United States Patent Application Publication US 2011/0214205 A1 - sequence listing, part 18

SEQ ID NO: 75511 - protein, 435 aa, Setaria italica
  Transcript Sequence Number=SeqID_9537
  Gene Ontology: Cellular component=integral to membrane
  Homolog annotation: Hit_ID=B9IGX9; Match level="QueryCoverage=99%, HitCoverage=100%, E-value=1e-147, Identity=62%"; Hit description =Auxin efflux carrier component, auxin transport protein
  Pfam annotation: Domain name=Mem_trans; Domain location=29-427; Score= 343.0; E_value=5.9e-100; Accession=PF03547.10; Description=Membrane transport protein
  Subcellular localization annotation: CTP_CleavageSite=40; ConfidenceScore=5.09e-01
MMERSLLQALATAAQGGTSGTSVLSMLKYAVLPIAKVFTVCFMGFLMACKYVNILQPNGRKLLNGLVFSLLLPCLIFSQLGRAITIEKMLQWWYIPVNIVVGAVSGSLIGFVVASIIRPPYPYFKFTIIHIGIGNIGNIPLVLIAALCRDPSNPFGDSDKCNQDGNAYISFGQWVGAIIVYTYVFRMLAPPPGRTFDGSDDDELPVKASGENAVPELSKYPIPTSTHTSTVPEDEPLLAAEKVQKECATSVGSKIMGHVKCVIKFLKDKQLLQPPIIASAFAIVIGIVPFLKNFVLTDEAPLFFFTDSCLILGEAMIPCILLAVGGNLVDGPGEGSKRLGVRTTVAIIFARLVLVPLAGVGIFMVVDKLGFIPKDDKMFKFVVLLQHSMPTSVLSGAVANLRGCGKESAAILFWVHIFAVFSMAGWIIVYLSLLF

SEQ ID NO: 75512 - protein, 62 aa, Setaria italica
  Transcript Sequence Number=SeqID_9538
FIGQKILTADRTDTFSFSELHLISWISIATSALPRSPGKCHTPLPQGRFLVSRLIPCNLTLV

SEQ ID NO: 75513 - protein, 91 aa, Setaria italica
  misc_feature (1)..(14): Xaa can be any naturally occurring amino acid
  Transcript Sequence Number=SeqID_9539
XXXXXXXXXXXXXXFFFFLLSTTHELGSRMHANYLDYPYCTAGRRLANIINHSSAMNMVIADFFFSHHLNSNQEPGRRQSTRKKKRDTHES

SEQ ID NO: 75514 - protein, 92 aa, Setaria italica
  Transcript Sequence Number=SeqID_9540
  Gene Ontology: Mol. function=zinc ion binding; Cellular component =intracellular
PLVPRLRGDPITLEGGGERSSRTDRDAGSGGNAAGAAAGGGNDGLTRDFLGLRAFSHGDILSMAGFDPCMSPASPAAYEQQGHQMSSKQWHV

SEQ ID NO: 75515 - protein, 63 aa, Setaria italica
  Transcript Sequence Number=SeqID_9541
  Gene Ontology: Mol. function=binding; Cellular component =mitochondrial inner membrane; Biological process=transport
  Homolog annotation: Hit_ID=Q10R11; Match level="QueryCoverage=100%, HitCoverage=13%, E-value=2e-15, Identity=73%"; Hit description =Mitochondrial carrier, putative, expressed
MSFSAVDMEEESGAAAAAAAAEEIRRLPAEVNWEMLDKSRFFVLGAALFSGVSAALYPAVVVK

SEQ ID NO: 75516 - protein, 50 aa, Setaria italica
  misc_feature (13)..(13): Xaa can be any naturally occurring amino acid
  misc_feature (26)..(26): Xaa can be any naturally occurring amino acid
  Transcript Sequence Number=SeqID_9542
  Gene Ontology: Mol. function=oxidoreductase activity; Biological process=oxidation reduction
  Homolog annotation: Hit_ID=Q2R3G3; Match level="QueryCoverage=86%, HitCoverage=14%, E-value=2e-12, Identity=79%"; Hit description=NAD dependent epimerase/dehydratase family protein, expressed
RRCEAVDIARAAXYLASDDAKYVSGXNLVVDGGFTSYKNMNLPFPTKPQE

SEQ ID NO: 75517 - protein, 139 aa, Setaria italica
  Transcript Sequence Number=SeqID_9543
  Gene Ontology: Mol. function=protein binding; Cellular component =TORC2 complex; Biological process=microtubule cytoskeleton organization and biogenesis
  Homolog annotation: Hit_ID=Q5D6Y8; Match level="QueryCoverage=74%, HitCoverage=48%, E-value=5e-51, Identity=89%"; Hit description=WD-40 repeat family protein
  Pfam annotation: Domain name=WD40; Domain location=33-75; Score=37.0; E_value=7.3e-08; Accession=PF00400.24; Description=WD domain, G-beta repeat
  Pfam annotation: Domain name=WD40; Domain location=79-117; Score =39.9; E_value=9.9e-09; Accession=PF00400.24; Description=WD domain, G-beta repeat
  Pfam module annotation: Pfam domain module=WD40::WD40; Domain location=33-75::79-117
FYCWDGSMVVAANNRGTCYVWRLLKGTQTITCFEPLHKLQAHDGYILKCLLSPEFCDPNRYLATASSDHTVKIWNVDGFKLEKTLVGHQRWVWDCVFSVDGAYLITASSDTTARLWTMSTGEAIRVYQGQYNKGRTVVD

SEQ ID NO: 75518 - protein, 170 aa, Setaria italica
  Transcript Sequence Number=SeqID_9544
  Gene Ontology: Mol. function=protein binding; Cellular component =TORC2 complex; Biological process=positive regulation of actin filament polymerization
  Homolog annotation: Hit_ID=A8JDD2; Match level="QueryCoverage=100%, HitCoverage=53%, E-value=2e-71, Identity=72%"; Hit description=TOR kinase binding protein
  Pfam annotation: Domain name=WD40; Domain location=110-147; Score =25.3; E_value=0.00025; Accession=PF00400.24; Description=WD domain, G-beta repeat
  Pfam annotation: Domain name=WD40; Domain location=25-62; Score=13.6; E_value=0.83; Accession=PF00400.24; Description=WD domain, G-beta repeat
  Pfam annotation: Domain name=WD40; Domain location=68-106; Score =45.3; E_value=2.4e-10; Accession=PF00400.24; Description=WD domain, G-beta repeat
  Pfam module annotation: Pfam domain module=WD40::WD40::WD40; Domain location=110-147::25-62::68-106
MAQPSVILATASYDHTIRFWEAKSGRCYRTIQYPDSQVNRLEITPDKRFLAAAGNPHIRLFDVNSNSPQPVISYDSHTSNVMAVGFHCDGNWMYSGSEDGTVRIWDLRTATCQREYESRAAVNTVVLHPNQKELISGDQNGNIRVWDLAANSCSCELVPEVDTAVRSLTV

SEQ ID NO: 75519 - protein, 100 aa, Setaria italica
  Transcript Sequence Number=SeqID_9545
  Gene Ontology: Mol. function=protein binding; Cellular component =TORC2 complex; Biological process=microtubule cytoskeleton organization and biogenesis
  Homolog annotation: Hit_ID=A8JDD2; Match level="QueryCoverage=84%, HitCoverage=26%, E-value=9e-31, Identity=72%"; Hit description=TOR kinase binding protein
  Pfam annotation: Domain name=WD40; Domain location=1-27; Score=0.5; E_ value=34; Accession=PF00400.24; Description=WD domain, G-beta repeat
  Pfam annotation: Domain name=WD40; Domain location=31-69; Score=39.4; E_value=1.4e-08; Accession=PF00400.24; Description=WD domain, G-beta repeat
  Pfam module annotation: Pfam domain module=WD40::WD40; Domain location=1-27::31-69
PRLSPEFCDPNRYLATASSDNTVKIWNVDGFKLEKTLVGHQRWVWDCVFSVDGAYLITASSDATARLWTMSTGEAIRVYQGHHKATVCCALHDGAESAPP

SEQ ID NO: 75520 - protein, 276 aa, Setaria italica
  Transcript Sequence Number=SeqID_9546
  Gene Ontology: Mol. function=protein binding; Cellular component =TORC2 complex; Biological process=positive regulation of actin filament polymerization
  Homolog annotation: Hit_ID=A8JDD2; Match level="QueryCoverage=98%, HitCoverage=95%, E-value=1e-108, Identity=61%"; Hit description=TOR kinase binding protein
  Pfam annotation: Domain name=WD40; Domain location=113-150; Score =0.5; E_value=34; Accession=PF00400.24; Description=WD domain, G-beta repeat
  Pfam annotation: Domain name=WD40; Domain location=161-203; Score =37.0; E_value=7.3e-08; Accession=PF00400.24; Description=WD domain, G-beta repeat
  Pfam annotation: Domain name=WD40; Domain location=207-245; Score =39.9; E_value=9.9e-09; Accession=PF00400.24; Description=WD domain, G-beta repeat
  Pfam annotation: Domain name=WD40; Domain location=28-66; Score=42.7; E_value=1.5e-09; Accession=PF00400.24; Description=WD domain, G-beta repeat
  Pfam annotation: Domain name=WD40; Domain location=70-107; Score =25.3; E_value=0.00025; Accession=PF00400.24; Description=WD domain, G-beta repeat
  Pfam module annotation: Pfam domain module=WD40::WD40::WD40::WD40::WD4 0; Domain location=113-150::161-203::207-245::28-66::70-107
ILATASYDHTIRFWEAKSGRCYRTIQYPDSVISYDSHTSNVMAVGFHCDGNWMYSGSEDGTVRIWDLRTATCQREYESRAAVNTVVLHPNQKELISGDQNGNIRVWDLAANSCSCELVPEVDTAVRSLTVMWDGSMVVAANNRGTCYVWRLLKGTQTITCFEPLHKLQAHDGYILKCLLSPEFCDPNRYLATASSDHTVKIWNVDGFKLEKTLVGHQRWVWDCVFSVDGAYLITASSDTTARLWTMSTGEAIRVYQGHHKATVCCALHDGAESAPS

SEQ ID NO: 75521 - protein, 304 aa, Setaria italica
  misc_feature (156)..(156): Xaa can be any naturally occurring amino acid
  Transcript Sequence Number=SeqID_9547
  Gene Ontology: Mol. function=nucleic acid binding; Cellular component= nucleus; Biological process=response to DNA damage stimulus
  Homolog annotation: Hit_ID=B9SFQ7; Match level="QueryCoverage=97%, HitCoverage=33%, E-value=1e-115, Identity=67%"; Hit description=DNA repair helicase rad5,16, putative
  Pfam annotation: Domain name=SNF2_N; Domain location=1-217; Score= -43.8; E_value=3.2e-06; Accession=PF00176.15; Description=SNF2 family N-terminal domain
  Pfam annotation: Domain name=zf-C3HC4; Domain location=241-280; Score= 34.7; E_value=3.7e-07; Accession=PF00097.17; Description=Zinc finger, C3HC4 type (RING finger)
  Pfam module annotation: Pfam domain module=SNF2_N::zf-C3HC4; Domain location=1-217::241-280
PASQGVESLWHSVRWERIILDEAHFIKDRRCNTARAIFALESEYKWALSGTPLQNRVGELYSLIRFLQIFPYSNYFCKDCNCEILDTSMKKLCDCGHSSVRHFCWWNKYIARPIQFGSVSDEGKRAMILLKEKVLKGIVLRRTKKGRAADLALPPXIVTLRRDSFDKNEMEFYEALYTQSVTQFDSYVAAGTLMNNYAHIFDLLTRLRQAVDHPYLVAYSKTAEPREGLKNEGNESMESQCGICHNMAEDVVVTSCDHAFCKTCLIDYSATLGNVSCPSCSVPLTVDLTTKSSVEKVTPRVKAC

SEQ ID NO: 75522 - protein, 124 aa, Setaria italica
  Transcript Sequence Number=SeqID_9548
VIQLKSRRVRGISGSVLAFFNSVLHFGQKRIIFGGGFYLVEIGGALRVRRKFSFVSIEFNKTVEGKKRSKNFDFVLSSAYLPSALPLTTLSLAVLIDVAALFLLGSAASGGKLGRRRWQRWGTR

SEQ ID NO: 75523 - protein, 75 aa, Setaria italica
  Transcript Sequence Number=SeqID_9549
  Homolog annotation: Hit_ID=B6TAK7; Match level="QueryCoverage=81%, HitCoverage=17%, E-value=3e-27, Identity=91%"; Hit description =Pollen-specific protein SF21
MGDSSGSASVSVDVERISFGGKEHLVRTRCGSVTVAVYGDEDKPALITYPDVGLNYMSCFQGLFFCPEAATLLLH

SEQ ID NO: 75524 - protein, 124 aa, Setaria italica
  Transcript Sequence Number=SeqID_9550
LHLDPDISHRGPPLEPTLSPPAPTAKHKATSTEAQRSERTRRPTNVTGHFAPYPPRLPPKLRNVTYPCIYRAQSKQSERPSTSRPRAGGGRRLTGLAAERANLAEARDEEAAEVEPHEPVQPAH

SEQ ID NO: 75525 - protein, 62 aa, Setaria italica
  Transcript Sequence Number=SeqID_9551
  Subcellular localization annotation: CTP_CleavageSite=41; ConfidenceScore=5.50e-01
PCTGDHLQPPTPLRKLSQSASLVPHQNTTRTGSLRNLTLLSNSAYRSLCIFIDSKFVFICTE

SEQ ID NO: 75526 - protein, 350 aa, Setaria italica
  Transcript Sequence Number=SeqID_9552
  Gene Ontology: Mol. function=saccharopine dehydrogenase (NAD+, L -glutamate-forming) activity; Cellular component=mitochondrial membrane; Biological process=oxidation reduction
  Homolog annotation: Hit_ID=B6T3D2; Match level="QueryCoverage=95%, HitCoverage=74%, E-value=1e-162, Identity=83%"; Hit description =Saccharopine dehydrogenase
  Pfam annotation: Domain name=Saccharop_dh; Domain location=1-342; Score=-107.1; E_value=0.021; Accession=PF03435.10; Description =Saccharopine dehydrogenase
HGYAVAAACVAAGADCLDISGEPEFMERVEAELHEPAARNGSLIVSACGFDSVPAELGFLFHSRQWEPPSAPATVEAYVSLQSTKRIVGNIGTYESAVLGVANASQLQALRRSRPRRPRPNIPGPPPPKGSLIEGHNPLGMWAMKLPSADTVVVKRTLSTITEHTEGLPGAEETPEYTELRKNFWSSVKPAHFGVKIASRSLMILVRFLITGLFIGLLANFSFGRSLLLKYPEFFSAGLFSRAGPSEEEVKSASFKMWFVGHGYSDAARALERGNKPDKEVITKVSGPEVGYITTPIILVQCALVLLSQRGNLPKGGVHTPGAVFGPTDLQRRLQENGLSFDVHVTRAMR

SEQ ID NO: 75527 - protein, 314 aa, Setaria italica
  misc_feature (200)..(200): Xaa can be any naturally occurring amino acid
  Transcript Sequence Number=SeqID_9553
  Gene Ontology: Mol. function=peptidase activity; Cellular component =nucleus; Biological process=proteolysis
  Homolog annotation: Hit_ID=B9SSN4; Match level="QueryCoverage=94%, HitCoverage=14%, E-value=2e-79, Identity=51%"; Hit description =Separase, putative
  Pfam annotation: Domain name=Peptidase_C50; Domain location=3-268; Score=195.7; E_value=1.3e-55; Accession=PF03568.9; Description =Peptidase family C50
MSVGLALKSTSDNAVLGGAVSVDEVQECVYQLVLYKGYFGRGGCCGKDRLRGFSCQIEDEALEALTYTIKNAANELPKPVDRDPIILVLDINVQMLPWENLPVLRNQEIYRMPSMTSIFLALSRSNNLRKDGSVMAPPFPVIDPFNTFYLLNPSGDLSSTQEEFDQLFRNYDWKGKALDPPPEAGELAVALTNHDLFLYXGHGSGTQYVSGKEIEKLNNCAAALLMGCSSGTLHCKGSYAPRGAPLSYLSAGSPAIIANLWDVSDKDIDRFSKALLDSWLQENFADGNICSNCCQLTQEFEAMKIASKENGRTN

SEQ ID NO: 75528 - protein, 168 aa, Setaria italica
  misc_feature (149)..(149): Xaa can be any naturally occurring amino acid
  Transcript Sequence Number=SeqID_9554
  Gene Ontology: Cellular component=chloroplast
  Homolog annotation: Hit_ID=B9RFQ7; Match level="QueryCoverage=95%, HitCoverage=21%, E-value=9e-24, Identity=36%"; Hit description =Pentatricopeptide repeat-containing protein, putative
  Pfam annotation: Domain name=PPR; Domain location=119-152; Score =28.3; E_value=3.1e-05; Accession=PF01535.12; Description=PPR repeat
  Pfam annotation: Domain name=PPR; Domain location=14-48; Score=17.3; E_value=0.065; Accession=PF01535.12; Description=PPR repeat
  Pfam annotation: Domain name=PPR; Domain location=49-83; Score=14.9; E_value=0.16; Accession=PF01535.12; Description=PPR repeat
  Pfam module annotation: Pfam domain module=PPR::PPR::PPR; Domain location=119-152::14-48::49-83
RSLAVCTGTFCSFFTYDVIIQALLHLKKEKDVLVLFAQMVMEGYLLDGYAYTSLLRSFLTKETIFEAAILFNRMVNQALVPDQETFELLVNDMAFFSFLNMVAQSLLKVVNTSGTVSPRIYNIIIYGLIKEGFKNEACKFLDQMLEKGXPDSRTHQVLVGNIGGEKAR

SEQ ID NO: 75529 - protein, 100 aa, Setaria italica
  Transcript Sequence Number=SeqID_9555
  Gene Ontology: Mol. function=inositol or phosphatidylinositol phosphatase activity; Biological process=abscisic acid mediated signaling
  Homolog annotation: Hit_ID=Q2QWT4; Match level="QueryCoverage=88%, HitCoverage=24%, E-value=3e-28, Identity=70%"; Hit description =3'(2'),5'-bisphosphate nucleotidase
LAAAKKAVALASRLCRRVQQGILQSDIQSKADRTPVTVADYGSQVLVSLVLKKELPSHSFSMVAEEDSEDLRKDDAQEILEHITSLVNETIANDDSYNMS

SEQ ID NO: 75530 - protein, 495 aa, Setaria italica
  misc_feature (445)..(445): Xaa can be any naturally occurring amino acid
  Transcript Sequence Number=SeqID_9556
  Gene Ontology: Mol. function=protein serine/threonine kinase activity; Cellular component=integral to membrane; Biological process=protein amino acid phosphorylation
  Homolog annotation: Hit_ID=B9RY42; Match level="QueryCoverage=93%, HitCoverage=46%, E-value=1e-171, Identity=63%"; Hit description =Phytosulfokine receptor, putative
  Pfam annotation: Domain name=LRR_1; Domain location=18-40; Score =16.8; E_value=0.09; Accession=PF00560.25; Description=Leucine Rich Repeat
  Pfam annotation: Domain name=LRR_1; Domain location=42-64; Score =18.5; E_value=0.028; Accession=PF00560.25; Description=Leucine Rich Repeat
  Pfam annotation: Domain name=LRR_1; Domain location=66-87; Score=5.5; E_value=28; Accession=PF00560.25; Description=Leucine Rich Repeat
  Pfam annotation: Domain name=Pkinase; Domain location=201-473; Score =128.6; E_value=2e-35; Accession=PF00069.17; Description=Protein kinase domain
  Pfam annotation: Domain name=Pkinase_Tyr; Domain location=201-473; Score=62.4; E_value=7.1e-18; Accession=PF07714.9; Description =Protein tyrosine kinase
  Pfam module annotation: Pfam domain module=LRR_1::LRR_1::LRR _1::Pkinase::Pkinase_Tyr; Domain location=18-40::42-64::66-87::201 -473::201-473
TLSLLGPNTRSSFGHLVKLQHMDLSWNKFSGPIPDELSNMSSLEVLNLAHNNLNGTIPSSLTKLNFLSKFDVSYNNLTGDVPTGGQFSTFTNEDFEGNSALCLLRNSSCSEKASLVEAARGKKSKGALVGLGLGTAVGVAAFLFCAYVIVARIVHSRMQECNPKAVANAEDSESSNSCLVLLFQNNKEFSIEDILKSTNNFDQAYIVGCGGFGLVYKSTLPDGRRVAIKRLSGDYSQIEREFQAEVETLSRAQHENLVLLQGYCKVGNDRLLIYSYMENGSLDYWLHERADSGMLLDWRKRLRIAQGAARGLAYLHMSCDPHILHRDIKSSNILLDENFEAHLADFGLARLICAYETHVTTDVVGTLGYIPPEYGQSPVATYKGDIYSFGIVLLELLTGRRPVDMCRPKGTRDVVSWVLQMKEEGRETEVFHPSIHHKENESQLXMRVLEIACLCVTAAPKSRPTSQQLVAWLDNIAEDGGLMQPEVSSGFDLLA

SEQ ID NO: 75531 - protein, 148 aa, Setaria italica
  Transcript Sequence Number=SeqID_9557
  Gene Ontology: Mol. function=binding
  Pfam annotation: Domain name=DUF1068; Domain location=8-146; Score =68.3; E_value=2.8e-17; Accession=PF06364.4; Description=Protein of unknown function (DUF1068)
GNICFTLFSKFSFQCTILALILLLSRYYVHWLKKKIILGLNYADCGKNDPELAKEMEKQFVDLLNEELKLQQVVAEEHSHHMNATLVEAKRQATQYQREAEKCNAATETCEEAREQSEAAISKEKKLTALWEQRARQLGWQESRATSM

SEQ ID NO: 75532 - protein, 48 aa, Setaria italica
  Transcript Sequence Number=SeqID_9558
WKQDFKECPFHVAVQKMQSNASILSCQSLGINALENTTLIEHLIGRCN

SEQ ID NO: 75533 - protein, 302 aa, Setaria italica
  misc_feature (287)..(287): Xaa can be any naturally occurring amino acid
  Transcript Sequence Number=SeqID_9559
  Gene Ontology: Cellular component=Golgi apparatus
  Homolog annotation: Hit_ID=Q84VB2; Match level="QueryCoverage=71%, HitCoverage=100%, E-value=1e-67, Identity=61%"; Hit description =Putative myosin heavy chain (Fragment)
KFMTDTVMMGILADVQQEAARQIASKDADIASLNQKVQQLENSSLILHEGRDKRYDEFYYLREQLDTISKSLLSSEWGFLGSQLNSEGSEDASKQRNKEKFRNGVAKKICSEEEVFADPKLLKHMDNDALIAYFNKSMNEMKRQHDTVVHGQTEEIFKLKRDLLKKEGPNPWHLRNNKELEHMRKKIGEVLSKLDVLLLENKRTFVRSKIDAFPGQHDKNNVVDSDVMQLQGGATNNEEPWSIPTQAPHVETNHKKHIIRLESDIEDASTAATIREEVEKIVMKEFXSEMKIRLHGMRWSLI

SEQ ID NO: 75534 - protein, 99 aa, Setaria italica
  Transcript Sequence Number=SeqID_9560
  Gene Ontology: Mol. function=transposase activity; Biological process= transposition, DNA-mediated
  Homolog annotation: Hit_ID=Q5JPZ3; Match level="QueryCoverage=82%, HitCoverage=12%, E-value=2e-15, Identity=48%"; Hit description =OSJNBa0004L19.21 protein
MLGLDYMASSSMNKKKITTTIPRMTGIQWVELQLQDSMECFNMFRMRRSVLISLHDTLVQDYGLRSSRQFCSKEALGMFLWACGAPQSSRQCKNNFCAH

SEQ ID NO: 75535 - protein, 55 aa, Setaria italica
  Transcript Sequence Number=SeqID_9561
MENSGEELSSTANRSFSGDGSAAASEEESGWTSYIDYFMKTQRRQKGEASLSADA

SEQ ID NO: 75536 - protein, 93 aa, Setaria italica
  Transcript Sequence Number=SeqID_9562
RAVPPLRCAAPRRGRRLEADLLQRRAAVPAVGSCSRAALTGSREATRARRRQRPEESTNPKANRSEIWVGAKLSLIWVVLFHRRIRRNVVCMA

SEQ ID NO: 75537 - protein, 70 aa, Setaria italica
  Transcript Sequence Number=SeqID_9563
  Gene Ontology: Cellular component=integral to membrane
  Homolog annotation: Hit_ID=Q10MX8; Match level="QueryCoverage=70%, HitCoverage=8%, E-value=1e-15, Identity=83%"; Hit description =Transmembrane protein G5p, putative, expressed
MARADADADEAPLLAEEPLRPGACSRELELREFRDRYVIRSLDSGGAAFAVTRSGGSIRPLSPEEAAVGS

SEQ ID NO: 75538 - protein, 87 aa, Setaria italica
  Transcript Sequence Number=SeqID_9564
  Gene Ontology: Mol. function=transferase activity, transferring glycosyl groups; Cellular component=integral to membrane; Biological process=cell wall organization and biogenesis
  Homolog annotation: Hit_ID=Q7XIF5; Match level="QueryCoverage=97%, HitCoverage=16%, E-value=1e-24, Identity=69%"; Hit description =Probable mannan synthase 7
  Subcellular localization annotation: CTP_CleavageSite=26; ConfidenceScore=5.02e-01
VSWLIGVLDGTSSAAADVYGAWVAVRAGVIAPVLQVAVWACMVMSVMLVVEAVYNSVVSLAVKAIGWRPEWRFKWEPLDGDDEKGSA

SEQ ID NO: 75539 - protein, 258 aa, Setaria italica
  Transcript Sequence Number=SeqID_9565
  Gene Ontology: Mol. function=kinase activity
  Homolog annotation: Hit_ID=B6SKP7; Match level="QueryCoverage=55%, HitCoverage=48%, E-value=4e-78, Identity=94%"; Hit description =Calcium-binding protein
  Pfam annotation: Domain name=C2; Domain location=8-89; Score=78.0; E _value=3.3e-20; Accession=PF00168.22; Description=C2 domain
MSIHGLVLEVRVTGCRKLRDTEFFTRQDPYVVLEYATTKHRTRTCTDGGRNPTFDEKFHIPLIEGLRELNVVVWNSNTLTHDDFIGSGRVYLHKVLTNGYDDSSWSLQTRHMRSAGEVKLIMHVDVSAMKNKMGRNIAASSTHSVPPPSMPAPALASAVPYTGVPPSYPPASAYPAPSAYPAYPTPSQSPYTTTEYPPPPQQAYPPSPAGYPPPSYPPQPYGEPYLPQPYGQPYPPPPAAQSPYPPAPYPGTYPPRPY

SEQ ID NO: 75540 - protein, 62 aa, Setaria italica
  Transcript Sequence Number=SeqID_9566
STPLSSKGQKGKRVKLGEPCRKIRIENRKSSIYEQNFGQGCPVQVRYRILYFFPSYPKVRCR

SEQ ID NO: 75541 - protein, 491 aa, Setaria italica
  misc_feature (203)..(203): Xaa can be any naturally occurring amino acid
  Transcript Sequence Number=SeqID_9567
  Gene Ontology: Mol. function=serine-type carboxypeptidase activity; Cellular component=extracellular region; Biological process =proteolysis
  Homolog annotation: Hit_ID=P08818; Match level="QueryCoverage=91%, HitCoverage=93%, E-value=0.0, Identity=72%"; Hit description=Serine carboxypeptidase 2 chain B
  Pfam annotation: Domain name=Peptidase_S10; Domain location=60-481; Score=713.8; E_value=1.4e-211; Accession=PF00450.14; Description =Serine carboxypeptidase
MIKLPQEEVGDFDPRTGTMAGRFHVAPVLVAVLLAWACQLRPTAAATAIGHEAGRIGRLPGQPVVDFPMYSGYVTVDGRAGRALFYWLQEVPAASQPAPLVLWLNGGPGCSSVAYGASEELGAFRIRPGGATLFLNKYRWNSAANILFLDSPAGVGFSYTNTTSDLYNSGDRRTAHDSYTFLVRWFERFPQYKYRDFYIAGEXSYAGHYVPELSQLVYRKNKGVSKPQINIKGFMVGNAVTDDYHDQVGTFESWWNHGLISDATYRRLKATCVSTVHHDIEHTSPPCDAAYDAATVEQGDIDPYSIYTPTCNQTSSSTTARKNWRLKGHYPWMRGSYDPCTEMHSTVYYNRPEVQRALHANVTGINYTWTTCSGIINTNWGDSPRSMLPIYKELIAAGLRIWVYSGDTDSVVPLTATRYSIDALGLPTVVSWYPWYDKKEVGGWSQVYKGLTLVTIRGAGHEVPLHRPKQALILFRHFLHGKPMPKNGTVV

SEQ ID NO: 75542 - protein, 186 aa, Setaria italica
  misc_feature (170)..(170): Xaa can be any naturally occurring amino acid
  Transcript Sequence Number=SeqID_9568
  Gene Ontology: Mol. function=hydrolase activity, acting on ester bonds; Biological process=lipid metabolic process
  Homolog annotation: Hit_ID=B6T560; Match level="QueryCoverage=100%, HitCoverage=50%, E-value=3e-49, Identity=45%"; Hit description=GSDL -motif lipase
  Pfam annotation: Domain name=Lipase_GDSL; Domain location=4-186; Score=4.8; E_value=0.0031; Accession=PF00657.14; Description=GDSL -like LipaseAcylhydrolase
LKDQMSTRLSAGRVSALLSKSIFLISAGANDAFDFFLQNRSPDSTAIQQFSEAMISTYDSHVKTLYNLGARKFVVINVPLIGCCPYLRSQNPTGECVEPLNQLAKSLNDGIRDLFSNLSSEMHGMKYSIASAYELVSSLIKKPHAAGLEEVKSACCGDGRFNAERGCTPXSSCCSDRSKYLFWDLL

SEQ ID NO: 75543 - protein, 71 aa, Setaria italica
  Transcript Sequence Number=SeqID_9569
  Subcellular localization annotation: CTP_CleavageSite=62; ConfidenceScore=5.10e-01
KPEFYKFLKETTEGKNKVEATRRGRMSFVRPARTSMIPFPVVRGRIPLSRPTRRELGRPSTSSKLGSCYFT

SEQ ID NO: 75544 - protein, 450 aa, Setaria italica
  Transcript Sequence Number=SeqID_9570
  Gene Ontology: Mol. function=protein serine/threonine kinase activity; Cellular component=plasma membrane; Biological process =protein amino acid phosphorylation
  Homolog annotation: Hit_ID=C4P7U8; Match level="QueryCoverage=97%, HitCoverage=96%, E-value=0.0, Identity=89%"; Hit description=CBL -interacting protein kinase 08
  Pfam annotation: Domain name=NAF; Domain location=310-371; Score =94.2; E_value=4.5e-25; Accession=PF03822.6; Description=NAF domain
  Pfam annotation: Domain name=Pkinase; Domain location=17-270; Score =316.5; E_value=5.4e-92; Accession=PF00069.17; Description=Protein kinase domain
  Pfam annotation: Domain name=Pkinase_Tyr; Domain location=17-268; Score=24.9; E_value=2.2e-15; Accession=PF07714.9; Description =Protein tyrosine kinase
  Pfam module annotation: Pfam domain module=NAF::Pkinase::Pkinase_Tyr; Domain location=310-371::17-270::17-268
MVGGGGGGGALRRVGKYEVGRTIGEGTFAKVKFAQNTETGESVAMKVLDRSSILKHKMAEQIKREISIMKLVRHPNVVRLHEVLASRKKIFIILEFITGGELFDKIIRHGRLNEADARRYFQQLIDGVDFCHSKGVYHRDLKPENLLLDSQGNLKISDFGLSAWPAQGSSLLRTTCGTPNYVAPEVLSHKGYNGALADTWSCGVILYVLLAGYLPFDEVDLTTLYGKIESAQYSFPPWFSGGAKSLIRRILDPNPDTRIRIEEIRNDEWFQKNYEPIKDIENEEVNLDDVNAAFDDPEEDTEDAFDEAAGPLTLNAFDLIILSQGLNLAALFDRRQDYDKLRNRFLSCKPAKVILSSMEVVAQSMGFKTHIRNYKMRVEGLNANKTSHLSIMVEVFEVAPSIFMVDLQRAAGDTSEYNTFVSNYCSKLDDIIWKFPMEKGKSRISRSSKC

SEQ ID NO: 75545 - protein, 719 aa, Setaria italica
  misc_feature (714)..(714): Xaa can be any naturally occurring amino acid
  Transcript Sequence Number=SeqID_9571
  Homolog annotation: Hit_ID=B9RDS4; Match level="QueryCoverage=98%, HitCoverage=32%, E-value=1e-155, Identity=42%"; Hit description=CRP, putative
VKLLLPIVLGLVDTITLSQTYVRMFVELLVRRLSDTSVVDSPKRPSVSSVIAELLRYMVLAVPDTFVSLDCFPLPSFVVPDVYGRGALLKITGGGGIASSKRCDAYRYLSCGYAVCSIQKRASDLATVANPNLQVRGAAKVVQALDKALVTGNLSVAYSSLFNDLSDALMEERWIKEVSPCLQSSLMWIGTVELSLICSIFFLCEWATCDYRDCRASPCQNVKFTGRRDLSQVHVAVSILKNKMDEMNNLSRSKSSNRITMNNIVKGSSLNDACLPVAAGDDSSGLRNNTNNLDEKKDTSGIFESPGPLHDIIVCWLDQHEVSSAAGFTRVDVLIVELIRNGIFYPQAYVRQLIISGITDKNDIMLDVERKRRHHRTLKQLPGSSLFDILEETRTAEEQQLYEIMSTYSSERRLVLSELSCGPSFYASSRGEYASSSCIRKQNDLPVASGGDKHGRVPEQVEDVKALVSSLLSFTYPHPVETEPCQIKTSFQESATSTLSQVETGEAKSGCEDCMRSKGQKLDDGATPFQGFPLIQSDEEDIWWVRKGTKLHESFNVEPAQKSVKQTSRGRAKVVRKTQSLAQLAAARIEGSQGASTSHVCESKLSCPHHKPNMDGDNVKDFDHMRMTNLTEVGKSLKRLRLLERRSVSLWLLKSIRQLVEGSEMTASKATNSISTLSLQPDDKSASKWRLGDEELLSVLYVLDTCCDLVSGAXFLVWL

SEQ ID NO: 75546 - protein, 201 aa, Setaria italica
  Transcript Sequence Number=SeqID_9572
  Gene Ontology: Mol. function=oxidoreductase activity; Cellular component=extracellular region; Biological process=oxidation reduction
  Homolog annotation: Hit_ID=Q2PAJ0; Match level="QueryCoverage=100%, HitCoverage=34%, E-value=1e-98, Identity=86%"; Hit description =Putative laccase
  Pfam annotation: Domain name=Cu-oxidase_2; Domain location=132-201; Score=-2.0; E_value=0.0015; Accession=PF07731.6; Description =Multicopper oxidase
PGTFDNTTVAGILEYEYPDAPSSAPSFNKALPLYKPTLPGFNDTDFVGNFTAKLRSLATAQYPAAVPKTVDKKFFFTVGLGTHPCPANTTCQGPTNTTQFAASVNNVSFALPTRALLHSHFTGLSSGVYSSDFPVAPLTPFNYTGTPPNNTNVANGTKLMVIPYGTNVELVMQGTSILGIESHPLHLHGFNFFVVGQGYGN

SEQ ID NO: 75547 - protein, 93 aa, Setaria italica
  misc_feature (35)..(35): Xaa can be any naturally occurring amino acid
  misc_feature (38)..(38): Xaa can be any naturally occurring amino acid
  Transcript Sequence Number=SeqID_9573
  Subcellular localization annotation: CTP_CleavageSite=5; ConfidenceScore=5.37e-01
AAEAAAAALTTRSETNHRSPLVGSNLRSPFCLLFXVFXVYHRNTPFILCPTFSPAKFQPCTCMAPLRGRRRAGSELEDEAATFRSKTDGLDQI

SEQ ID NO: 75548 - protein, 60 aa, Setaria italica
  Transcript Sequence Number=SeqID_9574
FWVSIYLYLCNQVLIKFDQLKVLNAVNQSPFPCLSLAFIFFPDLLTTTCAHPCYNQCCSE

SEQ ID NO: 75549 - protein, 141 aa, Setaria italica
  misc_feature (116)..(116): Xaa can be any naturally occurring amino acid
  Transcript Sequence Number=SeqID_9575
  Gene Ontology: Mol. function=nucleic acid binding; Cellular component= intracellular
  Homolog annotation: Hit_ID=B9RZ08; Match level="QueryCoverage=99%, HitCoverage=17%, E-value=2e-69, Identity=81%"; Hit description =Transcription factor, putative
  Pfam annotation: Domain name=JmjC; Domain location=18-141; Score =177.2; E_value=4.7e-50; Accession=PF02373.14; Description=JmjC domain
NSVLRLLQMPIPGVTDPMLYIGMLFSMFAWHVEDHYLYSINYHHCGAFKTWYGIPGDAAPGFERVASQYVYNKDILIGDGEDAAFDVLLGKTTMFPPNVLLDHNVPVYRAVQRPGXFVITFPRSYHAGFSHGFNCGEAVNF

SEQ ID NO: 75550 - protein, 106 aa, Setaria italica
  misc_feature (93)..(93): Xaa can be any naturally occurring amino acid
  Transcript Sequence Number=SeqID_9576
  Gene Ontology: Mol. function=voltage-gated anion channel activity; Cellular component=mitochondrial outer membrane; Biological process =anion transport
  Homolog annotation: Hit_ID=B6SLD1; Match level="QueryCoverage=100%, HitCoverage=38%, E-value=3e-52, Identity=94%"; Hit description=Outer plastidial membrane protein porin
  Pfam annotation: Domain name=Porin_3; Domain location=1-99; Score= -83.0; E_value=0.048; Accession=PF01459.14; Description=Eukaryotic porin
SLHLNNHGDTMVASYYHLVKHHSGTAVGAELSHSFSRNESTLIFGSQHSLDPHTTVKARFNNYGMASALVQHEWRPKSFITISGEVDTKAIEXKSTKVGLSVVLKH

SEQ ID NO: 75551 - protein, 280 aa, Setaria italica
  misc_feature (218)..(218): Xaa can be any naturally occurring amino acid
  Transcript Sequence Number=SeqID_9577
  Gene Ontology: Mol. function=voltage-gated anion channel activity; Cellular component=mitochondrial outer membrane; Biological process =anion transport
  Homolog annotation: Hit_ID=B6SLD1; Match level="QueryCoverage=100%, HitCoverage=100%, E-value=1e-147, Identity=91%"; Hit description =Outer plastidial membrane protein porin
  Pfam annotation: Domain name=Porin_3; Domain location=2-273; Score =385.8; E_value=7.5e-113; Accession=PF01459.14; Description =Eukaryotic porin
MAPGLYTDIGKKTRDLLYKDYNTHQKFSVTTCSPHGVAITAAGTRKNESLFGELHTQIKNKKLTVDVKANSESDLLTTITVDEFGTPGLKSILSLVVPDQRSGKLELQYLHEYAGVNASVGLNSNPMVNLSGVFGSKELSVGVDVSFDTATSNFTKYNAALSLTNPDLIASLHLNNHGDTMVASYYHLVKHHSGTAVGAELSHSFFCKISKNESTLIXFGSQHSLDPHTTVKARFNNYGMASALVQHEWRPKSFITISGEVDTKAIEKSTKVGLSVVLKH

SEQ ID NO: 75552 - protein, 91 aa, Setaria italica
  Transcript Sequence Number=SeqID_9578
  Gene Ontology: Mol. function=sucrose transmembrane transporter activity; Cellular component=integral to plasma membrane; Biological process=sucrose transport
  Homolog annotation: Hit_ID=B6T7Q1; Match level="QueryCoverage=100%, HitCoverage=17%, E-value=1e-33, Identity=77%"; Hit description =Sucrose transporter BoSUT1
MEGDGKEAANKRLDWATMNLESGGGVAGEKGDGNASRKPPMSIFRLFLACMVSGGIQYGWALQLSLLSPYSQTLGISHSYVSLTWICGPIA

SEQ ID NO: 75553 - protein, 164 aa, Setaria italica
  Transcript Sequence Number=SeqID_9579
  Homolog annotation: Hit_ID=B6TAN6; Match level="QueryCoverage=100%, HitCoverage=100%, E-value=3e-40, Identity=57%"; Hit description =Transcription regulator
  Pfam annotation: Domain name=BolA; Domain location=92-160; Score =87.2; E_value=5.9e-23; Accession=PF01722.10; Description=BolA-like protein
  Subcellular localization annotation: CTP_CleavageSite=65; ConfidenceScore=5.81e-01
MLPMRSAAAVPCSLAALLLRGLSSYSSSSVYSVRRHASSALSSQPSASYPSTCPPCPLSVPRRTREFTAWASAPGPAGPAESPATKALEAKIKEQLEADAVTVVDASGDGRHVCIDVVSKAFEGKSAVNRQRMVYKAIWEELQSTVHAVDQMTTKTPDEAAANK

SEQ ID NO: 75554 - protein, 85 aa, Setaria italica
  Transcript Sequence Number=SeqID_9580
HLLQAVAQLHGQHAQHAWRRRVPPDVSNGVGVGAESAVLLDVAEIWEHRLISRCGRWPGTGWRPTLVGRRRARVEGAGGRGGACR

SEQ ID NO: 75555 - protein, 102 aa, Setaria italica
  Transcript Sequence Number=SeqID_9581
PPRRPKRTGSKATAEMAGSSRQAAKPSAPAQKQSKKKGGKAAGAAVTEMDMATAHKLFYAKQGGGALAGDRRQQQQSYLPYRPGIVGFFTAAHALGRSHHPY

SEQ ID NO: 75556 - protein, 90 aa, Setaria italica
  Transcript Sequence Number=SeqID_9582
PPLRFISAGHVNDYDLDPSPQPPGKRKNWRSDVERNHRDAKVGGSATWSTRKKPAPRSGGAASAGSPRRGAGGRRSPRHGARTRLTRGRG

SEQ ID NO: 75557 - protein, 139 aa, Setaria italica
  misc_feature (40)..(40): Xaa can be any naturally occurring amino acid
  Transcript Sequence Number=SeqID_9583
  Gene Ontology: Mol. function=protein serine/threonine kinase activity; Biological process=protein amino acid phosphorylation
  Homolog annotation: Hit_ID=Q5VRL6; Match level="QueryCoverage=89%, HitCoverage=28%, E-value=2e-48, Identity=72%"; Hit description=Myb -binding protein
  Subcellular localization annotation: CTP_CleavageSite=78; ConfidenceScore=5.44e-01
CCLLLEDSLLPSSPFFQPCFYVPPSLRFKSTGYASTPPSXGAKGAVDQKNGRRYSMGTVPNGRPTVNYSYLSNNAPVRAAGVQRKLELDHQPQEANHKVTKANAMNQSWSRSAAVRSNGNYLAKDQSSRASDLAEKLSQ

SEQ ID NO: 75558 - protein, 103 aa, Setaria italica
  Transcript Sequence Number=SeqID_9584
  Gene Ontology: Mol. function=Rab GTPase activator activity; Cellular component=intracellular; Biological process=regulation of Rab GTPase activity
  Homolog annotation: Hit_ID=B6T9I2; Match level="QueryCoverage=98%, HitCoverage=25%, E-value=1e-36, Identity=72%"; Hit description=USP6 N-terminal-like protein
NWQDIIFDIWRRCLNILIEMDKKKAIDETEPGVAPSRAVDRFGFIKSEQSNSPDGIPKGKSIHEREREEKRIRKWRKMIGVGGSDWKHYVRRNPHVVKRRIRK

SEQ ID NO: 75559 - protein, 90 aa, Setaria italica
  Transcript Sequence Number=SeqID_9585
RPFFLYNRHTSYNKVWLVLQQEIMSVIFGQQLKLDMTRLPTLLIVFDMKADAACYLKIHCCPRVPSDIPSEAFQDDWRTPDDLKCKGNWQ

SEQ ID NO: 75560 - protein, 187 aa, Setaria italica
  misc_feature (12)..(12): Xaa can be any naturally occurring amino acid
  misc_feature (104)..(104): Xaa can be any naturally occurring amino acid
  misc_feature (120)..(120): Xaa can be any naturally occurring amino acid
  Transcript Sequence Number=SeqID_9586
  Gene Ontology: Mol. function=Rab GTPase activator activity; Cellular component=intracellular; Biological process=regulation of Rab GTPase activity
  Homolog annotation: Hit_ID=B6T9I2; Match level="QueryCoverage=98%, HitCoverage=49%, E-value=1e-87, Identity=82%"; Hit description=USP6 N-terminal-like protein
  Pfam annotation: Domain name=TBC; Domain location=3-186; Score=45.8; E_value=7.4e-11; Accession=PF00566.10; Description=TBC domain
FFPDCLRRFVWXLISGSRDRSLMNPGVYEALVIYETLASELEIIRDISRTFPSHIFFQQRHGPGQRSLYNILKAYSVYGRDVGYVQGMGFLAGLLLLYINEDAXHVPMEGLYRAGLPLLXQYLSQFEKLVMEHMPKLGQHFVEEMITPSMYARQWFITVFAYSFLFHLTLRVWDVFLYEGIKVVFQF

SEQ ID NO: 75561 - protein, 110 aa, Setaria italica
  Transcript Sequence Number=SeqID_9587
  Subcellular localization annotation: CTP_CleavageSite=49; ConfidenceScore=5.07e-01
SASKSYRQDIFGHLDLTLRAFSSHISSRFWFSLFLLAFFYPITVSFQFDQSKVWCVLVTFHQACLGWHNIRAELFKILLSQSMGIAYRDLRRVSSDFDVLTSKDTAVIHI

SEQ ID NO: 75562 - protein, 471 aa, Setaria italica
  Transcript Sequence Number=SeqID_9588
  Gene Ontology: Mol. function=protein serine/threonine kinase activity; Biological process=protein amino acid phosphorylation
  Homolog annotation: Hit_ID=Q5VRL6; Match level="QueryCoverage=100%, HitCoverage=100%, E-value=0.0, Identity=84%"; Hit description=Myb -binding protein
  Pfam annotation: Domain name=Pkinase; Domain location=4-283; Score =352.7; E_value=7.1e-103; Accession=PF00069.17; Description=Protein kinase domain
  Pfam annotation: Domain name=Pkinase_Tyr; Domain location=4-283; Score=57.4; E_value=1.5e-17; Accession=PF07714.9; Description =Protein tyrosine kinase
  Pfam module annotation: Pfam domain module=Pkinase::Pkinase_Tyr; Domain location=4-283::4-283
MERYTIIKEVGDGTFGSVWRAINKESGEVVAIKKMKKKYYSWEECINLREVKSLRRMNHPNIVKLKEVIRENDMLFFVFEYMECNLYQLMKNRGKAFSETEVRNWCFQIFQALSHMHQRGYFHRDLKPENLLVTKDLIKIADFGLAREISSEPPYTEYVSTRWYRAPEVLLQATVYNAAVDMWAMGAIIAELFSLRPLFPGSSEADELYKICGILGTPNQRTWPEGLQLAASIGFQFPQCESVHLSEVIPSASEDAINLISWLCSWDPRRRPTAVEVLQHPFFQPCFYVPPSLRFKSTGYASTPPSVGAKGAVDQKNGRRYSMGTVPNGRPTVNYSYLSNNAPVRAAGVQRKLELDHQPQEANHKVTKANAMNQSWSRSAAVRSNGNYLAKDQSSRASDLAEKLSQLSMGPNRVSGLGPERFTDLKPRTHGSAIKRPLPVGSRAWHGPADPFRRPYEMPGDRTLLPRKLVS

SEQ ID NO: 75563 - protein, 400 aa, Setaria italica
  Transcript Sequence Number=SeqID_9589
  Gene Ontology: Mol. function=Rab GTPase activator activity; Cellular component=intracellular; Biological process=regulation of Rab GTPase activity
  Homolog annotation: Hit_ID=B6T9I2; Match level="QueryCoverage=99%, HitCoverage=99%, E-value=0.0, Identity=88%"; Hit description=USP6 N -terminal-like protein
  Pfam annotation: Domain name=TBC; Domain location=102-318; Score =139.4; E_value=1.1e-38; Accession=PF00566.10; Description=TBC domain
QRLPDIIFDIWRRCLNILIEMDKKKAIDETEPGVAPSRAVDRFGFIKSEQSNSPDGIPKGKSIHEREREEKRIRKWRKMIGVGGSDWKHYVRRNPHVVKRRIRKGIPDCLRGLVWQLISGSRDLLLMNPGVYETLVIYETSASELEIIRDISRTFPSHIFFQQRHGPGQRSLYNILKAYSVYDRDVGYVQGMGFLAGLLLLYMSEEDAFWLLVALLKGAVHAPMEGLYQAGLPLVQQYLSQFEKLVMEHMPKLGQHFVEEMINPSMYASQWFITVFSYSFPFHLTLRVWDVFLYEGIKVVFQVGLALLRFCHDDLVKLPFEKLLHALRNFPEEATDPDVLLPIAFTFKVSSRLEDLKKEYQKQLEGTSETSSSKRHQPLISKTMSRVGSRVISNLTADKK

SEQ ID NO: 75564 - protein, 119 aa, Setaria italica
  Transcript Sequence Number=SeqID_9590
  Subcellular localization annotation: CTP_CleavageSite=25; ConfidenceScore=5.01e-01
MDHHGDGVSLLTKLGVGALTCNSVFAAYRSRGDPGTLAFVLAAYAALLLLLHSLRRFERAPPADRGRAKAEVWALSTLLTVMFASRVAPLMPPTVGVAVWAMAAATAGGGFWAFFLSHR

SEQ ID NO: 75565 - protein, 55 aa, Setaria italica
  Transcript Sequence Number=SeqID_9591
  Gene Ontology: Mol. function=protein disulfide oxidoreductase activity; Cellular component=plasma membrane; Biological process =cell redox homeostasis
  Homolog annotation: Hit_ID=B6T2S8; Match level="QueryCoverage=81%, HitCoverage=31%, E-value=1e-17, Identity=93%"; Hit description =Thioredoxin H-type
  Pfam annotation: Domain name=Thioredoxin; Domain location=6-55; Score= -26.8; E_value=0.031; Accession=PF00085.12; Description=Thioredoxin
IDSSIPFFQVVANFSASWCGPCRVIAPVYAEMSKTYPQLMFLTIDVDDLMVISSL

SEQ ID NO: 75566 - protein, 228 aa, Setaria italica
  Transcript Sequence Number=SeqID_9592
  Gene Ontology: Mol. function=metal ion binding
  Homolog annotation: Hit_ID=B1PPT4; Match level="QueryCoverage=61%, HitCoverage=97%, E-value=7e-46, Identity=54%"; Hit description=LIM2 transcription factor (Fragment)
  Pfam annotation: Domain name=LIM; Domain location=70-126; Score=69.3; E_value=1.5e-17; Accession=PF00412.14; Description=LIM domain
LLFLQFSNYSSVEGVLYCKPHYDQILKSTGSLDKSFEGASRSAKPEKSNGHKGQQRSRFSSMFVGTQDKCIVCNKTVYPLEKVALDGSSYHKSCFRCTHGGCTLSPSNHITHEGKLYCKTHHSQLFMVKGNFSQFEDSSGNAKVATEKPPETEEATKNPGQSELTEKPSEAELTAEKSPEKDAKQLQSSTDAIKPSETITTTQTPAGSERAIESESKSTIVDNKPSRK

SEQ ID NO: 75567 - protein, 93 aa, Setaria italica
  Transcript Sequence Number=SeqID_9593
LKKVHSHFRMFLIKYLSDTSAKEYDLLRAFKINHFNQRFVMNVQAQLNQHIQIQWNRTRLIWHLPHRKKNHIFKTTWQCVDERYKMSKLTGIN

SEQ ID NO: 75568 - protein, 50 aa, Setaria italica
  Transcript Sequence Number=SeqID_9594
FYPWLDYTSYFYVIVEIRSSMPIFHDTYIHARMSPLVSSYSYRWNLSRKK

SEQ ID NO: 75569 - protein, 67 aa, Setaria italica
  Transcript Sequence Number=SeqID_9595
  Gene Ontology: Mol. function=protein serine/threonine kinase activity; Biological process=protein amino acid phosphorylation
  Homolog annotation: Hit_ID=Q6H459; Match level="QueryCoverage=100%, HitCoverage=8%, E-value=1e-12, Identity=55%"; Hit description =Putative wall-associated kinase
RPTMKEVDMRLQFLRTKRLRKGLAEKDADIEPLLCPQDKNLYGHIDLVNAGSSGCYSLEQEFASLPR

SEQ ID NO: 75570 - protein, 122 aa, Setaria italica
  Transcript Sequence Number=SeqID_9596
  Gene Ontology: Mol. function=histone acetyltransferase activity; Cellular component=nucleus; Biological process=regulation of transcription, DNA-dependent
  Homolog annotation: Hit_ID=Q9XHY7; Match level="QueryCoverage=94%, HitCoverage=9%, E-value=8e-37, Identity=63%"; Hit description =Probable histone acetyltransferase HAC-like 3
  Pfam annotation: Domain name=zf-TAZ; Domain location=25-105; Score =20.8; E_value=0.00019; Accession=PF02135.8; Description=TAZ zinc finger
GCTFCDPCYKQNGERLHIHELTQIDTSKKNAQDYVECLVHASRCFDPRNCTLQVCLTLKKLFFHGVRCDIRARNWGGCQKCVFMWKILLHHSKGCNDTDCTVPRCRDIKVYMAEKMKLPGPV

SEQ ID NO: 75571 - protein, 92 aa, Setaria italica
  misc_feature (62)..(62): Xaa can be any naturally occurring amino acid
  misc_feature (76)..(76): Xaa can be any naturally occurring amino acid
  Transcript Sequence Number=SeqID_9597
  Subcellular localization annotation: CTP_CleavageSite=52; ConfidenceScore=5.84e-01
ALTSGAGTVTGSLTYSPIPSTVGSAARASAMAALVMLARTPLRLHSACRSRRGSARKSMLSXSCCGRRQSSSSCDXRPLLSAVSPPPLVRSG

SEQ ID NO: 75572 - protein, 121 aa, Setaria italica
  Transcript Sequence Number=SeqID_9598
  Homolog annotation: Hit_ID=Q75K40; Match level="QueryCoverage=99%, HitCoverage=14%, E-value=1e-13, Identity=33%"; Hit description =Putative retrotransposon protein
GIQSHLQLFRKIFQVKPQPKLECTAVVGGAEIQMRENSSSLYLEYELLESHSRWKEKWLYIGDHDPKLPKVTGHHPKWNNRWIDEPTHGNSLQVPELLGKIAQLKNQGLTGVGVAFSFMKK

SEQ ID NO: 75573 - protein, 94 aa, Setaria italica
  misc_feature (67)..(94): Xaa can be any naturally occurring amino acid
  Transcript Sequence Number=SeqID_9599
PPALRHHAPVLARARPLRLITMVRPLRPGWFPCSICSRKHREGSSFHFHAASQTVKMIRCWWTFALXXXXXXXXXXXXXXXXXXXXXXXXXXXX

SEQ ID NO: 75574 - protein, 74 aa, Setaria italica
  Transcript Sequence Number=SeqID_9600
  Gene Ontology: Mol. function=protein binding
LTPETVATTLALAEQHHCAELKFACLKFVAVRENLGVVDDDHASVNRKRGVCGNEGATPVESVEASERRIRRRF

SEQ ID NO: 75575 - protein, 402 aa, Setaria italica
  Transcript Sequence Number=SeqID_9601
  Gene Ontology: Mol. function=protein binding
  Homolog annotation: Hit_ID=B9SDZ9; Match level="QueryCoverage=84%, HitCoverage=83%, E-value=1e-139, Identity=66%"; Hit description =Speckle-type POZ protein, putative
  Pfam annotation: Domain name=BTB; Domain location=183-302; Score =104.3; E_value=4.2e-28; Accession=PF00651.23; Description=BTBPOZ domain
  Pfam annotation: Domain name=MATH; Domain location=30-159; Score =21.6; E_value=0.00088; Accession=PF00917.18; Description=MATH domain
  Pfam module annotation: Pfam domain module=BTB::MATH; Domain location= 183-302::30-159
  Subcellular localization annotation: CTP_CleavageSite=23; ConfidenceScore=5.27e-01
MAIPPQTPPPPTSWSRSVTEAVRGSHQFTVKGFSLAKGMGPGRFVTSDIFAVGGYHWAVYFYPDGKNPEDNANYVSVFVALASDGADVRALFELTLLDQSGRARHKVHSHFDRALQAGPYTLKYRGSMWGYKRFYRRSLLETSDFLKNDCLVLNCTVGVVKNRIETPKNAQVHFPLSDMGRCFKELLSLGIGCDITFEVGDEKVRAHKWILAARSPVFKAQFFGPIGKPDLHRVVVEDVEPVVFKAMVNFIYADELPSIHELAGSVSMWTSTVVVQHLLAAADRYGLDRLRILCEAKLCDELTPETVATTLALAEQHHCAELKFACLKFVAVRENLGAVMDTEGFNYLEETCPSLLSDLLATVAVVDDDHASVNRKRGVCGNEGATPVESVEASERRIRRRF

SEQ ID NO: 75576 - protein, 130 aa, Setaria italica
  Transcript Sequence Number=SeqID_9602
  Gene Ontology: Mol. function=2 iron, 2 sulfur cluster binding; Biological process=electron transport chain
  Homolog annotation: Hit_ID=B6SU48; Match level="QueryCoverage=100%, HitCoverage=68%, E-value=8e-61, Identity=86%"; Hit description =Ferredoxin-6
  Pfam annotation: Domain name=Fer2; Domain location=14-89; Score=70.2; E_value=7.7e-18; Accession=PF00111.19; Description=2Fe-2S iron-sulfur cluster binding domain
SSAPVPTHKVTVHDRQRGVVHEFVVPEDQYILHTAEAQDIRLPFACRHGCCTSCAVRIKSGQIRQPEALGISAELKDQGYALLCVGFPSGDVEVETQDEDEVYWLQFGRYFARGPVERDDYALELAMGDE

SEQ ID NO: 75577 - protein, 255 aa, Setaria italica
  misc_feature (221)..(221): Xaa can be any naturally occurring amino acid
  Transcript Sequence Number=SeqID_9603
  Subcellular localization annotation: CTP_CleavageSite=43; ConfidenceScore=5.72e-01
PGCTTSPAASSAPAPLSRYDFEPLLSYLSSPSVSASLTSSSPPASVPAPERRLAASYSAVPSHEWHALLRELAASDASLPLAFALLPFLHRHRLCFPLDLLLSSLLHSLSVSGRLLPHSLLLSFPPSLTDPPSPLLLNSLLAASAAASRPAVALRLLGLLREHDFLPDLASYSHLLASLLNTKDPPDAALLERLLGDLRESRLEPDAPLFSDLISAFARAXRLPDAALELLASAQAIGLTPRSNAATALISALGT

SEQ ID NO: 75578 - protein, 52 aa, Setaria italica
  Transcript Sequence Number=SeqID_9604
  Homolog annotation: Hit_ID=B6T085; Match level="QueryCoverage=98%, HitCoverage=20%, E-value=1e-13, Identity=79%"; Hit description=RING -H2 finger protein ATL2K
CSSTPERGISACASLMKMLSRERPAPRRPQSAVHADDGELDDLERQLQAVNN

SEQ ID NO: 75579 - protein, 40 aa, Setaria italica
  Transcript Sequence Number=SeqID_9605
IKGKISILLFQPLYLPDNPKKNLCSIYSYKLFQLVPLLKK

SEQ ID NO: 75580 - protein, 60 aa, Setaria italica
  Transcript Sequence Number=SeqID_9606
  Gene Ontology: Mol. function=calcium ion binding; Cellular component =oxygen evolving complex; Biological process=photosynthesis
  Homolog annotation: Hit_ID=B6ST36; Match level="QueryCoverage=93%, HitCoverage=23%, E-value=4e-25, Identity=98%"; Hit description =Chloroplast oxygen-evolving complex/thylakoid lumenal 25.6kDa protein
SRIVAAEAKKGFLPVVDKKAGYSFLYPFGWEEVAVQGQDKVYKDVIEPLESVSINSIPTS

SEQ ID NO: 75581 - protein, 246 aa, Setaria italica
  Transcript Sequence Number=SeqID_9607
  Gene Ontology: Mol. function=calcium ion binding; Cellular component =oxygen evolving complex; Biological process=photosynthesis
  Homolog annotation: Hit_ID=B6ST36; Match level="QueryCoverage=78%, HitCoverage=78%, E-value=2e-94, Identity=89%"; Hit description =Chloroplast oxygen-evolving complex/thylakoid lumenal 25.6kDa protein
  Pfam annotation: Domain name=PsbP; Domain location=68-243; Score =100.8; E_value=4.8e-27; Accession=PF01789.8; Description=PsbP
  Subcellular localization annotation: CTP_CleavageSite=43; ConfidenceScore=5.71e-01
MATAVPAASLPLPCRASSSSPAAAARRPRSPSLRKRHCVITPLAAACSPAPPPQLDNEEEGSGRRQVLLAGAAVAAAFISRPNPAAFAAEAKKGFLPVVDKKAGYSFLYPFGWEEVAVQGQDKVYKDVIEPLESVSINSIPTSKEDIRDLGPPDKVAEALIKKVLAPPTQKTKLIEAKENDVDGRAYYTFEFTAQAPNYTRHALGAIVIANGKFYTLTTGANERRWEKMKDRLHTVVDSFKIENRI

SEQ ID NO: 75582 - protein, 282 aa, Setaria italica
  misc_feature (227)..(227): Xaa can be any naturally occurring amino acid
  Transcript Sequence Number=SeqID_9608
  Gene Ontology: Mol. function=nucleotide binding; Biological process =defense response
  Homolog annotation: Hit_ID=Q84KC8; Match level="QueryCoverage=92%, HitCoverage=17%, E-value=8e-41, Identity=42%"; Hit description=NBS -LRR disease resistance protein homologue
  Pfam annotation: Domain name=LRR_1; Domain location=18-42; Score=1.2; E_value=1.8e+02; Accession=PF00560.25; Description=Leucine Rich Repeat
  Pfam annotation: Domain name=LRR_1; Domain location=181-203; Score =2.7; E_value=93; Accession=PF00560.25; Description=Leucine Rich Repeat
  Pfam annotation: Domain name=LRR_1; Domain location=205-225; Score =5.5; E_value=28; Accession=PF00560.25; Description=Leucine Rich Repeat
  Pfam annotation: Domain name=LRR_1; Domain location=228-249; Score =10.3; E_value=3.3; Accession=PF00560.25; Description=Leucine Rich Repeat
  Pfam module annotation: Pfam domain module=LRR_1::LRR_1::LRR_1::LRR _1; Domain location=18-42::181-203::205-225::228-249
MYKCPNLILINLPSDLHSLQSLEIEVCPEFLSSYSSSSTSCFPFASSLQFLELRSLEGMEAAAVPLSNLVSLTTLWIIGCGDLRSEGLGTLLTQGQLTELGVSDSPRFLVDCSKPSRTREEDPLPWSSKLQKLGSDDIAGVLTDSFCSLVSSSLATLSLAFNYDVERFTMEQVEALLLLTSLHDLEFEWCGKMQYLPAGLHKLDKLKALSIVDCKALRSLPKDGLPXSLQHLSIGYCPAIRSLPKVDTLASSLLSLTVNARNSKELIRQCRKLKGTIPRVYT

SEQ ID NO: 75583 - protein, 78 aa, Setaria italica
  misc_feature (14)..(14): Xaa can be any naturally occurring amino acid
  Transcript Sequence Number=SeqID_9609
KSPQAYVTGQPKVXLTSIIVTIQIVMGRTTLAKLLVMTHLLYELVQSHCISIFCHRCTIKLLLCFILHLACGSLQHHP

SEQ ID NO: 75584 - protein, 88 aa, Setaria italica
  Transcript Sequence Number=SeqID_9610
GVPLGGHVCDMACVIMEILCVLLPCIPRNFNYIANDILFFCYGICSATFISISYGDLYAMDFFRAFFSLLTIILHGSYINYHGSSCTN

SEQ ID NO: 75585 - protein, 73 aa, Setaria italica
  Transcript Sequence Number=SeqID_9611
  Subcellular localization annotation: CTP_CleavageSite=5; ConfidenceScore=5.10e-01
RGSVCCATNPLPSMLASKDNLYRPCRRTSLVATPPRLPHGNPKGEVGEKYRSIISTRSSLSLQSILLLLFFTY

SEQ ID NO: 75586 - protein, 76 aa, Setaria italica
  Transcript Sequence Number=SeqID_9612
LHKLTLLGNQSLLTSIIVTIQIVMGRTTLAKLLVMTHLLYELVQSHCISIFCHRCTIKLLLCFILHLACGSLQHHP

SEQ ID NO: 75587 - protein, 107 aa, Setaria italica
  Transcript Sequence Number=SeqID_9613
LRLITNFGRRRNYKVSVGVGESSAPASFRVCLWGDPQQYYLYRIGSLCISLYILSWLVLLSLWTMWYLDFEDGIYLVVLHFIALHGIWSYVANLSLRSYRYRIVYWV

SEQ ID NO: 75588 - protein, 120 aa, Setaria italica
  misc_feature (16)..(16): Xaa can be any naturally occurring amino acid
  Transcript Sequence Number=SeqID_9614
  Homolog annotation: Hit_ID=Q8W337; Match level="QueryCoverage=50%, HitCoverage=11%, E-value=8e-11, Identity=59%"; Hit description =Eukaryotic membrane protein family protein, expressed
  Pfam annotation: Domain name=DUF747; Domain location=1-120; Score= -128.7; E_value=2.1e-05; Accession=PF05346.3; Description=Eukaryotic membrane protein (cytomegalovirus gH-receptor) family
GTIKLYVVYNVLEIFXKLCQSFGEDVLQVLFNSAEGLSACSTDNVTFELLRFLLDEAIAVVAFVVHSFVLLAQAITLSTCIIAHNNALLALLVSNNFAEIKSNVFKRVSKENLHNLVYYE

SEQ ID NO: 75589 - protein, 327 aa, Setaria italica
  Transcript Sequence Number=SeqID_9615
  Gene Ontology: Mol. function=receptor activity; Cellular component =integral to membrane; Biological process=multicellular organismal development
  Homolog annotation: Hit_ID=Q8W337; Match level="QueryCoverage=99%, HitCoverage=47%, E-value=3e-64, Identity=83%"; Hit description =Eukaryotic membrane protein family protein, expressed
  Pfam annotation: Domain name=DUF747; Domain location=73-327; Score =326.3; E_value=6.2e-95; Accession=PF05346.3; Description=Eukaryotic membrane protein (cytomegalovirus gH-receptor) family
GELYGGNALRSTIAVGNEKKRQRVYNTMFHVPWRCERLIVTGFFVCLDSFLSLLTIMPARIVVTIWRLLKTRKFLQPNAADLSDYGCFVVLALGVASLQMIDISLIYHVIRGQGTIKLYVVYNVLEIFDKLCQSFGEDVLQVLFNSAEGLSACSTDNVTFELLRFLLDEAIAVVAFVVHSFVLLAQAITLSTCIIAHNNALLALLVSNNFAEIKSNVFKRVSKENLHNLVYYDIIERFHITAFLLFVLAQNILEAEGPWFDSFLINASLVFLCEVLIDAIKHSFLAKFNEIKPVAYSEFLEDLCKQILNDKPDDRQKDLTFIPRAYL

SEQ ID NO: 75590 - protein, 66 aa, Setaria italica
  Transcript Sequence Number=SeqID_9616
LIKPRRTIRPSKEPNPKINQHGEAAAGDARRTDRYALITSLTTTTRPRPSRWARRGVPWGACRGRA

SEQ ID NO: 75591 - protein, 151 aa, Setaria italica
  misc_feature (72)..(72): Xaa can be any naturally occurring amino acid
  Transcript Sequence Number=SeqID_9617
  Gene Ontology: Mol. function=RNA binding; Cellular component =chloroplast; Biological process=regulation of translation
  Homolog annotation: Hit_ID=A7XN92; Match level="QueryCoverage=69%, HitCoverage=12%, E-value=9e-21, Identity=43%"; Hit description=CRM family member 3
  Pfam annotation: Domain name=CRS1_YhbY; Domain location=1-53; Score =8.0; E_value=0.0033; Accession=PF01985.13; Description=CRS1  YhbY domain
HLHWKHREVVKLISKQKTLSFVQETVRLLEYESGGILVAIERVPKGYALIFYRGKNYRRPINIRPRNLLTKXKALKRAVAMQRHEALSQHIDQLENNIKQMKLDLGIEYYEEQEDDSSDSENEDGTAVTSASYDEACTISKNLVLFVSEPP

SEQ ID NO: 75592 - protein, 375 aa, Setaria italica
  Transcript Sequence Number=SeqID_9618
  Gene Ontology: Mol. function=RNA binding; Cellular component =chloroplast; Biological process=regulation of translation
  Homolog annotation: Hit_ID=A7XN92; Match level="QueryCoverage=86%, HitCoverage=38%, E-value=1e-75, Identity=45%"; Hit description=CRM family member 3
  Pfam annotation: Domain name=CRS1_YhbY; Domain location=228-312; Score=58.1; E_value=3.3e-14; Accession=PF01985.13; Description=CRS1 YhbY domain
  Pfam annotation: Domain name=CRS1_YhbY; Domain location=26-109; Score= 98.3; E_value=2.7e-26; Accession=PF01985.13; Description=CRS1  YhbY domain
  Pfam module annotation: Pfam domain module=CRS1_YhbY::CRS1_YhbY; Domain location=228-312::26-109
AAGGRDEEDGAKRRRVKAPTLAELTIEDEELRRLRRLGMTLRDRITVPKAGVTTAITEKIHDAWRKSELVRLKFHEDLAHDMKTAHELVERRTGGLIIWRSGSVMVVYRGSNYKRPLKSQTLNGASSQVKGEDGALFIPDASSPAENDSQGKDLAAQHANASQLNMQNTEDMTEEELEFNQMLDELGPRFVDWWGTGILPVDADLLPQTIPEYKTPYRVLPTGMRSTLTNAELTNLRKLARNLPCHFALGRNRNHQGLAAAIVKLWEKSLVVKIAVKRGIQNTNNKLMAEEIKNLTGGTLLLRNKFYIVIYRGKDFLPTSVAAVLAEREELTKDIQNMEEQRRNVSIGQPPDDGLDGHALAGTLAEFQEAQARWG

SEQ ID NO: 75593 - protein, 374 aa, Setaria italica
  misc_feature (17)..(17): Xaa can be any naturally occurring amino acid
  misc_feature (31)..(31): Xaa can be any naturally occurring amino acid
  Transcript Sequence Number=SeqID_9619
  Gene Ontology: Mol. function=RNA binding; Cellular component =chloroplast; Biological process=regulation of translation
  Homolog annotation: Hit_ID=A7XN92; Match level="QueryCoverage=84%, HitCoverage=37%, E-value=4e-73, Identity=45%"; Hit description=CRM family member 3
  Pfam annotation: Domain name=CRS1_YhbY; Domain location=178-265; Score=116.6; E_value=8.3e-32; Accession=PF01985.13; Description=CRS1 YhbY domain
IVKLWEKSLVVKIAVKXGIQNTNNKLMAEEXKNLTGGTLLLRNKFYIVIYRGKDFLPTSVAAVLAEREELTKDIQNMEEQRRNVSIGQPPDDGLDGHALAGTLAEFQEAQARWGREVTAKEQEEMKEASSRSEKQKLYRKLEHKLSVAQAKIHRAERLLSKIEASMVLADPCDDREMITDEEKSVFRRIGLRLKSYLPLGVRGVFDGVIENMHLHWKHREVVKLISKQKTLSFVQETARLLEYESGGILVAIERVPKGYALIFYRGKNYRRPINIRPRNLLTKAKALKRAVAMQRHEALSQHIDQLENNIKQMKLDLGIEYYEEQEDDSSDSENEDGTAVTSASYDEDQDDFSESADEDEYDYDDDEDEENDSL

SEQ ID NO: 75594 - protein, 77 aa, Setaria italica
  Transcript Sequence Number=SeqID_9620
  Homolog annotation: Hit_ID=B9RBE9; Match level="QueryCoverage=94%, HitCoverage=14%, E-value=1e-16, Identity=56%"; Hit description =Protein binding protein, putative
LYWLIERMVDLRVADNAVMLWSDQVALATDLQKLLSDADMWRNMTPGLPVLVTRCTLRLANSVVTGETLVPRQEQFQ

SEQ ID NO: 75595 - protein, 85 aa, Setaria italica
  Transcript Sequence Number=SeqID_9621
  Homolog annotation: Hit_ID=B9RBE9; Match level="QueryCoverage=100%, HitCoverage=17%, E-value=1e-23, Identity=63%"; Hit description =Protein binding protein, putative
MSCHQVRTKLVSCWLPVLNVCRGIVQPMHFHKSTNCQELEEAFLQIISTLPVPEAQELLRQCLGFSTRNVDDCPHLVAAFKTWFR

SEQ ID NO: 75596 - protein, 97 aa, Setaria italica
  Transcript Sequence Number=SeqID_9622
KIFSWQVEAFCLNTIWVQVLFLPSSRKISFFQLFTIPNSNNNIYIHINPILIGIAPVNSRKYSFRLPINIKALIQVVLPKMTVQPTPLINHVKNRSL

SEQ ID NO: 75597 - protein, 372 aa, Setaria italica
  misc_feature (41)..(41): Xaa can be any naturally occurring amino acid
  Transcript Sequence Number=SeqID_9623
  Gene Ontology: Mol. function=protein binding
  Homolog annotation: Hit_ID=B9RBE9; Match level="QueryCoverage=96%, HitCoverage=70%, E-value=4e-93, Identity=50%"; Hit description =Protein binding protein, putative
GGRLSLAVVASPSCSRPFHAHVEVLRLLHTLDFAGAIRSPXDALDLLPVALQLLFDACVEACIRFLEAVPWSEDEEARVIDLAPLLPADEATDLLARVSPPPVATGPTSAAGEAARSPSEAMLHGLIHSAIHGHPVHAATKAFVAMLLKDYPSRDCVHKVLDEAFQSRLETVKELMGKYASPDFRVAVDSDEREAIQRLNLHSAVLNVKHLYWLIERMVDLRVADNAVMLWSDQVALATDLQKLLSDADMWRNMTPGLPVLVTRCTLRLANSVVTGETLVPRQVRTKLVSCWLPVLNVCRGIVQPMHFHKSTNCQELEEAFLQIISTLPVPEAQELLRQCLGFSTRNVDDCPHLVAAFKTWFRRAGRAPLGG

SEQ ID NO: 75598 - protein, 139 aa, Setaria italica
  Transcript Sequence Number=SeqID_9624
  Gene Ontology: Mol. function=nucleic acid binding
  Homolog annotation: Hit_ID=Q656N0; Match level="QueryCoverage=98%, HitCoverage=4%, E-value=9e-63, Identity=83%"; Hit description =Putative STH1 protein
MASSQHVEMEAAKLLHKLIQESKDEPSKLATKLYVICQHMKLSGKEQSLPYQVISRAMETVVNQHGIDMEALRSSRIPFAGGPHAGDSSGAMSKDKEVIGNQSPMVGSDASQNSGQAGLWQFPSDMTRHVASVSGRVTN

SEQ ID NO: 75599 - protein, 347 aa, Setaria italica
  misc_feature (19)..(19): Xaa can be any naturally occurring amino acid
  Transcript Sequence Number=SeqID_9625
  Homolog annotation: Hit_ID=Q8YPZ5; Match level="QueryCoverage=58%, HitCoverage=85%, E-value=2e-19, Identity=35%"; Hit description =Alr4045 protein
  Subcellular localization annotation: CTP_CleavageSite=66; ConfidenceScore=5.42e-01
MASSSSTYLVLTCVHASLXRPLPSLHVTRIALAGITRRSTAGAPLFASPAACRTGERRRGWAQICRDSSLQGPPGADSPAQDQEDKKKSEAVAAAAARIASGGGGGGKLSDWTTSVLIFGIWAGFMYYIFQLAPNQTPYRDTYFLQKLLNLKGDDGFRMNDVLVALWYIMGIWPLVYSMLLLPTGRSSKSKIPVWPFLVLSCIGGAYALIPYFVLWKPPPPPIDEDEIEQWPLKFLESKLTAGVVFALGIGLIIYAGKAGGDDWKEFIRYFRESKFIHATCLDFTLLSAFSPFWVYNDMTARRWKNGSWLLLLALIPFVGPSLYLLLRPSLSSLLAASASSSDEIEK

SEQ ID NO: 75600 - protein, 111 aa, Setaria italica
  Transcript Sequence Number=SeqID_9626
  Pfam annotation: Domain name=GRP; Domain location=26-85; Score=-29.5; E_value=0.092; Accession=PF07172.3; Description=Glycine rich protein family
MAYVERGVVKDKRTIWRLSIISDFFRAVVNFIRVFFLTMFSVEKTDNYRKGYGSGKKWDGGPGGGGGRGPYGGGGGGGGGFGGGGSRGPRTLSDIRSNDHSSLPACGSCCG

SEQ ID NO: 75601 - protein, 166 aa, Setaria italica
  Transcript Sequence Number=SeqID_9627
  Gene Ontology: Mol. function=binding; Cellular component=nucleus; Biological process=regulation of transcription, DNA-dependent
  Homolog annotation: Hit_ID=Q6E438; Match level="QueryCoverage=92%, HitCoverage=17%, E-value=6e-58, Identity=66%"; Hit description =ACT11D09.4
  Pfam annotation: Domain name=PPR; Domain location=124-158; Score =24.8; E_value=0.00036; Accession=PF01535.12; Description=PPR repeat
  Pfam annotation: Domain name=PPR; Domain location=17-51; Score=9.2; E_ value=0.73; Accession=PF01535.12; Description=PPR repeat
  Pfam annotation: Domain name=PPR; Domain location=53-87; Score=19.6; E_value=0.013; Accession=PF01535.12; Description=PPR repeat
  Pfam annotation: Domain name=PPR; Domain location=89-123; Score=23.6; E_value=0.00084; Accession=PF01535.12; Description=PPR repeat
  Pfam module annotation: Pfam domain module=PPR::PPR::PPR::PPR; Domain location=124-158::17-51::53-87::89-123
SVAARAAVSSRVRPTVFTCNAVAAAMVLAGRHDDAVALFEFFFRRSNIVPNIVSYNTLILAHCEAVRVDDAMQVYRDMLSSAPFSPSSVTFRHLTKGLVAAGRIRDALDLLREMLNRGAGADSLVYNNLIAGYIDLDDWDKAFELFNELTERCAVYDGVVHTTFME

SEQ ID NO: 75602 - protein, 502 aa, Setaria italica
  Transcript Sequence Number=SeqID_9628
  Gene Ontology: Cellular component=exocyst; Biological process =exocytosis
  Homolog annotation: Hit_ID=B9RAG8; Match level="QueryCoverage=99%, HitCoverage=77%, E-value=1e-145, Identity=53%"; Hit description =Exocyst complex component, putative
  Pfam annotation: Domain name=Exo70; Domain location=136-494; Score =593.9; E_value=1.8e-175; Accession=PF03081.7; Description=Exo70 exocyst complex subunit
FRHLLIRGGSPLAAEDLQASLLRRLSLTVPSFNSSAVDLDCPSFAIHAGEGGDESGGRSSVSDDEISPYLIAPDTVGALRDIADVMLRAGYAPELCQVYGEVRRDTLMECLAVLGVDKMSLEEVQRVEWGVLDGKMKKWIQALKVVIRGLLAEERRICNQILAADPNAEEECFTEAAKGCVLQLLNFGDAIAIGKRSSEKLFRILGMYEALAEVLPELEGLFSGEAKDFIKEEAVGILVRLGDAVRGTIAEFACAIQGETSRRPLPGGEIHPLTRYVMNYVRLLADYNASLNQLLEYWDTELNGGDNPNMTPLGHCVLMLITHLQSKIDEKSRLYEDEALQNIFLMNNLLYIVQKVKDSELKTLLGDNWIRKRRGQIRQYSTGYLRSSWAKVLACLRDDGLPQTMGSSSALKAALKDRFKNFNLAFEDLYRTQTSWRVVDPQLREELKISISEKVLPAYRSFVGRFRGQLEGGRGSARYIKYNPEDLENQVSDFFEGKKPNA

SEQ ID NO: 75603 - protein, 72 aa, Setaria italica
  Transcript Sequence Number=SeqID_9629
FRCVVKEGLYFSESISLTTFCVCRHEFLSHVCCKFPIIVSLQLINLNNEMLGSGKISNKVRLCYISILLSTF

SEQ ID NO: 75604 - protein, 108 aa, Setaria italica
  Transcript Sequence Number=SeqID_9630
  Gene Ontology: Mol. function=oxidoreductase activity, acting on CH-OH group of donors
  Homolog annotation: Hit_ID=Q8W5N7; Match level="QueryCoverage=90%, HitCoverage=12%, E-value=4e-35, Identity=76%"; Hit description =Putative alcohol oxidase
  Pfam annotation: Domain name=GMC_oxred_N; Domain location=2-108; Score=-69.1; E_value=0.00083; Accession=PF00732.11; Description=GMC oxidoreductase
VSDSVALVCADAVPRNSSEGHFCGSCNFGCPTGDKRGTDTTWLVDAVASGAVILTGCKAECFILESNSGENARRSRKCVGLVATCMVAGVTKKLRIEAKVSIAACGAL

SEQ ID NO: 75605 - protein, 198 aa, Setaria italica
  misc_feature (81)..(81): Xaa can be any naturally occurring amino acid
  Transcript Sequence Number=SeqID_9631
  Gene Ontology: Mol. function=transferase activity; Cellular component= chloroplast
  Homolog annotation: Hit_ID=B6SKI6; Match level="QueryCoverage=100%, HitCoverage=79%, E-value=1e-102, Identity=42%"; Hit description=ATP binding protein
  Pfam annotation: Domain name=PPR; Domain location=11-45; Score=52.2; E_value=2e-12; Accession=PF01535.12; Description=PPR repeat
  Pfam annotation: Domain name=PPR; Domain location=116-150; Score =47.2; E_value=6.5e-11; Accession=PF01535.12; Description=PPR repeat
  Pfam annotation: Domain name=PPR; Domain location=151-185; Score =11.8; E_value=0.36; Accession=PF01535.12; Description=PPR repeat
  Pfam annotation: Domain name=PPR; Domain location=46-80; Score=37.1; E_value=6.9e-08; Accession=PF01535.12; Description=PPR repeat
  Pfam annotation: Domain name=PPR; Domain location=81-115; Score=48.3; E_value=2.9e-11; Accession=PF01535.12; Description=PPR repeat
  Pfam module annotation: Pfam domain module=PPR::PPR::PPR::PPR::PPR; Domain location=11-45::116-150::151-185::46-80::81-115
MLEHGCMPDVITYTTVINGFCKEGLIDEAVMLLKSMAACGCKPNTISYTIVLKGLCSAERWVDAEELMAQMIQQGCPPNPXTFNTLINFLCKKGMVEQAIELLKQMLVNGCSPDLISYSTVIDGLGKAGKTDEALELLNVMVNKGMSPNTIIYSSIACALSREGRINKVIQMIDSIQDATIRSDPVLYNAVISSLLDK

SEQ ID NO: 75606 - protein, 434 aa, Setaria italica
  misc_feature (330)..(330): Xaa can be any naturally occurring amino acid
  Transcript Sequence Number=SeqID_9632
  Gene Ontology: Mol. function=nucleic acid binding
  Homolog annotation: Hit_ID=Q0JDM0; Match level="QueryCoverage=97%, HitCoverage=48%, E-value=1e-180, Identity=71%"; Hit description=Zinc finger CCCH domain-containing protein 27
  Pfam annotation: Domain name=RRM_1; Domain location=377-433; Score =15.0; E_value=0.008; Accession=PF00076.14; Description=RNA recognition motif. (a.k.a. RRM, RBD, o
  Pfam annotation: Domain name=zf-CCCH; Domain location=147-173; Score =17.5; E_value=0.0074; Accession=PF00642.16; Description=Zinc finger C-x8-C-x5-C-x3-H type (and similar)
  Pfam module annotation: Pfam domain module=RRM_1::zf-CCCH; Domain location=377-433::147-173
  Subcellular localization annotation: CTP_CleavageSite=88; ConfidenceScore=5.53e-01
KGSRVSGNGQPFGGAGSQGESQKDFMPKFKRRPGAGAHSRAPRVNQSFRADSSASVAARPPRGRGRNGAPWTQHDPRFNTLDMMDFASQMAPQGPPAHPSLFMGAALPSGPYGFMPGMPHGILDPIHPLGMQGPIQPAVSPLIDLGLPRQRCRDFEERGFCLRGDMCPMEHGVNRIVVDDMQSLSQFNLPVSVPNTQGLGIQNEGGTGSVSKSVPAKEVKSGVASDAVKLNGSTTSAVADADVYDPDQPLWNNEHPEASCAGFVHTDAGMWNPESSGYEMGQEHSNQVFATDGSQGLKSSVWGRIASKRKSGTSNTAKITSTSTTGTKKXDYDEMAPSTAQSKSAAAKDTNGQSNSRIYGDVGRQSNRAAHKASRTLYVHGIPQENNRWEALLSHFQKFGQVIDIYIPSNSEKAFVQFSKREEAEAALKAPDAV

SEQ ID NO: 75607 - protein, 50 aa, Setaria italica
  Transcript Sequence Number=SeqID_9633
VIICYSSNKLPVTFLFFVRTPRSHFSKSLMFTTFGEKNKDGLVYVRRGHF

SEQ ID NO: 75608 - protein, 74 aa, Setaria italica
  misc_feature (22)..(22): Xaa can be any naturally occurring amino acid
  Transcript Sequence Number=SeqID_9634
MEDDAVSTLMDIDDSPLGAAGXAGFLDEDGEEELFLAPHRGGRGGGTAEVRGPLPFSTFYNNFDGADFDDADLA

SEQ ID NO: 75609 - protein, 58 aa, Setaria italica
  Transcript Sequence Number=SeqID_9635
LLSIDLLVTLLLARKLQRRRDLPIIKGKKELSYYRPYILLAPIGPANWLPVQNLTHES

SEQ ID NO: 75610 - protein, 112 aa, Setaria italica
  misc_feature (101)..(101): Xaa can be any naturally occurring amino acid
  Transcript Sequence Number=SeqID_9636
  Gene Ontology: Mol. function=nucleotide binding; Cellular component =protein complex; Biological process=protein polymerization
  Subcellular localization annotation: CTP_CleavageSite=55; ConfidenceScore=5.51e-01
MAAQLVFSNVSSCQCPLGISPKNVGNTLLGESARNFQRKKWFSGGFYRSSRLECSANSRRAGPRRTKDTLYDLHPEISLLYGEDNGAASVSSKEQGIDAAXERLVDAPASYR

SEQ ID NO: 75611 - protein, 46 aa, Setaria italica
  Transcript Sequence Number=SeqID_9637
  Gene Ontology: Mol. function=ubiquitin thiolesterase activity; Cellular component=intracellular; Biological process=ubiquitin -dependent protein catabolic process
  Homolog annotation: Hit_ID=Q6K6Z5; Match level="QueryCoverage=100%, HitCoverage=13%, E-value=3e-12, Identity=65%"; Hit description=(RAP Annotation release2) Peptidase C12
MSWAAIENDPGVLTELLQQMQLKGLQVDELYSLDLDALNDLQPIYG

SEQ ID NO: 75612 - protein, 113 aa, Setaria italica
  misc_feature (69)..(69): Xaa can be any naturally occurring amino acid
  misc_feature (85)..(85): Xaa can be any naturally occurring amino acid
  Transcript Sequence Number=SeqID_9638
  Gene Ontology: Mol. function=ubiquitin thiolesterase activity; Cellular component=intracellular; Biological process=ubiquitin -dependent protein catabolic process
  Homolog annotation: Hit_ID=B9S046; Match level="QueryCoverage=84%, HitCoverage=30%, E-value=2e-15, Identity=51%"; Hit description =Ubiquitin carboxyl-terminal hydrolase isozyme L5, putative
VNRKEMYTAELKDLQRKRENLLQQMGDTSARHVPSVEQSLAEVAAQIEAVTEKIIMEEEKVKKWKTENXERHNYVPFLFNFLKIXFEEKQQLMPLIEKAKAKQKSHSHSSNPR

SEQ ID NO: 75613 - protein, 332 aa, Setaria italica
  Transcript Sequence Number=SeqID_9639
  Gene Ontology: Mol. function=ubiquitin thiolesterase activity; Cellular component=intracellular; Biological process=ubiquitin -dependent protein catabolic process
  Homolog annotation: Hit_ID=B9S046; Match level="QueryCoverage=95%, HitCoverage=96%, E-value=1e-112, Identity=65%"; Hit description =Ubiquitin carboxyl-terminal hydrolase isozyme L5, putative
  Pfam annotation: Domain name=Peptidase_C12; Domain location=2-206; Score=278.7; E_value=1.3e-80; Accession=PF01088.13; Description =Ubiquitin carboxyl-terminal hydrolase, family 1
MSWAAIENDPGVLTELLQQMQLKGLQVDELYSLDLDALNDLQPIYGLIVLYKWRPPEKDERPVMKDTVPNLFFANQIINNACATQAILSVLLNSPGITLSDELKRLKEFAKDLPPELKGLAIVNCSSIRMLNNSFARSEVSEEQKPSSKDDDVYHFISYVPVDGVLYELDGLKEGPISLGKCSGGVGEAGWLRVAQPVIQEHIDRFTQNEIRFSVMAILKNRKEMYTAELKDLQRKRENLLQQMGDPSARHVPSVEQSLAEVAAQIEAVTEKIIMEEEKVKKWKTENMRRKHNYVPFLFNFLKILEEKQQLKPLIEKAKAKHKSHSHSTNPR

SEQ ID NO: 75614 - protein, 170 aa, Setaria italica
  Transcript Sequence Number=SeqID_9640
  Gene Ontology: Biological process=transport
  Homolog annotation: Hit_ID=Q75IP8; Match level="QueryCoverage=87%, HitCoverage=16%, E-value=1e-78, Identity=95%"; Hit description =Pentatricopeptide, putative, expressed
  Pfam annotation: Domain name=Clat_adaptor_s; Domain location=24-169; Score=-61.0; E_value=0.042; Accession=PF01217.12; Description =Clathrin adaptor complex small chain
ASRIKHETVDEEAGERVGERGEKMILAVLFANSDGNILIERFHGVPAEERLHWRSFLVKLGSENLKGSKNEELHVASHKSVSIVYTTIGDVCLYIVGKDEYDELALAEVIFAITSAVKDVCGKPPTERLFLDKYGRICLCLDEIVWKGLLENTEKDRVRRLIRLKPPVEP

SEQ ID NO: 75615 - protein, 41 aa, Setaria italica
  Transcript Sequence Number=SeqID_9641
HHLGHFCIEFKFKKKHFNVNRAKKTNHKQLYHMFSRHITVR

SEQ ID NO: 75616 - protein, 84 aa, Setaria italica
  Transcript Sequence Number=SeqID_9642
EMHFLNAQGQGKLPGKTKQNKLSTEVKPVQHYRHLGDRPEPSQEHVTACTSASILKFLQKAPTQQADGQLHPSRSRTTKKAPIS

SEQ ID NO: 75617 - protein, 58 aa, Setaria italica
  Transcript Sequence Number=SeqID_9643
EPRRCCRILISDGSRTSIEHTKIFVKDMHIIHDVVFVQLFKKDILVSNININPSLQLR

SEQ ID NO: 75618 - protein, 112 aa, Setaria italica
  Transcript Sequence Number=SeqID_9644
  Gene Ontology: Mol. function=nucleotide binding
  Homolog annotation: Hit_ID=Q8RUA3; Match level="QueryCoverage=100%, HitCoverage=14%, E-value=2e-38, Identity=60%"; Hit description =Putative disease resistance protein
RLDEISENRAAYNIEHTPAPAWAASCSSALNFPGRDDLEEYTVGLDKYSDMLKEQLLDDAVTARAVVSISGESSIGKTTLARKVYQSPEVRNHFEIRTWTVLPHKCRAADVL

SEQ ID NO: 75619 - protein, 302 aa, Setaria italica
  Transcript Sequence Number=SeqID_9645
  Gene Ontology: Mol. function=zinc ion binding; Cellular component =intracellular
  Homolog annotation: Hit_ID=B3GS43; Match level="QueryCoverage=86%, HitCoverage=15%, E-value=1e-27, Identity=33%"; Hit description =Methylcytosine binding domain protein
  Subcellular localization annotation: CTP_CleavageSite=79; ConfidenceScore=5.02e-01
MKGSLANRGDVNFAKGSFANKPINNNEPNVPMLEVMRKSNNEMQNRYNDCVPGCQPHAASRTCRNVNGLMSTQANFVNMSSAVQSVGDVPVTSTSQDQCDLQLGFGAQKQQIFSSHGELRSAATGSPQLGSNARNSSLPTGSSQFWDFGSFARPNSVPAAPSQLGSIAQPNYVHSAASSQFASMLGSISRTHSVHPSVSSQFGNMPIQNFVSTSEPTLVLGYAPQMGTVPPPAVQLGWDSSLPRMVTGGSMVTCVCIWCNSQFHHFGPVDGQQAGSFGFICPSCRDRMSGHHNMPNNGSWQP

SEQ ID NO: 75620 - protein, 354 aa, Setaria italica
  Transcript Sequence Number=SeqID_9646
  Gene Ontology: Mol. function=nucleoside-triphosphatase activity; Biological process=defense response
  Homolog annotation: Hit_ID=B5UBC0; Match level="QueryCoverage=100%, HitCoverage=33%, E-value=4e-71, Identity=43%"; Hit description=NBS -LRR class disease resistance protein
  Pfam annotation: Domain name=NB-ARC; Domain location=1-330; Score =35.9; E_value=1.8e-11; Accession=PF00931.14; Description=NB-ARC domain
IVGYGGVGKTSIATALYKKLGDQFGCRAMVTVSQSSNIEAILDNIRSQVKPQSNKDQERHGRSEESCLAAALEGLQAQIRRGKSTIKAKCRCLGTAQETKGGTKRNQLNDELKGHFQKNSYLVVIDDVWSATTLEDIRKAFPQTDKHSERGRIIVTTRFPAVATARREQEGDRVHKVVPLSLGKSMELFNQAYSESKPSENVSVPEEVWKVCGGLPLAIVAMSGYVACNSHKHLDWDKIYTKLFPDKKRREELKSGDILNSTPAEAGKDTRKGLTQEELGRIVSHCYNDMPAEIITCSLYLSIFPKGSRISRKRLIRRWIAEGFVSEKDGMGVEDVAETYFGHLVRRKMIRSVE

SEQ ID NO: 75621 - protein, 752 aa, Setaria italica
  Transcript Sequence Number=SeqID_9647
  Gene Ontology: Mol. function=protein serine/threonine kinase activity; Cellular component=plasma membrane; Biological process =protein amino acid phosphorylation
  Homolog annotation: Hit_ID=Q9LNN0; Match level="QueryCoverage=77%, HitCoverage=82%, E-value=1e-180, Identity=54%"; Hit description =F8L10.9 protein
  Pfam annotation: Domain name=Pkinase; Domain location=185-469; Score =316.5; E_value=5.4e-92; Accession=PF00069.17; Description=Protein kinase domain
  Pfam annotation: Domain name=Pkinase_Tyr; Domain location=185-434; Score=33.3; E_value=6.1e-16; Accession=PF07714.9; Description =Protein tyrosine kinase
  Pfam module annotation: Pfam domain module=Pkinase::Pkinase_Tyr; Domain location=185-469::185-434
MGCVSSKQFHGGDEHGDGKPRRRPSSNSLKRLVSYSSSKRHEDLEEEDEEGAVVAATSSTAGRCAGNDASTARLIRKPPAPVVEAVPALPEEAATLAIGVVDAERAVAAAAGNWKRAPADVQVNGAAEQEPRSAGPRTEGEAKPRIRDVPNGVQGEHVAAGWPRWLTEVAAEAVRGWQPRRAESFEKLDKIGQGTYSSVYKARDLENGKIVALKKVRFANMDPESVRFMAREIHILRRLDHPNVVKLEGLVTSRMSSSLYLVFEYMEHDLAGLAATPGLKFTEPQVKCYMRQLLSGLEHCHNRGVLHRDIKGANLLIDNNGILKIADFGLATFFNPNQKQHLTSRVVTLWYRPPELLLGATNYGAAVDLWSAGCILAELLSGKPIMPGRTEVEQLHKIFKLCGSPSEEFWANLKLSRATIFKPQHPYRRCVNDVYKDFPTTALALLDRLLAVEPGNRGTAASALDSEFFTTKPYACDPSSLPKYPPSKEYDAKLRDEEARRQRAAAKGQEAEAGRRKQLPGPDGNSGLQQRRVQVNPKSGSYKFTPKEDAVSGFPIDPPARAADNGYPQRVPLMHAGRSSSTLGRSSGVDPKAQRFHTSQIVGADMSNQSTAAGQRGNAPKMSNLGESARRQYLREHRSSSRYSQLTGADPSDRPEWTHQFQERPSSSHRKDDAVANKEPTVVNGTKKNRIHYSGPLMPPGVNMDEILREHERQIQQAVRRARLDKGKGKHNGERDQSEALLYTTVNIRADR

SEQ ID NO: 75622 - protein, 98 aa, Setaria italica
  Transcript Sequence Number=SeqID_9648
  Gene Ontology: Mol. function=protein binding; Cellular component =ribonucleoprotein complex; Biological process=porphyrin biosynthetic process
  Homolog annotation: Hit_ID=B9T2G3; Match level="QueryCoverage=97%, HitCoverage=98%, E-value=1e-32, Identity=75%"; Hit description=Snrnp sm protein, putative
  Pfam annotation: Domain name=LSM; Domain location=15-93; Score=78.5; E_value=2.3e-20; Accession=PF01423.14; Description=LSM domain
MASAEEEIAVKEPLDLIRLSLDERIYVKLRSDRELRGKLHAYDQHLNMILGDVEEVVTTVEIDDETYEEIVRTTKRTIPFLFVRGDGVILVSPPLRTA

SEQ ID NO: 75623 - protein, 72 aa, Setaria italica
  Transcript Sequence Number=SeqID_9649
  Homolog annotation: Hit_ID=B6TGT8; Match level="QueryCoverage=100%, HitCoverage=43%, E-value=1e-33, Identity=95%"; Hit description=SFT2 domain containing 2
  Pfam annotation: Domain name=SFT2; Domain location=1-60; Score=1.4; E_ value=4.2e-05; Accession=PF07770.4; Description=SFT2-like protein
MMFDPVRLYATAIYVGCVVLALIFALWIHDKLLTLIAIICEICALFWYSLSYIPFARRMVSDLMVKFCDTEL

SEQ ID NO: 75624 - protein, 121 aa, Setaria italica
  Transcript Sequence Number=SeqID_9650
  Gene Ontology: Mol. function=metal ion binding; Biological process =cobalamin biosynthetic process
  Homolog annotation: Hit_ID=B6T3E3; Match level="QueryCoverage=100%, HitCoverage=57%, E-value=8e-60, Identity=86%"; Hit description =Sirohydrochlorin ferrochelatase
  Pfam annotation: Domain name=CbiX; Domain location=1-92; Score=82.5; E_value=1.5e-21; Accession=PF01903.9; Description=CbiX
FVEMFRTRPCFKIFEHALQELAEPTIKDAFGKCVQQGASRIIVSPYFLSPGRHWKQDIPALAAEASKEHSNVPYIVTAPLGLHELMVDIMNDRIKYCLQHVGGDVDECTVCAGTGKCRLYS

SEQ ID NO: 75625 - protein, 47 aa, Setaria italica
  Transcript Sequence Number=SeqID_9651
LLLCFLFPSLYSHVTTWRTRRELKRNNSQNKRHLKLFKGHKEGYMRL

SEQ ID NO: 75626 - protein, 147 aa, Setaria italica
  misc_feature (129)..(129): Xaa can be any naturally occurring amino acid
  Transcript Sequence Number=SeqID_9652
  Gene Ontology: Mol. function=oxidoreductase activity, acting on the CH-NH2 group of donors, NAD or NADP as acceptor; Cellular component =chloroplast; Biological process=nitrogen compound metabolic process
  Homolog annotation: Hit_ID=A7VKB1; Match level="QueryCoverage=87%, HitCoverage=5%, E-value=7e-61, Identity=84%"; Hit description=NADH -glutamate synthase 2
  Pfam annotation: Domain name=GXGXG; Domain location=1-90; Score=-9.5; E_value=3.5e-06; Accession=PF01493.11; Description=GXGXG motif
FNGMAAERFCVRNSGAQAVVEGIGDHGCEYMTGGTVVILGKTGRNFAAGMSGGIAYVYDLDGMFSTRCNHESVDLYSVDEEDDIVTLRMMVEQHRLNTESGLAKDILSNFEDLLPKFVKVFPRDYKRVXLENMKVEKVAKEAEQKAK

SEQ ID NO: 75627 - protein, 105 aa, Setaria italica
  Transcript Sequence Number=SeqID_9653
  Subcellular localization annotation: CTP_CleavageSite=60; ConfidenceScore=5.03e-01
PNAPRRGGTGRGRIESGFRAAGAQRHQIQSAQREIRAAPTSNRTRTNTNESKSSRTGRTNQQLGRGSGETDTKTTPFSKRNSWRSPRIRREGKREGKRRTGEGGG

SEQ ID NO: 75628 - protein, 600 aa, Setaria italica
  Transcript Sequence Number=SeqID_9654
  Gene Ontology: Mol. function=protein serine/threonine kinase activity; Cellular component=plasma membrane; Biological process =protein amino acid phosphorylation
  Homolog annotation: Hit_ID=Q75I96; Match level="QueryCoverage=100%, HitCoverage=98%, E-value=0.0, Identity=83%"; Hit description =BRASSINOSTEROID INSENSITIVE 1-associated receptor kinase 1, putative, expressed
  Pfam annotation: Domain name=LRRNT_2; Domain location=8-48; Score =19.7; E_value=0.0087; Accession=PF08263.4; Description=Leucine rich repeat N-terminal domain
  Pfam annotation: Domain name=LRR_1; Domain location=100-122; Score =15.1; E_value=0.29; Accession=PF00560.25; Description=Leucine Rich Repeat
  Pfam annotation: Domain name=LRR_1; Domain location=124-146; Score =10.5; E_value=3; Accession=PF00560.25; Description=Leucine Rich Repeat
  Pfam annotation: Domain name=LRR_1; Domain location=148-167; Score =9.6; E_value=4.5; Accession=PF00560.25; Description=Leucine Rich Repeat
  Pfam annotation: Domain name=LRR_1; Domain location=52-74; Score=0.1; E_value=2.9e+02; Accession=PF00560.25; Description=Leucine Rich Repeat
  Pfam annotation: Domain name=LRR_1; Domain location=76-98; Score =13.3; E_value=0.86; Accession=PF00560.25; Description=Leucine Rich Repeat
  Pfam annotation: Domain name=Pkinase; Domain location=277-551; Score =118.2; E_value=2.6e-32; Accession=PF00069.17; Description=Protein kinase domain
  Pfam annotation: Domain name=Pkinase_Tyr; Domain location=277-551; Score=82.8; E_value=1.2e-21; Accession=PF07714.9; Description =Protein tyrosine kinase
  Pfam module annotation: Pfam domain module=LRRNT_2::LRR_1::LRR_1::LRR_ 1::LRR_1::LRR_1::Pkinase::Pkinase_Tyr; Domain location=8-48::100 -122::124-146::148-167::52-74::76-98::277-551::277-551
  Subcellular localization annotation: CTP_CleavageSite=58; ConfidenceScore=5.19e-01
SLLPFSASDRQGDALYDMKLKLNASGSQLSQSHQNQVNPCTWNSVICDNNNNVVQVTLASMGFTGVLSPRIGELEYLNVLSLPGNNITGGIPEQFGNLSRLTSLDLEDNLLVGPIPASLGQLSKLQLLILSQNYLNGSIPETLASISSLTDIRLAYNKLTGQIPPSLVIPPQLFQVARYNFSGNNLTCGANFPHTCASNVSYQGSSRGSKIGIVIGTVGGVLGLLILGTLFIICNERRKNHLREVFVDVSGEDDRRIAFGQLKRFAWRELQLATDNFSEKNVLGQGGFGKVYKGALPDGTKIAVKRLTDYESPGGEAAFLREVELISVAVHRNLLRLIGFCTTQTERLLVYPFMQNLSVAYRLREFKPGEPILDWSARKRVAIGTARGLEYLHEHCNPKIIHRDVKAANVLLDEGFEPVVGDFGLAKLVDVQKTSVTTQVRGTMGHIAPEYLSTGKSSERTDVFGYGIMLLELVTGQRAIDFSRLEEEDDVLLLDHVKKLQREGHLDAIVDRNLNRNYNGQEGEMMIQIALLCTQASPEDRPSMSEVVRMLEGEGLAERWEEWQQVEVTRRQDYERMQQRFDWGEDSIYNQDAIELSAGR

SEQ ID NO: 75629 - protein, 55 aa, Setaria italica
  misc_feature (24)..(24): Xaa can be any naturally occurring amino acid
  Transcript Sequence Number=SeqID_9655
  Gene Ontology: Mol. function=transferase activity, transferring glycosyl groups
  Homolog annotation: Hit_ID=B6TQX9; Match level="QueryCoverage=69%, HitCoverage=10%, E-value=5e-12, Identity=89%"; Hit description =Galactinol synthase 3
APPVTCVLITVLWSLVFSQDFLNXMFFREQYKPIPNVYNLVLAMLWRHPENVQLE

SEQ ID NO: 75630 - protein, 86 aa, Setaria italica
  Transcript Sequence Number=SeqID_9656
  Gene Ontology: Mol. function=glutathione transferase activity; Cellular component=cytoplasm; Biological process=auxin mediated signaling pathway
  Homolog annotation: Hit_ID=Q8GTC1; Match level="QueryCoverage=69%, HitCoverage=26%, E-value=4e-22, Identity=81%"; Hit description =Glutathione transferase F2
  Pfam annotation: Domain name=GST_N; Domain location=1-65; Score=40.2; E_value=8.2e-09; Accession=PF02798.12; Description=Glutathione S -transferase, N-terminal domain
PYVARALLALEEAGVEYELVPMSRDAGDHRRPDHLARNPFGQVPVLEDGDLTLFGKLSIALSSSDRCQSGNQSQSCNLQIMFNIRR

SEQ ID NO: 75631 - protein, 53 aa, Setaria italica
  Transcript Sequence Number=SeqID_9657
  Gene Ontology: Mol. function=transferase activity, transferring glycosyl groups
  Homolog annotation: Hit_ID=B6TQX9; Match level="QueryCoverage=96%, HitCoverage=15%, E-value=1e-14, Identity=73%"; Hit description =Galactinol synthase 3
IGYCQQCPDRVAWPTAELGPPPALYFNAGMFVHEPSRAFAVAMLGSCTNMPAL

SEQ ID NO: 75632 - protein, 83 aa, Setaria italica
  Transcript Sequence Number=SeqID_9658
  Gene Ontology: Mol. function=glutathione transferase activity; Cellular component=chloroplast; Biological process=auxin mediated signaling pathway
  Homolog annotation: Hit_ID=Q8GTC1; Match level="QueryCoverage=98%, HitCoverage=36%, E-value=6e-33, Identity=80%"; Hit description =Glutathione transferase F2
  Pfam annotation: Domain name=GST_N; Domain location=3-78; Score=83.2; E_value=9.1e-22; Accession=PF02798.12; Description=Glutathione S -transferase, N-terminal domain
MAAVMKVHGWAMSPFVSRALLCLEEAGVGYELVPMSRYAGDHHRPDHLAMNPFGQVPVLEDGDLTVFESRAIGRHVLRKYRPE

SEQ ID NO: 75633 - protein, 142 aa, Setaria italica
  Transcript Sequence Number=SeqID_9659
  Gene Ontology: Mol. function=transferase activity, transferring glycosyl groups
  Homolog annotation: Hit_ID=B6TQX9; Match level="QueryCoverage=59%, HitCoverage=24%, E-value=1e-41, Identity=90%"; Hit description =Galactinol synthase 3
  Pfam annotation: Domain name=Glyco_transf_8; Domain location=3-140; Score=-51.7; E_value=0.0075; Accession=PF01501.12; Description =Glycosyl transferase family 8
LPKTTDIWEFVEYERMVYLDADIQVFENIDELFELEKGSFYAVMDCFCEKTWSHTPQYKIGYCQQCPDRVAWPTAELGPPPALYFNAGMSVLWLARSSLQNITMRSFIFHLFLIRVPNFRSVQFAVECELTIPFQGVSVGQD

SEQ ID NO: 75634 - protein, 226 aa, Setaria italica
  misc_feature (96)..(96): Xaa can be any naturally occurring amino acid
  Transcript Sequence Number=SeqID_9660
  Gene Ontology: Mol. function=glutathione transferase activity; Biological process=auxin mediated signaling pathway
  Homolog annotation: Hit_ID=Q8GTC0; Match level="QueryCoverage=96%, HitCoverage=98%, E-value=1e-96, Identity=79%"; Hit description =Glutathione transferase F3
  Pfam annotation: Domain name=GST_C; Domain location=110-205; Score =76.2; E_value=1.2e-19; Accession=PF00043.17; Description=Glutathione S-transferase, C-terminal domain
  Pfam annotation: Domain name=GST_N; Domain location=6-81; Score=98.2; E_value=2.7e-26; Accession=PF02798.12; Description=Glutathione S -transferase, N-terminal domain
  Pfam annotation: Domain name=Glutaredoxin; Domain location=8-68; Score=7.1; E_value=0.046; Accession=PF00462.16; Description =Glutaredoxin
  Pfam module annotation: Pfam domain module=GST_C::GST_N::Glutaredoxin; Domain location=110-205::6-81::8-68
MAAANKAVKVYGWAVSPYVARALLALEEAGVEYELVPMSRDAGDHRRPDHLARNPFGQVPVLEDGDLTLFESRAIARHVLRKHKPELLGGGQPRAXAMVDVWLEVEAHQHHPAAGAIVMQCLITPLIGGERDQAVVDENAGKLRAVFEIYEARLSRSRYLAGDFVSAADLSHFPLMRYFMATEYAAMVEALPHVRAWWEDLAARPAARKVAELMPLDFGLSKKDEQ

SEQ ID NO: 75635 - protein, 287 aa, Setaria italica
  Transcript Sequence Number=SeqID_9661
MARSKNGCLKILVCAGSGSDPSAGSDADADEHPDENKAISDKSRWSFRRRSTRHRVLKNSDISEPETLSSSKAKAEITPSNNVYTSTYSYASEKPLHQDKPDEKILHEEKSEEKPLYQEMSDEKLMDKPIEKPVDKLMEEPADQINEKSIEQPAEETTETPTEESVEKITDAPTEVPAEKISEAASEDPAERIVENSIEETPEREVEELIEKPTESISVSSTVPKQEETTSLVEGSSADPEEDHMESAAAALQPGCGTDFVCCNSWPCNVMLSYFSFDVFNYYDIIS

SEQ ID NO: 75636 - protein, 265 aa, Setaria italica
  misc_feature (7)..(7): Xaa can be any naturally occurring amino acid
  misc_feature (89)..(89): Xaa can be any naturally occurring amino acid
  Transcript Sequence Number=SeqID_9662
  Homolog annotation: Hit_ID=Q9FXI5; Match level="QueryCoverage=65%, HitCoverage=21%, E-value=5e-10, Identity=34%"; Hit description =Protein IQ-DOMAIN 32
EGDGGEXIVLEIGAMENRNYVPDKANKDDSIVHSEVKNAHEVEAQPQEEEQQNGHVSDPEVEAQAQEELVQELHVEPENSDLHDHLENXVESYATPEGTPMSRATVPESHGTPSSEVSVNTKKSRSKKPKSHASKRSLASPSSDSVGRSSTDNFSKESRRAKRENSSKAAKSDHVDQEPRISNSNPLPSYMQFTESARAKASASASPKMSPDVQDSNPRKRHSLPMTNGKHDSSPRMQRSSSQAQQNVKSNSAVPHNSSDKRWHI

SEQ ID NO: 75637 - protein, 341 aa, Setaria italica
  misc_feature (273)..(273): Xaa can be any naturally occurring amino acid
  Transcript Sequence Number=SeqID_9663
  Gene Ontology: Mol. function=transferase activity, transferring glycosyl groups
  Homolog annotation: Hit_ID=B6TQX9; Match level="QueryCoverage=92%, HitCoverage=91%, E-value=1e-171, Identity=91%"; Hit description =Galactinol synthase 3
  Pfam annotation: Domain name=Glyco_transf_8; Domain location=27-272; Score=282.5; E_value=9.6e-82; Accession=PF01501.12; Description =Glycosyl transferase family 8
MAPELAGKMTAKAAAAPAVKPTTRAYVTFLAGDGDYWKGVVGLAKGLRKVGSAYPLVVAVLPDVPESHRRILVSQGCIVREIEPVYPPENQTQFAMAYYVINYSKLRIWEFVEYERMVYLDADIQVFENIDELFELEKGSFYAVMDCFCEKTWSHTPQYKIGYCQQCPDRVAWPTAELGPPPALYFNAGMFVHEPSMATAKALLDTLRVTPPTPFAEQDFLNMFFREQYKPIPNVYNLVLAMLWRHPENVQLEKVKVVHYCAAGSKPWRYTGXKEANMDREDIKMLVNKWWNIYNDESLDFKGLPALPADADEVEAVAKKPIRAALAEAGTMKYVTAPSAA

SEQ ID NO: 75638 - protein, 335 aa, Setaria italica
  misc_feature (61)..(61): Xaa can be any naturally occurring amino acid
  Transcript Sequence Number=SeqID_9664
  Gene Ontology: Mol. function=transferase activity, transferring glycosyl groups
  Homolog annotation: Hit_ID=A4PBN5; Match level="QueryCoverage=94%, HitCoverage=95%, E-value=1e-143, Identity=78%"; Hit description =Galactinol synthase
  Pfam annotation: Domain name=Glyco_transf_8; Domain location=22-268; Score=288.8; E_value=1.2e-83; Accession=PF01501.12; Description =Glycosyl transferase family 8
MGPNMSAFSSKQQASAKRRAYVTFLAGDGDYWKGVVGLAKGLRKARSAYPLVVAVLPDVPXEHRRKLREQGCVVREIQPVYPPESQTQFAMAYYVINYSKLRIWEFVEYERMVYLDADIQVYENIDHLFDLEKGRFYAVMDCFCEKTWSHTPQYKIGYCQQCPDKVTWPEHELGPPPPRYFNAGMFVHEPSLGTAKDLLDALVVTPPTPFAEQDFLNMFFRDVYEPIPPVYNLVLAMLWRHPENVKPLDKVKVVHYCAAGSKPWRYTGEEANMDREDIKMLVSKWWDIFNDESLDYKGPAVDDDGAEVVDQAREPLRQALAEAGAAKFFPAPSAA

SEQ ID NO: 75639 - protein, 747 aa, Setaria italica
  misc_feature (30)..(30): Xaa can be any naturally occurring amino acid
  misc_feature (41)..(41): Xaa can be any naturally occurring amino acid
  misc_feature (704)..(704): Xaa can be any naturally occurring amino acid
  misc_feature (735)..(735): Xaa can be any naturally occurring amino acid
  Transcript Sequence Number=SeqID_9665
  Gene Ontology: Cellular component=plasma membrane
  Homolog annotation: Hit_ID=Q9FXI5; Match level="QueryCoverage=85%, HitCoverage=72%, E-value=1e-25, Identity=31%"; Hit description =Protein IQ-DOMAIN 32
EPADQINEKSIEQPAEETTETPTEESVEKXTDAPTEVPAEXISEAASEDPAERIVENSIEETPEREVEELIEKPTESISVSSTVPKQEETTSLVEGSSADPEEDHMESAAAALQPGCGTDFARQELLNQKDLVKLQAVIRGRLVRKQASESLHCLLAIVKIQGLIRARQAQQSGGKVQETIVHSSGERLLRNGFALKLMASMPTPKSVHIKCDPSESDITWKWMERWTSLIPPISGENLPEHRENGELMGENVKEDAQHDDEVVPLDSDLSFPKLVPDDVKETLGTSDSSALEAPASIPDESSEVEIKRDPEPELIENIDRDAEQVTDQKTENPVDEFLMSSDQQSSQADASSEPIPLPEKTESPNEDSGDAYSSEKTLEMEGKRSVGRKLCNPAFAAAQLKFEELSTNSTISRSSSSSYLDGASKSRVHTPRPEEDYSSKQDNDMGLPESSVAHDAKMIIAASECGTEISISSTLDSPDRSEGDGGEIVLEIGAMENRNYVPDKANKDDSIVHSEVKNAHEVEAQPQEEEQQNGHVSDPEVEAQAQEELVQELHVEPENSDLHDHLEKPVESYATPEGTPMSRATVPESHGTPSSEVSVNTKKSRSKKPKSHASKRSLASPSSDSVGRSSTDNFSKESRRAKRENSSKAAKSDHVDQEPRISNSNPLPSYMQFTESARAKASASASPKMSPDVQDSNPRKRHXLPMTNGKHDSSPRMQRSSSQAQQNVKKQTVXVPHNSSDKRWHI

SEQ ID NO: 75640 - protein, 98 aa, Setaria italica
  Transcript Sequence Number=SeqID_9666
  Subcellular localization annotation: CTP_CleavageSite=53; ConfidenceScore=5.66e-01
SSARRSSPGSPSSPPAPAAGSAASAPAPTDRPSPPPSSRRDDQRVRGRRRACRFEYVEQDLGLIGVQFSSPSFFRSCHGRRSVNRNRNSSLVAALRKF

SEQ ID NO: 75641 - protein, 40 aa, Setaria italica
  Transcript Sequence Number=SeqID_9667
LEAVLWGIGTALGELPPYFLSRAGSVHTALHLPLSCWLTA

SEQ ID NO: 75642 - protein, 298 aa, Setaria italica
  Transcript Sequence Number=SeqID_9668
  Gene Ontology: Mol. function=transition metal ion binding; Cellular component=ER-Golgi intermediate compartment membrane; Biological process=Golgi organization and biogenesis
  Homolog annotation: Hit_ID=Q6YTV1; Match level="QueryCoverage=82%, HitCoverage=98%, E-value=1e-101, Identity=74%"; Hit description =Putative vacuole Membrane Protein 1
  Pfam annotation: Domain name=SNARE_assoc; Domain location=56-176; Score=-15.1; E_value=0.0093; Accession=PF09335.3; Description=SNARE associated Golgi protein
VLYLGPHVALFTIKAVQCGRVDLKSAPYDTILLKRMPSWLDKDCLEFGAPIYQETIPFSKILQKVYLEAVLWGIGTALGELPPYFLSRAASMSGRRIDELEDFNAPVSEGFLSSTLHRAKQWIMSHLSFAVILLLASVPNPLFDLAGILCGQFNIPFWKFFLATLIGKAIVKVCLQTTLVITLCNNQLFDLVEKRLIWAFGIVPGVASVVPSLVAKLKTAKDKFLSAHVAASASIAVKGKWNLSFTLIWNTVVWLMVINFIIQIVTSSAQGYLRTQQQLEISKKLSETKLSASEPSSR

SEQ ID NO: 75643 - protein, 131 aa, Setaria italica
  Transcript Sequence Number=SeqID_9669
  Gene Ontology: Mol. function=transferase activity, transferring glycosyl groups; Cellular component=integral to membrane; Biological process=metabolic process
  Homolog annotation: Hit_ID=B9S0A3; Match level="QueryCoverage=100%, HitCoverage=26%, E-value=1e-15, Identity=34%"; Hit description=UDP -glucosyltransferase, putative
PSNTGRIRPAVDFARKSGLPVRLVELPLDLAAEGLPDGADDVEKVPSDLWTNYFRALARLREPLERHLHAAGAPYPTCVVADFCHPWAKELAANLAVPRLSFFSMCAFCLLCQHNVERFNAYDGVADDNEP

SEQ ID NO: 75644 - protein, 72 aa, Setaria italica
  misc_feature (60)..(60): Xaa can be any naturally occurring amino acid
  Transcript Sequence Number=SeqID_9670
  Gene Ontology: Mol. function=ferrochelatase activity; Cellular component=chloroplast; Biological process=porphyrin biosynthetic process
  Homolog annotation: Hit_ID=Q0DIV0; Match level="QueryCoverage=95%, HitCoverage=12%, E-value=1e-21, Identity=76%"; Hit description =Ferrochelatase-2, chloroplastic
PLGSVEELLAAYDSKRDDLPPPVIVWEWGWTKSAETWNGRAAMLAVLALLVLEVTTGEGXSLHQWGILPPIR

SEQ ID NO: 75645 - protein, 534 aa, Setaria italica
  Transcript Sequence Number=SeqID_9671
  Gene Ontology: Mol. function=ferrochelatase activity; Cellular component=chloroplast; Biological process=porphyrin biosynthetic process
  Homolog annotation: Hit_ID=Q0DIV0; Match level="QueryCoverage=95%, HitCoverage=99%, E-value=0.0, Identity=87%"; Hit description =Ferrochelatase-2, chloroplastic
  Pfam annotation: Domain name=Ferrochelatase; Domain location=121-445; Score=633.6; E_value=2e-187; Accession=PF00762.11; Description =Ferrochelatase
GGRRHRSRGPSPTEGRRERMWSSSQASTRGVVEMGRVEAGPSHFPKRPAPRNPTRVNLSRTHAVKPCSAGDRAGISVKCNLGWSSQPSPDLKHHFIVHSSASEAVLTSQSDMRKLFVGNEKIGVLLLNLGGPETLDDVQPFLFNLFADPDIIRLPRLFRFLQKPLAKFISVVRAPKSKEGYASIGGGSPLRQITDAQAEALREALCEKDVPAKVYVGMRYWHPFTEEAIEQIKRDGITKLVVLPLYPQFSISTSGSSLRLLESIFREDEYLVNMQHTVIPSWYQREGYIKAMATLIENELTKFSEPQKVMIFFSAHGVPLAYVEEAGDPYKAEMEECIDLIMEELEKRGIMNPCILAYQSRVGPVEWLKPYTDETIIELGQKGVKSLLAVPISFVSEHIETLEEIDVEYKELALESGIKNWGRVPALGCEPTFISDLADAVIESLPYVGAMAVSNLEARQSLVPLGSVEELLAAYDSKRDELPPPVIVWEWGWTKSAETWNGRAAMLAVLALLVLEVTTGEGFLHQWGILPPIR

SEQ ID NO: 75646 - protein, 323 aa, Setaria italica
  Transcript Sequence Number=SeqID_9672
  Gene Ontology: Mol. function=nucleoside-triphosphatase activity; Cellular component=cytoplasm; Biological process=transport
  Homolog annotation: Hit_ID=B9GYH0; Match level="QueryCoverage=99%, HitCoverage=98%, E-value=1e-141, Identity=74%"; Hit description=ABC transporter family protein
  Pfam annotation: Domain name=ABC_tran; Domain location=39-224; Score =73.0; E_value=1.1e-18; Accession=PF00005.19; Description=ABC transporter
MAPTVEISHLSFTYPGIDGRPPPGAPPLIEDVCFSLDAGQRCLLLGSNGAGKTTILKILGGKHMVDPSMVRVLGRSAFHDTALTSSGDLCYLGGEWRRDVAFAGYQVNIQMDISAEKMIFGVAGVDPKRRDELIKILDIDLAWRMHKASDGQRRRVQICMGLLKPFKVLLLDEITVDLDVLARSNLLTYLKKECEERGATIIYATHIFDGLDDWPTHIIYIAHGKLQLALPLEKVKEMSQLSLMRTVESWLRKERDEDRRRRKERKEKGLPEFDKVVEGSRVIGDPAKSAARVVNNGWAAGRLTSTIAGEENFVFSSNSVLRQ

SEQ ID NO: 75647 - protein, 57 aa, Setaria italica
  misc_feature (24)..(24): Xaa can be any naturally occurring amino acid
  Transcript Sequence Number=SeqID_9673
  Homolog annotation: Hit_ID=B6SKI4; Match level="QueryCoverage=80%, HitCoverage=5%, E-value=1e-10, Identity=76%"; Hit description=ATP binding protein
NDIGSAHNMEQGDKQDIYQFRALXILLEVITGKPTDSQSELESLKALAARPPILHLH

SEQ ID NO: 75648 - protein, 68 aa, Setaria italica
  Transcript Sequence Number=SeqID_9674
  Gene Ontology: Mol. function=protein tyrosine kinase activity; Cellular component=integral to membrane; Biological process=protein amino acid phosphorylation
  Homolog annotation: Hit_ID=B6SKI4; Match level="QueryCoverage=88%, HitCoverage=7%, E-value=1e-24, Identity=90%"; Hit description=ATP binding protein
MLFFCDYPQLSEALTEDPDRLKDMADPAIQGTFAVDSLCTVAEIALNCTAGEPSDRPSIDDVIWNLQY

SEQ ID NO: 75649 - protein, 91 aa, Setaria italica
  Transcript Sequence Number=SeqID_9675
  Gene Ontology: Mol. function=protein tyrosine kinase activity; Cellular component=integral to membrane; Biological process=protein amino acid phosphorylation
  Homolog annotation: Hit_ID=B6SKI4; Match level="QueryCoverage=94%, HitCoverage=11%, E-value=1e-35, Identity=86%"; Hit description=ATP binding protein
FSLLPSAHNMEQGDKQDIYQFGLILLEVITGKPTDSQSELESLKAQLSEALTEDPDRLKDMADPAIQGTFAVDSLCTVAEIALNCTAGEPS

SEQ ID NO: 75650 - protein, 137 aa, Setaria italica
  misc_feature (41)..(41): Xaa can be any naturally occurring amino acid
  Transcript Sequence Number=SeqID_9676
  Gene Ontology: Mol. function=protein tyrosine kinase activity; Cellular component=integral to membrane; Biological process=protein amino acid phosphorylation
  Homolog annotation: Hit_ID=B6SKI4; Match level="QueryCoverage=83%, HitCoverage=14%, E-value=9e-49, Identity=78%"; Hit description=ATP binding protein
GVARGIQFLHNMTAPGIVKNDLNIENILLDKTLTSKINDFXLPIISTSKNGKIFSEIPFAVHEDNDIGSAHNMEQGDKQDIYQFGLILLEVITGKPTDSQSELESLKAQVRRKLHFLITTMSLYFSTKCCFFVIILS

SEQ ID NO: 75651 - protein, 416 aa, Setaria italica
  Transcript Sequence Number=SeqID_9677
  Gene Ontology: Mol. function=protein tyrosine kinase activity; Cellular component=chloroplast; Biological process=protein amino acid phosphorylation
  Homolog annotation: Hit_ID=B6SKI4; Match level="QueryCoverage=89%, HitCoverage=48%, E-value=1e-179, Identity=81%"; Hit description=ATP binding protein
  Pfam annotation: Domain name=Pkinase; Domain location=129-392; Score=- 48.9; E_value=1.4e-05; Accession=PF00069.17; Description=Protein kinase domain
  Pfam annotation: Domain name=Pkinase_Tyr; Domain location=119-392; Score=-91.7; E_value=1.3e-07; Accession=PF07714.9; Description =Protein tyrosine kinase
  Pfam module annotation: Pfam domain module=Pkinase::Pkinase_Tyr; Domain location=129-392::119-392
GTRGRGKGTDEEYGMILAIAGAVVGGALLIALVMVVVLRRARTRHPEVSVLPKSPAAAPAKKADGWKAPAKATQKIITPADKRHASQAARVNTLEVPAYRVYTLEELQEATNNFSSSNMIKTSPLAQHYNGQLQDGSRVLVRCLRLKPKYSPQSLAPYMEIISKLRHRHLVSIIGHCIVGDQENPNIASSVYLISECVTNGSLRSHLTEWRRREMLKWPQRVSAVTGVARGIQFLHNMTAPGIVKNDLNIENILLDKTLTSKINDFNLPIISTSKNGKIFSEIPFAVHEDNDIGSAHNMEQGDKQDIYQFGLILLEVITGKPTDSQSELESLKAQLSEALTEDPDRLKDMADPAIQGTFAVDSLCTVAEIALNCTAGEPSDRPSIDDVIWNLQYSMQVQDGWASSESLGLSVKSQG

SEQ ID NO: 75652 - protein, 57 aa, Setaria italica
  Transcript Sequence Number=SeqID_9678
LISMTSPSGKKNADGHLYSGTETRVFSISIVSSQQPAGEGAAATTTNKILKGTTNLR

SEQ ID NO: 75653 - protein, 209 aa, Setaria italica
  Transcript Sequence Number=SeqID_9679
  Gene Ontology: Mol. function=ATPase activity, coupled to transmembrane movement of substances; Cellular component=integral to membrane; Biological process=transport
  Homolog annotation: Hit_ID=Q8GU65; Match level="QueryCoverage=100%, HitCoverage=13%, E-value=6e-94, Identity=79%"; Hit description=MRP -like ABC transporter
LRLSTGSRRAHGAGAIINYMEVDAQEVANVTHQLHNLWLMPLQIAVALALLYTHLGPAVLTAVAAITVVTVAVAFANKLNIEYQFMFLGKRDERMKAITELLNYIRVIKLQAWEETFGDKIRKLREEELGWLAKSMYFMCANTIVIWSGPLAMTVLVFGTCVLTSVELDAGKVFTATAFFKTLDAPMQSFPEAIAAVTQATVSVGRLDR

SEQ ID NO: 75654 - protein, 185 aa, Setaria italica
  misc_feature (12)..(12): Xaa can be any naturally occurring amino acid
  Transcript Sequence Number=SeqID_9680
  Gene Ontology: Mol. function=acyl carrier activity; Cellular component=chloroplast; Biological process=fatty acid biosynthetic process
  Pfam annotation: Domain name=Acyl-ACP_TE; Domain location=3-182; Score=182.8; E_value=1e-51; Accession=PF01643.9; Description=Acyl -ACP thioesterase
SSRDLANGEVIXGRATSKWVMMSQNTRRLQRVSDDVRDEVFIHCPKTPRLAFPEENNGSLKKIPILSDPAQYSRLGLVPRRADLDMNQHVNNVTYIGWVLESIPQDIIDTHELQTITLDYRRECQHDDIVDSLTYIEEGEEKSMNGSASAAQHKEEQQQFLHCLRFARNGDEINRGRTVWRKLAR

SEQ ID NO: 75655 - protein, 310 aa, Setaria italica
  Transcript Sequence Number=SeqID_9681
  Gene Ontology: Mol. function=acyl carrier activity; Cellular component=chloroplast; Biological process=fatty acid biosynthetic process
  Pfam annotation: Domain name=Acyl-ACP_TE; Domain location=21-292; Score=498.4; E_value=9.5e-147; Accession=PF01643.9; Description=Acyl- ACP thioesterase
GGGARPNLAERLRLGSLLEDGLSYKESFIVRCYEVGINKTATVETIANLLQEVGCNHAQSVGFSTDGFATTTTMRKLGLIWVTNRMHIEIYKYPAWGDVVEIETWCQEDGRIGTRRDWILKDLANGEVIGRATSKWVMMSQNTRRLQRVSDDVRDEVFIHCPKTPRLAFPEENNGSLKKIPILSDPAQYSRLGLVPRRADLDMNQHVNNVTYIGWVLESIPQDIIDTHELQTITLDYRRECQHDDIVDSLTYIEEGEEKSMNGSASAAQHDGAAAVRYYNARPKNGSSVFHSFLGRYHACNNIPCHICMS

SEQ ID NO: 75656 - protein, 68 aa, Setaria italica
  Transcript Sequence Number=SeqID_9682
PLTKGTPSWAATKESWFSGDGYEGAAETRKHAVVRRRRMGLLMMLRLLKKLFLAHKSGAAPSRKTPPI

SEQ ID NO: 75657 - protein, 155 aa, Setaria italica
  Transcript Sequence Number=SeqID_9683
  Subcellular localization annotation: CTP_CleavageSite=82; ConfidenceScore=5.06e-01
FFFWLSSALGTTRDSTPINRIINATSPVQWTHTTLKHCVCVLHFHFPSSGSSLHIGRGATKSIALLSSACFILDNAAGSLLVEDAVSTFTALDDISWLQGVLSSAISAEVADGLRLLRVHGSGDLGFPAAGMVRGEGRTGGRVLGFLSSPSKQRT

SEQ ID NO: 75658 - protein, 124 aa, Setaria italica
  Transcript Sequence Number=SeqID_9684
  Gene Ontology: Mol. function=binding; Cellular component =mitochondrial inner membrane; Biological process=transport
  Homolog annotation: Hit_ID=B9SZ46; Match level="QueryCoverage=100%, HitCoverage=30%, E-value=6e-54, Identity=79%"; Hit description =Protein brittle-1, chloroplast, putative
  Pfam annotation: Domain name=Mito_carr; Domain location=36-124; Score= 73.2; E_value=9.6e-19; Accession=PF00153.19; Description =Mitochondrial carrier protein
DRLKMAYLHSPEGKKRVSMMKQQKQEANALDQLELGTVRTLLYGAIAGCCAEAATYPFEVVRRQLQMQVKATRMNAFATCLKIVDQGGVPALYAGLIPSLLQVLPSASISYFVYELMKIVMKVE

SEQ ID NO: 75659 - protein, 227 aa, Setaria italica
  Transcript Sequence Number=SeqID_9685
  Gene Ontology: Mol. function=binding; Cellular component =mitochondrial inner membrane; Biological process=transport
  Homolog annotation: Hit_ID=B9SZ46; Match level="QueryCoverage=88%, HitCoverage=49%, E-value=2e-88, Identity=77%"; Hit description =Protein brittle-1, chloroplast, putative
  Pfam annotation: Domain name=Mito_carr; Domain location=127-216; Score=93.9; E_value=5.6e-25; Accession=PF00153.19; Description =Mitochondrial carrier protein
  Pfam annotation: Domain name=Mito_carr; Domain location=34-121; Score= 74.7; E_value=3.4e-19; Accession=PF00153.19; Description =Mitochondrial carrier protein
  Pfam module annotation: Pfam domain module=Mito_carr::Mito_carr; Domain location=127-216::34-121
KKAVEEVALAEGGVLVLQEKEKEKDVRAGAGAMNMTKHLWAGAVAAMVSRTLVAPLERLKLEYIVRGEQRNLFELMHAIATTQGLKGFWKGNFVNILRTAPFKAVNFYAYDTYRKQLHKWSGNEETTNFERFIAGAFAGVTATMMCIPMDTIRTRMVAPGGEALGGVIGVARHMIQTEGFFSLYKGLVPSLISMAPSGAVFYGVYDILKMAYLHSPEGKKRVIDDET

SEQ ID NO: 75660 - protein, 159 aa, Setaria italica
  Transcript Sequence Number=SeqID_9686
  Homolog annotation: Hit_ID=UPI00001634E0; Match level="QueryCoverage =73%, HitCoverage=10%, E-value=7e-23, Identity=48%"; Hit description =pentatricopeptide (PPR) repeat-containing protein
  Pfam annotation: Domain name=DUF1685; Domain location=7-126; Score =118.2; E_value=2.8e-32; Accession=PF07939.3; Description=Protein of unknown function (DUF1685)
  Subcellular localization annotation: CTP_CleavageSite=48; ConfidenceScore=5.58e-01
MEAVSSTAYFSSQPQLPASTAGDPATPIASASRLVRQPRRNSSFVTVEASSGTGGDGVVRTRSLTEDDLEELKGCLDLGFGFAYSEIPELCGTLPALELCYSMTRRFLDEQREPGQEQETSATPLPNWRISGPGDDPEEVKARLKYWAQAVACTVKLCS

SEQ ID NO: 75661 - protein, 762 aa, Setaria italica
  Transcript Sequence Number=SeqID_9687
  Homolog annotation: Hit_ID=B9S250; Match level="QueryCoverage=74%, HitCoverage=67%, E-value=2e-81, Identity=37%"; Hit description=ATP binding protein, putative
  Pfam annotation: Domain name=Cast; Domain location=2-683; Score= -274.2; E_value=0.017; Accession=PF10174.1; Description=RIM-binding protein of the cytomatrix
  Pfam annotation: Domain name=DUF827; Domain location=74-502; Score= -95.8; E_value=0.003; Accession=PF05701.3; Description=Plant protein of unknown function (DUF827)
  Pfam annotation: Domain name=DUF869; Domain location=268-663; Score= -293.2; E_value=0.099; Accession=PF05911.3; Description=Plant protein of unknown function (DUF869)
  Pfam annotation: Domain name=Myosin_tail_1; Domain location=50-721; Score=-520.7; E_value=0.082; Accession=PF01576.11; Description =Myosin tail
  Pfam annotation: Domain name=Pox_A_type_inc; Domain location=163-185; Score=4.5; E_value=21; Accession=PF04508.4; Description=Viral A-type inclusion protein repeat
  Pfam annotation: Domain name=Pox_A_type_inc; Domain location=398-420; Score=7.4; E_value=7.9; Accession=PF04508.4; Description=Viral A-type inclusion protein repeat
  Pfam annotation: Domain name=Pox_A_type_inc; Domain location=489-511; Score=12.3; E_value=1.5; Accession=PF04508.4; Description=Viral A -type inclusion protein repeat
  Pfam annotation: Domain name=Strep_SA_rep; Domain location=366-390; Score=6.7; E_value=9.7; Accession=PF06696.3; Description =Streptococcal surface antigen repeat
  Pfam annotation: Domain name=Strep_SA_rep; Domain location=584-608; Score=0.4; E_value=1e+02; Accession=PF06696.3; Description =Streptococcal surface antigen repeat
  Pfam annotation: Domain name=Strep_SA_rep; Domain location=612-636; Score=6.4; E_value=11; Accession=PF06696.3; Description =Streptococcal surface antigen repeat
  Pfam annotation: Domain name=Strep_SA_rep; Domain location=88-112; Score=4.4; E_value=22; Accession=PF06696.3; Description =Streptococcal surface antigen repeat
  Pfam module annotation: Pfam domain module=Cast::DUF827::DUF869::Myosi n_tail_1::Pox_A_type_inc::Pox_A_type_inc::Pox_A_type_inc::Strep_SA _rep::Strep_SA_rep::Strep_SA_rep::Strep_SA_rep; Domain location=2 -683::74-502::...
  Pfam module annotation: Domain location=268-663::50-721::163-185::398- 420::489-511::366-390::584-608::612-636::88-112
  Subcellular localization annotation: CTP_CleavageSite=82; ConfidenceScore=5.57e-01
MLGGRPKSAAAEAKSGKVTPPTPKGGRASKPASAKPANGTPPQAPRAADRSPRSGDKPPSGDRRTPKVFDRLSTPPAEKQSSAMKLSQELQAQLAAVQEELVKAKEQLVEKEKEKGKVLEELEDAKRLADEANANLMVALAARKKAEEASETEMFRAVELEQTSIESMQKKEEELQRKLESMRSQQESDAAALRSTVEQLEKARYELADAIDAKNLALNQVDDATRLSEVNAHKVELLNAEVTRLKELLDTELESKEKEGAKQIMRLEAEVSALKIELQKAKDAEEKVAELEDVIEGLRVDVANATKARTEAEEQADEWKQKAEILEIKLEAANQSYMLKVDSLNSVMKELDEASTLLTEKECELSDLQNKLQALEDEVARQNEDINASDERLDVAEKEAIELREEINELQSKLQALEEEKMDAINNENNASSQMESICEEKDKLAQELEASKDEYEKVKKAMEDLASALHEMSGEAREARERYLNKQEEIERAKAQIEELNINLKNTQENYEVMLDEANYERVCLKKTVERMEAEAKNTSEEWQSKEVSFMSSIKKSEEEISAMRVEMDKATETARDWENRNAELEEKLKELEAQVEEANRAKDEAKAEALEWKEKLLDKENELQNIKQENDELQVKESTASEKLKELSSMVGNAKDRVLNGTGPKDENEKGNTKEDDPVVVVAKMWENSKVTDYDLSTEKEKDGESELDLESNKGDAASDCHRLSTDTRMNNNTKLIKQQQPKKPLMKKFGGLLKKRSQH

SEQ ID NO: 75662 - protein, 46 aa, Setaria italica
  misc_feature (26)..(26): Xaa can be any naturally occurring amino acid
  Transcript Sequence Number=SeqID_9688
ALAKLSIGLMSKFCRFYDFEKFHNVXSGWLVLLLSSCIIASILIIQ

SEQ ID NO: 75663 - protein, 94 aa, Setaria italica
  Transcript Sequence Number=SeqID_9689
  Gene Ontology: Mol. function=oxidoreductase activity, acting on the CH-OH group of donors, NAD or NADP as acceptor; Biological process =oxidation reduction
  Homolog annotation: Hit_ID=B9RLR7; Match level="QueryCoverage=100%, HitCoverage=19%, E-value=9e-41, Identity=81%"; Hit description=UDP -glucose 6-dehydrogenase, putative
  Pfam annotation: Domain name=UDPG_MGDP_dh_C; Domain location=1-90; Score=23.4; E_value=2.6e-06; Accession=PF03720.7; Description=UDP -glucoseGDP-mannose dehydrogenase family, UDP binding domain
DVCKGLLGGQGPRSASTTPTVTEDQIQRDLAMNKFDWDHPMHLQPTSPTAVKQVSCVWDAYEATKGAHGLCILTEWDEFKTLDYQKIFDNMQKP

SEQ ID NO: 75664 - protein, 169 aa, Setaria italica
  misc_feature (152)..(152): Xaa can be any naturally occurring amino acid
  Transcript Sequence Number=SeqID_9690
  Gene Ontology: Mol. function=oxidoreductase activity, acting on the CH-OH group of donors, NAD or NADP as acceptor; Biological process =oxidation reduction
  Homolog annotation: Hit_ID=Q6IVK7; Match level="QueryCoverage=99%, HitCoverage=30%, E-value=6e-81, Identity=89%"; Hit description =Putative UDP-glucose dehydrogenase 1
  Pfam annotation: Domain name=UDPG_MGDP_dh_N; Domain location=1-121; Score=63.7; E_value=7e-16; Accession=PF03721.6; Description=UDP -glucoseGDP-mannose dehydrogenase family, NAD binding domain
DIIFVSVEHPTKTRGLGAGKAADLTYWESAARMISDVSKSDKIVVEKSTVPVKTAEAIEKILTHNSKGINYQILSNPEFLAEGTAIEDLFKPDRVLIGGRETPEGRKAVQALKDVYAHWVPEDRILTTNLWSAELSKLAANAFLAQRYSSFXSNVLFSALCEATGANVY

SEQ ID NO: 75665 - protein, 239 aa, Setaria italica
  misc_feature (175)..(175): Xaa can be any naturally occurring amino acid
  misc_feature (229)..(229): Xaa can be any naturally occurring amino acid
  Transcript Sequence Number=SeqID_9691
  Gene Ontology: Mol. function=oxidoreductase activity, acting on the CH-OH group of donors, NAD or NADP as acceptor; Biological process =metabolic process
  Homolog annotation: Hit_ID=Q6IVK7; Match level="QueryCoverage=97%, HitCoverage=42%, E-value=1e-121, Identity=90%"; Hit description =Putative UDP-glucose dehydrogenase 1
  Pfam annotation: Domain name=UDPG_MGDP_dh; Domain location=38-135; Score=190.1; E_value=6.1e-54; Accession=PF00984.11; Description=UDP -glucoseGDP-mannose dehydrogenase family, central domain
  Pfam annotation: Domain name=UDPG_MGDP_dh_C; Domain location=157-237; Score=36.0; E_value=1.3e-07; Accession=PF03720.7; Description=UDP -glucoseGDP-mannose dehydrogenase family, UDP binding domain
  Pfam module annotation: Pfam domain module=UDPG_MGDP_dh::UDPG_MGDP_dh_ C; Domain location=38-135::157-237
GCLHSVGRETPEGRKAVQALKDVYAHWVPEDRILTTNLWSAELSKLAANAFLAQRISSVNAISALCEATGANVTEVAYAVGKDTRIGPKFLNASVGFGGSCFQKDILNLVYICECNGLPEVANYWKQVIKINDYQKSRFVNRVVSSMFNTVAGKKIAVLGFAFKKDTGDTRETPXAIDVCKGLLGDKAQISIYDPQVTEDQIQRDLAMNKFDWDHPMHLQPTSPTAVKXQVSCVWDAYE

SEQ ID NO: 75666 - protein, 481 aa, Setaria italica
  misc_feature (180)..(180): Xaa can be any naturally occurring amino acid
  misc_feature (346)..(346): Xaa can be any naturally occurring amino acid
  Transcript Sequence Number=SeqID_9692
  Gene Ontology: Mol. function=oxidoreductase activity, acting on the CH-OH group of donors, NAD or NADP as acceptor; Biological process =oxidation reduction
  Homolog annotation: Hit_ID=Q6IVK7; Match level="QueryCoverage=99%, HitCoverage=87%, E-value=0.0, Identity=91%"; Hit description =Putative UDP-glucose dehydrogenase 1
  Pfam annotation: Domain name=UDPG_MGDP_dh; Domain location=209-306; Score=192.7; E_value=9.9e-55; Accession=PF00984.11; Description=UDP -glucoseGDP-mannose dehydrogenase family, central domain
  Pfam annotation: Domain name=UDPG_MGDP_dh_C; Domain location=328-453; Score=164.0; E_value=4.4e-46; Accession=PF03720.7; Description=UDP -glucoseGDP-mannose dehydrogenase family, UDP binding domain
  Pfam annotation: Domain name=UDPG_MGDP_dh_N; Domain location=2-200; Score=332.2; E_value=1e-96; Accession=PF03721.6; Description=UDP -glucoseGDP-mannose dehydrogenase family, NAD binding domain
  Pfam module annotation: Pfam domain module=UDPG_MGDP_dh::UDPG_MGDP_dh_ C::UDPG_MGDP_dh_N; Domain location=209-306::328-453::2-200
MVKICCIGAGYVGGPTMAVIALKCPAIEVVVVDISKPRIEAWNSDQLPIYEPGLDDVVKQCRGRNLFFSTDVEKHVAEANIIFVSVNTPTKTRGLGAGKAADLTYWESAARMIADVSKSDKIVVEKSTVPVKTAEAIEKILTHNSKGINYQILSNPEFLAEGTAIEDLFKPDRVLIGGRXTPEGRKAVQALKDVYAHWVPEDRILTTNLWSAELSKLAANAFLAQRISSVNAISALCEATGANVSEVAYAVGKDSRIGPKFLNASVGFGGSCFQKDILNLVYICECNGLPEVANYWKQVIKINDYQKSRFVNRVVSSMFNTVAGKKIAVLGFAFKKDTGDTRETPXAIDVCKGLLGDKAQISIYDPQVTEDQIQRDLAMNKFDWDHPMHLQPTSPSAVKQVSMVWDAYEATKDAHGLCILTEWDEFKTLDYQKIFDNMQKPAFVFDGRNIVDSEKLREIGFIVYSIGKPLDAWLKDMPAVA

SEQ ID NO: 75667 - protein, 430 aa, Setaria italica
  misc_feature (13)..(13): Xaa can be any naturally occurring amino acid
  misc_feature (206)..(206): Xaa can be any naturally occurring amino acid
  Transcript Sequence Number=SeqID_9693
  Gene Ontology: Mol. function=oxidoreductase activity, acting on the CH-OH group of donors, NAD or NADP as acceptor; Biological process =oxidation reduction
  Homolog annotation: Hit_ID=Q6IVK7; Match level="QueryCoverage=100%, HitCoverage=78%, E-value=0.0, Identity=90%"; Hit description =Putative UDP-glucose dehydrogenase 1
  Pfam annotation: Domain name=UDPG_MGDP_dh; Domain location=211-308; Score=190.1; E_value=6.1e-54; Accession=PF00984.11; Description=UDP -glucoseGDP-mannose dehydrogenase family, central domain
  Pfam annotation: Domain name=UDPG_MGDP_dh_C; Domain location=330-430; Score=100.1; E_value=7.5e-27; Accession=PF03720.7; Description=UDP -glucoseGDP-mannose dehydrogenase family, UDP binding domain
  Pfam annotation: Domain name=UDPG_MGDP_dh_N; Domain location=2-201; Score=325.6; E_value=1e-94; Accession=PF03721.6; Description=UDP -glucoseGDP-mannose dehydrogenase family, NAD binding domain
  Pfam module annotation: Pfam domain module=UDPG_MGDP_dh::UDPG_MGDP_dh_ C::UDPG_MGDP_dh_N; Domain location=211-308::330-430::2-201
MVKICCIGAGYVXGGPTMAVIALKCPDIEVVVVDISKPRIEAWNSDTLPIYEPGLDDVVKQCRGKNLFFSTDVEKHVAEADIIFVSVNTPTKTRGLGAGKAADLTYWESAARMIADVSKSDKIVVEKSTVPVKTAEAIEKILTHNSKGINYQILSNPEFLAEGTAIEDLFKPDRVLIGGRETPEGRKAVQALKDVYAHWVPEDRYXSTTNLWSAELSKLAANAFLAQRISSVNAISALCEATGANVTEVAYAVGKDTRIGPKFLNASVGFGGSCFQKDILNLVYICECNGLPEVANYWKQVIKINDYQKSRFVNRVVSSMFNTVAGKKIAVLGFAFKKDTGDTRETPAIDVCKGLLGDKAQISIYDPQVTEDQIQRDLAMNKFDWDHPMHLQPTSPTAVKQVSCVWDAYEATKGAHGLCILTEWDEFKTL

SEQ ID NO: 75668 - protein, 466 aa, Setaria italica
  misc_feature (17)..(17): Xaa can be any naturally occurring amino acid
  misc_feature (25)..(25): Xaa can be any naturally occurring amino acid
  misc_feature (43)..(43): Xaa can be any naturally occurring amino acid
  misc_feature (70)..(70): Xaa can be any naturally occurring amino acid
  misc_feature (220)..(220): Xaa can be any naturally occurring amino acid
  misc_feature (330)..(330): Xaa can be any naturally occurring amino acid
  misc_feature (372)..(372): Xaa can be any naturally occurring amino acid
  Transcript Sequence Number=SeqID_9694
  Gene Ontology: Mol. function=oxidoreductase activity, acting on the CH-OH group of donors, NAD or NADP as acceptor; Biological process =oxidation reduction
  Homolog annotation: Hit_ID=Q6IVK7; Match level="QueryCoverage=99%, HitCoverage=83%, E-value=0.0, Identity=88%"; Hit description =Putative UDP-glucose dehydrogenase 1
  Pfam annotation: Domain name=UDPG_MGDP_dh; Domain location=189-290; Score=148.6; E_value=1.9e-41; Accession=PF00984.11; Description=UDP -glucoseGDP-mannose dehydrogenase family, central domain
  Pfam annotation: Domain name=UDPG_MGDP_dh_C; Domain location=312-438; Score=169.5; E_value=9.7e-48; Accession=PF03720.7; Description=UDP -glucoseGDP-mannose dehydrogenase family, UDP binding domain
  Pfam annotation: Domain name=UDPG_MGDP_dh_N; Domain location=1-180; Score=241.0; E_value=2.9e-69; Accession=PF03721.6; Description=UDP -glucoseGDP-mannose dehydrogenase family, NAD binding domain
  Pfam module annotation: Pfam domain module=UDPG_MGDP_dh::UDPG_MGDP_dh_ C::UDPG_MGDP_dh_N; Domain location=189-290::312-438::1-180
LKCPDIEVVVVDISKPXIEAWNSDXLPIYEPGLDDVVKQCRGXNLFFSTDVEKHVAEADIIFVSVNTPTXKTRGLGAGKAADLTYWESAARMIADVSKSDKIVVEKSTVPVKTAEAIEKILTHNSKGINYQILSNPEFLAEGTAIEDLFKPDRVLIGGRETPEGRKAVQALKDVYAHWVPEDRILTTNLWSAELSKLAANAFLAQRISSVQTTNTTDNYXTKATGANVTEVAYAVGKDTRIGPKFLNASVGFGGSCFQKDILNLVYICECNGLPEVANYWKQVIKINDYQKSRFVNRVVSSMFNTVAGKKIAVLGFAFKKDTGDTRETPXAIDVCKGLLGDKAQISIYDPQVTEDQIQRDLAMNKFDWDHPXLHLQPTSPTAVKQVSCVWDAYEATKGAHGLCILTEWDEFKTLDYQKIFDNMQKPAFVFDGRNIVDPEKLREIGFIVYSIGKPLDAWLKDMPAVA

SEQ ID NO: 75669 - protein, 93 aa, Setaria italica
  Transcript Sequence Number=SeqID_9695
TLAYLQKDAKALAGGEVLIGANGHWNSRKDRNTPANLILSSRVALPLARCHRHHVLLPAASCTTAPSLLPSPHVAVDSSSAAAFVSLTLPDRT

SEQ ID NO: 75670 - protein, 80 aa, Setaria italica
  Transcript Sequence Number=SeqID_9696
  Gene Ontology: Mol. function=hydrolase activity, acting on glycosyl bonds; Biological process=polysaccharide catabolic process
  Homolog annotation: Hit_ID=B4FJF7; Match level="QueryCoverage=100%, HitCoverage=23%, E-value=3e-28, Identity=77%"; Hit description=Beta -amylase
QVVATAAEKAEEERMVAFTYLRMGPDLFQPDNWRRFAAFVKRMSGAGKRDMCREQVEREASGVAHATQPLVQEAAVALTN

SEQ ID NO: 75671 - protein, 41 aa, Setaria italica
  Transcript Sequence Number=SeqID_9697
LRFLLTNLLKQTPNRHVNKILSYSIEFIFQVSSKTVQLLYM

SEQ ID NO: 75672 - protein, 131 aa, Setaria italica
  misc_feature (113)..(113): Xaa can be any naturally occurring amino acid
  misc_feature (122)..(122): Xaa can be any naturally occurring amino acid
  Transcript Sequence Number=SeqID_9698
  Gene Ontology: Mol. function=RNA binding; Cellular component =ribonucleoprotein complex; Biological process=regulation of translation
  Homolog annotation: Hit_ID=Q9FYT6; Match level="QueryCoverage=100%, HitCoverage=18%, E-value=1e-49, Identity=82%"; Hit description =Chloroplastic group IIA intron splicing facilitator CRS1, chloroplastic
  Pfam annotation: Domain name=CRS1_YhbY; Domain location=45-129; Score= 72.0; E_value=2.2e-18; Accession=PF01985.13; Description=CRS1  YhbY domain
EQAREAVEKGKARAVPWAAARDEGLKVALRREKKAREPTRAEAELEAGELDRLQRLARGMGRWARAKKAGVTDEVVEDLRREWARGEELAAVRIVEPLRRNMDRAREILEIKXGGLVIWTKXDIHFVYRGS

SEQ ID NO: 75673 - protein, 116 aa, Setaria italica
  misc_feature (34)..(34): Xaa can be any naturally occurring amino acid
  Transcript Sequence Number=SeqID_9699
IVHVHMPVSQFTVSSRVHSGMEWRQSKISLPDEXKTEAILAACYPLNNLLTPSIIHSRLDAKIEISSSTVSTCIVMTQPKVQNTSLSSLFAWFTPKKITGQNAQTRGGRLSSHWSP

SEQ ID NO: 75674 - protein, 720 aa, Setaria italica
  misc_feature (507)..(507): Xaa can be any naturally occurring amino acid
  Transcript Sequence Number=SeqID_9700
  Gene Ontology: Mol. function=protein serine/threonine kinase activity; Biological process=protein amino acid phosphorylation
  Homolog annotation: Hit_ID=Q650V1; Match level="QueryCoverage=100%, HitCoverage=90%, E-value=0.0, Identity=74%"; Hit description =Putative serine/threonine-specific protein kinase
  Pfam annotation: Domain name=Pkinase; Domain location=414-704; Score =203.7; E_value=5.1e-58; Accession=PF00069.17; Description=Protein kinase domain
  Pfam annotation: Domain name=Pkinase_Tyr; Domain location=414-704; Score=242.0; E_value=1.4e-69; Accession=PF07714.9; Description =Protein tyrosine kinase
  Pfam module annotation: Pfam domain module=Pkinase::Pkinase_Tyr; Domain location=414-704::414-704
WAQQAEETYQLQLALALRLCADAACAADPGFLDPGETGSGRGSGNGRAFPLAHPAPSPESLSHRFWVNGSLSYNSTIPDGFYVIHGMDPFVWSLCTDIHEENRIPSMESLKSVLPDDSSIQAILIDRRTDFDLGMLESYASSLSSSCTDAKDVVTQLAKVVSSRMGGTTSNEENLLPRWKECNEAIKSSAGSVVLHLGKLPVGLCKHRSLLFKMLADKVSIPCRVVKGCKYCKSDDASSCLVRFGLEREYLVDLIGDPGQLSDPDSFVNGPYSLSVSSPLHPPKFRSLEITSNFSSVAKQYFSDCHSLNLLFSDSSTGAATSAVTTLDQPYSKKHIAGDEIINSWMPGKGQAAIKPDIIVPEAPREVLPLITSSNIKLDKKKELKLIEETQHLRHTVSDLSLAADDLIIPWNELILKEKIGAGSFGTVHRADWHGSDVAVKILMEQDFHPERFREFMREVAIMKSLRHPNIVLFMGAVTEPPNLSIVTEYLSRLGSSFWLYLCLSLXYDIIIVYPLGCFQQVMPFFHCRGSLYKLLHRSGAKEVLDERRRLNMAFDVAKGMNYLHRRSPPIVHRDLKSPNLLVDKKYTVKVCDFGLSRLKANTFLSSKSLAGTPEWMAPEVLRDEPSNEKSDVYSFGVILWELMTLQQPWCNLNPAQVVAAVGFKGRRLEIPKDLNPLVAALIESCWANEPWRRPSFTNIMEALRPLIKVPVPQLIRSDS

SEQ ID NO: 75675 - protein, 87 aa, Setaria italica
  Transcript Sequence Number=SeqID_9701
  Gene Ontology: Mol. function=protein serine/threonine kinase activity; Cellular component=myosin complex; Biological process =protein amino acid phosphorylation
  Homolog annotation: Hit_ID=Q650V1; Match level="QueryCoverage=100%, HitCoverage=11%, E-value=4e-42, Identity=90%"; Hit description =Putative serine/threonine-specific protein kinase
YSFGVILWELMTLQQPWCNLNPAQVVAAVGFKGRRLEIPKDLNPLVAALIESCWANEPWRRPSFTNIMEALRPLIKVPVPQLIRSDS

SEQ ID NO: 75676 - protein, 260 aa, Setaria italica
  Transcript Sequence Number=SeqID_9702
  Gene Ontology: Mol. function=ubiquitin thiolesterase activity; Cellular component=SAGA complex; Biological process=ubiquitin -dependent protein catabolic process
  Homolog annotation: Hit_ID=Q25AN5; Match level="QueryCoverage=100%, HitCoverage=46%, E-value=1e-133, Identity=88%"; Hit description =H0811D08.10 protein
  Pfam annotation: Domain name=UCH; Domain location=53-244; Score=10.0; E_value=6.5e-08; Accession=PF00443.21; Description=Ubiquitin carboxyl- terminal hydrolase
HKSHAQGHGDCCIAHRVFSGILRSDVTCTSCGFTSTTFEPCMDISLDLDVGDNSSFGVANTKPHARNGERSSAGVNSKVSTLMRCLERFTRAERLDAEQKFFCERCNERQESLKQMSIRRLPLVSCFHIKRFEHSSVKKVSRKVDHCLQFPFSLDMAPYLSSSILRSRYGNRIFPAEASDADAVSELSSEFEIFAVITHSGKLEAGHYVTYLRLNNHWYKCDDAWVTRVEEHTVRTSQAYMLFYVQKTLYYKACERAAAV

SEQ ID NO: 75677 - protein, 99 aa, Setaria italica
  Transcript Sequence Number=SeqID_9703
TFGHYLMLAAGSSLHAAQCSRYTECLKYCLHRSAFHLTLSRCFKCSLCRICYLIPIGSLYLAQLSPVFMPPCIVCTEYLQILTGFSLFYNLSIAYFGTY

SEQ ID NO: 75678 - protein, 91 aa, Setaria italica
  Transcript Sequence Number=SeqID_9704
  Subcellular localization annotation: CTP_CleavageSite=48; ConfidenceScore=5.11e-01
LFNSCQPQLLYLPHDLPSLSLTHSDDRIARKSRFPRLPQTPPPLEAPPAVVSPNSIPQRQSFLASIRTLLSTYLHESMPRMAGTKVFPTRN

SEQ ID NO: 75679 - protein, 131 aa, Setaria italica
  Transcript Sequence Number=SeqID_9705
  Gene Ontology: Mol. function=catalytic activity; Cellular component =chloroplast envelope; Biological process=metabolic process
  Subcellular localization annotation: CTP_CleavageSite=12; ConfidenceScore=5.12e-01
NVKNAETPNTSTATANSSRSPLQGKNMAAIISIAICFLHGIVSRRMQLMNLPPWISNGITSLPFACISDPTRKPMPLKLDVTFPPLPDVRWSISRLYYLFNSQLERNIVLSIVTLLITCFSFVIVGGLLFH

SEQ ID NO: 75680 - protein, 36 aa, Setaria italica
  Transcript Sequence Number=SeqID_9706
  Gene Ontology: Mol. function=protein dimerization activity
  Homolog annotation: Hit_ID=Q3LAG0; Match level="QueryCoverage=94%, HitCoverage=4%, E-value=1e-09, Identity=82%"; Hit description =Transposase-related protein w-gary2
SCKSAFTSSGPVIPKHHSTLSIKTIEALVCTRDWMR

SEQ ID NO: 75681 - protein, 502 aa, Setaria italica
  Transcript Sequence Number=SeqID_9707
  Gene Ontology: Mol. function=protein dimerization activity; Cellular component=nucleus; Biological process=regulation of RNA metabolic process
  Homolog annotation: Hit_ID=Q3LAG0; Match level="QueryCoverage=100%, HitCoverage=60%, E-value=0.0, Identity=70%"; Hit description =Transposase-related protein w-gary2
  Pfam annotation: Domain name=hATC; Domain location=419-501; Score =105.7; E_value=1.5e-28; Accession=PF05699.6; Description=hAT family dimerisation domain
RFVKKPQTPMVNAVSHNDMEGHCCALFQKEKANLKNKLALSSRRVSLSASIWTPDGAEPAVNYLCLTAHFIDKDWKVNRMIIKFGMFQSSPANVERMIHCKEACVPESESGAYNVIWDAIRDWNLDQKLLSLTYVGEVRDDTSTSKLKETLVEKKCLPIRGKIYDIACVDDFLNSIVSEVQQNIIHLVSDMVTEFFGVHTSSSSKQHQLVEVISQMSLKCPQEDAKWWHKFYFRLEVLLHFKKSFPSEEVASPEDIGVAESICKILRTFYRVIEVISSPNCPTANMYFNEIWKVRTVLQEEASNEHGEIATMVTEMQEMFNRYWQNSYLWLCLPVILDPRFKISFIEFRLKRAFGLKSASYLSAIRQTLQELFHEYCNSVDQPNGGATKSEAFDADDNDSLDDWDQHLNEQASSQKSTELDNYLEDGLVPRKDDFDILNWWMCHTTKYPRLAAIAQDILAMPASAVQSEAAFTSSGPVIPKHHSTLSIKTIEALVCTRDWMR

SEQ ID NO: 75682 - protein, 124 aa, Setaria italica
  Transcript Sequence Number=SeqID_9708
  Homolog annotation: Hit_ID=A9PAC1; Match level="QueryCoverage=98%, HitCoverage=34%, E-value=2e-34, Identity=59%"; Hit description=F-box family protein
  Pfam annotation: Domain name=Kelch_1; Domain location=56-110; Score =31.3; E_value=3.8e-06; Accession=PF01344.17; Description=Kelch motif
KKNGGSHWAVEDFSWLQGPMAMVGGELYVLSNSCIMKQRGENFPDKMVSCASEFQSRIGFGMIGLGNSIYLVGGVIGPGPRNQCIKPLSDVDILNVTSERPTWRPGSPMTHCRGSICGCALLRI

SEQ ID NO: 75683 - protein, 75 aa, Setaria italica
  Transcript Sequence Number=SeqID_9709
CLIADQIYTPSAPNCLSFWLFLVHRCLYAPKYSVCLLEKLKRPTIWNEWSTMNVVPNVVDIICSFGTDKSSCYVK

SEQ ID NO: 75684 - protein, 171 aa, Setaria italica
  Transcript Sequence Number=SeqID_9710
  Gene Ontology: Mol. function=electron carrier activity
  Homolog annotation: Hit_ID=Q336Y0; Match level="QueryCoverage=97%, HitCoverage=8%, E-value=8e-42, Identity=59%"; Hit description=Amine oxidase, flavin-containing family protein, expressed
RNMILSCWSKDVKHLLNLAECGVSVVPLKDELPRHTLIRDVYLFLDQNGYINAGIASDKVAKEHDTPEVVDVPKLNESNQMESVSIQDGIVSVPLQNGDFEYGTGIECCRTVCVKNTVEASNDKNCPTVDCDALELLPYLKSEEQPTEEKNLGVSTEGRDASLPSNNLDIQ

SEQ ID NO: 75685 - protein, 96 aa, Setaria italica
  Transcript Sequence Number=SeqID_9711
HLLHGEAGAEGRQRRAARRGGALRPRAVPEPRVPAGAGGAEGPAPAAGHAVHELGRVRDHHHDRRRQGAGAAQPFSLSLTRPQLILIHACARAWVP

SEQ ID NO: 75686 - protein, 92 aa, Setaria italica
  Transcript Sequence Number=SeqID_9712
  Subcellular localization annotation: CTP_CleavageSite=72; ConfidenceScore=5.54e-01
RNPQLPRSRSCLVLPSPYTSGLLLHLRLLCRSTSPAIVSFRRPYPVTRASCSTYCLTASRPRSSFSWFQDPRSAHGWATALVEEPPAGARGP

SEQ ID NO: 75687 - protein, 199 aa, Setaria italica
  Transcript Sequence Number=SeqID_9713
  Homolog annotation: Hit_ID=B6T4M5; Match level="QueryCoverage=100%, HitCoverage=90%, E-value=1e-104, Identity=94%"; Hit description =Lysine decarboxylase-like protein
  Pfam annotation: Domain name=Lysine_decarbox; Domain location=60-193; Score=229.0; E_value=1.2e-65; Accession=PF03641.6; Description=Lysine decarboxylase family
MGDNSAADAPAPGRFGRICVFCGSNPGNRAVFGDAALDLGKELVARGIDLVYGGGSVGLMGLIAQTVLDGGCSVLGVIPRALMPLEISGASVGEVKVVSDMHERKAEMARQADAFIALPGGYGTMEELLEMITWSQLGIHDKPVGLLNVDGYYDPLLTLFDKGATEGFIKQDCRDIIVSAPTAHELLKKMEHYTRSHTE

SEQ ID NO: 75688 - protein, 83 aa, Setaria italica
  Transcript Sequence Number=SeqID_9714
  Homolog annotation: Hit_ID=B6T4M5; Match level="QueryCoverage=96%, HitCoverage=36%, E-value=2e-35, Identity=88%"; Hit description =Lysine decarboxylase-like protein
TTYHILQVGLLNVDGYYDPLLTLFDKGATEGFIKQDCRDIIVSAPTAHELLKKMEHYTRSHTEVAPRTSWEMSELGYGKAPET

SEQ ID NO: 75689 - protein, 84 aa, Setaria italica
  Transcript Sequence Number=SeqID_9715
  Subcellular localization annotation: CTP_CleavageSite=37; ConfidenceScore=5.04e-01
RYLSSILVQSAAVCFICPPFLLVGSIKTPRRGEENSSAATPQPAGRCSRPVAPASAHLNRTGHDDSTGKHLDGNGEEGFRSLSL

SEQ ID NO: 75690 - protein, 127 aa, Setaria italica
  misc_feature (113)..(113): Xaa can be any naturally occurring amino acid
  Transcript Sequence Number=SeqID_9716
  Homolog annotation: Hit_ID=B6TSG4; Match level="QueryCoverage=98%, HitCoverage=59%, E-value=1e-20, Identity=58%"; Hit description=ABC -type Co2+ transport system, permease component
  Subcellular localization annotation: CTP_CleavageSite=45; ConfidenceScore=5.11e-01
MELPLPLSPPRAHAALLTCSSTPIAFGLRSHSHPAAPSRGAWPLRARRNKNYRSEEDAATAEPKIITLGRPGKSRRRGNRKQLPQKADADGEGEDEGDDDDERDVAIPEVVTXNRMMRRVGVSVGAP

SEQ ID NO: 75691 - protein, 162 aa, Setaria italica
  Transcript Sequence Number=SeqID_9717
  Gene Ontology: Cellular component=cytoplasm
  Homolog annotation: Hit_ID=B6U7X1; Match level="QueryCoverage=99%, HitCoverage=75%, E-value=3e-66, Identity=80%"; Hit description=Maf -like protein CV_0124
  Pfam annotation: Domain name=Maf; Domain location=1-160; Score=-5.9; E_value=1.2e-08; Accession=PF02545.6; Description=Maf-like protein
REDPDDLVMVLAEAKADAIMSRLNIADYQKEDNQPTLLITSDIVVVHEGIIREKPTTKEEARQFLKGYSGGHVSTVGSVVVTNLTTGKRLGSLDKAEVYFHDIPDEVIENLIDEGVVFRVAGGLLLEHPLTLPFVEAVVGSSDSVMGLSKEIASKLIHDSIL

SEQ ID NO: 75692 - protein, 68 aa, Setaria italica
  Transcript Sequence Number=SeqID_9718
CEPLNFSDNMFPEPETIHLVHRELVNINIRLGLCAGIIGGSSEPLADGKIRRWLWTKLMPHAIHRLRC

SEQ ID NO: 75693 - protein, 199 aa, Setaria italica
  misc_feature (31)..(31): Xaa can be any naturally occurring amino acid
  Transcript Sequence Number=SeqID_9719
  Gene Ontology: Mol. function=heat shock protein binding; Cellular component=integral to membrane; Biological process=protein folding
  Homolog annotation: Hit_ID=B6TUY9; Match level="QueryCoverage=52%, HitCoverage=28%, E-value=2e-51, Identity=93%"; Hit description =Chaperone protein dnaJ 49
  Pfam annotation: Domain name=DnaJ; Domain location=108-169; Score =116.4; E_value=9.3e-32; Accession=PF00226.23; Description=DnaJ domain
  Subcellular localization annotation: CTP_CleavageSite=5; ConfidenceScore=5.37e-01
GDRARAIQVPSPKGPSRLDPSPAPSTTLLAXLLNPQDDSPASSSSSPPPPPPQPAAAGAAEAAEADGLRERKQKGKKREEEETTGAAAREYTAEQLEVVRQVKKHSRDYYQILGLEKDCTVEDVRKAYRKLSLKVHPDKNKAPGAEDAFKAVSKAFQCLSDDEGRKRYDLVGSDEPVTHHRRPSTARAYNGFYEDDFDP

SEQ ID NO: 75694 - protein, 299 aa, Setaria italica
  Transcript Sequence Number=SeqID_9720
  Gene Ontology: Mol. function=heat shock protein binding; Cellular component=integral to membrane; Biological process=protein folding
  Homolog annotation: Hit_ID=B6TUY9; Match level="QueryCoverage=87%, HitCoverage=71%, E-value=1e-131, Identity=85%"; Hit description =Chaperone protein dnaJ 49
  Pfam annotation: Domain name=DUF1977; Domain location=202-294; Score =131.4; E_value=3e-36; Accession=PF09320.3; Description=Domain of unknown function (DUF1977)
  Pfam annotation: Domain name=DnaJ; Domain location=51-112; Score =116.4; E_value=9.3e-32; Accession=PF00226.23; Description=DnaJ domain
  Pfam module annotation: Pfam domain module=DUF1977::DnaJ; Domain location=202-294::51-112
VFLFVLFWVSCRERKQKGKKREERETTGAAAREYTAEQLEVVRQVKKHSRDYYQILGLEKDCTVEDVRKAYRKLSLKVHPDKNKAPGAEDAFKAVSKAFQCLSDDEGRKRYDLVGSDEPVTHHRRPSTARAYNGFYEDDFDPDEIFRNFFFGNMAPATTRQFGQFGTFHFRTGGMHAHGQQNSGGSTVRMLIQLLPVLLLLLLNFLPSSEPVYSLNRSYPYEHKFQTPRGVAYYVKMPNFEEQYPHQSTERVTLERHVERDYYSIITQNCRVELQRRQWGLAYQTPHCDMLKKFEAAAQ

SEQ ID NO: 75695 - protein, 224 aa, Setaria italica
  misc_feature (156)..(156): Xaa can be any naturally occurring amino acid
  misc_feature (180)..(180): Xaa can be any naturally occurring amino acid
  Transcript Sequence Number=SeqID_9721
  Gene Ontology: Mol. function=aspartic-type endopeptidase activity; Biological process=proteolysis
  Homolog annotation: Hit_ID=B6SJT4; Match level="QueryCoverage=95%, HitCoverage=40%, E-value=1e-63, Identity=67%"; Hit description =Aspartic proteinase nepenthesin-2
AVAGFGRGAPSVPAQLGLNKFSYCLLSRRFDDNAAVSGSLVLGDSGGKADGMQYVPLVRSAAGDKQPYAVYYYLALTGVTVGGKAVRLPERAFAANAAGSGGAIVDSGTTFTYLDPTVFQPVADAVIAAVGGKYKRSKEAEDGLGLRPCFALPQGXAKSMALPELSLRFKGGAEMQLPLXNYFVVAGRAPVPGAAAAAPAAAGEAICLAVVTDLGGAGDVGSGP

SEQ ID NO: 75696 - protein, 88 aa, Setaria italica
  Transcript Sequence Number=SeqID_9722
  Subcellular localization annotation: CTP_CleavageSite=22; ConfidenceScore=5.24e-01
VFSTYPPVSVSGTGTLLLKVVRAFPGSMAWVTYFSAVAPGMSLVEKQWLVHGAHTSALQRLVLGPRLEAFSLPLLTLKKQGHLVSLNL

SEQ ID NO: 75697 - protein, 125 aa, Setaria italica
  misc_feature (57)..(57): Xaa can be any naturally occurring amino acid
  Transcript Sequence Number=SeqID_9723
  Gene Ontology: Mol. function=catalytic activity; Biological process =metabolic process
  Homolog annotation: Hit_ID=B6UCK4; Match level="QueryCoverage=100%, HitCoverage=17%, E-value=3e-59, Identity=89%"; Hit description =Catalytic/ ligase
IVIPVRGSLPIKGLRVSDLSWQDFLGRVNDTKVENYAAVKQPAYAFTNILFSSGTTXGEPKAIPWTHITPLKAAADGWCHMDIRKGDVVVWPTNLGWMMGPWLVYASLLNGHVTALYNGSPNSSG

SEQ ID NO: 75698 - protein, 316 aa, Setaria italica
  misc_feature (191)..(191): Xaa can be any naturally occurring amino acid
  Transcript Sequence Number=SeqID_9724
  Gene Ontology: Mol. function=catalytic activity; Biological process =metabolic process
  Homolog annotation: Hit_ID=B6UCK4; Match level="QueryCoverage=93%, HitCoverage=40%, E-value=1e-136, Identity=80%"; Hit description =Catalytic/ ligase
AAALHAALRRALDSRAGAGDPAAVWGELCRSLLRPDVPFAVHRMLYYGCFAGFPSPTPPAWTPDPKEAALTNVGRVMEVRGRELLGDAYKDPITSFPDLYKFSNENPEAYWRMVFEDMGVEFSVEPSCIWRESDAYPGGEWLPGAELNAAANCLNAKPGRSSQDVAIVWRDEGKDSEPLNFMTLEELRKKXCLVANALDALDLPKGSAIAIDMPMNVNAVVIYLAIVLAGYVVVSIADSFAAPAISTRLKISEAKAIFTQDYILRDDKELPLYSRVVEAKAPMAIVIPVRGSLPIKGLRVSDLSWQDFLGRVNDTK

SEQ ID NO: 75699 - protein, 81 aa, Setaria italica
  Transcript Sequence Number=SeqID_9725
NKLPWNIIIPAICVYVFYARTYVHVITHCCYIGLKENGIRTTETKEDFASDTPRLLPALHILMQLVKLCLIMRTYDSAGLT

SEQ ID NO: 75700 - protein, 76 aa, Setaria italica
  Transcript Sequence Number=SeqID_9726
SHSFDCHVVSRIIREVKQCRIKVPLHSLVVQKIVHIKLGISGEQNVVTLIWFVALRQWSEHGYSSFDKSVFSCRAE

SEQ ID NO: 75701 - protein, 91 aa, Setaria italica
  Transcript Sequence Number=SeqID_9727
DTYNRRLMFTAIACVSSSLKLSLYFLYAFYPKIVYAWYMAITKSSTLPMLGEKLLAKLGWSRRDQPHDGQFHRVAHGTCIVGLANVAVAIC

SEQ ID NO: 75702 - protein, 357 aa, Setaria italica
  misc_feature (174)..(174): Xaa can be any naturally occurring amino acid
  Transcript Sequence Number=SeqID_9728
  Homolog annotation: Hit_ID=B9T2E2; Match level="QueryCoverage=78%, HitCoverage=70%, E-value=2e-97, Identity=65%"; Hit description =Catalytic, putative
  Pfam annotation: Domain name=DUF676; Domain location=30-257; Score =319.3; E_value=8e-93; Accession=PF05057.6; Description=Protein of unknown function (DUF676)
EVEVEPARGGGEDVWSADADAEVAQGGGFPEHLVIMVNGLVGSADDWKFAAEQFVRRMPDKVIVHRSQCNSATQTFDGVDLMGERLANEVLSVVEQRSGVKKISFVAHSLGGLVARYAIGRLYEPNNRSNSYAGKSRDDVEHLEGLIAGLEPMNFITFASPHLGSSGNKQIVPXLPFLCGLPFLERRASETAHLIVGRTGKHLFLTDNDDGRRPLLLRMVDDCDGLQFRSALRSFKRRVAYANANFDHMVGWRTSSIRRQHELPKHRLLVRDEKYPHIVYVEKEVTNNNETEAHADFYDPEEEMIRGLTQVPWERVDVSFQKSSQRLVAHNTIQVKSYWLNSDGADVINHMMDNFIV

SEQ ID NO: 75703 - protein, 91 aa, Setaria italica
  Transcript Sequence Number=SeqID_9729
  Subcellular localization annotation: CTP_CleavageSite=29; ConfidenceScore=5.40e-01
SPEHVRHVKDRDAALPPHVRCFHTSLQFRSSTRRSKFTTLPGRTHPFVNPPGYGKNQCRYTTIYGIRVRTCTSWGSIRIAIVSSAQPTGVR

SEQ ID NO: 75704 - protein, 67 aa, Setaria italica
  Transcript Sequence Number=SeqID_9730
  Homolog annotation: Hit_ID=B6UG16; Match level="QueryCoverage=92%, HitCoverage=19%, E-value=2e-13, Identity=66%"; Hit description =Deoxyribonuclease ycfH
TKEFKKSQATTASNESLNHPENIHIVLKYVTSLLEMPEAELAELSYKNATKLFSYPGSKVHPEAEAI

SEQ ID NO: 75705 - protein, 128 aa, Setaria italica
  Transcript Sequence Number=SeqID_9731
  Gene Ontology: Mol. function=endodeoxyribonuclease activity, producing 5'-phosphomonoesters
  Homolog annotation: Hit_ID=B6UG16; Match level="QueryCoverage=98%, HitCoverage=40%, E-value=9e-38, Identity=66%"; Hit description =Deoxyribonuclease ycfH
TNFSLSGFLTGMKSTKAKQMLKSIPLDRILLETDAPDALPKLDDVSVSAVPVPSSDADTENHNKDSESQATTASNESLNHPENIHIVLKYVTSLLEMPEAELAELSYKNATKLFSYPGSKVHPEAEAI

SEQ ID NO: 75706 - protein, 228 aa, Setaria italica
  Transcript Sequence Number=SeqID_9732
  Homolog annotation: Hit_ID=B6TFD3; Match level="QueryCoverage=100%, HitCoverage=100%, E-value=1e-102, Identity=81%"; Hit description=FIP1
  Pfam annotation: Domain name=GRAM; Domain location=107-185; Score =43.1; E_value=1.1e-09; Accession=PF02893.12; Description=GRAM domain
MKTSSGSHVIGVAVTSKAYAIEEGTRDRPAAKKDGDRLAVSLTHPSPYASFSYKHSSKGQENHWVNKLGRRAQSFRDHVTLGPKLSETVKGKLSLGARILQAGGVERVFRQAFSAEKGERLVKALQCYLYTTGGPIAGMLFVSTKKVAFRSDRPITVASPKGDTARVTYKVVIPLRRIGKVRPSENADRPEEKYIHVATVDGFEFWFMGFVSYQRSFKYMQQAVSELQ

SEQ ID NO: 75707 - protein, 226 aa, Setaria italica
  Transcript Sequence Number=SeqID_9733
  Homolog annotation: Hit_ID=B6TFD3; Match level="QueryCoverage=100%, HitCoverage=99%, E-value=1e-93, Identity=74%"; Hit description=FIP1
  Pfam annotation: Domain name=GRAM; Domain location=105-184; Score =46.2; E_value=1.2e-10; Accession=PF02893.12; Description=GRAM domain
MRKSGSSGHVIGVPVTSKAYGIEEGTCRKSDGDHLAVSLTHPSPYASFDYKHSSKDHQVIRWVSKLSRRAQGFREHVTLGPKLSETVKGKLSLGARILQAGGVERVFRQAFSAEKGERLVKALQCYLYTTGGPIAGMLFVSTRRIAFRSDRSLAVTSPAGDVVARVPYKVVVPLRRIKRVRPSENADKPEQKYIQVATVDGFEFWFMGFVSYQRCCKYMLQVISEL

SEQ ID NO: 75708 - protein, 134 aa, Setaria italica
  misc_feature (88)..(88): Xaa can be any naturally occurring amino acid
  Transcript Sequence Number=SeqID_9734
  Gene Ontology: Mol. function=structural constituent of ribosome; Cellular component=ribonucleoprotein complex; Biological process =translation
  Homolog annotation: Hit_ID=O48557; Match level="QueryCoverage=95%, HitCoverage=73%, E-value=3e-61, Identity=90%"; Hit description=60S ribosomal protein L17
  Pfam annotation: Domain name=Ribosomal_L22; Domain location=1-118; Score=154.2; E_value=3.9e-43; Accession=PF00237.11; Description =Ribosomal protein L22pL17e
AFGQRAKRYLEDVMAHKQAIPFRRYCRGVGRTAQAKSRHSNGQGRWPVKSARFILDLLKNAESNADVKGLDVDNLYVSHIQVNQAQKXRGRPSTITVAHGRINPYMSSPCHIELILSEKEEPVKKEPDNIVAQA

SEQ ID NO: 75709 - protein, 112 aa, Setaria italica
  Transcript Sequence Number=SeqID_9735
  Gene Ontology: Mol. function=structural constituent of ribosome; Cellular component=ribonucleoprotein complex; Biological process =translation
  Homolog annotation: Hit_ID=B6VC48; Match level="QueryCoverage=48%, HitCoverage=49%, E-value=4e-25, Identity=98%"; Hit description=60S ribosomal protein L17 (Fragment)
  Pfam annotation: Domain name=Ribosomal_L22; Domain location=7-99; Score=15.0; E_value=5.8e-07; Accession=PF00237.11; Description =Ribosomal protein L22pL17e
DHYLYCACSTLIKVTPDNRPKFSLSQRQATIHSNTAELPSLSLPGCDLRLSLFLDVDTLYVSHIQVNQAQKQRRRTYRAHGRINPYMSSPCHIELILSEKEEPVKKEAGEDM

SEQ ID NO: 75710 - protein, 171 aa, Setaria italica
  Transcript Sequence Number=SeqID_9736
  Gene Ontology: Mol. function=structural constituent of ribosome; Cellular component=ribonucleoprotein complex; Biological process =translation
  Homolog annotation: Hit_ID=O48557; Match level="QueryCoverage=99%, HitCoverage=99%, E-value=4e-90, Identity=92%"; Hit description=60S ribosomal protein L17
  Pfam annotation: Domain name=Ribosomal_L22; Domain location=17-153; Score=261.3; E_value=2.2e-75; Accession=PF00237.11; Description =Ribosomal protein L22pL17e
MVKYSREPSNPTKSAKAMGRDLRVHFKNTRETAFAIRKLQLTKAKRYLEDVIAHKQAIPFHRYCGGVGRTAQAKSRHSNGQGRWPVKSARFILDLLKNAESNAEVKGLDVDTLYVSHVQVNQAQKQRRRTYRAHGRINPYMSSPCHIELILSEKEEPVKKEAETQIATRKA

SEQ ID NO: 75711 - protein, 171 aa, Setaria italica
  Transcript Sequence Number=SeqID_9737
  Gene Ontology: Mol. function=structural constituent of ribosome; Cellular component=ribonucleoprotein complex; Biological process =translation
  Homolog annotation: Hit_ID=O48557; Match level="QueryCoverage=100%, HitCoverage=100%, E-value=2e-93, Identity=96%"; Hit description=60S ribosomal protein L17
  Pfam annotation: Domain name=Ribosomal_L22; Domain location=17-153; Score=265.1; E_value=1.6e-76; Accession=PF00237.11; Description =Ribosomal protein L22pL17e
MVKYSQEAGNPTKSAKAMGRDLRVHFKNTRETAFALRKLPLAKAKRYLEDVMAHKQAIPFRRYCRGVGRTAQAKSRHSNGQGRWPVKSARFILDLLKNAESNADVKGLDVDNLYVSHIQVNQAQKQRRRTYRAHGRINPYMSSPCHIELILSEKEEPVKKEPDNIVAPRKQ

SEQ ID NO: 75712 - protein, 172 aa, Setaria italica
  Transcript Sequence Number=SeqID_9738
  Gene Ontology: Mol. function=structural constituent of ribosome; Cellular component=ribonucleoprotein complex; Biological process =translation
  Homolog annotation: Hit_ID=O48557; Match level="QueryCoverage=96%, HitCoverage=97%, E-value=2e-88, Identity=93%"; Hit description=60S ribosomal protein L17
  Pfam annotation: Domain name=Ribosomal_L22; Domain location=18-154; Score=264.5; E_value=2.4e-76; Accession=PF00237.11; Description =Ribosomal protein L22pL17e
MALADSREPTNPTKSTKAMGRDLRVHFKNTRETAFALRKLSLTKAKRYLEDVIAHKQAIPFRRYCGGVGRTAQAKSRHSNGQGRWPVKSARFILDLLKNAESNAEVKGLDVDTLYVSHIQVNQAQKQRRRTYRAHGRINPYMSSPCHIELILSEKEEPVKKEAESQIATRKA

SEQ ID NO: 75713 - protein, 171 aa, Setaria italica
  Transcript Sequence Number=SeqID_9739
  Gene Ontology: Mol. function=structural constituent of ribosome; Cellular component=ribonucleoprotein complex; Biological process =translation
  Homolog annotation: Hit_ID=O48557; Match level="QueryCoverage=99%, HitCoverage=99%, E-value=8e-91, Identity=93%"; Hit description=60S ribosomal protein L17
  Pfam annotation: Domain name=Ribosomal_L22; Domain location=17-153; Score=266.0; E_value=8.7e-77; Accession=PF00237.11; Description =Ribosomal protein L22pL17e
MVKYSREPTNPTKSAKAMGRDLRVHFKNTRETAFALRKLSLTKAKRYLEDVIAHKQAIPFRRYCGGVGRTAQVKSRHSNGQGRWPVKSARFILDLLKNAESNAEVKGLDVDTLYVSHIQVNQAQKQRRRTYRAHGRINPYMSSPCHIELILSEKEEPVKKEAESQIATRKA

SEQ ID NO: 75714 - protein, 63 aa, Setaria italica
  Transcript Sequence Number=SeqID_9740
QHVSAKYPSSTFDKIAVVDNGFHKVASSKKEYLRHDFVWTCFCKLKIPYLVQCAHFLVLLEKY

SEQ ID NO: 75715 - protein, 101 aa, Setaria italica
  Transcript Sequence Number=SeqID_9741
  Gene Ontology: Cellular component=endoplasmic reticulum membrane; Biological process=lipid biosynthetic process
  Homolog annotation: Hit_ID=B6TBD7; Match level="QueryCoverage=100%, HitCoverage=32%, E-value=3e-37, Identity=79%"; Hit description=ASC1 -like protein 1
MAALVELFLGSTSAPVDWEAEAYPIYGDFAALPLLVAFFPAVRFLLDRLVFEVLARRLIFGKGYDKLAETDDSRKKINKFKESAWKFVYFLSGELLSLSVT

SEQ ID NO: 75716 - protein, 130 aa, Setaria italica
  Transcript Sequence Number=SeqID_9742
  Gene Ontology: Mol. function=sequence-specific DNA binding; Cellular component=nucleus; Biological process=regulation of transcription, DNA-dependent
  Homolog annotation: Hit_ID=B6T167; Match level="QueryCoverage=76%, HitCoverage=54%, E-value=3e-50, Identity=93%"; Hit description=WRKY7- superfamily of TFs having WRKY and zinc finger domains
  Pfam annotation: Domain name=WRKY; Domain location=43-102; Score =134.7; E_value=2.9e-37; Accession=PF03106.7; Description=WRKY DNA -binding domain
RKEQPQPKELLAVPAARGAAEAVPERPRTERIAFRTRSEIEILDDGYKWRKYGKKSVKNSPNPRNYYRCSTEGCNVKKRVERDKDDPSYVVTTYEGTHNHVSPSTVYYASQDAASGRFFVAGTQPPGSIN

SEQ ID NO: 75717 - protein, 53 aa, Setaria italica
  Transcript Sequence Number=SeqID_9743
FTYRMCLFMYVLIAFLLVGHFQHISLFSFCFLSEVQKKGCTYGQFCTDLLRSS

SEQ ID NO: 75718 - protein, 135 aa, Setaria italica
  Transcript Sequence Number=SeqID_9744
SWEPLSRPHVDATADLGRVLSAACTSVPLAAGAEADVESLHETVFSCVGTVDEIEAIVDTFYAKAGATSGALGELARTIQQEVECLEEATRLSSIVTGLQMQEVSLRANLIQAKQRLRLGPAVAAPAFAASGWCF

SEQ ID NO: 75719 - protein, 78 aa, Setaria italica
  Transcript Sequence Number=SeqID_9745
  Gene Ontology: Mol. function=electron carrier activity; Cellular component=integral to membrane; Biological process=oxidation reduction
  Homolog annotation: Hit_ID=Q2R351; Match level="QueryCoverage=92%, HitCoverage=7%, E-value=3e-36, Identity=100%"; Hit description =Respiratory burst oxidase protein D, putative, expressed
  Pfam annotation: Domain name=NAD_binding_6; Domain location=1-76; Score=-18.3; E_value=0.0026; Accession=PF08030.4; Description=Ferric reductase NAD binding domain
KKGVIELHNYCTSVYEEGDARSALIAMLQSLNHAKHGVDVVSGTRVKTHFARPNWRNVYKRIALNHRDQRVGKSIDPY

SEQ ID NO: 75720 - protein, 710 aa, Setaria italica
  Transcript Sequence Number=SeqID_9746
  Gene Ontology: Mol. function=electron carrier activity; Cellular component=integral to membrane; Biological process=oxidation reduction
  Homolog annotation: Hit_ID=Q2R351; Match level="QueryCoverage=100%, HitCoverage=75%, E-value=0.0, Identity=90%"; Hit description =Respiratory burst oxidase protein D, putative, expressed
  Pfam annotation: Domain name=FAD_binding_8; Domain location=396-518; Score=205.9; E_value=1.1e-58; Accession=PF08022.4; Description=FAD -binding domain
  Pfam annotation: Domain name=Ferric_reduct; Domain location=197-355; Score=159.8; E_value=7.9e-45; Accession=PF01794.11; Description =Ferric reductase like transmembrane component
  Pfam annotation: Domain name=NADPH_Ox; Domain location=1-36; Score= -25.0; E_value=0.0043; Accession=PF08414.2; Description=Respiratory burst NADPH oxidase
  Pfam annotation: Domain name=NAD_binding_6; Domain location=524-693; Score=269.3; E_value=8.7e-78; Accession=PF08030.4; Description =Ferric reductase NAD binding domain
  Pfam annotation: Domain name=efhand; Domain location=37-65; Score =25.7; E_value=0.00019; Accession=PF00036.24; Description=EF hand
  Pfam annotation: Domain name=efhand; Domain location=81-109; Score =1.9; E_value=13; Accession=PF00036.24; Description=EF hand
  Pfam module annotation: Pfam domain module=FAD_binding_8::Ferric _reduct::NADPH_Ox::NAD_binding_6::efhand::efhand; Domain location=396- 518::197-355::1-36::524-693::37-65::81-109
ELFDALSRRRNISGDTISKAELLEFWDQISDTSFDGRLQTFFDMVDKDADGRITEEEVKEIILLSASANKLSKIQEQAEEYARLIMEELDPGNLGYIDLYNLETLLLQAPSQSVRIGTTNSRNLSQMLSQNLRPTPEPNPLRRWYRRAQYFLEDNWKRVWVMLLWLSICAGLFTWKFVQYRRRYVFEVMGYCVCIAKGGAETLKFNMALILLPVCRNTITWIRNRTAVGRVVPFDDNLNFHKVVAVGITVGAALHIISHLTCDFPRLLRATDAEYAPLGQYFGFPRPNDYWWFVKGTEGWTGLVMLVLMAVAFTLATPWFRRGRLALPGPLKRLTGFNAFWYSHHCFVVVYALLIVHGHYLYLTKKWQKKSTWMYLAVPLVMYACERLTRALRSSVRPVKILKVAVYPGNVLSLHFSKPQGFRYKSGQYIFVNCAAVSPFQWHPFSITSAPKDDYVSVHIRTLGDWTRELKTVFSKVCRPPTEGKSGLLRAEYDRDGSTMTNPSFPKVLIDGPYGAPAQDYKKYDVVLLVGLGIGATPMISIIKDIINNMKQLDGDLEAGSGNDNSVSTASFRTRRAYFYWVTREQGSFEWFRGVMDEVAETDKKGVIELHNYCTSVYEEGDARSALIAMLQSLNHAKHGVDVVSGTRVKTHFARPNWRNVYKRIALNHRDQRVGVFYCGAPVLTKELRELAQDFSRKTNTKFEFHKENF

SEQ ID NO: 75721 - protein, 101 aa, Setaria italica
  misc_feature (97)..(97): Xaa can be any naturally occurring amino acid
  misc_feature (99)..(99): Xaa can be any naturally occurring amino acid
  Transcript Sequence Number=SeqID_9747
  Gene Ontology: Mol. function=electron carrier activity; Cellular component=integral to membrane; Biological process=oxidation reduction
  Homolog annotation: Hit_ID=B9IC23; Match level="QueryCoverage=100%, HitCoverage=19%, E-value=2e-27, Identity=56%"; Hit description =Cytochrome P450
EFSTKVLREFSSVVFRTNARKLADKISSAATSGTIINMQELLMKTTMDSIFKVGFGFELNTLSGTDESSIQFSDAFDEANSLVYHRYVDLFWKLKRXFXIG

SEQ ID NO: 75722 - protein, 74 aa, Setaria italica
  Transcript Sequence Number=SeqID_9748
MPKVRSIFTVLIVMLLLVSASSGQTAVTEGNHEDTLEVAERHGRRVLTDIQDYDYGGSNPKHDPRRKPGNGHSR

SEQ ID NO: 75723 - protein, 106 aa, Setaria italica
  Transcript Sequence Number=SeqID_9749
  Gene Ontology: Cellular component=cytoplasm
  Homolog annotation: Hit_ID=B8NYN3; Match level="QueryCoverage=72%, HitCoverage=15%, E-value=3e-19, Identity=59%"; Hit description =DUF895 domain membrane protein
MSAMATTQQPVEEKEMSPPAKRGFFRYNSPLTQVFLISLVCFCCPGMFNALSGLGGGGQIDHTTIDKANTAVYACFAVFGVVGGAAHNIFGPRNTLLLGALAYPLY

SEQ ID NO: 75724 - protein, 184 aa, Setaria italica
  misc_feature (3)..(3): Xaa can be any naturally occurring amino acid
  misc_feature (59)..(59): Xaa can be any naturally occurring amino acid
  misc_feature (177)..(177): Xaa can be any naturally occurring amino acid
  Transcript Sequence Number=SeqID_9750
  Gene Ontology: Mol. function=heat shock protein binding
  Homolog annotation: Hit_ID=B9T4J7; Match level="QueryCoverage=98%, HitCoverage=37%, E-value=3e-23, Identity=38%"; Hit description=Heat shock protein binding protein, putative
AIXVLPDCFEAEERSVYETSELLHIVSGRDLFGIVSVADSVKELSYACHEKLTQSGFRXSGFTPNVSRNANKDPASMNPVDIHKKEKGHEDDILSSDAFKDIELRICGKVVATATRSPKCNCIDNSDVEDHIHVYLVPNADASDLMQEHLLLGTITGLATTGEEGSCCVYDGRGIKXHVIMKTQ

SEQ ID NO: 75725 - protein, 36 aa, Setaria italica
  Transcript Sequence Number=SeqID_9751
MDVQGVSLSWPIWFHAATPGNVSLYISIYYEMESSS

SEQ ID NO: 75726 - protein, 421 aa, Setaria italica
  Transcript Sequence Number=SeqID_9752
NSNSLLPITKSTKENFKGLLFAFPQDIEIQAGATLSWPIWFHAATPGNVSLYISIYYEMESSSDIKYRTLRMHYNLEVLPSLDISFAISMSSSRLQEYIVRMDVRNKTPSESFVLHQLSCVGSKWAVSALPSCSSISSVETVSANQAVSCFFKIKDFEADSCKEADRGSYRTDMTLYPGSSGDVFDIARSPLADFHFQERYRQGKLVKGPCSLLDFVVISKAAGNSSEPSPDLQLLSHHTCHCSALSQSPVWWIMEGPRTITHDFSKSYCEVSIQLVIHNSAAHPSSVRVVTSDVMPEKSQTVHPHDPSSVQGGWYDVSLENDIKAISSAKGTQHEKQSSKSISPYVWCSLSSAQIELQPDSCARVPLKVCIFAPGTYNFSNYELQWKVHPSEGAQVDESKNGSSGSGQGHPFYVTVLQSV

SEQ ID NO: 75727 - protein, 320 aa, Setaria italica
  misc_feature (16)..(16): Xaa can be any naturally occurring amino acid
  Transcript Sequence Number=SeqID_9753
  Homolog annotation: Hit_ID=A8HQ22; Match level="QueryCoverage=85%, HitCoverage=18%, E-value=2e-14, Identity=23%"; Hit description =Component of TRAPP complex, TRS85-like protein
KKFDVYKLQLPVFNYXSLRVIHEDHRTYASDADVGVSESTWHELEEELIPSSSVVRTNWLDTQPKSSRKYKDSSVCVAGEAVKVSVELKNPLQIPVDVSGISLICQHSTNLDALTSDVSGLTLDGGEDKVNTEPSVSVFETDEENFVVSKLDIILGGGESKRVQLDVTPKVEGILKLVGIWWTLSNSVVGYQYFEFDAQKKNKKGKRGHRRSLNSSLVVIKGLPKLTGSIDRMPTKAFAGDLQLLKLNLRNHSEYAVKGIKMKISNPRFLIPGDSSDIGLKFPHCLKKHTQSEINLVPYKSTKENFKGLLFAFPQDIEIQ

SEQ ID NO: 75728 - protein, 170 aa, Setaria italica
  misc_feature (15)..(15): Xaa can be any naturally occurring amino acid
  misc_feature (86)..(86): Xaa can be any naturally occurring amino acid
  misc_feature (121)..(121): Xaa can be any naturally occurring amino acid
  Transcript Sequence Number=SeqID_9754
RRWGPAGQRRPDRDXILVEQVAAAAADGGASATEAARQVWGLVVQARGMECASCYVLDTCRVRSSAGFCTHFCLARAQCFGDPVEXPAPQRLAQPPRRPSIARRRRGPVAATTTDLLLLKXSMRQRPNAMMPPVCRQERGREAWGLDWKQGRRTESIQSFRSVQFLPDFL

SEQ ID NO: 75729 - protein, 88 aa, Setaria italica
  Transcript Sequence Number=SeqID_9755
VIVHLWLNEYPCIRDYLECSKIHTKHKFNSRMKREEFTVPNWSLKLISKHTSTSRNKVRRQLIRYTRISVVNASRQLTPCLAGQARRR

SEQ ID NO: 75730 - protein, 203 aa, Setaria italica
  misc_feature (172)..(172): Xaa can be any naturally occurring amino acid
  Transcript Sequence Number=SeqID_9756
  Gene Ontology: Mol. function=protein serine/threonine kinase activity; Cellular component=ribosome; Biological process=protein amino acid phosphorylation
  Homolog annotation: Hit_ID=B6SWM7; Match level="QueryCoverage=100%, HitCoverage=42%, E-value=2e-85, Identity=78%"; Hit description =Serine/threonine-protein kinase AtPK19
MVSSEITSVSAARAQGPKLFRGKILLPGGPPDVVPSENVEFDFSDVFGPTAVQTPTEVSILTPDSPAPVAESNDEVYNDPDVIVKRSHSLVGPSSLVSQALPFSKLTLRETESSLELSECSSKEKPINQGPLSDDELDDVKKENEGVGLDDFEVLKLVGQGAFGKVYQVRKXGTSEIYAMKVMRKDKVVEKNHAEYMKAERDI

SEQ ID NO: 75731 - protein, 263 aa, Setaria italica
  misc_feature (86)..(86): Xaa can be any naturally occurring amino acid
  Transcript Sequence Number=SeqID_9757
  Gene Ontology: Mol. function=protein serine/threonine kinase activity; Cellular component=ribosome; Biological process=protein amino acid phosphorylation
  Homolog annotation: Hit_ID=Q43380; Match level="QueryCoverage=99%, HitCoverage=54%, E-value=1e-137, Identity=88%"; Hit description =Putative pp70 ribosomal protein S6 kinase
  Pfam annotation: Domain name=Pkinase; Domain location=1-190; Score =145.5; E_value=1.6e-40; Accession=PF00069.17; Description=Protein kinase domain
  Pfam annotation: Domain name=Pkinase_C; Domain location=210-253; Score=50.8; E_value=5.2e-12; Accession=PF00433.16; Description =Protein kinase C terminal domain
  Pfam annotation: Domain name=Pkinase_Tyr; Domain location=4-174; Score=-128.8; E_value=3.6e-05; Accession=PF07714.9; Description =Protein tyrosine kinase
  Pfam module annotation: Pfam domain module=Pkinase::Pkinase _C::Pkinase_Tyr; Domain location=1-190::210-253::4-174
QEPKYRLYLVLDFINGGHLFFQLYKQGLFREELARIYTAEIVSAVAHLHANGIMHRDLKPENILLDADGHAMLTDFGLAKEFCENXRSNSMCGTVEYMAPEIVQGRGHDKAADWWSVGILLFEMLTGKPPFVGGNRDKIQQKIVKEKIKLPTYLSSEVHSLLKGLLHKEAGRRLGSGTGGSDEIKNHKWFKSINWKRLEARQIQPSFRPNVAGKTCIANFDECWTSMPVLDSPVASPVAANSNFVGFSYVRPSSFLQKPSPLG

SEQ ID NO: 75732 - protein, 487 aa, Setaria italica
  Transcript Sequence Number=SeqID_9758
  Gene Ontology: Mol. function=protein serine/threonine kinase activity; Cellular component=ribosome; Biological process=protein amino acid phosphorylation
  Homolog annotation: Hit_ID=Q6TQF8; Match level="QueryCoverage=100%, HitCoverage=100%, E-value=0.0, Identity=86%"; Hit description =Ribosomal protein S6 kinase
  Pfam annotation: Domain name=Pkinase; Domain location=152-408; Score =347.6; E_value=2.4e-101; Accession=PF00069.17; Description=Protein kinase domain
  Pfam annotation: Domain name=Pkinase_C; Domain location=428-472; Score=41.9; E_value=2.5e-09; Accession=PF00433.16; Description =Protein kinase C terminal domain
  Pfam annotation: Domain name=Pkinase_Tyr; Domain location=152-392; Score=-9.1; E_value=4.1e-13; Accession=PF07714.9; Description =Protein tyrosine kinase
  Pfam module annotation: Pfam domain module=Pkinase::Pkinase _C::Pkinase_Tyr; Domain location=152-408::428-472::152-392
MVSSQPSSLTAALAQGPNLCPVKILLPMGPPDVVSSESIEYDFSDVFGSTPVQTPTNLCGHEPNSPAHTVESNEEIYNDPVVIIKRSHSLVGPTSLVSRSLLLSKLSLGKTEGSSELVKCLSEEKEGDQGQLSDEEFDNATTEDEGVGLDDFEILKLVGQGAFGKVFQVRKKNTSEIYAMKVMRKDKILENNHAEYMKAEREILTKVDHPFIVQLRYSFQTKYRLYLVLDFINGGHLFFQLYKQGLFREELARIYTAEIVSAVAHLHANGIMHRDLKPENILLDADGHAMLTDFGVAKEFDENTRSNSMCGTVEYMAPEIVQGRGHDKAADWWSVGILLFEMLTGKPPFVGGNRDKIQQKIVKEKLKLPSFLSSEAHSLLKGLLHKEPNKRLGSGPGGSNEIRNHKWFKPINWRKLEARQIQPSFRPNVAGLTCIANFDECWTKTPVLDSPVATPAGGGHDNFAGFTYVRPAPILEEVKPSSSRLKD

SEQ ID NO: 75733 - protein, 214 aa, Setaria italica
  Transcript Sequence Number=SeqID_9759
  Gene Ontology: Mol. function=binding
  Homolog annotation: Hit_ID=Q6H7S8; Match level="QueryCoverage=100%, HitCoverage=7%, E-value=6e-87, Identity=74%"; Hit description =Putative LvsC
LAFDEDQQIVADKWIHILRALSDERGPWSAAPFPNNIVTYWKLDKTEDKWRRRLKLKRNYKFDERLCHPSSTKSSNENTAPTVDPSGSTKIPEKLKHLLLKGVRGITGDINSESFEDNNDTSDSPQTFPPKTHPVSDTADSADSDYHAIVQNRKESPTSGDSDYIEVLSSVHCVLVTPKRKLAGQLTITRNALHFSFEFLVEGTGGSSVFNRFQ

SEQ ID NO: 75734 - protein, 271 aa, Setaria italica
  Transcript Sequence Number=SeqID_9760
  Gene Ontology: Mol. function=nucleic acid binding
  Homolog annotation: Hit_ID=Q2QN69; Match level="QueryCoverage=80%, HitCoverage=53%, E-value=1e-28, Identity=36%"; Hit description =Targeting protein for Xklp2 containing protein, expressed
AAAVAEVDQLVVQHEEAKAAAEEDVKGGAFEEEGKEGIEAELEGSSKVRAMRSKTMAKAMSSVPDPGSGRVKHLVHAFESLLTISGATSDADKAGEGSWALPGLQSLKDEGEGDLGLPQVSVFLSSDFLNAGPNRLCSSLDGKADRFSWDSKTSAGGRRSRRTSSESLRSSWNRKLKVTSQHPFKLRTEQRGRFKEQQLAQKVQEMLLEEEKKRIHVAQGLPWTTDEPECLIKPAVKERTEPIDLVLHSDMRALERAEFDQHVLERNKFAE

SEQ ID NO: 75735 - protein, 197 aa, Setaria italica
  Transcript Sequence Number=SeqID_9761
  Gene Ontology: Mol. function=protein binding
  Homolog annotation: Hit_ID=B6TES9; Match level="QueryCoverage=95%, HitCoverage=37%, E-value=2e-59, Identity=67%"; Hit description =Protein lap1
YVLSRIPTLSKPRPAAASEFDIEQPPAHTPSPRTPSTAGEFELVERMPGLRHPSVLRAMTRAVADVSAARSALQVLGPRPDHELVDSSRAIVAAAEAGDSRIPEGDVEACRAVVRLEETHDAYEALLQEAEARLERVYRSAMEGTDLDVEAVEKGGEDGGPAAGADGGDAAVQEEVVAVLRQAEEGKPVVERCRPSL

SEQ ID NO: 75736 - protein, 116 aa, Setaria italica
  Transcript Sequence Number=SeqID_9762
  Gene Ontology: Mol. function=chromatin binding; Cellular component =signal recognition particle, endoplasmic reticulum targeting; Biological process=chromatin assembly or disassembly
  Homolog annotation: Hit_ID=Q8LSQ2; Match level="QueryCoverage=99%, HitCoverage=29%, E-value=3e-36, Identity=70%"; Hit description =Probable signal recognition particle 43 kDa protein, chloroplastic
  Subcellular localization annotation: CTP_CleavageSite=43; ConfidenceScore=5.41e-01
MEAVLRHPSLSRLKPPNPNPHRTPPPSLASPSLLRLRERRLTVAAVFQDQKPREPASKGGDDEEAYGEVDRIVSSRTIKNPVFAEDGSATTSVATEYLVEWKDGHEPSWIPAEAID

SEQ ID NO: 75737 - protein, 123 aa, Setaria italica
  Transcript Sequence Number=SeqID_9763
  Gene Ontology: Mol. function=signal transducer activity; Biological process=G-protein coupled receptor protein signaling pathway
  Homolog annotation: Hit_ID=Q2R941; Match level="QueryCoverage=52%, HitCoverage=7%, E-value=1e-20, Identity=69%"; Hit description=G -protein alpha subunit, putative, expressed
MAAAGGGDWEDLVRRMFPPGTTIPEPPANLDYSIALEYDGPPVSYELPRIEPVNIPAIPTADPVSGPLGLANGAVPVAPVVGPARRANPPPPPRVAQAQRAHHSSAAQARGELGVGQFGGGAG

SEQ ID NO: 75738 - protein, 65 aa, Setaria italica
  Transcript Sequence Number=SeqID_9764
LRKDGNFRKKLGREDKKLESQLLEPVAAPPVHPVHVPTKQPARPAPQKATAEDDELAALQAEMAL

SEQ ID NO: 75739 - protein, 222 aa, Setaria italica
  misc_feature (121)..(121): Xaa can be any naturally occurring amino acid
  Transcript Sequence Number=SeqID_9765
  Gene Ontology: Cellular component=plasma membrane; Biological process= protein transport
  Homolog annotation: Hit_ID=Q9SZE4; Match level="QueryCoverage=68%, HitCoverage=68%, E-value=2e-48, Identity=65%"; Hit description =Vacuolar protein sorting-associated protein 32 homolog 2
  Pfam annotation: Domain name=Snf7; Domain location=21-198; Score =179.5; E_value=9.3e-51; Accession=PF03357.13; Description=Snf7
MSMFNRIFGKPKEQANSNALATLDKLNETLDMLEKKEKVLEKKAAAELERAKEFSKAKNKRAAIQSLKRKKLYEQQIEQLGNFQLRIHDQMIMLEAAKATTETVDALRTGAAAMKAMQKAXTNIDDVDKTMDEINEQTENMKQIQDALSAPLGASADFDEDELEAELEELEGAELESQLLEPVAAPPVHPVHVPTKQPARPAPQKATAEDDELAALQAEMAL

SEQ ID NO: 75740 - protein, 96 aa, Setaria italica
  Transcript Sequence Number=SeqID_9766
  Gene Ontology: Mol. function=DNA-directed RNA polymerase activity; Cellular component=chloroplast; Biological process=transcription
  Homolog annotation: Hit_ID=B6T6D8; Match level="QueryCoverage=96%, HitCoverage=48%, E-value=2e-38, Identity=81%"; Hit description=DCL protein
PDPWEEAEAEILRDVEPVVELVKDILHSRRYENGGFLSPTEEKVVVEKLLSHHPCVDEKIGCGLDGIMVDRHPEFRQSRCLFVVRTNGDWVDFSYR

SEQ ID NO: 75741 - protein, 45 aa, Setaria italica
  Transcript Sequence Number=SeqID_9767
TLDIQFIYQLNYYEHADFCYDLLFIFLGMTNFIPLHAFSNKAYLQ

SEQ ID NO: 75742 - protein, 73 aa, Setaria italica
  Transcript Sequence Number=SeqID_9768
  Gene Ontology: Mol. function=calcium ion binding; Cellular component =flagellin-based flagellum; Biological process=response to cadmium ion
  Homolog annotation: Hit_ID=Q9ATP2; Match level="QueryCoverage=100%, HitCoverage=38%, E-value=6e-35, Identity=97%"; Hit description =Calmodulin-like protein
  Pfam annotation: Domain name=efhand; Domain location=2-30; Score =40.5; E_value=6.8e-09; Accession=PF00036.24; Description=EF hand
  Pfam annotation: Domain name=efhand; Domain location=40-68; Score =33.1; E_value=1.1e-06; Accession=PF00036.24; Description=EF hand
  Pfam module annotation: Pfam domain module=efhand::efhand; Domain location=2-30::40-68
GDMKEAFRVFDENGDGYISAAELQAVLKKLGLPEARNLATVQEMICNVDADRDGRVDFSEFKNMMQGITVWGA

SEQ ID NO: 75743 - protein, 221 aa, Setaria italica
  Transcript Sequence Number=SeqID_9769
  Gene Ontology: Mol. function=calcium ion binding; Cellular component =flagellin-based flagellum; Biological process=response to cadmium ion
  Homolog annotation: Hit_ID=Q9ATP2; Match level="QueryCoverage=75%, HitCoverage=88%, E-value=5e-59, Identity=72%"; Hit description =Calmodulin-like protein
  Pfam annotation: Domain name=efhand; Domain location=150-178; Score =40.5; E_value=6.8e-09; Accession=PF00036.24; Description=EF hand
  Pfam annotation: Domain name=efhand; Domain location=188-216; Score =33.1; E_value=1.1e-06; Accession=PF00036.24; Description=EF hand
  Pfam annotation: Domain name=efhand; Domain location=66-94; Score =34.4; E_value=4.6e-07; Accession=PF00036.24; Description=EF hand
  Pfam module annotation: Pfam domain module=efhand::efhand::efhand; Domain location=150-178::188-216::66-94
MSNVQESYTTRICNAHKPPKKGREGAPRVHATMENAAPPPAAAKPSLSKKPSPSFRLRNGSLNALRLRRVFDLFDRNGDGEITLDEMASALDALGLGADRSGLEAAVGGYIPAGAAGLRFDDFESLHRALGDALFGPIPEEVPEEDDEGDMKEAFRVFDENGDGYISAAELQAVLKKLGLPEARNLATVQEMICNVDADRDGRVDFSEFKNMMQGITVWGA

SEQ ID NO: 75744 - protein, 451 aa, Setaria italica
  Transcript Sequence Number=SeqID_9770
  Homolog annotation: Hit_ID=B9SLV3; Match level="QueryCoverage=92%, HitCoverage=81%, E-value=1e-165, Identity=65%"; Hit description =Pentatricopeptide repeat-containing protein, putative
  Pfam annotation: Domain name=PPR; Domain location=115-149; Score =25.2; E_value=0.00028; Accession=PF01535.12; Description=PPR repeat
  Pfam annotation: Domain name=PPR; Domain location=150-184; Score =16.5; E_value=0.1; Accession=PF01535.12; Description=PPR repeat
  Pfam annotation: Domain name=PPR; Domain location=300-334; Score=6.5; E_value=1.5; Accession=PF01535.12; Description=PPR repeat
  Pfam annotation: Domain name=PPR; Domain location=45-79; Score=0.6; E_ value=7.5; Accession=PF01535.12; Description=PPR repeat
  Pfam annotation: Domain name=PPR; Domain location=80-114; Score=23.2; E_value=0.0011; Accession=PF01535.12; Description=PPR repeat
  Pfam module annotation: Pfam domain module=PPR::PPR::PPR::PPR::PPR; Domain location=115-149::150-184::300-334::45-79::80-114
MALLKNSVLLQGRLRHAAAAAFTARRGAATSTEEYQRRNYAENASEYNTVMGSLVAQRRPYLLRDAYDDMMLDGVQPVRDTFHTLIVGTMKGSRLQDALYFRDQMKEMGLQPDVNIYNFLISTCGKCKNSDAAIMLLEEMKAHGVKLKGETYICLLNALAATGRTDQVYAIVSDMSAAGLGLNKYCYAGLITAFKNKTPTTEETMAKILDFVEQSKGWKYVERVSKDNAENVMMNVSEEELYNLPTAEYVNRRGGFVLKQFTVYHVAIHACAELRSKETLEALLEMFNKDNRDGSSYDAFMVMQAMRCYLRCGDIDSAIKMFEEYTSSRFPAAELYVTLAEGAMIGHTPRGMQVAQETIEKMVSRNFFLNPRMGTDLLLSAAGERTGGYTTANYVWDLLQSRNITPSLPAVEAYHKGLKEREIPADDPRLLNVTRVLDNLNVRFGPRRNIQ

SEQ ID NO: 75745 - protein, 83 aa, Setaria italica
  Transcript Sequence Number=SeqID_9771
  Gene Ontology: Mol. function=transferase activity; Biological process= metabolic process
  Homolog annotation: Hit_ID=B6TFG4; Match level="QueryCoverage=100%, HitCoverage=27%, E-value=4e-35, Identity=79%"; Hit description =Undecaprenyl pyrophosphate synthetase
  Pfam annotation: Domain name=Prenyltransf; Domain location=1-80; Score=-92.5; E_value=0.00057; Accession=PF01255.11; Description =Putative undecaprenyl diphosphate syntha
PDDIDERVLASRLATSAAGELACPDLVVRTSGELRLSNFLLWQAAYSEFFYTDKMWPDFGEAEYLEALRSYQSRDRRFGQTRV

SEQ ID NO: 75746 - protein, 143 aa, Setaria italica
  Transcript Sequence Number=SeqID_9772
LRVVPLSIHMMRWRIAQGFYPKLMELRCTSTRNDEKKPQIRWEQGTELPSISSVQSPQHAFSSSSSSLTISVIAVLQSLRSWQLGRLGLARAHLDARGRRLAAADGLPVADEGLDALQLQLVVELVDEGVRRRVHLAAGGGGD

SEQ ID NO: 75747 - protein, 172 aa, Setaria italica
  Transcript Sequence Number=SeqID_9773
  Gene Ontology: Mol. function=protein disulfide oxidoreductase activity; Cellular component=chloroplast; Biological process =glycerol ether metabolic process
  Homolog annotation: Hit_ID=B6SHQ3; Match level="QueryCoverage=70%, HitCoverage=70%, E-value=2e-52, Identity=78%"; Hit description =Thioredoxin M-type
  Pfam annotation: Domain name=Redoxin; Domain location=58-170; Score= -13.9; E_value=0.052; Accession=PF08534.2; Description=Redoxin
  Pfam annotation: Domain name=Thioredoxin; Domain location=66-169; Score=144.8; E_value=2.6e-40; Accession=PF00085.12; Description =Thioredoxin
  Pfam module annotation: Pfam domain module=Redoxin::Thioredoxin; Domain location=58-170::66-169
  Subcellular localization annotation: CTP_CleavageSite=56; ConfidenceScore=5.72e-01
PKLPRQPTTTTTDDLDAIPCSSYSSTSSTFRSSPLRAITGLSGSRRCAGRGASVLRAVQGQDTTIEVSDVTKSTWQTLVMESELPVLVEFWAPWCGPCKMIDPVVGKLSKDYEGKLRCYKLNTDESPDIASQYGVRSIPTMMIFKDGEKKDSVIGAVPESTLTTCIEKFVER

SEQ ID NO: 75748 - protein, 116 aa, Setaria italica
  Transcript Sequence Number=SeqID_9774
  Subcellular localization annotation: CTP_CleavageSite=89; ConfidenceScore=5.17e-01
SDSCLWLATTLALPVVKDFAADAGSTSSVVIGIMPSPDSSCLWMATTLALPVVRDFAADAGSRSSVVIGIMPSPDRSFLGAAALNALAVATEAAAAMKATMKRVVATVLLWAIVIC

SEQ ID NO: 75749 - protein, 349 aa, Setaria italica
  misc_feature (185)..(185): Xaa can be any naturally occurring amino acid
  misc_feature (197)..(197): Xaa can be any naturally occurring amino acid
  Transcript Sequence Number=SeqID_9775
PERARKYFQHLERFLSSRLSKNEFEKLCLVALGHENLPLHNHLIRSILHNASRACGPPVINDPKLVRGATPSGHAFVPPVWDNGSALNQNVKENKPSSRRENALTQKSSLNHCATIQENGVHHLSDLKRCTQVQKGEHVEPLIKRPRLEKEPFSLHSLHSNGSALPSGENLGREIIHQSQGPVQXPLGIQLRPGSFXGFQKPSALASISSKDTSDTCIEFGELCDTLSVKKRMDKIAESEGLEGVSIECANLLNNGIDVFIKQLIGPCVELVTARSQLGKLRNEALKQQLRRKLINGVSLQNHIPGQGGIIPPETNSISMQDLKAVMELNPCLLGVNASLLLEKINSYD

SEQ ID NO: 75750 - protein, 55 aa, Setaria italica
  Transcript Sequence Number=SeqID_9776
PMILAGCPRCMMYVMLSREDPRCPKCHSTVLLDFNGDAPAADPRNAGAKSKGRRG

SEQ ID NO: 75751 - protein, 156 aa, Setaria italica
  Transcript Sequence Number=SeqID_9777
  Homolog annotation: Hit_ID=B9SVW7; Match level="QueryCoverage=50%, HitCoverage=46%, E-value=5e-09, Identity=41%"; Hit description=60S ribosomal protein L18a, plant, putative
MAAMLEAKHSTNKPQSPPPSHSASAPSSLPYHHHHYGTFPPPLQPPLTLGAAYHASPVGFGGQGVVAFPSAVQQQVFVEGVPVREPPLPFCGVGIGWFLFLLGFFLAAIPWYAGAFLLFFVALDHREKPGLIACTIAAIFALVSFILNGIRMHPFW

SEQ ID NO: 75752 - protein, 845 aa, Setaria italica
  Transcript Sequence Number=SeqID_9778
  Homolog annotation: Hit_ID=B9S250; Match level="QueryCoverage=73%, HitCoverage=73%, E-value=5e-79, Identity=35%"; Hit description=ATP binding protein, putative
  Pfam annotation: Domain name=Cast; Domain location=39-715; Score= -296.7; E_value=0.051; Accession=PF10174.1; Description=RIM-binding protein of the cytomatrix
  Pfam annotation: Domain name=Cenp-F_leu_zip; Domain location=452-603; Score=-13.2; E_value=0.088; Accession=PF10473.1; Description=Leucine -rich repeats of kinetochore p
  Pfam annotation: Domain name=Filament; Domain location=315-583; Score= -166.6; E_value=0.0044; Accession=PF00038.13; Description =Intermediate filament protein
  Pfam annotation: Domain name=HrpB7; Domain location=239-387; Score= -32.0; E_value=0.051; Accession=PF09486.2; Description=Bacterial type III secretion protein
  Pfam annotation: Domain name=Myosin_tail_1; Domain location=6-729; Score=-519.0; E_value=0.077; Accession=PF01576.11; Description =Myosin tail
  Pfam module annotation: Pfam domain module=Cast::Cenp-F_leu _zip::Filament::HrpB7::Myosin_tail_1; Domain location=39-715::452 -603::315-583::239-387::6-729
PRLSFDRSPRSADSKPVVERRVPKIGTPPDKQPRREAELQARLESAQEDLKKAKDQLAFIVGERDRLVGELNEAKRVADETHEKLQDALMAKRWAEEATEIEKFRADELEQAGIDEAQRREEEWQREIECVRGQHAADLETLVNTTEELERLRRDLSMANEAKKAALGHADDAMKIAEVNAEKVEILSIEVVRLKGLLDSTAASEESKNRETEVLVKNLESEVSSLKVKLEEAKVLEERLAEAEKTIQELKSQIADAQKVESDIRQQLEEWKEKSASLEMKLEEVTLSEKFKSDSLASTTEQLDKIHSMLQDRESEIEVLKGKTTALEIEVARLLAEVNDSNEHLDASQQEVFGLQTTIDVLRNKLETAELAASEALNNEKTANTKIEDLTEEKTKLISELDDARDREEKEKRAVEDLTAALDKACCEAQEAHDRFQKKEDDYEHALAQIGDLKMSLKSMEESYEAMLDEANHDITRLRETVEKLEAEVSKYREECESKELDLITASKQSEQEIAALKVEVEQVAASLQGAEHEIEAVTEEKERLQEKLRNTEAAVAEANKAVQEAKTEKEQLQEKLAHTESAVAEASMATQEAKTEMERLQEKLTYTESAVAEADKAVQEAKAESSQLKERLLDKENALQNLTQENDEFRMREADAMKKIEELSALLAEAMTKKHPEEEEKLVIVDEVHNSAREEFTRSVAENEDAEESDDKKLHLEVDADDMRSNGDMNHEEKDDSKVEQEELKIGSVQESEKVVFEKEAQAENRKQETESSNDELDSKKEDSSTENTNGTTVPEDTASKVAMSPTKPQQQQKKNKPLLKKFGSLLKKKTASSRTARVLLVSS

SEQ ID NO: 75753 - protein, 713 aa, Setaria italica
  Transcript Sequence Number=SeqID_9779
  Gene Ontology: Mol. function=zinc ion binding
  Homolog annotation: Hit_ID=B9SSQ5; Match level="QueryCoverage=30%, HitCoverage=17%, E-value=9e-92, Identity=68%"; Hit description =Protein binding protein, putative
KWHSKFRVYLSPFIHGTRYSSFGRHFTKVEKLVEIADKLHWYVEPGDTIVDFCCGANDFSRLLKEKLDKVQKKCHFKNYDLIQPKNHFGFEKRDWMTVKLNELPRGSQLIMGLNPPFGVKASLANKFIDKALSFKPKLVVLIVPKETKRLDQKKTPYDLIWEDSECLAGKAFYLPGSVDLNDKTVEGWNASAPPLYLWSRPDWTKKHMKIAEEHSHTSMGKKKPRHVDSLSDDPVREEAEPSDKIKTRSGKGKENTGKASFHSKEDNILDDLPVRKQAEATNKWNSRSGKERGTDKTACNDREANLPDDHAAKKQARSEEERGTLGKIAVHVKEANMSDNLPVKKQSEPTSRVIPGKEKENGSYENRSDNRRKWTPDHVESLPPEKQVEVAYEETKVTIPRKESIHNEHRGACHENRRNSHGEEIKSRHNYQQTAAGMLNVKSMDGGDSDMSIPSPDSNNAGSKSRSYSPAIPTEHPSDRIAHPDSYCPSEELYDPMLNRANLKGSYLASNDEYFDELKYADIDNSSRMRGSSIDEVTKPYIGASTSLYSSQSRDDGSFYRRPSSEDLNTSTGRNLVADVAMQGHGIRYDGHGDSCQASKIPLATGSQTHLSMNGGTGADYPLARFSLGSSGARFSQPASTPSFGLSGSGLQRGSVMDKYGYGLLGPSGPQSSIIDRYAPSLDGRNNTRPESSLPQQYPFGRQGSYGGGWPQN

SEQ ID NO: 75754 - protein, 128 aa, Setaria italica
  misc_feature (84)..(84): Xaa can be any naturally occurring amino acid
  Transcript Sequence Number=SeqID_9780
  Gene Ontology: Mol. function=metal ion binding
  Homolog annotation: Hit_ID=B9SSQ5; Match level="QueryCoverage=96%, HitCoverage=8%, E-value=2e-21, Identity=46%"; Hit description =Protein binding protein, putative
LGNEASKLTLKDVTRKCSVPTTHVYSGRQTDKIAQGKIERSVQAVGAALKKLENGGNVNDAKAVCEPDVLRQLAKISTSLFLSXSQSIYELICWHSKFRVYLSPFIHGTRYSSFGRHFTKVEKLVEVY

SEQ ID NO: 75755 - protein, 228 aa, Setaria italica
  misc_feature (14)..(14): Xaa can be any naturally occurring amino acid
  Transcript Sequence Number=SeqID_9781
  Gene Ontology: Mol. function=binding
  Homolog annotation: Hit_ID=Q7XZF5; Match level="QueryCoverage=83%, HitCoverage=10%, E-value=2e-33, Identity=45%"; Hit description=RST1
NSSSLPGAALLTLXFTQGYLNEGKSKSLPRVHTAFEQAFTEIAESMYISRNIEVALLALHSWKSFVSNWMQAVVALLDSKEPSKLNKALKAANDIFKILCDHVPVSTPRVAVNIALVIGALCLIVPPTAHLVISSASDFLLKWLFQYEHEHQQWSAALSLGLIFNCFHPTDKKSRFQVINGLLEVISKTESGLAKGACGLALGYACQGLLTRAHNATDAEVAAATELN

SEQ ID NO: 75756 - protein, 109 aa, Setaria italica
  Transcript Sequence Number=SeqID_9782
  Gene Ontology: Mol. function=serine-type endopeptidase activity; Cellular component=plastid stroma; Biological process=proteolysis
  Homolog annotation: Hit_ID=Q0JBL5; Match level="QueryCoverage=57%, HitCoverage=20%, E-value=1e-28, Identity=96%"; Hit description=ATP -dependent Clp protease proteolytic subunit
  Subcellular localization annotation: CTP_CleavageSite=42; ConfidenceScore=5.59e-01
RLVTAAPNPNPLNPSAAAAMLRRLAAVAPRAFSSSSSPHAPPAAASGYTPRREYGLVPMVIEHTSRGERAYDIFSRLLKERIVCIHGPISDDTASLVVAQLLFLESENP

SEQ ID NO: 75757 - protein, 268 aa, Setaria italica
  Transcript Sequence Number=SeqID_9783
  Gene Ontology: Mol. function=serine-type endopeptidase activity; Cellular component=plastid stroma; Biological process=proteolysis
  Homolog annotation: Hit_ID=B4FUS5; Match level="QueryCoverage=100%, HitCoverage=88%, E-value=1e-109, Identity=79%"; Hit description=ATP -dependent Clp protease proteolytic subunit
  Pfam annotation: Domain name=CLP_protease; Domain location=50-231; Score=433.4; E_value=3.5e-127; Accession=PF00574.15; Description=Clp protease
  Subcellular localization annotation: CTP_CleavageSite=12; ConfidenceScore=5.06e-01
GSAGLGPRRLVVAAPPRAFFSSSPYQPPQPEGFSPHREYGLVPMVIETTSRGERAYDIFSRLLKERIVCIHGPIADDTASLVVAQLLFLESENPLKPVHLYINSPGGVVTAGLAIYDTMQYIRCPVTTLCIGQAASMGSLLLAAGAPGERRALPNARVMIHQPSGGAQGQATDIAIQAKEILKMRDRLNKIYQKHTRQPIDKIELCMERDLFMDPEEARDWGLIDEVIENRPASLMTEGLGGGGLDVPNLGGSGGGGRGRDVEEPSAV

SEQ ID NO: 75758 - protein, 78 aa, Setaria italica
  Transcript Sequence Number=SeqID_9784
  Gene Ontology: Mol. function=protein serine/threonine phosphatase activity; Cellular component=protein serine/threonine phosphatase complex; Biological process=protein amino acid dephosphorylation
  Homolog annotation: Hit_ID=Q69QZ0; Match level="QueryCoverage=98%, HitCoverage=21%, E-value=5e-35, Identity=88%"; Hit description =Probable protein phosphatase 2C 27
GRDYMEDAHVCISDLAKNFGYKAVDDEVISFYGVFDGHGGKDAAHYVRDNLPRLIVEDADFPLELEKVVKRSFVETEV

SEQ ID NO: 75759 - protein, 138 aa, Setaria italica
  misc_feature (114)..(114): Xaa can be any naturally occurring amino acid
  Transcript Sequence Number=SeqID_9785
  Gene Ontology: Mol. function=protein serine/threonine phosphatase activity; Cellular component=protein serine/threonine phosphatase complex; Biological process=protein amino acid dephosphorylation
  Homolog annotation: Hit_ID=B6TE17; Match level="QueryCoverage=100%, HitCoverage=37%, E-value=4e-58, Identity=83%"; Hit description=DNA -binding protein phosphatase 2C
MCVEGLEDAGRLDFGDQGIDKHADFAMERVCENTVSVDFKQTKLNNFVPFIRSGEWSDIGGRDYMEDAHVCISDLAKNFGYKAVDDEVISFYGVFDGHGGKDAAHYVRDNLPRXPWQVITDDADFPLWSLEKGVKRSF

SEQ ID NO: 75760 - protein, 87 aa, Setaria italica
  Transcript Sequence Number=SeqID_9786
  Subcellular localization annotation: CTP_CleavageSite=63; ConfidenceScore=5.40e-01
EAALGRRRLAVSTRQRPTILRVPVVILPTPRRLPPLFSSPSLSCRQIPSGHRRFEHGRRPTTRVRSLDELLGRGVARRRRQRPPPPP

SEQ ID NO: 75761 - protein, 137 aa, Setaria italica
  Transcript Sequence Number=SeqID_9787
  Subcellular localization annotation: CTP_CleavageSite=22; ConfidenceScore=5.12e-01
VFPSSSSRRPGGSRLCSPLPLLAAARSQAAIVDSSTGGGQPHGRARGQPHGRARGCPHPLGRRSSNRPQLQPGGAPTGLSVRPAPPLTTSIYEQRRGAGIDEAGDVGHRVDPRAVGPVFSARCASACSAARCRCRHR

SEQ ID NO: 75762 - protein, 144 aa, Setaria italica
  misc_feature (130)..(130): Xaa can be any naturally occurring amino acid
  Transcript Sequence Number=SeqID_9788
  Gene Ontology: Mol. function=nucleotide binding; Cellular component =intracellular; Biological process=small GTPase mediated signal transduction
  Homolog annotation: Hit_ID=Q2R0P2; Match level="QueryCoverage=100%, HitCoverage=43%, E-value=3e-65, Identity=84%"; Hit description=Small GTP-binding protein domain containing protein, expressed
  Pfam annotation: Domain name=MMR_HSR1; Domain location=27-144; Score =110.6; E_value=5.1e-30; Accession=PF01926.15; Description=GTPase of unknown function
  Pfam annotation: Domain name=Miro; Domain location=28-128; Score=1.7; E_value=0.0074; Accession=PF08477.5; Description=Miro-like protein
  Pfam module annotation: Pfam domain module=MMR_HSR1::Miro; Domain location=27-144::28-128
DLLDLVCSELRKFEGLDGVEEEKNKVPALAIVGRPNVGKSSILNALVGEDRTIVSPVSGTTRDAIDTEFTTADGEKYKLIDTAGIRRRAAVISAGSTTESLSVKRAFQAIRRSDVVALVIEAMACVTEQXRIEKEGKACVIVVN

SEQ ID NO: 75763 - protein, 327 aa, Setaria italica
  misc_feature (31)..(31): Xaa can be any naturally occurring amino acid
  Transcript Sequence Number=SeqID_9789
  Gene Ontology: Mol. function=nucleotide binding; Cellular component =intracellular; Biological process=small GTPase mediated signal transduction
  Homolog annotation: Hit_ID=Q2R0P2; Match level="QueryCoverage=92%, HitCoverage=88%, E-value=1e-147, Identity=84%"; Hit description =Small GTP-binding protein domain containing protein, expressed
  Pfam annotation: Domain name=Dynamin_N; Domain location=37-159; Score= -19.4; E_value=0.007; Accession=PF00350.15; Description=Dynamin family
  Pfam annotation: Domain name=GTP_EFTU; Domain location=32-212; Score=- 64.1; E_value=0.00021; Accession=PF00009.19; Description=Elongation factor Tu GTP binding domain
  Pfam annotation: Domain name=MMR_HSR1; Domain location=35-160; Score =154.3; E_value=3.8e-43; Accession=PF01926.15; Description=GTPase of unknown function
  Pfam annotation: Domain name=Miro; Domain location=36-160; Score =17.1; E_value=0.00027; Accession=PF08477.5; Description=Miro-like protein
  Pfam module annotation: Pfam domain module=Dynamin_N::GTP_EFTU::MMR _HSR1::Miro; Domain location=37-159::32-212::35-160::36-160
VVFFLCILCFVSSSLVVKFCRVFLDGVEEEXNKVPALAIVGRPNVGKSSILNALVGEDRTIVSPVSGTTRDAIDTEFTTADGEKYKLIDTAGIRRRAAVISAGSTTESLSVKRAFQAIRRSDVVALVIEAMACVTEQDYKIAERIEKEGKACVIVVNKWDTIPNKNHESTTHYEQDVREKLRILDWAPIVYCSATNGTSVEKIISAAALVEKERSRRLGTSILNQVVREAIAFKPPPRTRGGKRGRVYYTTQAAVGPPTFVLFVNDAKLFSDMYRRYMEKKLRSDAGFPGTPIRLLWRSRRRPDKRGKSADSKLPSPGTPSRMALAS

SEQ ID NO: 75764 - protein, 90 aa, Setaria italica
  Transcript Sequence Number=SeqID_9790
RCVVEFRGSRRISATSKCQSVEEIDAGAIEWGVQVNDPEDGVIWELGRQGKVEWWVRGCWAYGAQDHRTHKMQLVPVDGQVTVTGSFAAG

SEQ ID NO: 75765 - protein, 264 aa, Setaria italica
  Transcript Sequence Number=SeqID_9791
  Gene Ontology: Mol. function=metalloendopeptidase activity; Cellular component=cellular_component; Biological process=proteolysis
  Homolog annotation: Hit_ID=Q2PYX9; Match level="QueryCoverage=88%, HitCoverage=67%, E-value=1e-126, Identity=91%"; Hit description =Glycoprotein endopeptidase-like protein
  Pfam annotation: Domain name=Peptidase_M22; Domain location=1-198; Score=64.4; E_value=4.2e-16; Accession=PF00814.17; Description =Glycoprotease family
LVAVNHCVAHIEMGRAVTGAVDPVVLYVSGGNTQVIAYSEGRYRIFGETIDIAVGNCLDRFARVLELSNDPSPGYNIEQLAKKGEKFIDLPYVVKGMDVSFSGILSFIEATAIEKLKNNECTPADLCYSLQETLFAMLVEITERAMAHCDSKDVLIVGGVGCNERLQEMMRIMCSERGGRLFATDDRYCIDNGAMIAYTGLLAYAHGATTPLEESTFTQRFRTDEVHAIWREKEMPVMTNIHTDAMAEVSKDEASMPTPIIVDS

SEQ ID NO: 75766 - protein, 65 aa, Setaria italica
  misc_feature (5)..(5): Xaa can be any naturally occurring amino acid
  misc_feature (60)..(60): Xaa can be any naturally occurring amino acid
  Transcript Sequence Number=SeqID_9792
  Gene Ontology: Mol. function=protein tyrosine kinase activity; Cellular component=plasma membrane; Biological process=protein amino acid phosphorylation
  Homolog annotation: Hit_ID=B9G748; Match level="QueryCoverage=95%, HitCoverage=6%, E-value=1e-26, Identity=90%"; Hit description =Pyruvate kinase
KLKLXFQEWTQQVQEMLNTKKVGDIAFRDKDFKTAIDYYSKLVAMMSTPSATVFARRSFXYLMNE

SEQ ID NO: 75767 - protein, 505 aa, Setaria italica
  misc_feature (45)..(45): Xaa can be any naturally occurring amino acid
  misc_feature (80)..(80): Xaa can be any naturally occurring amino acid
  Transcript Sequence Number=SeqID_9793
  Gene Ontology: Mol. function=protein tyrosine kinase activity; Cellular component=plasma membrane; Biological process=protein amino acid phosphorylation
  Homolog annotation: Hit_ID=B9G748; Match level="QueryCoverage=90%, HitCoverage=50%, E-value=0.0, Identity=96%"; Hit description =Pyruvate kinase
  Pfam annotation: Domain name=Pkinase; Domain location=85-323; Score =29.3; E_value=3.1e-10; Accession=PF00069.17; Description=Protein kinase domain
  Pfam annotation: Domain name=Pkinase_Tyr; Domain location=85-323; Score=-54.2; E_value=4e-10; Accession=PF07714.9; Description=Protein tyrosine kinase
  Pfam module annotation: Pfam domain module=Pkinase::Pkinase_Tyr; Domain location=85-323::85-323
MGCFQSKVAGPLPPNDAAALPADNPADPEAANGGADGGDAGDDKXAAKRAVPVFREFALAELRAATKGFSADLIVSESGXKAPNVVYRGRLDGGRLIAVKRFSRVSWPDPQQFVAEAAGVGKVRHKRLVNLIGCCAEGDERLLVAEYMPNDTLSKHLFHWDKQPLPWEMRLRVAYFIAQALDHCNAENRKIYHDLNAYRVLFDEEGDPRLSSFGLMKNSRDGKSYSTNLAYTPPEFLRTGRVIAESVIYSYGTVLLDLLSGKHIPPSHALDLIRGKNILLLMDSSLEGQYANEDASKLVDLASKCLQFEARDRPNIKYLLSSVGPLQKQKEVASHVLMGITKATSVLPAILSPLGKACSVLDLTAVHDILLKTGYKDDEGAENELSFQEWTQQVQEMLNTKKVGDIAFRDKDFKTAIDYYSKLVAMMSTPSATVFARRSFSYLMNEQAELALRDAMQAQVCMQEWPTAFYLQALALSKLGMETDAQDMLNDGATFEAKKQNSWRS

SEQ ID NO: 75768 - protein, 127 aa, Setaria italica
  Transcript Sequence Number=SeqID_9794
  Gene Ontology: Mol. function=ribonuclease activity; Cellular component=chloroplast
  Homolog annotation: Hit_ID=Q9LZA0; Match level="QueryCoverage=85%, HitCoverage=13%, E-value=2e-39, Identity=67%"; Hit description =Ribonuclease II-like protein
ELLYMNLEEEEELRILQEAASIRAQWRRSQGSIDTAMIEPRIKVSNPDDPEPNINLYVEDQANPAMQLVSEMMILCGEAVAAFGADNNLPLPYRGHPQSNTAVSAFSHLPDGPARSFANISVLRAAE

SEQ ID NO: 75769 - protein, 384 aa, Setaria italica
  Transcript Sequence Number=SeqID_9795
  Gene Ontology: Mol. function=substrate-specific transmembrane transporter activity; Cellular component=integral to membrane; Biological process=transmembrane transport
  Homolog annotation: Hit_ID=B6TAG3; Match level="QueryCoverage=100%, HitCoverage=72%, E-value=0.0, Identity=92%"; Hit description =Arabinose-proton symporter
  Pfam annotation: Domain name=Sugar_tr; Domain location=1-354; Score =199.7; E_value=8e-57; Accession=PF00083.16; Description=Sugar (and other) transporter
AGVGIGFGAMVSGVYIAEISPAGARGTLTSLPEICINFGILLGYVSNYAFSGLSEHINWRVMLGVGILPSVFIGFALFVIPESPRWLMMEKRVSEARAVLLQISESEAEVEERLSEIEEAAGLMKSMKSEEKEVWRELLNPSPAVRRMLYAGCGIQLFQQITGIDATVYYSPTIFKDAGIKSDQELLAATVAVGFTKTVFILVAIFLIDKVGRKPLLYVSTIGMTACLFLLGVALTLQKHAMGLMSPRVGIDLAIFAVCGNVAFFSIGMGPICWVLSSEVFPLRLRAQGSALGQVGGRVSSGLVSMSFLSMARAISVAGMFFVFAAISSISVLFVYFCVPETKGKTLEQIEMMFESGDEWRGGEIELEDTQHLIPSDKKSVPLG

SEQ ID NO: 75770 - protein, 181 aa, Setaria italica
  Transcript Sequence Number=SeqID_9796
  Gene Ontology: Mol. function=serine O-acetyltransferase activity; Cellular component=cytoplasm; Biological process=cysteine biosynthetic process from serine
  Homolog annotation: Hit_ID=Q8GZP7; Match level="QueryCoverage=97%, HitCoverage=56%, E-value=3e-72, Identity=79%"; Hit description =Satase isoform II
  Pfam annotation: Domain name=Hexapep; Domain location=103-120; Score =9.5; E_value=12; Accession=PF00132.16; Description=Bacterial transferase hexapeptide (th
  Pfam annotation: Domain name=Hexapep; Domain location=121-138; Score =17.6; E_value=0.054; Accession=PF00132.16; Description=Bacterial transferase hexapeptide (th
  Pfam annotation: Domain name=Hexapep; Domain location=77-94; Score =16.2; E_value=0.13; Accession=PF00132.16; Description=Bacterial transferase hexapeptide (th
  Pfam module annotation: Pfam domain module=Hexapep::Hexapep::Hexapep; Domain location=103-120::121-138::77-94
RDAACDRMVHCFLYYKGFLALQAHRAAHALWADGRAAPALLLQSRASEVFGVDIHPGARIGCGILLDHATGVVIGETAVVGNDVSILHGVTLGGTGKESGDRHPKVGDGVLIGAGASVLGNVHIGAGAKIGAGAVVLRDVPEGTTAVGNPAKAIGKKAVPQRRPEEQPGVTMEQGWSDYVI

SEQ ID NO: 75771 - protein, 66 aa, Setaria italica
  Transcript Sequence Number=SeqID_9797
  Subcellular localization annotation: CTP_CleavageSite=32; ConfidenceScore=5.48e-01
RGLSAPKIHSKQHSARDAMLVAVTWYASRFVLASSWRSSAVQFARLAFPLLPPSSSSDHLSFRLFG

SEQ ID NO: 75772 - protein, 195 aa, Setaria italica
  misc_feature (126)..(126): Xaa can be any naturally occurring amino acid
  Transcript Sequence Number=SeqID_9798
  Homolog annotation: Hit_ID=Q53NA2; Match level="QueryCoverage=46%, HitCoverage=20%, E-value=1e-35, Identity=82%"; Hit description =D8Ertd354e protein, putative
  Pfam annotation: Domain name=DUF2261; Domain location=5-145; Score= -242.0; E_value=0.024; Accession=PF10019.1; Description =Uncharacterized conserved protein (DU
KCSSGVCFSKDCTFSSPNMGPLRADAPAWCLAPFEPEGLLRSISSILSGTIGIHYGHVLIHFKTHKGRLKHWLLMGFSLLVLGILLHFTKAIPINKQLYSFSYVCFTGGAAGIVLSAFYILIDVWXLRTPFLFLESIGMNAMLVFVLGAQGILAAFVNGWYYKSPDNSLVRWIVKHVFVALTKERVPNIDHQVES

SEQ ID NO: 75773 - protein, 148 aa, Setaria italica
  Transcript Sequence Number=SeqID_9799
  Gene Ontology: Mol. function=DNA binding; Biological process =regulation of transcription
  Homolog annotation: Hit_ID=B9SPR1; Match level="QueryCoverage=79%, HitCoverage=30%, E-value=5e-33, Identity=60%"; Hit description =Transcription factor, putative
  Pfam annotation: Domain name=NAM; Domain location=2-36; Score=-42.7; E_value=0.0019; Accession=PF02365.7; Description=No apical meristem (NAM) protein
PATPELVGMKKTLVFYKGRAPRGEKTNWVMHEYRLHSKSAPKSNKDEWVVCRVFAKSAGAKKYPSNNAHSRPHHHPYTLDMVPPLLPTLLQHDPFARGHHHHPYMTPADLAELARFARGTPGLHPHIQPHPGTAAAAYMNPAAAAAVA

SEQ ID NO: 75774 - protein, 230 aa, Setaria italica
  misc_feature (104)..(104): Xaa can be any naturally occurring amino acid
  Transcript Sequence Number=SeqID_9800
  Gene Ontology: Mol. function=metal ion binding; Cellular component =intracellular
  Homolog annotation: Hit_ID=Q5TKH9; Match level="QueryCoverage=91%, HitCoverage=25%, E-value=2e-44, Identity=52%"; Hit description =Putative BRCT domain-containing protein
NKTLNSDRPESPSLSPFFWLRGEEQEEGGTAGSLSEPLSLDTPLCHNAPTFSDIMDSDDEIPNNVTPNSKAEVSEIFDSEIFEWSQRPCSPELRSTPLKKTGKXKKILDQITETDDVEDMNLGGSFDKLDHESNAAQLVNGAEIKKRKSARARTKKNSKLPDCGKLCTKGCDAVHQVTDIPVSITTMPGQKNSGKKESNTSSGRSKVSCNSSRFLCSSDKSMETFPLFSP

SEQ ID NO: 75775 - protein, 119 aa, Setaria italica
  Transcript Sequence Number=SeqID_9801
DQDCFLHFKSHRSRCHFKVATNLFYELTVAEEEEIFLLLKRNAVQVTCPPLNSMYFGVVELVSNFPCNPWLQPRLERFHYLCTWLFKRVSAACFCTLLKIHIHIETGCRDALEKPCTEI

SEQ ID NO: 75776 - protein, 51 aa, Setaria italica
  Transcript Sequence Number=SeqID_9802
  Gene Ontology: Mol. function=transporter activity; Cellular component= intracellular; Biological process=transport
  Homolog annotation: Hit_ID=Q9SJS7; Match level="QueryCoverage=80%, HitCoverage=7%, E-value=2e-10, Identity=85%"; Hit description =Putative phosphatidylinositol/phosphatidylcholine transfer protein
AAVRRVDALEAELIVTKKALYDALMKQEELLAYIDRQEFARFEKKKKFFCF

SEQ ID NO: 75777 - protein, 655 aa, Setaria italica
  Transcript Sequence Number=SeqID_9803
  Gene Ontology: Mol. function=transporter activity; Cellular component= intracellular; Biological process=transport
  Homolog annotation: Hit_ID=Q1EPB6; Match level="QueryCoverage=82%, HitCoverage=90%, E-value=0.0, Identity=66%"; Hit description =Phosphatidylinositol transfer protein, putative
  Pfam annotation: Domain name=CRAL_TRIO; Domain location=100-286; Score=134.9; E_value=2.5e-37; Accession=PF00650.12; Description =CRALTRIO domain
  Pfam annotation: Domain name=CRAL_TRIO_N; Domain location=7-83; Score= 44.6; E_value=4e-10; Accession=PF03765.7; Description=CRALTRIO, N -terminus
  Pfam module annotation: Pfam domain module=CRAL_TRIO::CRAL_TRIO_N; Domain location=100-286::7-83
KNRRKSDIRGNSISIEDVRDFEELQTVDAFRQSLILDEMLPAKHDDYHMLLRFLKARKFDIEKAKHMWGDMLQWRSEFGADTIIEDFEYTELDEVLQYYPHGYHGVDKEGRPVYIERLGKVDPNKLMHVTTMDRYVKYHVKEFEKSFLIKFPACSIAAKRHIDSSTTILDVQAVSLKNFSKTARDLMTRLQNIDNDNYPETLYRMFIVNAGPGFRILWSTVKSFLDPKTTSKIQVLGAKFQTKLLEIINANQLPEFLGGSCTCSELGGCLKGEKGPWTDPNILKMVISGKACCKRQIVAVSNDDEKIIAYGKLKYSAKRGSDTSTAESGSEADDITSPKAIRTYGKNPMLTPVREEQAKLMKAANVSAGYSEYDVCVPMIDKVVDGTYFSDNTKCSESRHARVIAWLVAFVMMVTTLFRAFFSRIPKNTLDKSSEVDDNLSAYSLDYSTTKEEFRPPSPAPEFTEADILSSVLKRLAELEEKIDVLQSKPSEMPSEKEELLNAAVRRVDALEAELIVTKKALYDALMKQEELLAYIDRQEFARFEKKKKFFLLLKRNAVQVTCPPLNSMYFGVVELVSNFPCNPWLQPRLERFHYLCTWLFKRVSAACFCTLLKIHIHIETVVLCIIRWILAAAPLVLWRSFIQCLQLGEGLFYF

SEQ ID NO: 75778 - protein, 76 aa, Setaria italica
  Transcript Sequence Number=SeqID_9804
LQIQTLHVCRISSRKMRICECECECGVGVSTCSACCHRISENTPVVLEGESDPGTRPRPRVAPETGLASRSIILHP

SEQ ID NO: 75779 - protein, 560 aa, Setaria italica
  Transcript Sequence Number=SeqID_9805
  Gene Ontology: Mol. function=cysteine-type peptidase activity; Biological process=ubiquitin-dependent protein catabolic process
  Homolog annotation: Hit_ID=B9FUP4; Match level="QueryCoverage=95%, HitCoverage=71%, E-value=0.0, Identity=69%"; Hit description =Ubiquitin carboxyl-terminal hydrolase
  Pfam annotation: Domain name=UCH; Domain location=207-557; Score =191.9; E_value=1.8e-54; Accession=PF00443.21; Description=Ubiquitin carboxyl-terminal hydrolase
MSGGGSGSGDKMLLFGSFTEDETKLFQGQPLKSPTKSVNRSWELPEIQFGSLNFSVLSLQKASSPISKGVVLPAKSADAQSSTITRENACSNKKEAAGSSFPNGGPVLANGCPPVNVSPTNGVLENVKKTEAVVPPVVPARNISNAAPHSVSEVDKDGIKSTQSKKLNKEKEITENGSPIVDTPIVATPADEAVTSLNKKASQNMLLLPHGLRNTGNICFLNATLQALLSCSPFVHLLQDLRNRSIPKVGYPTLNAFVEFISQFDVLDESVMKKNEKAVTVAAKPLNPAMFDAVLKNFTPDVPAGISARPRQEDAQEFLSFAMNRMHDELLKLNGNVSNAKEGMVVSSADDDAWETVGRKNKSAIVRTQSFVPSELSAIFGGQLQSVVKAAGNKASATVQPYLLLHLDIFPDAVQTLNDALNLFSTPESLEGYRTAAGKAGLVTARKSFKIHTLSKIMILHLKRFSYGNHGSTKVYKPLHFPLQLVLNRDLLSSPSSEGRKYELVATITHHGKDPYRGHYTAHSKNANGQWLRFDDDAVTPVGQNEVLHDQAYILFYKQV

SEQ ID NO: 75780 - protein, 70 aa, Setaria italica
  misc_feature (29)..(29): Xaa can be any naturally occurring amino acid
  Transcript Sequence Number=SeqID_9806
  Gene Ontology: Mol. function=electron carrier activity; Biological process=response to oxidative stress
  Homolog annotation: Hit_ID=C3SA78; Match level="QueryCoverage=90%, HitCoverage=31%, E-value=5e-13, Identity=61%"; Hit description =Peroxidase (Fragment)
MATGALCFRAFALSMACLLLAVPLLVAQXPSKLSLEYYSKTCPNVEHVVRTEMECAVRADTRQCCPDASP

SEQ ID NO: 75781 - protein, 158 aa, Setaria italica
  Transcript Sequence Number=SeqID_9807
  Gene Ontology: Mol. function=electron carrier activity; Cellular component=extracellular region; Biological process=response to oxidative stress
  Homolog annotation: Hit_ID=Q5CC42; Match level="QueryCoverage=77%, HitCoverage=39%, E-value=8e-62, Identity=90%"; Hit description =Putative peroxidase
  Pfam annotation: Domain name=peroxidase; Domain location=1-123; Score= -100.5; E_value=0.038; Accession=PF00141.15; Description=Peroxidase
PRCILQAVLRLHGEDGQHHQPCRQTSFSLLRYVSDDRIYGDFEMTSKYNPSSETYLSKLKEVCPQDSGDDNISAMDSHTSAIFDNAYYETLIKGEGLLNSDQEMWSSIAGYSTADTVNKYWADPAAFFKQFSDSMVKMGNITNPAGGEVRKNCRFVNT

SEQ ID NO: 75782 - protein, 333 aa, Setaria italica
  Transcript Sequence Number=SeqID_9808
  Gene Ontology: Mol. function=electron carrier activity; Cellular component=extracellular region; Biological process=response to oxidative stress
  Homolog annotation: Hit_ID=Q5CC42; Match level="QueryCoverage=92%, HitCoverage=91%, E-value=1e-140, Identity=79%"; Hit description =Putative peroxidase
  Pfam annotation: Domain name=peroxidase; Domain location=49-299; Score=389.1; E_value=7.8e-114; Accession=PF00141.15; Description =Peroxidase
MATGALCFRAFALSMACLLLAVPLLVAQDPSKLSLEYYSKTCPNVEHVVRTEMECAVRADTRNAALMLRLHFHDCFVQGCDGSVLLDDTATMIGEKQADQNVNSLKGFELVDKIKEKLEAECPGTVSCADLLAIAARDAVVLVGGPYWDVPVGRLDSKKASLDLANSDIPTAQQGLVTLIAKFWQKGLDATDMVALVGSHTIGFARCENFRDRIYGDFEMTSKYNPSSETYLSKLKEVCPQDSGDDNISAMDSHTSAIFDNAYYETLIKGEGLLNSDQEMWSSIAGYSTADTVNKYWADPAAFFKSYFVRSCTYRLLTLSFTFGFLLFYPVFF

SEQ ID NO: 75783 - protein, 87 aa, Setaria italica
  Transcript Sequence Number=SeqID_9809
KKQETQFINTRYILAISWILTIPIIKYLSSSRKYCMTTRLEQEMKSDQRENHGDKFNLATGLTSSNTELGLEKRGTQRTKLQGKDTG

SEQ ID NO: 75784 - protein, 106 aa, Setaria italica
  Transcript Sequence Number=SeqID_9810
IQKRQGYRRRSRGTGTRTSRTTEAVTTLSGCRFGRNDKKGLGTLPFYKICRNALTLPSFFIPPARLGPARRLGRLRPSAPWARSTTAATAAAGRRRSPRTPRHYRD

SEQ ID NO: 75785 - protein, 269 aa, Setaria italica
  misc_feature (10)..(10): Xaa can be any naturally occurring amino acid
  Transcript Sequence Number=SeqID_9811
  Gene Ontology: Mol. function=structural constituent of cytoskeleton; Cellular component=microtubule organizing center; Biological process= microtubule cytoskeleton organization and biogenesis
  Homolog annotation: Hit_ID=B9T277; Match level="QueryCoverage=99%, HitCoverage=32%, E-value=2e-92, Identity=59%"; Hit description=Gamma- tubulin complex component, putative
DHGDGDRGWXDVFSLEYDARVPLDTVFTASVMKMYLKVFNFLWKLKRVDHSLTGVWKTMKPNCIVSSPFYKEGTSIRAQFVSVLRKCQVLFNEMNHFVTNFQYYIMFEVLEVSWARFSDEMDAAKDLDDLLLAHDKYLNSILEKALLGERSQGLLRNLFELFDIILQFRSHADRWFERIYELQLRGKGKPKSKSKETGSWLDGGRKAMIQLAGELFRKMGEDLDSIAKDYTASLDAFITQLPMQQHVDLKFLLFRLDFTEYYSRVSSSK

SEQ ID NO: 75786 - protein, 110 aa, Setaria italica
  Transcript Sequence Number=SeqID_9812
  Gene Ontology: Mol. function=protein disulfide oxidoreductase activity; Cellular component=cytoplasm; Biological process=electron transport chain
  Homolog annotation: Hit_ID=Q2R076; Match level="QueryCoverage=98%, HitCoverage=98%, E-value=9e-22, Identity=54%"; Hit description =Glutaredoxin-C10
  Pfam annotation: Domain name=Glutaredoxin; Domain location=13-83; Score=70.8; E_value=5.1e-18; Accession=PF00462.16; Description =Glutaredoxin
MDRVARLVSERTVVVFTVSNCSWCNVVTSLLDSLGVHAAVHDLDRDPRGREMERELARRLGGGAGRGGSTPTVPAVFVGGDLVGGINRVLALHLSDELVRMLRNAGAICP

SEQ ID NO: 75787 - protein, 632 aa, Setaria italica
  misc_feature (11)..(11): Xaa can be any naturally occurring amino acid
  Transcript Sequence Number=SeqID_9813
  Gene Ontology: Mol. function=hydrolase activity, hydrolyzing O -glycosyl compounds; Cellular component=chloroplast; Biological process=carbohydrate metabolic process
  Homolog annotation: Hit_ID=Q10PY8; Match level="QueryCoverage=99%, HitCoverage=98%, E-value=0.0, Identity=90%"; Hit description=Neutral alpha-glucosidase AB, putative, expressed
  Pfam annotation: Domain name=Glyco_hydro_31; Domain location=46-490; Score=806.0; E_value=2.4e-239; Accession=PF01055.18; Description =Glycosyl hydrolases family 31
VFFWLNAAERXMQIDVLAPGWDGATTLETGRIDTLWMAEAGVIDAFFFVGSEPKDVVKQYISVTGTPAMPQQFATAYHQCRWNYRDEADVDGVDAGFDEHDIPYDVLWLDIEHTDGKRYFTWDHSAFPNPEEMQRKIAGKGRKMVTIVDPHIKRDNSFHLHQEATEKGYYVKDADGNDYDGWCWPGSSSYPDMLNPEIREWWADKFSYENYKGSTPTLYIWNDMNEPSVFNGPEVTMPRDVIHYGDVEHRELHNAYGYYFHMATADGLLKRGEGKDRPFVLSRAFFAGSQRYGAVWTGDNSADWDHLKSSIPMVLTLGLTGLPFSGADVGGFFGNPEPDLLVRWYQVGAFYPFFRGHAHHDTKRREPWLFGERRTAIIREAIHVRYSLLPYFYTLFREASVTGIPVMRPLWLEFPDDKETYNNGEAFMVGPSLLAQGIYEEGQKSVSVYLPGKESWYDLRNGSPYKGSMSHKLQVLEDSIPSFQRGGTIVPRKDRFRRSSTQMVNDPYTLVIALNSSNAAEGELYVDDGKSYDYQHGAFIHRRFVFADNKLTSLNIAPDNLGKKKFTSECVIERIIILGLRSGAKKAIIEPGNQEVEIESGPVSLRSGSSPAAPTIRRPNVRIADDWTIRIA

SEQ ID NO: 75788 - protein, 241 aa, Setaria italica
  Transcript Sequence Number=SeqID_9814
  Homolog annotation: Hit_ID=Q00UY7; Match level="QueryCoverage=82%, HitCoverage=69%, E-value=3e-35, Identity=39%"; Hit description =F1N19.25 (ISS)
RRAGAVRCAATAPAPMGEKTEYRDGPLERAFMGLFARKMEKYATKKKQQQQQQTELEKKKKAVWEWDYESFVDVSRRVMVGRTRAQQQEAVREVLLSMLPPGAPEQFRKLFPPTRWACEFNAALTVPFFHWLVGPSEVIEVEVDGVKQKSGVLIKKCRYLENSGCVGMCVNMCKIPTQDFFTNEFGLPLTMNPNFEDMSCEMIYGQVPPPLEEDPVSKQPCYPNLCSMSTPSAPVCPKLQT

SEQ ID NO: 75789 - protein, 46 aa, Setaria italica
  Transcript Sequence Number=SeqID_9815
  Homolog annotation: Hit_ID=B6TT85; Match level="QueryCoverage=86%, HitCoverage=11%, E-value=1e-13, Identity=92%"; Hit description =Strictosidine synthase 3
TGRDNVTEALDGFSFVSVSEVAERGGALWVGSVDTPYAGELRRRIG

SEQ ID NO: 75790 - protein, 72 aa, Setaria italica
  Transcript Sequence Number=SeqID_9816
QCCSQLTESLEVVHAEAHQRDLQSLDTCSFALITLCLYVSPQNTRSYATHAHGRTHVHHSRPRHDKSLSQKR

SEQ ID NO: 75791 - protein, 79 aa, Setaria italica
  Transcript Sequence Number=SeqID_9817
  Gene Ontology: Mol. function=transferase activity, transferring glycosyl groups; Biological process=metabolic process
  Homolog annotation: Hit_ID=C4MF44; Match level="QueryCoverage=100%, HitCoverage=16%, E-value=3e-24, Identity=69%"; Hit description=UDP -glycosyltransferase UGT98B4
ASRMAGFINHAVATGLTIQFVKLHFPAVEFGLPDGCENADMIQSIDLFKNLMEACAALREPLTAYLRQQSPSPSCIISD

SEQ ID NO: 75792 - protein, 72 aa, Setaria italica
  Transcript Sequence Number=SeqID_9818
  Gene Ontology: Mol. function=phosphotransferase activity, alcohol group as acceptor; Biological process=protein modification process
  Homolog annotation: Hit_ID=B6SKC9; Match level="QueryCoverage=88%, HitCoverage=11%, E-value=5e-17, Identity=68%"; Hit description =Phosphatidylinositol 3-and 4-kinase family protein
LLKKGAARGLTPYDIGHILCRETVNRGSEIEDIIQEAEDAVLPGSSENMFLETISEIIDRHLNKVVFYSWNN

SEQ ID NO: 75793 - protein, 156 aa, Setaria italica
  misc_feature (92)..(92): Xaa can be any naturally occurring amino acid
  Transcript Sequence Number=SeqID_9819
  Gene Ontology: Mol. function=phosphotransferase activity, alcohol group as acceptor; Cellular component=peroxisome; Biological process= protein modification process
  Homolog annotation: Hit_ID=B6SKC9; Match level="QueryCoverage=94%, HitCoverage=26%, E-value=1e-65, Identity=80%"; Hit description =Phosphatidylinositol 3-and 4-kinase family protein
  Pfam annotation: Domain name=PI3_PI4_kinase; Domain location=1-111; Score=-35.7; E_value=0.0082; Accession=PF00454.19; Description =Phosphatidylinositol 3- and 4-kinase
NCYFVNLLDREEEGGNYKLIPIDHGYCLPEKFEDCTFEWLYWPQAREPFNNETIEYIKSLDAEKDIKLLKFHGWELSPRCARVLRISTMLLXKGAARGLTPYDIGHILCRETVNRGSEIEDIIQEAEDAVLPGSSENMFLETISEIIDRHLNKEFA

SEQ ID NO: 75794 - protein, 85 aa, Setaria italica
  misc_feature (53)..(53): Xaa can be any naturally occurring amino acid
  Transcript Sequence Number=SeqID_9820
  Gene Ontology: Mol. function=carbohydrate binding; Cellular component= endoplasmic reticulum membrane
  Pfam annotation: Domain name=DUF2012; Domain location=1-85; Score= -49.0; E_value=0.0069; Accession=PF09430.2; Description=Protein of unknown function (DUF2012)
VRVDISARNPGYIQAALTETRRVLNELVLEPLKEEQYYEVREPFSVMSLLKSXPMGLMVGFMVLMVFVMPKMMENIGKLSTLLHP

SEQ ID NO: 75795 - protein, 83 aa, Setaria italica
  Transcript Sequence Number=SeqID_9821
  Gene Ontology: Mol. function=carbohydrate binding
AVVSACLGAAAAHQAGSGEGYTISGRIKIEGANPKGFGLPAKTSNTKVILNGGQRVTFARPDGYFALYPTRREYTSFSFILKF

SEQ ID NO: 75796 - protein, 241 aa, Setaria italica
  Transcript Sequence Number=SeqID_9822
  Gene Ontology: Mol. function=carbohydrate binding; Cellular component= endoplasmic reticulum membrane
  Homolog annotation: Hit_ID=B7Q0N4; Match level="QueryCoverage=62%, HitCoverage=68%, E-value=3e-16, Identity=33%"; Hit description =Membrane protein, putative
  Pfam annotation: Domain name=DUF2012; Domain location=34-224; Score =279.9; E_value=5.8e-81; Accession=PF09430.2; Description=Protein of unknown function (DUF2012)
  Subcellular localization annotation: CTP_CleavageSite=31; ConfidenceScore=5.63e-01
PKPNRSKPKAATSSRLSPSGLPRPRRAATTTAKMAASFPRHGRLLVLLVVAVVSACLGAAAAHQAGSGEGYTISGRIKIEGANPKGFGLPAKTSNTKVILNGGQRVTFARPDGYFAFHNVPAGTHLIEVSSIGYFFSPVRVDISARNPGYIQAALTETRRVLNELVLEPLKEEQYYEVREPFSVMSLLKSPMGLMVGFMVLMVFVMPKMMENIDPEEMKQAQEQMRNNPVSFSSLLSRAQG

SEQ ID NO: 75797 - protein, 120 aa, Setaria italica
  misc_feature (30)..(30): Xaa can be any naturally occurring amino acid
  Transcript Sequence Number=SeqID_9823
MAAEAVGFMARGANGGRPAELVTRDFLGGXAAADDARDATAARHDAVPGKLSLPKHACPSTPRDLNLFPVAAAATKPCAVTTAPAPAPAPSSAACGGATTTYHSVCTIEKVKTALERFER

SEQ ID NO: 75798 - protein, 180 aa, Setaria italica
  misc_feature (59)..(59): Xaa can be any naturally occurring amino acid
  Transcript Sequence Number=SeqID_9824
  Gene Ontology: Mol. function=ATP-dependent helicase activity; Biological process=RNA processing
  Homolog annotation: Hit_ID=Q5N870; Match level="QueryCoverage=97%, HitCoverage=10%, E-value=5e-67, Identity=69%"; Hit description =Endoribonuclease Dicer homolog 3a
NGVTINRSEHKPNVFGMTASPVIRKGVSSDMDCENQLSELENILDSKIHTVLDSEQILXSQELCVPSAKEVNRYYEPRTVSFEDLSEELGILCSKYDGLIAQLYSRLTNQYKDADEITKESRRRLSNSLAKICYCLEDVGLLCASEATKICIERGHRKGWLKGGGDTTDQQSDANGPGLF

SEQ ID NO: 75799 - protein, 104 aa, Setaria italica
  Transcript Sequence Number=SeqID_9825
  Gene Ontology: Mol. function=DNA binding; Cellular component=nucleus; Biological process=regulation of transcription
  Homolog annotation: Hit_ID=Q8L438; Match level="QueryCoverage=98%, HitCoverage=58%, E-value=3e-51, Identity=95%"; Hit description=Myb -like DNA-binding protein-like
  Pfam annotation: Domain name=Myb_DNA-binding; Domain location=14-61; Score=51.9; E_value=2.4e-12; Accession=PF00249.23; Description=Myb -like DNA-binding domain
  Pfam annotation: Domain name=Myb_DNA-binding; Domain location=67-103; Score=18.3; E_value=0.031; Accession=PF00249.23; Description=Myb-like DNA-binding domain
  Pfam module annotation: Pfam domain module=Myb_DNA-binding::Myb_DNA -binding; Domain location=14-61::67-103
MARRTSGPKKKLRRGLWSPEEDEKLMNHIAKYGHGCWSSVPKLAGLERCGKSCRLRWINYLRPDLKRGAFSQEEEDLIIHLHSMLGNKWSQIAAQLPGRTDNGR

SEQ ID NO: 75800 - protein, 65 aa, Setaria italica
  Transcript Sequence Number=SeqID_9826
FFFFVKILISHLFMMRKKPTVTFVSCCMEHSNLSLKMQHPDKTLATCVGNICNIATSKIYFATST

SEQ ID NO: 75801 - protein, 243 aa, Setaria italica
  misc_feature (226)..(226): Xaa can be any naturally occurring amino acid
  Transcript Sequence Number=SeqID_9827
  Gene Ontology: Mol. function=metal ion binding
  Homolog annotation: Hit_ID=B6T7M2; Match level="QueryCoverage=83%, HitCoverage=52%, E-value=2e-72, Identity=68%"; Hit description=RHC1A
  Pfam annotation: Domain name=zf-C3HC4; Domain location=145-185; Score= 38.2; E_value=3.2e-08; Accession=PF00097.17; Description=Zinc finger, C3HC4 type (RING finger)
SRHNDISSILHTFLGLHEQPGRVGGGGSVRSAAGTATPENEPEPFDPVIFFQNYLHNLMDGGANIQVLLDDASVSLGPGLGLGRVGGASFGDYFVGPGLEQLIEQLAENDPNRYGTPPAAKSALSSLPDVVVTDAMVAAAEGAECAVCKEDFSPGEVAKQMPCKHIYHNDCIVPWLELHNSCPICRFELPTDDPDYEGRKASNPQPPVGIAAAAAPSGSSTSAEGXMEEREENARVVERRFNV

SEQ ID NO: 75802 - protein, 136 aa, Setaria italica
  Transcript Sequence Number=SeqID_9828
  Subcellular localization annotation: CTP_CleavageSite=44; ConfidenceScore=5.02e-01
QVSLMICSMMSPIKEFLPLSFFFCFFSHYSDCCMFFSGNVYVCRQGRSSQGRPGWIVKPLPSQISGFGSQLASSSCSNPLTLDFAEDHESSCLTFVSVLTARARISSMFLHTCRLPMGIMLFLLAGEVRKNNINGD

SEQ ID NO: 75803 - protein, 87 aa, Setaria italica
  Transcript Sequence Number=SeqID_9829
  Subcellular localization annotation: CTP_CleavageSite=80; ConfidenceScore=5.49e-01
QGRSSQGRPGWIVKPLPSQISGFGSQLASSSCSNPLTLDFAEDHESSCLTFVSVLTARARISSMFLHTCRLPMGIMLFLLAGEVRKF

SEQ ID NO: 75804 - protein, 77 aa, Setaria italica
  Transcript Sequence Number=SeqID_9830
NCEACSREEATDCDHSRVAAAHEKKLKLRLQPFFLLCHKVVLNYTSAHSVYILWFEGVYGLTSLLPSVPFYSNKLLN

SEQ ID NO: 75805 - protein, 168 aa, Setaria italica
  Transcript Sequence Number=SeqID_9831
  Gene Ontology: Mol. function=phosphoinositide binding; Biological process=cell communication
  Homolog annotation: Hit_ID=B4FAI4; Match level="QueryCoverage=95%, HitCoverage=31%, E-value=7e-51, Identity=60%"; Hit description=PX domain containing protein
TTTVNAAAPLVQAKAGRDLFGMFKGLKQTVVNGLVATKPPPVEQETDTEFLAHKARFEDLQQQLTTTSQQAETLVKAQDDLRETTGHLGMTLIKLAKFEREQATCNSLRRRAGEIHNFANHVLKMSRSQIKLNSEIVKHLGSIHEYLEAMISVNHAFTDRSNALHHVQ

SEQ ID NO: 75806 - protein, 216 aa, Setaria italica
  misc_feature (202)..(202): Xaa can be any naturally occurring amino acid
  Transcript Sequence Number=SeqID_9832
  Gene Ontology: Mol. function=RNA-directed DNA polymerase activity; Biological process=RNA-dependent DNA replication
  Homolog annotation: Hit_ID=Q8S461; Match level="QueryCoverage=97%, HitCoverage=11%, E-value=2e-90, Identity=77%"; Hit description =Putative prpol
RYSTKRVQRIRPLPRIDQIVDSTAGCETLSFLDAYSGYHQIAMKEADQLATSFITPFGPYCYVKMPFGLKNAGATFQRCMLKCFGDLIGRTVEAYVDDIVVKSRKSEQLVPGLELAFERLRDKRIKLNLEKCVFGVPRGMLLGFIVSVRGIEANPEKIAAVNDIGPIRNMKGVQRVMGCLASLSRFISRLGERGLPLYRLLXKSDRFEWTSEARGS

SEQ ID NO: 75807 - protein, 84 aa, Setaria italica
  Transcript Sequence Number=SeqID_9833
QHIAFSDQANSAATSMNREQHFHAGITDTSANPDYSQGVSTENYTGNCFRVSVKLVYSRAQQTSPLGSLLGWALVHLMKSCKQS

SEQ ID NO: 75808 - protein, 77 aa, Setaria italica
  Transcript Sequence Number=SeqID_9834
  Subcellular localization annotation: CTP_CleavageSite=17; ConfidenceScore=5.65e-01
RRSPPPGPPPPSRAPPTSSAPAPPPPPPPPPPTPLPAPRILPLTPGPPPPSSHRRLHRPRRPPNSPPSRPSSPPPPP

SEQ ID NO: 75809 - protein, 116 aa, Setaria italica
  Transcript Sequence Number=SeqID_9835
  Gene Ontology: Mol. function=catalytic activity; Cellular component =plasma membrane
  Homolog annotation: Hit_ID=B6TT19; Match level="QueryCoverage=75%, HitCoverage=20%, E-value=7e-44, Identity=95%"; Hit description =Catalytic/ protein phosphatase type 2C
MGNCVVSGGTTAVTAAGAGGEDGRRRGRRWKAPREEQLGSVPGRIFSNDGRSRTAAVFTQQGRKGINQDAMLVWDGFGGEDDVVLCGVFDGHGPHGHLVARRVRDALPLRLMSAVR

SEQ ID NO: 75810 - protein, 360 aa, Setaria italica
  Transcript Sequence Number=SeqID_9836
  Gene Ontology: Mol. function=catalytic activity; Cellular component =plasma membrane
  Homolog annotation: Hit_ID=Q8H4S6; Match level="QueryCoverage=100%, HitCoverage=83%, E-value=1e-167, Identity=81%"; Hit description =Probable protein phosphatase 2C 64
  Pfam annotation: Domain name=PP2C; Domain location=5-250; Score =106.2; E_value=1.1e-28; Accession=PF00481.13; Description=Protein phosphatase 2C
MLVWDGFGGEDDVVLCGVFDGHGPHGHLVARRVRDALPLRLMSAVRASKAGLDMPAAAWRKAFARAYKAMDKDLRSHATLDCFCSGSTGVTVLKLGSDLYMANIGDSRAVLGSRDAAAGGMVAVQLTVDLKPDVPSEAERIKKCRGRVFALQDEPEVPRVWLPFDDAPGLAMARAFGDFCLKDYGVISVPEFFHWSLSEKDQFVILASDGVWDVLSNQEAVDIVSSSPSRSKAAKSLVEAATREWKTKYPTSKIDDCAVVCLYLDGKMDHERDSTASMDNMSLDEGSVADPNEAEQEPALTRNFTVRTVAGSAHEKVLAGAVDAVVAGAAHDQNWSGLDGVTRVNSLVQLPRFSEEKAIG

SEQ ID NO: 75811 - protein, 264 aa, Setaria italica
  Transcript Sequence Number=SeqID_9837
  Gene Ontology: Mol. function=microtubule motor activity; Cellular component=microtubule associated complex; Biological process =microtubule-based movement
  Homolog annotation: Hit_ID=Q2QMU6; Match level="QueryCoverage=100%, HitCoverage=9%, E-value=1e-130, Identity=85%"; Hit description =Kinesin motor domain containing protein, expressed
SIRALEKDVSEKESEIAQCKAHISELNIHAEAAAREYKQKLMELEAMAQQVKTDNSSAHACSMRQEKISSKPHGSGSPFKCIGIGFVQQMNSEKDEELSAAKQRIVELEGIAASRQREIFMLNARLATTESMTHDVIRDMLGVKMNMTTWAALVDNQKKMEPTESAISQAQEIKEQSNELMKLKKQLDEFIEERQSWLDEINQKQSELGAARINIEKLRQREHFMIAEIELLKAENSNYKTIILNLEDEVKKLTRQQNLQLRIN

SEQ ID NO: 75812 - protein, 60 aa, Setaria italica
  Transcript Sequence Number=SeqID_9838
FAGLGSKKATSYGNPLDFVHITVCAVGSTKRHLGSACTARTHVIFKFGVTHKPRLITSSK

SEQ ID NO: 75813 - protein, 198 aa, Setaria italica
  Transcript Sequence Number=SeqID_9839
  Gene Ontology: Cellular component=endoplasmic reticulum
  Homolog annotation: Hit_ID=B6TMT9; Match level="QueryCoverage=100%, HitCoverage=100%, E-value=3e-58, Identity=59%"; Hit description =Reticulon
  Pfam annotation: Domain name=Reticulon; Domain location=17-179; Score= 190.6; E_value=4.4e-54; Accession=PF02453.9; Description=Reticulon
  Subcellular localization annotation: CTP_CleavageSite=29; ConfidenceScore=5.16e-01
MATHPRSLHALLGGGAVADVLLWRRRNASAAAVVGATAVWFVFERAGYSLPSVLSNALLLLVAILFFWAKSASLLNRPLPPLPNLEVSDVVVEKAADRALIWINRVLAVGHDIAIKRDRKVFIQVILVLWVVSYVGMLFNFLTLIYIGMMLSLLVPPLYEKYQDHVDEKLGVAHSVLSRHIDTIMTRAGQSAKQKKNE

SEQ ID NO: 75814 - protein, 131 aa, Setaria italica
  Transcript Sequence Number=SeqID_9840
  Gene Ontology: Mol. function=protein serine/threonine kinase activity; Biological process=protein amino acid phosphorylation
  Homolog annotation: Hit_ID=Q5ZAL3; Match level="QueryCoverage=99%, HitCoverage=16%, E-value=7e-54, Identity=75%"; Hit description =Putative serine/threonine kinase
  Pfam annotation: Domain name=Pkinase; Domain location=1-126; Score= -98.4; E_value=0.012; Accession=PF00069.17; Description=Protein kinase domain
  Pfam annotation: Domain name=Pkinase_Tyr; Domain location=1-130; Score=-146.7; E_value=0.00057; Accession=PF07714.9; Description =Protein tyrosine kinase
  Pfam module annotation: Pfam domain module=Pkinase::Pkinase_Tyr; Domain location=1-126::1-130
GVAQGLLYLHKHSRLRVIHRDLKASNILLDRDMNPKISDFGMARIFCSNVTEANTTRVVGTHGYIAPEYASEGLFSIKSDVFSFGVLLLEIITGKRTAGFYQYGKFFNLTGYAYQLWQDGRWHELVDPALG

SEQ ID NO: 75815 - protein, 279 aa, Setaria italica
  Transcript Sequence Number=SeqID_9841
  Gene Ontology: Mol. function=heat shock protein binding
  Homolog annotation: Hit_ID=Q108V8; Match level="QueryCoverage=100%, HitCoverage=10%, E-value=1e-133, Identity=83%"; Hit description=DNAJ heat shock N-terminal domain-containing protein, putative, expressed
AHPAESVRETISVIMRTIAEEDAIAAESMRDAALKDGALLRHLLNAFFFPAGERRDVSRQLVALWADSYQPALDLLSRILPPGLVAYLHTRSDEDSQSQYDEAPLSRRQKRILQQRRARGSKSMAAQEQGTPSNGVDDGALFRHTSAGTYGGADVDQRHVGQYTSAHSPVAGMNIDPSHAMSVPHGSVPEALSENNHQIGAPQLDSHVYLVDSNANGNLVSSSHSDFSVPAQVVVENTPVGSGRLLCNWYGFWRAFSLDHNRADLIWNERTRQELKEAL

SEQ ID NO: 75816 - protein, 182 aa, Setaria italica
  misc_feature (85)..(85): Xaa can be any naturally occurring amino acid
  misc_feature (150)..(150): Xaa can be any naturally occurring amino acid
  Transcript Sequence Number=SeqID_9842
  Gene Ontology: Mol. function=tRNA isopentenyltransferase activity; Cellular component=intracellular; Biological process=tRNA processing
  Homolog annotation: Hit_ID=B2XWS3; Match level="QueryCoverage=97%, HitCoverage=36%, E-value=8e-78, Identity=80%"; Hit description =Isopentenyl transferase IPT1
  Pfam annotation: Domain name=IPPT; Domain location=1-176; Score= -67.7; E_value=2.7e-06; Accession=PF01715.9; Description=IPP transferase
ALVSPFLFDDMAQDMQDCTLSDHPDDIGLNNNDEGSGYERLKEIDPVAAQRIHPNDHRKIKRYLELYATTGALPSNLFQGEAAKXQKWGRASNSRFDCCFLWVDADIQVLDNYVNQRVDCMMDAGLLDEVCNIYDPDAVYTQGLRQAIGXVREFDEFFRLYLTRKESDKDKAASSTTMLTVH

SEQ ID NO: 75817 - protein, 219 aa, Setaria italica
  misc_feature (179)..(179): Xaa can be any naturally occurring amino acid
  misc_feature (195)..(195): Xaa can be any naturally occurring amino acid
  misc_feature (209)..(209): Xaa can be any naturally occurring amino acid
  Transcript Sequence Number=SeqID_9843
  Gene Ontology: Mol. function=tRNA isopentenyltransferase activity; Cellular component=intracellular; Biological process=tRNA processing
  Homolog annotation: Hit_ID=B2XWS3; Match level="QueryCoverage=100%, HitCoverage=46%, E-value=1e-109, Identity=85%"; Hit description =Isopentenyl transferase IPT1
  Pfam annotation: Domain name=IPPT; Domain location=12-219; Score =60.3; E_value=7.3e-15; Accession=PF01715.9; Description=IPP transferase
FAGVEVVSADSMQVYRGLDVLTNKVPLHEQKGVPHHLLSVIDPSVEFTCRDFRDHAVPIIQEILNRGGLPVIVGGTNFYIQALVSPFLFDDMAQDMQDCTLSDHPDDIGLNNNDEGSGYERLKEIDPVAAQRIHPNDHRKIKRYLELYATTGALPSNLFQGEAAKKWGRASNSRFDCCXLWVDADIQVLDNYVNXKVDCMMDAGLLDEXCNIYDPDAVY

SEQ ID NO: 75818 - protein, 225 aa, Setaria italica
  misc_feature (50)..(50): Xaa can be any naturally occurring amino acid
  misc_feature (95)..(95): Xaa can be any naturally occurring amino acid
  Transcript Sequence Number=SeqID_9844
  Gene Ontology: Mol. function=tRNA isopentenyltransferase activity; Cellular component=intracellular; Biological process=tRNA processing
  Homolog annotation: Hit_ID=B2XWS3; Match level="QueryCoverage=85%, HitCoverage=39%, E-value=2e-68, Identity=69%"; Hit description =Isopentenyl transferase IPT1
YCLVLFLSFLDNYVNQRVDCMMDAGLLDEVCNIYDPDAVYTQGLRQAIGXVREFDEFFRLYLTRKESDKDKAASSTTMLTVHDDQLKSLLDDAVXQLKTNTRRLVRRQRRRLHRLSKDFGWNLHRVDATKAFCCTTGDSWNHEVVEPCVDVVKRFLADGAACLPSTNASDGIGERELWTQYVCEACDKRVLRGAHEWEQHRQGRGHRRRVQRLKQRKSLIRPSES

SEQ ID NO: 75819 - protein, 276 aa, Setaria italica
  misc_feature (168)..(168): Xaa can be any naturally occurring amino acid
  Transcript Sequence Number=SeqID_9845
  Gene Ontology: Cellular component=nucleus; Biological process =multicellular organismal development
  Homolog annotation: Hit_ID=Q00UI2; Match level="QueryCoverage=97%, HitCoverage=31%, E-value=6e-64, Identity=42%"; Hit description=Daxx -interacting protein MSP58/p78, contains FHA domain (ISS)
  Pfam annotation: Domain name=DUF1253; Domain location=1-275; Score =235.1; E_value=1.7e-67; Accession=PF06862.4; Description=Protein of unknown function (DUF1253)
LSSIEIVIVDHADVISMQNWAHLEAVFEQLNHLPSKEHGTNVMRIRPWYLDQHAQYYRQTILLSSYLTPEINALFNGSCFNYEGKIKMVTEYAGVLPKIQLEVRQVYERFDASSIAGADDARFDYFCNKVYPKIQDLDEGGLLLFVSSYFEYIRISNFLKSKEASFCXRIGEATSQQDISRSRLWFFEGKKKILLYSERSHFYHRYKIRGTKHLLIYSLPGRKEFYPELVNMLGESENPKCNVLFSRLDLLKLERIVGTSSARRLISSDKSMFVFC

SEQ ID NO: 75820 - protein, 264 aa, Setaria italica
  misc_feature (140)..(140): Xaa can be any naturally occurring amino acid
  Transcript Sequence Number=SeqID_9846
  Gene Ontology: Mol. function=nucleotide binding; Biological process =defense response
  Homolog annotation: Hit_ID=Q7XIQ0; Match level="QueryCoverage=57%, HitCoverage=11%, E-value=1e-25, Identity=41%"; Hit description =Putative resistance complex protein I2C-1
  Pfam annotation: Domain name=LRR_1; Domain location=110-127; Score =3.1; E_value=77; Accession=PF00560.25; Description=Leucine Rich Repeat
  Pfam annotation: Domain name=LRR_1; Domain location=133-156; Score =5.7; E_value=25; Accession=PF00560.25; Description=Leucine Rich Repeat
  Pfam annotation: Domain name=LRR_1; Domain location=40-61; Score=3.9; E_value=55; Accession=PF00560.25; Description=Leucine Rich Repeat
  Pfam annotation: Domain name=LRR_1; Domain location=63-86; Score=4.6; E_value=40; Accession=PF00560.25; Description=Leucine Rich Repeat
  Pfam module annotation: Pfam domain module=LRR_1::LRR_1::LRR_1::LRR _1; Domain location=110-127::133-156::40-61::63-86
NSNNRKVTNVVFQSLEELTFGSMVKWENWADAENRELFPNLQKLQINRCYNLRRLPFMALSIAIKELSLSGCGSYSGTVSSYLHRLTCLTHLKVNDCSQKLILPCQKLVSLEYLHLSNCKELCFEGGILCMNNLKALHIXSCHIVRLSIEEELTRLLSGWASMFGEEQALVLKTTILQIVKEAGMKSRDIHLPVSAVAGLSKKSDRKRRDTQHKQEHIHVMQSLTDLTMDNLSQSLNLDNILCKLSTLRTLCLHKVHDISILQE

SEQ ID NO: 75821 - protein, 323 aa, Setaria italica
  Transcript Sequence Number=SeqID_9847
  Gene Ontology: Mol. function=transcription factor activity; Cellular component=nucleus; Biological process=negative regulation of transcription from RNA polymerase II promoter
  Homolog annotation: Hit_ID=Q013C1; Match level="QueryCoverage=85%, HitCoverage=55%, E-value=7e-35, Identity=31%"; Hit description=[S] KOG2422 Uncharacterized conserved protein
  Pfam annotation: Domain name=DUF654; Domain location=172-323; Score =21.2; E_value=7.7e-13; Accession=PF04910.6; Description=Protein of unknown function, DUF654
ERSQPLSYTEQKHSVQKKPTNVVPETNKKSKKKKKKSKAEPSSMKSKDEQSLDSILEDLSIEKKPMQQRVHQSDRATGKEIETDEAGATSILTIDPKHLKGENEMRRIFGSKVVDSFESQRNMPSSSRQVRGVRRVAHNPRKTLLVSPPSYWPPWDKSISMDLLETKSGLNYFRYTFDPSVSHVQELFEAAKAANDLNAIAAILGKYPYHPESLLTFAELFKYSGEHQSSADAVEKCLFALECAWHPLFSPLQGNYQLKYSHDINKPFFTALFSHMKNLDRRGCHRSALEVCKFLLSLDSDDPKGALFCIDYFALRSQQYKWL

SEQ ID NO: 75822 - protein, 328 aa, Setaria italica
  misc_feature (13)..(13): Xaa can be any naturally occurring amino acid
  misc_feature (21)..(21): Xaa can be any naturally occurring amino acid
  misc_feature (24)..(24): Xaa can be any naturally occurring amino acid
  Transcript Sequence Number=SeqID_9848
  Gene Ontology: Mol. function=transcription factor activity; Cellular component=nucleus; Biological process=negative regulation of transcription from RNA polymerase II promoter
  Homolog annotation: Hit_ID=Q013C1; Match level="QueryCoverage=78%, HitCoverage=55%, E-value=5e-30, Identity=35%"; Hit description=[S] KOG2422 Uncharacterized conserved protein
  Pfam annotation: Domain name=DUF654; Domain location=2-278; Score =274.2; E_value=3e-79; Accession=PF04910.6; Description=Protein of unknown function, DUF654
EVPFALECAWHPXFSPLHGNXISXYLIKINEPFFTALFSHMKNLDRRGCHRSALEVCKFLLSLDSDDPKGALFCIDYFALRSQQYKWLEQFAEEYQCDNSLWLFPNFSFSLAIARFYLERDATSEGSDHADKSTSVDLMKQALMLHPLVLCKIVDKAPLKDSSWTQILRNVFFGSAKPGSPSLEHMINIYVERHYIMWRFPELQNLLKEAALLVIESLKQDNREAQDWACVRKEAFSSEKNEYSHLLVSDFSDTTPSLPPEELRPFMVGPGMVHEMPPVEQEAAGAERLRAPRDVVGRNPALVFLESLLPWVDYGDNHHDANDDNNGD

SEQ ID NO: 75823 - protein, 67 aa, Setaria italica
  Transcript Sequence Number=SeqID_9849
  Homolog annotation: Hit_ID=B9SFK0; Match level="QueryCoverage=97%, HitCoverage=12%, E-value=2e-12, Identity=47%"; Hit description =Pentatricopeptide repeat-containing protein, putative
MYGKHNRLEEMHRVLDEMECSKFGRTKKTFWIMYKAYVSCGRRTEANTILGMIWKHGFGLPRSVSVQ

SEQ ID NO: 75824 - protein, 87 aa, Setaria italica
  Transcript Sequence Number=SeqID_9850
VTATRAEQIENKHKHTNTQHYTRIQGTNSQSPTDALCLLLHTDRSGSLIQSSVRHVAGVVPSLPPPGAATAPLADAAGHATRGVAAG

SEQ ID NO: 75825 - protein, 88 aa, Setaria italica
  Transcript Sequence Number=SeqID_9851
CRRGEHVVVREEDHPAAATTRPLLPHAAGAASDHRQNPHSSSEDHGRIKPLGGFSYPYRTQHMAMFDSTPTNALLSQPLFLLSTHPTH

SEQ ID NO: 75826 - protein, 117 aa, Setaria italica
  Transcript Sequence Number=SeqID_9852
  Gene Ontology: Mol. function=transferase activity, transferring phosphorus-containing groups; Cellular component=chloroplast; Biological process=sulfate assimilation
  Homolog annotation: Hit_ID=B4F9S5; Match level="QueryCoverage=67%, HitCoverage=29%, E-value=3e-39, Identity=98%"; Hit description =Adenylyl-sulfate kinase
  Pfam annotation: Domain name=APS_kinase; Domain location=77-117; Score=-74.0; E_value=0.00017; Accession=PF01583.12; Description =Adenylylsulphate kinase
GAARWRRAAVRVRGRTAAAALGGGCGGGGGMEQRHGDGPHSPVKEKPVMSNIGKSTNILWHNCPIGQSDRQKLLGQKGCVVWITGLSGSGKSTLACALSRELHCRGHLTYVLDGDNL

SEQ ID NO: 75827 - protein, 113 aa, Setaria italica
  Transcript Sequence Number=SeqID_9853
  Gene Ontology: Mol. function=transferase activity, transferring phosphorus-containing groups; Cellular component=chloroplast; Biological process=amino acid biosynthetic process
  Homolog annotation: Hit_ID=B4FQF6; Match level="QueryCoverage=83%, HitCoverage=37%, E-value=7e-45, Identity=92%"; Hit description =Adenylyl-sulfate kinase
  Pfam annotation: Domain name=APS_kinase; Domain location=1-98; Score =113.4; E_value=7.4e-31; Accession=PF01583.12; Description =Adenylylsulphate kinase
IFRAGEVAKLFADAGIICIASLISPYRRDRDACRALLPDSKFIEVFMDLPLKICEARDPKGLYKLARTGKIKGFTGIDDPYEPPVNGEVSLKSMSYSYFLCARTLQFPYSNWI

SEQ ID NO: 75828 - protein, 215 aa, Setaria italica
  Transcript Sequence Number=SeqID_9854
  Gene Ontology: Mol. function=transferase activity, transferring phosphorus-containing groups; Cellular component=chloroplast; Biological process=sulfate assimilation
  Homolog annotation: Hit_ID=B4FJ56; Match level="QueryCoverage=82%, HitCoverage=79%, E-value=3e-96, Identity=94%"; Hit description =Adenylyl-sulfate kinase
  Pfam annotation: Domain name=APS_kinase; Domain location=45-192; Score=305.8; E_value=9.3e-89; Accession=PF01583.12; Description =Adenylylsulphate kinase
RASPAVVGAARWRRAAVRVRGRTAAAALGGGCGGGGGMEQRHGDGPHSPGKSTLACALSRELHCRGHLTYVLDGDNLRHGLNRDLSFKAEDRAENIRRVGEVAKLFADAGIICIASLISPYRRDRDACRALLPDSKFIEVFMDLPLKICEARDPKGLYKLARTGKIKGFTGIDDPYEPPVNGEIVIQMKDGECPSPKAMAKQVMCYLEENGCLQA

SEQ ID NO: 75829 - protein, 124 aa, Setaria italica
  Transcript Sequence Number=SeqID_9855
  Gene Ontology: Mol. function=protein binding
  Homolog annotation: Hit_ID=Q7X8J3; Match level="QueryCoverage=79%, HitCoverage=25%, E-value=4e-20, Identity=55%"; Hit description =OSJNBa0088K19.1 protein
MSTAASTTSGGTPLRSASAIVAVTESGQHLLRIDGYSHTTGIPTGSDIKSSPFRVGGHSWRISYYPGAQTSSWPYYNCISLSLRLDDDAAKPQGVVRARHSFSLLDREGKPGPYFTNNGNKTLA

SEQ ID NO: 75830 - protein, 436 aa, Setaria italica
  Transcript Sequence Number=SeqID_9856
  Homolog annotation: Hit_ID=Q84NP6; Match level="QueryCoverage=80%, HitCoverage=71%, E-value=1e-107, Identity=52%"; Hit description=Leaf senescence related protein-like
  Pfam annotation: Domain name=DUF231; Domain location=240-413; Score =239.7; E_value=7e-69; Accession=PF03005.7; Description=Arabidopsis proteins of unknown function
LPPRGRSLLAAARRSPVTTLVVAFFLLALFMYGEDARTIAELSIDDYLYPDADLYNVSGLPPLVLPPPTCDLSAGRWLFDNVSTPAYREKDCTFLTKQVTCLANGRPDDTWQYWKWQPNDCSLPAFDARRFMETMRGKRLMFVGDSLNRNQWESLVCLVQPILSKGRKKIVKRGSLTIFHAKEYRATLEFYWAPFLVESNSDNPKIHSIEHRIIRPDRIEGHAKYWKDVDYLIFNTYIWWMNTADMKVRRPNSRYWSQHDEVPRIEAYGRVFKTWSDWLNHNIDPARTSVFFMTISPLHISPQNWGNPEGIRCVKETLPYQNYSQPLDLYHDMRIFDLVVKVASSMEKVPVTVINITRMSDYRKDAHTSLYTIRQGKLLTPKQKADPEKFADCIHWCLPGVPDVWNQILYTRILSKSSWHSNSAPPPLQSLPLPPQ

SEQ ID NO: 75831 - protein, 254 aa, Setaria italica
  misc_feature (4)..(4): Xaa can be any naturally occurring amino acid
  misc_feature (15)..(15): Xaa can be any naturally occurring amino acid
  Transcript Sequence Number=SeqID_9857
  Gene Ontology: Cellular component=membrane
  Homolog annotation: Hit_ID=O80599; Match level="QueryCoverage=80%, HitCoverage=38%, E-value=4e-50, Identity=50%"; Hit description =T27I1.10 protein
  Pfam annotation: Domain name=DUF221; Domain location=3-112; Score= -156.5; E_value=0.0059; Accession=PF02714.7; Description=Domain of unknown function DUF221
LMQXFGLIWNFIKEXYFLRMREDTEFVPSFPYHTEVPKVLLFGLLGFTCSVLAPLILPFLLVYFFLGYVVYRNQLLNVYRTRYDTGGLYWPIAHNTVIFSLVLTQVIGLGVFGLKESPVAAGFTIPLIILTLLFNQYCRNRLLPLFRTFPAQDLIDMDREDERSGRIDEIHHRLHSAYCQFPDTEDVPLEKIKIIGGDEEQGCSSGESTGKDTCMDPKMDLSHPTLKGLPVSRLRHAVRLITFLIRLQKRGLSE

SEQ ID NO: 75832 - protein, 361 aa, Setaria italica
  Transcript Sequence Number=SeqID_9858
  Gene Ontology: Mol. function=nucleotidyltransferase activity; Cellular component=cytoplasm; Biological process=biosynthetic process
  Homolog annotation: Hit_ID=Q1PCW7; Match level="QueryCoverage=100%, HitCoverage=100%, E-value=0.0, Identity=88%"; Hit description=GDP -mannose pyrophosphorylase
  Pfam annotation: Domain name=Hexapep; Domain location=248-265; Score =7.7; E_value=19; Accession=PF00132.16; Description=Bacterial transferase hexapeptide (th
  Pfam annotation: Domain name=Hexapep; Domain location=266-283; Score =20.7; E_value=0.0063; Accession=PF00132.16; Description=Bacterial transferase hexapeptide (th
  Pfam annotation: Domain name=Hexapep; Domain location=306-323; Score =11.5; E_value=3.5; Accession=PF00132.16; Description=Bacterial transferase hexapeptide (th
  Pfam annotation: Domain name=NTP_transferase; Domain location=2-236; Score=255.7; E_value=1.1e-73; Accession=PF00483.15; Description =Nucleotidyl transferase
  Pfam module annotation: Pfam domain module=Hexapep::Hexapep::Hexapep:: NTP_transferase; Domain location=248-265::266-283::306-323::2-236
MKALILVGGFGTRLRPLTLSFPKPLVDFANKPMILHQIEALKEVGVTEVVLAINYRPEVMINFLKDFEDKLGITITCSQETEPLGTAGPLALARDKLADGSGEPFFVLNSDVISEYPFAELIEFHKSHGGEATIMVTKVDEPSKYGVVVMEEATGRVERFVEKPKIFVGNKINAGIYLLNPSVLDRIELRPTSIEKEVFPQIAADQKLHAMVLPGFWMDVGQPRDYITGLRLYLDSLRKKSAAKLASGAHVVGNVLVHESAKIGEGCLIGPDVAIGPGCVVEDGVRLSRCTVMRGVRIKKHACISNSIIGWHSTVGQWARIENMTILGEDVHVCDEVYSNGGVVLPHKEIKSSILKPEIVM

SEQ ID NO: 75833 - protein, 117 aa, Setaria italica
  Transcript Sequence Number=SeqID_9859
  Gene Ontology: Mol. function=methyltransferase activity; Biological process=metabolic process
  Homolog annotation: Hit_ID=Q8S0I2; Match level="QueryCoverage=100%, HitCoverage=38%, E-value=5e-60, Identity=94%"; Hit description =Methyltransferase-like
TLFYSVPRFVTHIDDQAIRALTEYYSEVLPPSNTPGVAILDMCSSWVSHYPPGYKQEKIVGMGLNEDELKRNSVLTEYVVQDLNVNPKLPFEDNTFDVITNVVSVDYLTKPIDVFKE

SEQ ID NO: 75834 - protein, 240 aa, Setaria italica
  Transcript Sequence Number=SeqID_9860
  Gene Ontology: Mol. function=methyltransferase activity; Biological process=metabolic process
  Homolog annotation: Hit_ID=Q8S0I2; Match level="QueryCoverage=100%, HitCoverage=76%, E-value=1e-127, Identity=91%"; Hit description =Methyltransferase-like
  Pfam annotation: Domain name=Methyltransf_11; Domain location=81-175; Score=21.4; E_value=0.00092; Accession=PF08241.4; Description =Methyltransferase domain
VAGARPRQGVSPVEQILKNVEWPDEFPFKPEDFSRFDESSDTLFYSVPRFVTHIDDQAIRALTEYYSEVLPPSNTPGVAILDMCSSWVSHYPPGYKQEKIVGMLLCKRLNEDELKRNSVLTEYVVQDLNVNPKLPFEDNTFDVITNVVSVDYLTKPIDVFKEMQRILKPAGLAIMSFSNRCFWTKAISIWTSTGDADHAWIVGAYFHYAGDFEPPQAVDISPSPGRTDPMYVVYSRKRIA

SEQ ID NO: 75835 - protein, 131 aa, Setaria italica
  Transcript Sequence Number=SeqID_9861
  Gene Ontology: Mol. function=hydrolase activity; Cellular component =anchored to membrane
  Homolog annotation: Hit_ID=B6TFY1; Match level="QueryCoverage=83%, HitCoverage=47%, E-value=4e-41, Identity=77%"; Hit description=GPI -anchored protein
  Pfam annotation: Domain name=X8; Domain location=20-104; Score=121.1; E_value=3.7e-33; Accession=PF07983.5; Description=X8 domain
MAAPLLLLLLLAMFAGSDAAFCVCKPGIPDTMMQKAIDYACSKGADCTPTAMGGPCYGNGNKVAVCSYICNSYFQSRSSMGATCDFGGVATLTTTDPSSGTCKFASGPSSAGGGGGGMGGTGGTGAGTGAG

SEQ ID NO: 75836 - protein, 55 aa, Setaria italica
  Transcript Sequence Number=SeqID_9862
LSSAGARNKPWDYQEVKQLPYHWLHLARHYIINQRKRKTKVNLSSRPAPIADYLT

SEQ ID NO: 75837 - protein, 132 aa, Setaria italica
  Transcript Sequence Number=SeqID_9863
  Homolog annotation: Hit_ID=B1B5J2; Match level="QueryCoverage=84%, HitCoverage=18%, E-value=8e-29, Identity=61%"; Hit description =Calmodulin-binding protein
GGGEEEDAAEPEMMARRPSFKWSTPTGARIGCLRDYPADLQSMALEQVNLSPRVAPSPGAAGRLPLPIPSPRPSPRIRLSPRLHYMGLPTPTSARLPIPSPAPGATRRSPKQQFMGFQTPAVALTLPKHKGK

SEQ ID NO: 75838 - protein, 682 aa, Setaria italica
  Transcript Sequence Number=SeqID_9864
  Gene Ontology: Mol. function=ATP-dependent helicase activity; Cellular component=nuclear speck
  Homolog annotation: Hit_ID=B6ST55; Match level="QueryCoverage=89%, HitCoverage=79%, E-value=0.0, Identity=87%"; Hit description=Pre -mRNA-processing ATP-dependent RNA helicase prp-5
  Pfam annotation: Domain name=DEAD; Domain location=157-328; Score =257.7; E_value=2.7e-74; Accession=PF00270.21; Description=DEADDEAH box helicase
  Pfam annotation: Domain name=Helicase_C; Domain location=397-473; Score=121.8; E_value=2.3e-33; Accession=PF00271.23; Description =Helicase conserved C-terminal domain
  Pfam module annotation: Pfam domain module=DEAD::Helicase_C; Domain location=157-328::397-473
PPKPEAVRRADSDDDEDDPVESFLRAKKDAGLALAADAMRAGYDSDEEVYAAAKAVDAGMMEYDSDDNPIVVDKKKIEPIPALDHSTIEYDAFTKDFYEEKPLISGMSDQEVADYMKSLAIRVSGFDVPRPIKNFEDCGFPVPLMNAIAKQAYEKPTTIQCQALPIVLSGRDIIGIAKTGSGKTAAFVLPMIVHIMDQPELEKEEGPIGVICAPTRELAHQIYLEAKKFAKPYNLRVAAVYGGVSKFDQFKELKAGCEVVIATPGRLIDLLKMKALKMFRATYLVLDEADRMFDLGFEPQIRSIVGQIRPDRQTLLFSATMPYKVERLAREILTDPIRVTVGQVGSANEDIKQVVNVLPSDTEKMPWLLEKLPGMIDDGDVLVFASKKARVDEIEKELNQRGFRIAALHGDKDQASRMETLQKFKSGTYHVLVATDVAARGLDIKSIKTVVNFDIAKEMDMHIHRIGRTGRAGDKDGTAYTLITQKEARFAGELVHSLIAAGQDVPNELMDLAMKDGRFRAKRDSRKGGKKGGGKGKGGGGGAGRSRGVRGVDFGLGIGYNAESGAQVPAPRTAAVNSLKTGMMQQFKSSFVSGSSNTPSSSAPSFVRPALRGFVSGGTIGGDSRPAQSAPSFVPASRSAPLAPSFVPASRPAGNSNEIGNQNPESSRDRSRERKRPSGWDR

SEQ ID NO: 75839 - protein, 73 aa, Setaria italica
  Transcript Sequence Number=SeqID_9865
AVKYADFHQQQQQQVSSMSHNSNSEQQHQLHLQHPGSGSHDQHRGGGRNNVDHPEEDEDDDDEEPVSDSSPEE

SEQ ID NO: 75840 - protein, 219 aa, Setaria italica
  Transcript Sequence Number=SeqID_9866
  Gene Ontology: Mol. function=nucleotide binding; Cellular component =nucleus; Biological process=defense response
  Homolog annotation: Hit_ID=Q8L441; Match level="QueryCoverage=89%, HitCoverage=20%, E-value=7e-65, Identity=60%"; Hit description =Putative NBS-LRR type resistance protein
  Pfam annotation: Domain name=NB-ARC; Domain location=46-217; Score= -34.8; E_value=3.8e-07; Accession=PF00931.14; Description=NB-ARC domain
QTNYERLAEMNTFGFRHLQQAQPSRQWRQTDSIIIDSDTDILSRSRDREKKKIVGMLLDQASNMDLMVLPIVGMGGMGKTTFVQLIYNDPAIEKHFEFRRWCCVSDDFDVSTIASNICQTNEKGREKSLQELQSIISGKRYLIVLDDVWNRDADKWGKLKTCLKQGGKGSVVLTTTRDAEVARIMTMGVAEAHNIENLSDEHLKEIVQSRAFTLQNPNI

SEQ ID NO: 75841 - protein, 227 aa, Setaria italica
  Transcript Sequence Number=SeqID_9867
  Gene Ontology: Mol. function=transferase activity, transferring glycosyl groups; Cellular component=integral to membrane; Biological process=protein amino acid glycosylation
  Homolog annotation: Hit_ID=B9S8X5; Match level="QueryCoverage=94%, HitCoverage=31%, E-value=2e-39, Identity=42%"; Hit description =Transferase, transferring glycosyl groups, putative
  Pfam annotation: Domain name=Gal-bind_lectin; Domain location=78-203; Score=19.2; E_value=1.2e-05; Accession=PF00337.14; Description =Galactoside-binding lectin
GNISPEVFQWLDTWNQMKQLTNITNGLPHASEAINDGRTAWENLTTSVHNAKSQHREKERLCPYSIRRMDASKLETDSFTIEVPCGLIVGSSITLIGTPGVLSGNFWIDLVGTALPGESENPIVLQYNVHLNGDKITKDPVIVQNTFTGNNGWGVEERCPSTNSHNATEGTSNLLISCIQELISLHTTDATSSTVDDLKRCNAMVGREDRDIMNSKHHAAAKKHREP

SEQ ID NO: 75842 - protein, 128 aa, Setaria italica
  Transcript Sequence Number=SeqID_9868
  Gene Ontology: Mol. function=transferase activity, transferring glycosyl groups; Cellular component=integral to membrane; Biological process=protein amino acid glycosylation
MWMTNKLATTVSITFFSLVIVRYLIVNSPTSGISQYQILHTNPLEWFNSPVAAQETTPEAAAANASTSNSLDFGNISPEVFQWLDTWNQMKQLTNITNGLPHASEAINDGRINSQNGRFQVGDRFFHH

SEQ ID NO: 75843 - protein, 78 aa, Setaria italica
  Transcript Sequence Number=SeqID_9869
LQQRGKPLEQETLIRSAMPASQTLKRPCYRSGNSYAFLHEHDPSTIITHRSNAGSSCRHQKEQGVDVSTIDDVVRHHR

SEQ ID NO: 75844 - protein, 95 aa, Setaria italica
  Transcript Sequence Number=SeqID_9870
YLRASKSIKIATVPYPQVHVSVSYLSVFLSCVPNKAARLLKKKERIRLLIYQWATVARSIDPHAARQRALRSLRPSGPRSHFMHACPINCTAACS

SEQ ID NO: 75845 - protein, 77 aa, Setaria italica
  Transcript Sequence Number=SeqID_9871
SHSRKRNSSQELSGHRESGGDPPPPVDPTKKKKVVGVVGKWRELGPLLHNFSIPCLRRGWLSLSFLAAGALSVLGTV

SEQ ID NO: 75846 - protein, 186 aa, Setaria italica
  misc_feature (82)..(82): Xaa can be any naturally occurring amino acid
  misc_feature (90)..(90): Xaa can be any naturally occurring amino acid
  misc_feature (107)..(107): Xaa can be any naturally occurring amino acid
  Transcript Sequence Number=SeqID_9872
  Gene Ontology: Mol. function=electron carrier activity; Cellular component=plasma membrane; Biological process=oxidation reduction
  Homolog annotation: Hit_ID=Q9ZPN0; Match level="QueryCoverage=90%, HitCoverage=58%, E-value=1e-80, Identity=90%"; Hit description =Cytochrome b5 reductase
  Pfam annotation: Domain name=FAD_binding_6; Domain location=28-132; Score=135.5; E_value=1.7e-37; Accession=PF00970.16; Description =Oxidoreductase FAD-binding domain
SKCVTLDIIRNNGVSANVGCLDPENFKKFKLVEKKQISHNVAKFKFALPTPTSVLGLPIGQHISCRGQDATGEEVIKPYTPXTTLDSDFXGIFELVIKIVIPTKGRXMSHHFREMKVGDYLSVKGPKGRFKYQVGQVRAFGMLAGGSGITPMFQVARAILENPNDSTKVHLIYANVTYEDILLKEE

SEQ ID NO: 75847 - protein, 42 aa, Setaria italica
  Transcript Sequence Number=SeqID_9873
RAGSETVPVTKEPCRSPLIIGELMGKNTLIRRCIKAYADKTG

SEQ ID NO: 75848 - protein, 84 aa, Setaria italica
  misc_feature (29)..(29): Xaa can be any naturally occurring amino acid
  Transcript Sequence Number=SeqID_9874
  Gene Ontology: Mol. function=electron carrier activity; Cellular component=plasma membrane; Biological process=oxidation reduction
  Homolog annotation: Hit_ID=Q9ZPN0; Match level="QueryCoverage=100%, HitCoverage=29%, E-value=9e-38, Identity=89%"; Hit description =Cytochrome b5 reductase
  Pfam annotation: Domain name=NAD_binding_1; Domain location=1-69; Score=-4.5; E_value=0.01; Accession=PF00175.13; Description =Oxidoreductase NAD-binding domain
MQEELDNMAKTYPDRFKIYYVLNQPPENXGNGGVGFVSKEMIQSHFPAPAEDIQVLRCGPPPMNKAMAAHLDELNYTKEMQFQF

SEQ ID NO: 75849 - protein, 222 aa, Setaria italica
  misc_feature (72)..(72): Xaa can be any naturally occurring amino acid
  misc_feature (121)..(121): Xaa can be any naturally occurring amino acid
  misc_feature (145)..(145): Xaa can be any naturally occurring amino acid
  Transcript Sequence Number=SeqID_9875
  Gene Ontology: Mol. function=structural constituent of ribosome; Cellular component=ribonucleoprotein complex; Biological process =translational elongation
  Homolog annotation: Hit_ID=O24573; Match level="QueryCoverage=86%, HitCoverage=59%, E-value=2e-71, Identity=72%"; Hit description=60S acidic ribosomal protein P0
  Pfam annotation: Domain name=Ribosomal_60s; Domain location=129-220; Score=62.7; E_value=1.4e-15; Accession=PF00428.11; Description=60s Acidic ribosomal protein
AHFVTLLDQLHRGDNFHSTLVNLGGDVVPPGNTGLDPSQTSFFQVLNIPTKINKGTVEIITPVELIKKGDKXGSSESALLAKLGIRPFSYGLQIVNVYEDGSVFSPEVLDLTEDDLVEKFXTGVSMVASLSLALSYPTLAAAPHXMFINGYKNVLAVAVETDYSYPHADKIKEYLKDPSKFAVAAPVAAAGSGAAAAPKEEEKAPEPAEESDEEMGFSLFDD

SEQ ID NO: 75850 - protein, 217 aa, Setaria italica
  misc_feature (106)..(106): Xaa can be any naturally occurring amino acid
  misc_feature (139)..(139): Xaa can be any naturally occurring amino acid
  Transcript Sequence Number=SeqID_9876
  Gene Ontology: Mol. function=structural constituent of ribosome; Cellular component=ribonucleoprotein complex; Biological process =translational elongation
  Homolog annotation: Hit_ID=O24573; Match level="QueryCoverage=97%, HitCoverage=65%, E-value=1e-99, Identity=88%"; Hit description=60S acidic ribosomal protein P0
  Pfam annotation: Domain name=Ribosomal_L10; Domain location=1-90; Score=120.7; E_value=4.7e-33; Accession=PF00466.12; Description =Ribosomal protein L10
LLDEYTKVLIALADNVGSKQLQDIRRGLRGDSVVLMGKNTLIRRCIKAYADKTGNHTFDPLMDLLVGNVGLIFTKGDLKEVREEVAKYKVGAPARVGLVAPVDVVXVPPGNTGLDPSQTSFFQVLNIPTKINKGTVEIXLTPVELIKKGDKVGSSESALLAKLGIRPFSYGLQIVNVYEDGSVFSPEVLDLTEDDLVEKFATGVSMVASLSGQAPQG

SEQ ID NO: 75851 - protein, 279 aa, Setaria italica
  Transcript Sequence Number=SeqID_9877
  Gene Ontology: Mol. function=electron carrier activity; Cellular component=plasma membrane; Biological process=oxidation reduction
  Homolog annotation: Hit_ID=Q9ZPN0; Match level="QueryCoverage=100%, HitCoverage=100%, E-value=1e-147, Identity=90%"; Hit description =Cytochrome b5 reductase
  Pfam annotation: Domain name=FAD_binding_6; Domain location=47-146; Score=175.6; E_value=1.5e-49; Accession=PF00970.16; Description =Oxidoreductase FAD-binding domain
  Pfam annotation: Domain name=NAD_binding_1; Domain location=156-264; Score=140.3; E_value=5.9e-39; Accession=PF00175.13; Description =Oxidoreductase NAD-binding domain
  Pfam module annotation: Pfam domain module=FAD_binding_6::NAD_binding_ 1; Domain location=47-146::156-264
MDFLQGQSTETMVAVAVAVVAVAAGGAFLLLRSRKPKGCLDPENFKKFKLVEKKQISHNVAKFKFALPTPTSVLGLPIGQHISCRGQDATGEEVIKPYTPTTLDSDLGYFELVIKMYPQGRMSHHFREMKVGDYLSVKGPKGRFKYQVGQVRAFGMLAGGSGITPMFQVARAILENPNDSTKVHLIYANVTYEDILLKEELDNMAKTYPDRFKIYYVLNQPPENWNGGVGFVSKEMIQSHFPAPAEDIQVLRCGPPPMNKAMAAHLDELNYTKEMQFQF

SEQ ID NO: 75852 - protein, 547 aa, Setaria italica
  Transcript Sequence Number=SeqID_9878
  Gene Ontology: Mol. function=actin binding; Cellular component =cortical actin cytoskeleton; Biological process=actin filament depolymerization
  Homolog annotation: Hit_ID=B9T4F8; Match level="QueryCoverage=100%, HitCoverage=89%, E-value=0.0, Identity=70%"; Hit description=WD -repeat protein, putative
  Pfam annotation: Domain name=WD40; Domain location=115-153; Score =33.1; E_value=1.1e-06; Accession=PF00400.24; Description=WD domain, G-beta repeat
  Pfam annotation: Domain name=WD40; Domain location=160-198; Score =41.9; E_value=2.5e-09; Accession=PF00400.24; Description=WD domain, G-beta repeat
  Pfam annotation: Domain name=WD40; Domain location=251-291; Score =18.4; E_value=0.03; Accession=PF00400.24; Description=WD domain, G -beta repeat
  Pfam annotation: Domain name=WD40; Domain location=27-64; Score=0.9; E_value=30; Accession=PF00400.24; Description=WD domain, G-beta repeat
  Pfam annotation: Domain name=WD40; Domain location=376-413; Score =11.2; E_value=1.9; Accession=PF00400.24; Description=WD domain, G -beta repeat
  Pfam annotation: Domain name=WD40; Domain location=419-457; Score =24.1; E_value=0.00059; Accession=PF00400.24; Description=WD domain, G-beta repeat
  Pfam annotation: Domain name=WD40; Domain location=462-500; Score =28.8; E_value=2.3e-05; Accession=PF00400.24; Description=WD domain, G-beta repeat
  Pfam annotation: Domain name=WD40; Domain location=506-543; Score =24.3; E_value=0.00049; Accession=PF00400.24; Description=WD domain, G-beta repeat
  Pfam annotation: Domain name=WD40; Domain location=72-111; Score =22.1; E_value=0.0023; Accession=PF00400.24; Description=WD domain, G- beta repeat
  Pfam module annotation: Pfam domain module=WD40::WD40::WD40::WD40::WD4 0::WD40::WD40::WD40::WD40; Domain location=115-153::160-198::251 -291::27-64::376-413::419-457::462-500::506-543::72-111
RFSPNGEWVASADASGCVRVWGRYGDRALKAEFRPLSGRVDDLRWSPDGLRIVVSGDGKGKSFVRAFVWDSGSTVGEFDGHSKRVLSCDFKPTRPFRIVTCGEDFLANFYEGPPFKFKHSIRDHSNFVNCIRYSPDGSKFITVSSDKKGLIYDGKTGEKIGELSTEGSHTGSIYAVSWSPDSKQVLTVSADKTAKVWDIMEDASGKLNRTLTCPGTGGVDDMLVGCLWQNDHLVTVSLGGTFNVFSASNPDKEPVTFAGHLKTISSLVLFPQSSPRTILSASYDGVIMRWIQGVGYGGRLMRKDNTQIKCFAAVEEELVTSGYDNKVFRIPLNGDQCGDAESVDVGGQPNALNLAIQKPEFALITTDSGIVLLHNSKVISTTKVSYTITSSSVSPDGTEAVVGAQDGKLRIYSINGDTVTEEAVLEKHRGAITSIHYSPDVSMFASADANREAVVWDRASREVKLKNMLYHTARINTVAWSPDSRLVATGSLDTCAIVYEIDKPAASRITIKGAHLGGVHGLSFIDNDTLVTAGEDACIRVWKVVQQ

SEQ ID NO: 75853 - protein, 321 aa, Setaria italica
  misc_feature (184)..(184): Xaa can be any naturally occurring amino acid
  misc_feature (241)..(241): Xaa can be any naturally occurring amino acid
  Transcript Sequence Number=SeqID_9879
  Gene Ontology: Mol. function=structural constituent of ribosome; Cellular component=ribonucleoprotein complex; Biological process =translational elongation
  Homolog annotation: Hit_ID=O24573; Match level="QueryCoverage=85%, HitCoverage=85%, E-value=1e-134, Identity=88%"; Hit description=60S acidic ribosomal protein P0
  Pfam annotation: Domain name=Ribosomal_60s; Domain location=228-320; Score=60.5; E_value=6.4e-15; Accession=PF00428.11; Description=60s Acidic ribosomal protein
  Pfam annotation: Domain name=Ribosomal_L10; Domain location=6-110; Score=167.6; E_value=3.5e-47; Accession=PF00466.12; Description =Ribosomal protein L10
  Pfam module annotation: Pfam domain module=Ribosomal_60s::Ribosomal _L10; Domain location=228-320::6-110
MAIKRTKAEKKQAYDRKLCSLLDEYTKVLIALADNVGSKQLQDIRRGLRGDSVVLMGKNTLIRRCIKAYADKTGNHTFDPLMDLLVGNVGLIFTKGDLKEVREEVAKYKVGAPARVGLVAPVDVVVPPGNTGLDPSQTSFFQVLNIPTKINKGTVEIITPVELIKKGDKVGSSESALLAKLGIXRPFSYGLQVINVYEDGSVFSPEVLDLTEEDLIEKFATGVSMVASLSLALSYPTLAAXRPHMFINGYKNVLAVAVETDYSYPHADKIKEYLKDPSKFAAAAPVASADSGAAAAPKEEEKKAEEPAEESDDDMGFSLFD

SEQ ID NO: 75854 - protein, 82 aa, Setaria italica
  Transcript Sequence Number=SeqID_9880
ATVRSRQMRRRAAVLLKKPRRRRGQAGRTRQQQAPGRHARAVSVAVDHRAQVWAEAKPKLRRRRRVGPAAGAAPDEEARGPR

SEQ ID NO: 75855 - protein, 107 aa, Setaria italica
  Transcript Sequence Number=SeqID_9881
  Subcellular localization annotation: CTP_CleavageSite=57; ConfidenceScore=5.51e-01
ARWRLPRSSAPDRRGREGTGPRRCSWRWTTPSCSPSPASSPTSSGPGSSPPSVHRPRSAPVLRGSLLSLPLCISFGFDMRPIPGSFPGDGSRLVVMRLLRCNPIPFC

SEQ ID NO: 75856 - protein, 88 aa, Setaria italica
  Transcript Sequence Number=SeqID_9882
  Gene Ontology: Mol. function=transporter activity; Cellular component= membrane; Biological process=oligopeptide transport
  Homolog annotation: Hit_ID=Q7X619; Match level="QueryCoverage=94%, HitCoverage=13%, E-value=2e-36, Identity=87%"; Hit description =P0076O17.8 protein
RAAAGNFRHGNKFRFLDKACIRVAPQGPNTKPESPWRLCTVAEVQQAKTLLAVTPIFACTIVFNTVLAQLQTFSVQQGSAMDTTLPPG

SEQ ID NO: 75857 - protein, 171 aa, Setaria italica
  Transcript Sequence Number=SeqID_9883
AWAQRRSTFPAEEVASRRTSVAAEELEPKRLRCSGRGRRRIQATSASRRKPTTLSKRSSTCIDLPNQSSGDVESKSRPVTSPAAARVLGYLHGPSPPRSSTRFAPRPDLPLDLLELNGSRARFAAAWAWCGGGEMLRVEELRQRSDTTTTEGVGATQGHRCVEATSRLRGR

SEQ ID NO: 75858 - protein, 151 aa, Setaria italica
  misc_feature (135)..(135): Xaa can be any naturally occurring amino acid
  misc_feature (144)..(144): Xaa can be any naturally occurring amino acid
  Transcript Sequence Number=SeqID_9884
  Gene Ontology: Mol. function=protein tyrosine kinase activity; Cellular component=plasma membrane; Biological process=protein amino acid phosphorylation
  Homolog annotation: Hit_ID=Q10M75; Match level="QueryCoverage=100%, HitCoverage=14%, E-value=7e-63, Identity=80%"; Hit description =Leucine Rich Repeat family protein, expressed
  Pfam annotation: Domain name=LRR_1; Domain location=101-122; Score =4.2; E_value=49; Accession=PF00560.25; Description=Leucine Rich Repeat
  Pfam annotation: Domain name=LRR_1; Domain location=123-145; Score =14.7; E_value=0.39; Accession=PF00560.25; Description=Leucine Rich Repeat
  Pfam annotation: Domain name=LRR_1; Domain location=26-50; Score=8.2; E_value=8.4; Accession=PF00560.25; Description=Leucine Rich Repeat
  Pfam annotation: Domain name=LRR_1; Domain location=52-73; Score=9.0; E_value=5.8; Accession=PF00560.25; Description=Leucine Rich Repeat
  Pfam annotation: Domain name=LRR_1; Domain location=75-98; Score =13.7; E_value=0.73; Accession=PF00560.25; Description=Leucine Rich Repeat
  Pfam module annotation: Pfam domain module=LRR_1::LRR_1::LRR_1::LRR _1::LRR_1; Domain location=101-122::123-145::26-50::52-73::75-98
  Subcellular localization annotation: CTP_CleavageSite=23; ConfidenceScore=5.16e-01
VHVDLSCNQFSGSLASISDNSSMASTLQYLNVSHNVLSGALFDSDPMPLLDSLEVFDASFNMLSGNIPQFNFVISLKALRLQNNNFSGSIPEALFRETSMVLTELDLSCNQLRGPIRRVTSTNLKYLNLSYNSLXGALPITFGXCSIVDLS

SEQ ID NO: 75859 - protein, 71 aa, Setaria italica
  Transcript Sequence Number=SeqID_9885
  Gene Ontology: Mol. function=metal ion binding; Cellular component =plasma membrane; Biological process=multicellular organismal development
  Homolog annotation: Hit_ID=B4FAG9; Match level="QueryCoverage=74%, HitCoverage=13%, E-value=4e-20, Identity=86%"; Hit description =Palmitoyltransferase ZDHHC9
MNGVSASAGAGAGAGGEGPLVYEAWKGSNVFFLQGRFIFGPDARSLFVTMFLIVAPVSIFCAFVARELMDN

SEQ ID NO: 75860 - protein, 66 aa, Setaria italica
  Transcript Sequence Number=SeqID_9886
  Gene Ontology: Mol. function=hydrolase activity; Biological process =lipid catabolic process
  Homolog annotation: Hit_ID=B6TPQ5; Match level="QueryCoverage=75%, HitCoverage=10%, E-value=8e-23, Identity=100%"; Hit description =Patatin-like protein 3
MDEAEEMQVERLHEEADAGGADTDKLSYEIFSILESKFLFGYTDPHQLWLPKAPPPPPLAQASAAA

SEQ ID NO: 75861 - protein, 90 aa, Setaria italica
  Transcript Sequence Number=SeqID_9887
  Subcellular localization annotation: CTP_CleavageSite=86; ConfidenceScore=5.24e-01
RAGELDLRWRRTDLGARWPPGRASPYPLFYFPPPRRSSRVVSVLLAYPFFLSFSFSKRPGLESERTRSVETRYWLPRTRTRSGAVRAMRL

SEQ ID NO: 75862 - protein, 489 aa, Setaria italica
  Transcript Sequence Number=SeqID_9888
  Homolog annotation: Hit_ID=UPI00005DC1A3; Match level="QueryCoverage =96%, HitCoverage=74%, E-value=3e-82, Identity=37%"; Hit description =VAD1 (VASCULAR ASSOCIATED DEATH1)
FRKAKTAAIFPNAIEIVAGSKRHFFGSFLTRDEAYRIIVDGWEQHVSDARLLLERQETKSASSSEENGYVLLEGTKESKQDEDSSQQDRSVNGTAVSSSSADGSDSNINISRKFSKVEEYGAEDNIIALNPFNFEPVDEAAPSVPESYTLITESKFQVPVEVLFNFLLSDGSFDFLDDFHKKCGDKDFSCSKWRSDEQGGLVRDVSFLHPIKIYLGAKFGTCQEVQKLRVYKNRHLVIQTSQSIGDAPYGDHFTVEGIWDIEQDSLDGNCCFLRIYLNVAFSKKTIFRGKIEQSTKDECREVFGLWIKLGHDLLKQENNRPKDASGSTNAALQLGATENGENAVENAVPMASSAQDESGVRCLITPIQDHQHRAGRDSSVASTSQELWGSLTSYMRSRQLGPVLAVALVAFIILMQVTIIVLLTRSPQVQMSPHGISTGSKESIEWVQKRLSLLSEEMQLAEAHMERMRHEFAWLRSHLERLERLRGNL

SEQ ID NO: 75863 - protein, 225 aa, Setaria italica
  misc_feature (24)..(24): Xaa can be any naturally occurring amino acid
  misc_feature (48)..(48): Xaa can be any naturally occurring amino acid
  misc_feature (146)..(146): Xaa can be any naturally occurring amino acid
  misc_feature (217)..(217): Xaa can be any naturally occurring amino acid
  Transcript Sequence Number=SeqID_9889
  Gene Ontology: Mol. function=nucleic acid binding; Cellular component= chromatin; Biological process=chromatin assembly or disassembly
  Homolog annotation: Hit_ID=Q7XGF2; Match level="QueryCoverage=100%, HitCoverage=52%, E-value=1e-28, Identity=33%"; Hit description =Retrotransposon protein, putative, unclassified
  Pfam annotation: Domain name=zf-H2C2; Domain location=156-197; Score =10.8; E_value=0.015; Accession=PF09337.2; Description=His(2)-Cys(2) zinc finger
ECMAVLLAVEKWRSYLLGSYLLGXKFLIGTDYRSLRFLTEQRATTKLXKKTLLKLMDLNFKIQYKKGSSNAATDALYRCPNHSILHAVFVSNPSWMHNLQEGYLDYPEDKQLLTELAIMSPNEKVFSLQNGLIRCKGRVWIDNNKXAQTHMLQSLHSSGIGGHSGIYATYHKIKYMFAWPKLKAAVSSFVQACQVCQQAKVEYVKLPRLLQPLPIPXQAWATVSL

SEQ ID NO: 75864 - protein, 53 aa, Setaria italica
  Transcript Sequence Number=SeqID_9890
IKPVLIKWFCLCSVFHWFIFNCFAHPLRLTVKVTFWKTQVLRVLLKKKEEIEV

SEQ ID NO: 75865 - protein, 31 aa, Setaria italica
  misc_feature (6)..(6): Xaa can be any naturally occurring amino acid
  Transcript Sequence Number=SeqID_9891
  Gene Ontology: Mol. function=transporter activity; Cellular component= mitochondrial inner membrane; Biological process=mitochondrial transport
  Homolog annotation: Hit_ID=B9S901; Match level="QueryCoverage=100%, HitCoverage=10%, E-value=9e-10, Identity=87%"; Hit description =Mitochondrial uncoupling protein, putative
FLPTWXRLGPWQFVFWVSYEKLRCASGISSF

SEQ ID NO: 75866 - protein, 238 aa, Setaria italica
  misc_feature (224)..(224): Xaa can be any naturally occurring amino acid
  Transcript Sequence Number=SeqID_9892
  Gene Ontology: Cellular component=vacuole
PPPGDRIWYGFTSMPEIEWELESSVEDRKITNSHIASLIGNRIKASLHQSLVLPNCESIPVSWMISDKDDWVPRKIAPFIWLNREPTTENSARPPVGTTRELPGEASVSKAIAKNKSSPPASSTRSENELPKTKICFDGSEQAEASTSRHWQSQLVSASGAPLQSCEDATGDQLRMPLLRGSSRDDRAMVVAAGTSASEEAGDVKRKRGARRARVMDLGRRSGXKLEEKGKHIVGKMR

SEQ ID NO: 75867 - protein, 404 aa, Setaria italica
  misc_feature (17)..(17): Xaa can be any naturally occurring amino acid
  Transcript Sequence Number=SeqID_9893
  Gene Ontology: Mol. function=electron carrier activity; Biological process=oxidation reduction
  Homolog annotation: Hit_ID=B6SU71; Match level="QueryCoverage=100%, HitCoverage=77%, E-value=1e-171, Identity=68%"; Hit description =Cytochrome P450 CYP72A124
  Pfam annotation: Domain name=p450; Domain location=1-401; Score =154.2; E_value=3.9e-43; Accession=PF00067.14; Description=Cytochrome P450
VREVLSNKFGHFRKPKXPANFIKMIGDGLSNHEGQKWAVHRKIINHAFQLEKLKRMLPAFTACTSELIKRWEGKMGSSKVREIDVWPELQDLTGDAISRAAFGSSISEGRRIFRIQSEQAQLASHMTNLYIPGYTYLPTKVNRRIKANAREVEGLLKGIITKKERAMKNGHANDDDLLVMLMQSNIKESKDGGSSKPMMTVDDIMGELKLFYFAGMETTSVLLTWALVVLSMYPEWQDRAREEVLRVFGKREPDLDGTHQLKVVTMVLYEVLRLYPPITLLERETYKEMELGGIKYPPGVKLLLPVVIIHHDPDIWGEDVDEFKPERFAEGISKASKEAPAFFPFGWGPRICSGQNFALLEAKIALSMILQHFSFGLSPSYTHAPFPVSTLQPDHGAQLMLKKI

SEQ ID NO: 75868 - protein, 58 aa, Setaria italica
  Transcript Sequence Number=SeqID_9894
  Gene Ontology: Mol. function=small conjugating protein ligase activity; Cellular component=chromatin; Biological process=ubiquitin- dependent protein catabolic process
  Homolog annotation: Hit_ID=A8JFI8; Match level="QueryCoverage=51%, HitCoverage=18%, E-value=9e-10, Identity=100%"; Hit description =Ubiquitin carrier protein
SPLKCHTDIISLRCAVYADGSICLDILQNQWSPIYDVAAILTSIQVHCTRNLLFLSSP

SEQ ID NO: 75869 - protein, 75 aa, Setaria italica
  Transcript Sequence Number=SeqID_9895
  Gene Ontology: Mol. function=small conjugating protein ligase activity; Cellular component=chromatin; Biological process=ubiquitin- dependent protein catabolic process
  Homolog annotation: Hit_ID=C0PM89; Match level="QueryCoverage=73%, HitCoverage=46%, E-value=6e-25, Identity=98%"; Hit description =Ubiquitin carrier protein
  Pfam annotation: Domain name=UQ_con; Domain location=1-74; Score =10.3; E_value=6.8e-06; Accession=PF00179.18; Description=Ubiquitin -conjugating enzyme
TLQFTEEYPNKPPTVRFVSRMFHPNIYADGSICLDILQNQWSPIYDVAAILTSIQVHCTRNLLFLSSPDYLFQCL

SEQ ID NO: 75870 - protein, 152 aa, Setaria italica
  Transcript Sequence Number=SeqID_9896
  Gene Ontology: Mol. function=small conjugating protein ligase activity; Cellular component=chromatin; Biological process=ubiquitin- dependent protein catabolic process
  Homolog annotation: Hit_ID=P25865; Match level="QueryCoverage=100%, HitCoverage=100%, E-value=2e-81, Identity=93%"; Hit description =Ubiquitin-conjugating enzyme E2 1
  Pfam annotation: Domain name=UQ_con; Domain location=8-145; Score =270.5; E_value=3.8e-78; Accession=PF00179.18; Description=Ubiquitin -conjugating enzyme
MSTPARKRLMRDFKRLMQDPPAGISGAPQDSNILLWNAVIFGPDDTPWDGGTFKLTLQFTEEYPNKPPTVRFVSRMFHPNIYADGSICLDILQNQWSPIYDVAAILTSIQSLLCDPNPNSPANSEAARMFSENKREYNRKVREVVEQSWTAD

SEQ ID NO: 75871 - protein, 124 aa, Setaria italica
  misc_feature (74)..(74): Xaa can be any naturally occurring amino acid
  Transcript Sequence Number=SeqID_9897
  Gene Ontology: Mol. function=transferase activity, transferring phosphorus-containing groups; Cellular component=chloroplast; Biological process=phosphorylation
  Homolog annotation: Hit_ID=O23927; Match level="QueryCoverage=100%, HitCoverage=13%, E-value=3e-46, Identity=69%"; Hit description =Pyruvate orthophosphate dikinase
  Pfam annotation: Domain name=PEP-utilizers_C; Domain location=1-124; Score=-124.3; E_value=4.8e-06; Accession=PF02896.10; Description=PEP- utilising enzyme, TIM barrel domain
QLKVMVNADIPQMRWLEGKNGAEGIGLCRTEHMFFSSDERIKAMRQMIMADTAEQRQEALGLLLPYQKTDFEGXFRAMDGLPVTIRLLDPPLHEFLPEGNVEDVVHMLSCHTNSTHEEILARVE

SEQ ID NO: 75872 - protein, 401 aa, Setaria italica
  misc_feature (232)..(232): Xaa can be any naturally occurring amino acid
  Transcript Sequence Number=SeqID_9898
  Gene Ontology: Mol. function=transferase activity, transferring phosphorus-containing groups; Cellular component=chloroplast; Biological process=phosphorylation
  Homolog annotation: Hit_ID=Q75KR1; Match level="QueryCoverage=98%, HitCoverage=44%, E-value=0.0, Identity=80%"; Hit description =Pyruvate, phosphate dikinase 2
  Pfam annotation: Domain name=PEP-utilizers; Domain location=39-129; Score=160.2; E_value=6.1e-45; Accession=PF00391.15; Description=PEP -utilising enzyme, mobile domain
  Pfam annotation: Domain name=PEP-utilizers_C; Domain location=141 -401; Score=290.1; E_value=4.9e-84; Accession=PF02896.10; Description= PEP-utilising enzyme, TIM barrel domain
  Pfam module annotation: Pfam domain module=PEP-utilizers::PEP -utilizers_C; Domain location=39-129::141-401
SFYPSSFENPSSYKDKVIAAGLPASPGAAVGQIVFAAFDAETWHSEGKSVILVRTETSAEDVGGMHAAVGILTARGGMTSHAAVVARGWGKCCVAGCSSIHVNDAEKVVVVGGKVLYEGDWLSLNGSTGEVILGKLPLSLPTLSADLGTFMSWVDEVKQLKVMVNADTPADALAGRKNGAEGIGLCRTEHMFFSSDERIKAMRQMIMADTAEQRQEALGLLLPYQKTDFEGXFRAMDGLPVTIRLLDPPLHEFLPEGNVEDVVHMLSCHTNSTHEEILARVEKLSEVNPMLGFRGCRLGISYPELTAMQARAVFEAAIAVNDQGFQVLPEIMVPLVGTPQELGQQVSVIRQVADKVFAHAETTITYRIGSMIEVPRAALIADEIAELAEFFSFGTNDLTQM

SEQ ID NO: 75873 - protein, 194 aa, Setaria italica
  Transcript Sequence Number=SeqID_9899
  Gene Ontology: Mol. function=transferase activity, transferring phosphorus-containing groups; Cellular component=chloroplast; Biological process=phosphorylation
  Homolog annotation: Hit_ID=Q75KR1; Match level="QueryCoverage=92%, HitCoverage=21%, E-value=1e-74, Identity=72%"; Hit description =Pyruvate, phosphate dikinase 2
  Pfam annotation: Domain name=PEP-utilizers_C; Domain location=3-194; Score=85.9; E_value=1.4e-22; Accession=PF02896.10; Description=PEP -utilising enzyme, TIM barrel domain
IAYPTGDYCIRACFPGLPVTIRLLDPPLHEFLPEGNVEDVVHMLSCHTNSTHEEILARVEKLSEVNPMLGFRGCRLGISYPELTAMQARAVFEAAIAVNDQGFQVLPEIMVPLVGTPQELGQQVSVIQETTITYRIGSMIEVPRAALIADEIAELAEFFSFGTNDLTQMTFGYSRDDIGKFLPTYMSQGILQHD

SEQ ID NO: 75874 - protein, 203 aa, Setaria italica
  Transcript Sequence Number=SeqID_9900
  Homolog annotation: Hit_ID=Q10PG9; Match level="QueryCoverage=100%, HitCoverage=63%, E-value=3e-66, Identity=68%"; Hit description =Transposon protein, putative, unclassified, expressed
  Subcellular localization annotation: CTP_CleavageSite=37; ConfidenceScore=5.47e-01
PRAHPVAVPIAQPPQPLVHSQPRSFAAVPRALVAGVVARPEQQPPRGVPIAPQPKVNPVPPGAPSSEQVNPKDRSREDTTTVVINDRKVNLLDSESGSLYALCRSWVRNGVPHESQPSFGNGEPILPRPLPASVVDSRISDKENNDAADVGSDEEPQKNADGEYNTSDLLKQHVKRAKRIRAGLQKERLRRIERYKQRLALLL

SEQ ID NO: 75875 - protein, 119 aa, Setaria italica
  Transcript Sequence Number=SeqID_9901
  Gene Ontology: Cellular component=integral to membrane
  Homolog annotation: Hit_ID=Q8W0S5; Match level="QueryCoverage=40%, HitCoverage=9%, E-value=8e-16, Identity=83%"; Hit description =Putative phosphate/phosphoenolpyruvate translocator
  Subcellular localization annotation: CTP_CleavageSite=38; ConfidenceScore=5.31e-01
ISIPSGGGGGGELQSRALAPGSAGQQQSKRLPRAYSTAAEAVAGLAQGRRPSSTLEVFSLVAQLLLGEIGPARMEETDCPEGSVPERIGEQQEASLPLPPAFLEFLSENGLDPAVYSMA

SEQ ID NO: 75876 - protein, 46 aa, Setaria italica
  Transcript Sequence Number=SeqID_9902
VLGSSLVEETRLTYGRKTGLLIWAITLAGLLGGGALLVYNTSALSG

SEQ ID NO: 75877 - protein, 102 aa, Setaria italica
  Transcript Sequence Number=SeqID_9903
  Gene Ontology: Cellular component=oxygen evolving complex; Biological process=photosynthesis
  Homolog annotation: Hit_ID=B6SQV5; Match level="QueryCoverage=100%, HitCoverage=78%, E-value=6e-31, Identity=71%"; Hit description =Photosystem II 10 kDa polypeptide
  Pfam annotation: Domain name=PsbR; Domain location=6-102; Score =189.1; E_value=1.3e-53; Accession=PF04725.4; Description=Photosystem II 10 kDa polypeptide PsbR
FAVVCGTGKKIKTDKPFGIGGGLTVDVDASGRKVKGKGVYQFVDKYGANVDGYSPIYKEEDWSPSGDVYVGGKTGLLNLGHPLAGLLGGGALLVYNTSALSG

SEQ ID NO: 75878 - protein, 184 aa, Setaria italica
  misc_feature (46)..(46): Xaa can be any naturally occurring amino acid
  misc_feature (49)..(49): Xaa can be any naturally occurring amino acid
  Transcript Sequence Number=SeqID_9904
  Gene Ontology: Mol. function=RNA polymerase II transcription termination factor activity; Cellular component=nucleus; Biological process=termination of RNA polymerase II transcription
  Homolog annotation: Hit_ID=Q5Z4Y8; Match level="QueryCoverage=73%, HitCoverage=15%, E-value=5e-44, Identity=67%"; Hit description =Regulator of nonsense transcripts 1-like
MYSLSIIIFLTIPNAHKAQRKLPVINLNTVDGFQGREREVVHCYNXLIXCYMFVRCNKEQKIGFVSDFRRMNVAITRARSAVLVVGSASTLQKDEHWNNLVESAKERNRYFKVPKPFGAFFAEDNLETMAVKPQKDPRPPEQNTEVMEGMNEAAMGREFDAADQADAGDDDDADMDADDGGGDD

SEQ ID NO: 75879 - protein, 482 aa, Setaria italica
  Transcript Sequence Number=SeqID_9905
IVAAAEARAAWQRAANRCLVQEDRKRAPKLACYPSSAEQQHGTNNGSCRHSEDHPISNFMPLSWNPMNSNLPPDVRWWVQLQPSFGIQKDLASERQCCLSRKIDEKKVEDSAPKPKHEETLLCEAADTSTEKSGDIFEPPWMVSSAFMKYSPETGLEELKTVGRYSQASKCSETASNCLYNDNEFPDFECIDPAPLKNPEKANFDMDVPWKEGEKTQPWWQIADENELALLVAEKAMQHIENCDLPRPTQTVPVHRTESYTRKNIGDYGGPSSPAGRVSHPVPGQCDHVKCSYSTGSTDELDLFKGNGVWEEHGRNDPFSVSQDFSSSSTTGSESKQTLQNVSERDKILEALRHSQTRAREAELAAKKADNEKDDIIKLLFRQASHLFACNQWLKIMQLENIVLQLKHKEHSIASIIPELPWMSLKEKPAQGQEQKDWTRRKGRRQKKGGGFFDAILFAVGLGLAGAGFLLGWTLGWLLPQL

SEQ ID NO: 75880 - protein, 145 aa, Setaria italica
  misc_feature (35)..(35): Xaa can be any naturally occurring amino acid
  Transcript Sequence Number=SeqID_9906
  Gene Ontology: Mol. function=nucleic acid binding; Cellular component= ribonucleoprotein complex; Biological process=mRNA processing
  Homolog annotation: Hit_ID=B9SQT1; Match level="QueryCoverage=77%, HitCoverage=39%, E-value=5e-48, Identity=76%"; Hit description =Ribonucleoprotein, chloroplast, putative
  Pfam annotation: Domain name=RRM_1; Domain location=33-103; Score =62.6; E_value=1.5e-15; Accession=PF00076.14; Description=RNA recognition motif. (a.k.a. RRM, RBD, o
RNKEQEQEQDGVVEASSDDGSASEAASTTTTKLYXGNLPYNCDSAQLAGIVQEYASPEMVEVLYDRTTGRSRGFAFVTMTTVQDCELVIKNLDGSLYGGRTMKVNFADRPKPKLPLYPETDHKLFVGNLSWTVTSEMLTEAFQRC

SEQ ID NO: 75881 - protein, 362 aa, Setaria italica
  Transcript Sequence Number=SeqID_9907
  Gene Ontology: Mol. function=phosphoprotein phosphatase activity; Cellular component=nucleus; Biological process=protein amino acid dephosphorylation
  Homolog annotation: Hit_ID=B6TKI2; Match level="QueryCoverage=99%, HitCoverage=81%, E-value=0.0, Identity=86%"; Hit description =Serine/threonine protein phosphatase
  Pfam annotation: Domain name=Metallophos; Domain location=25-258; Score=97.4; E_value=5.1e-26; Accession=PF00149.20; Description =Calcineurin-like phosphoesterase
RLVLAAAAILHREPNLVRVDPRPGQAVVVVGDVHGQLHDVIFLLRDAGFPSEERIFVFNGDYVDRGAWGLETLLLLLAWKVLLPNCVFLLRGNHESKYCTSVYGFEREVMAKYKDQGPQVYRKFLRCFEDLPLATIIAGCVYTAHGGIFRGTVVLPSKRLKKGKKGRKNKADFTVDPTSMRLGSLDELLKARRTVLDPPWEGQNLIPGDVLWSDPSLEMGLSPNKERGIGLLWGPDITQQFLRTNNLKLIIRSHEGPDARDKRHDLLGMDKGYTIDHDVECGKLITLFSAPDYPQFQASEERYNNCGAYIVLNPPDFATPVFHSFEAVKPRPPAHPFYDFEEVIDSDEELNLDAMDSGTSSQ

SEQ ID NO: 75882 - protein, 226 aa, Setaria italica
  Transcript Sequence Number=SeqID_9908
  Gene Ontology: Mol. function=hydrolase activity; Cellular component =cell wall
  Homolog annotation: Hit_ID=B6TNN9; Match level="QueryCoverage=98%, HitCoverage=83%, E-value=2e-79, Identity=66%"; Hit description =Cyclase
  Pfam annotation: Domain name=Cyclase; Domain location=13-212; Score =126.9; E_value=6.5e-35; Accession=PF04199.5; Description=Putative cyclase
AEVRLEEHGGGRIIDITHAYRPELPAPGRDGLGPVTQLTESMANGSINNVSELRMLVHSGTHVDAPGHMVQEHFEAGLDVDKLDLDVLNGPALLIDVPRDTNITAQAMESLNIPKGVRRVLFRTLNTDRKLMWTKEIDTSFVGFTEDGAQWLLDNTDIKLVGVDYLSFAAFDYLIPAHLVFLNRPDMIPIEGLKLDHVKAGIYMLHCLPLRLIGCDGSPIRCILMK

SEQ ID NO: 75883 - protein, 47 aa, Setaria italica
  Transcript Sequence Number=SeqID_9909
  Homolog annotation: Hit_ID=B7UCQ8; Match level="QueryCoverage=100%, HitCoverage=8%, E-value=5e-18, Identity=91%"; Hit description=NBS1 -like protein (Fragment)
MVWALTPVDTVRGTQKYYIFAAGTYKVGRKDCDVIVQADTSISRVHA

SEQ ID NO: 75884 - protein, 207 aa, Setaria italica
  misc_feature (161)..(161): Xaa can be any naturally occurring amino acid
  misc_feature (182)..(182): Xaa can be any naturally occurring amino acid
  Transcript Sequence Number=SeqID_9910
  Gene Ontology: Mol. function=binding; Cellular component=mitochondrion
  Homolog annotation: Hit_ID=B9RQC9; Match level="QueryCoverage=100%, HitCoverage=69%, E-value=1e-84, Identity=38%"; Hit description =Pentatricopeptide repeat-containing protein, putative
  Pfam annotation: Domain name=PPR; Domain location=1-34; Score=16.5; E_ value=0.1; Accession=PF01535.12; Description=PPR repeat
  Pfam annotation: Domain name=PPR; Domain location=105-139; Score =47.8; E_value=4.1e-11; Accession=PF01535.12; Description=PPR repeat
  Pfam annotation: Domain name=PPR; Domain location=140-174; Score =31.0; E_value=5e-06; Accession=PF01535.12; Description=PPR repeat
  Pfam annotation: Domain name=PPR; Domain location=35-69; Score=54.4; E_value=4.2e-13; Accession=PF01535.12; Description=PPR repeat
  Pfam annotation: Domain name=PPR; Domain location=70-104; Score=53.3; E_value=9.5e-13; Accession=PF01535.12; Description=PPR repeat
  Pfam module annotation: Pfam domain module=PPR::PPR::PPR::PPR::PPR; Domain location=1-34::105-139::140-174::35-69::70-104
  Subcellular localization annotation: CTP_CleavageSite=22; ConfidenceScore=5.02e-01
MYNMVFSALGKLKQVSFISNLYVKMKTNGVVPDVFTYNIMISSFGRVGLVDKARELFEEMEASSCKPDVITYNSFINCLGKNGDLDEAHMLFKEMQEKGYDPDVFTYSILIECFGKSNKVDMACSLFDEMIAEGCVPNIVTYNILLDCLERRGKTAEAHKXYETLKQQGLTPDSITYSILEXLEARSQQRARIRKPSRITGWVVSPV

SEQ ID NO: 75885 - protein, 260 aa, Setaria italica
  Transcript Sequence Number=SeqID_9911
  Gene Ontology: Mol. function=ATP-dependent helicase activity; Cellular component=nucleus; Biological process=ribosome biogenesis
  Homolog annotation: Hit_ID=Q5K5B6; Match level="QueryCoverage=97%, HitCoverage=46%, E-value=1e-138, Identity=94%"; Hit description=DEAD- box ATP-dependent RNA helicase 57
  Pfam annotation: Domain name=Helicase_C; Domain location=124-200; Score=112.6; E_value=1.3e-30; Accession=PF00271.23; Description =Helicase conserved C-terminal domain
QITSFCSVEYLVLDESDKLFELGFVEVIDSVVEACSNPSIIRSLFSATLPDSIEALARTIMHDAIRVIVGRKNSASSLIKQKLIFAGTERGKLLALRQSFQESLNPPVLIFVQSKDRAKELYKELAFDDVRADVIHADLSEEQRQDAVDNLRAGKTWVLIATEVIARGMDFKGVNCVINYDFPESAAAYIHRIGRCGRAGRSGEAITFFTEEDKPFLRNIANVLVSSGCEVPSWIMALPKLKRMKHRVDRDPISTLPDED

SEQ ID NO: 75886 - protein, 363 aa, Setaria italica
  Transcript Sequence Number=SeqID_9912
  Gene Ontology: Mol. function=hydrolase activity; Cellular component =plasma membrane; Biological process=response to cadmium ion
  Homolog annotation: Hit_ID=B9SS14; Match level="QueryCoverage=99%, HitCoverage=57%, E-value=1e-167, Identity=77%"; Hit description =Dynamin, putative
  Pfam annotation: Domain name=Dynamin_M; Domain location=2-253; Score =157.3; E_value=4.7e-44; Accession=PF01031.12; Description=Dynamin central region
  Pfam annotation: Domain name=GED; Domain location=266-359; Score =118.9; E_value=1.7e-32; Accession=PF02212.10; Description=Dynamin GTPase effector domain
  Pfam module annotation: Pfam domain module=Dynamin_M::GED; Domain location=2-253::266-359
IARRKEQEFFASSPDYSHLASRMGSEYLAKLLSQQLEAVIRARIPSITSLINKTIDELESEMDHLGRPIASDAGAQLYLILELCRAFDKIFKEHLDGGRPGGDRIYGVFDNQLPSALRKLPFDRHLSVQNVKRVVSQADGYQPHLIAPEQGYRRLIESALNYFRGPAEASVDAVHFVLKELVRMSIGETQELKRFPTLQAELAAACYVALERFREDGRKTTLRLVDMESAYLTVEFFRKLPQEVDKTGPGNPRTANPPPTPSDDRYTDAHFRRIASNVSSYIGMVSETLKNTIPKSVVHCQVREAKRSLLNHFYTQVGRKDAKQLAVLLDEDPALMERRLQCFKRLELYKSARDEIDAVAWTR

SEQ ID NO: 75887 - protein, 280 aa, Setaria italica
  Transcript Sequence Number=SeqID_9913
  Gene Ontology: Mol. function=electron carrier activity; Cellular component=mitochondrial respiratory chain; Biological process =electron transport chain
  Homolog annotation: Hit_ID=B9S4S0; Match level="QueryCoverage=82%, HitCoverage=90%, E-value=1e-116, Identity=83%"; Hit description=NADH- ubiquinone oxidoreductase 24 kD subunit, putative
  Pfam annotation: Domain name=Complex1_24kDa; Domain location=72-239; Score=246.1; E_value=8.6e-71; Accession=PF01257.11; Description =Respiratory-chain NADH dehydrogenase 2
  Subcellular localization annotation: CTP_CleavageSite=76; ConfidenceScore=5.43e-01
MLPPAARLAARRLLGLASSSASEAAARRLAPSPIAASSYAAAARGSVSSSRPFSTALNYHIDSPENKSDMKWEFSEANMKKVKEILSHYPSNYKQSGIIPLLDLAQQQHGGWVPVAAMDAIAKIVEVAPIRVYEVATFYTMFNRTKVGKYHLLVCGTTPCMIRGSREIEETLLEHLGVKRNEVTSDGLFSVGEMECMGCCVNAPMIAVADYSKGSEGYTYNYYEDLTPKRVVEIVEMLRRGEIPPRGTQHPERKNCGPAGGNTTLHGEPKPPPCRDLDAC

SEQ ID NO: 75888 - protein, 250 aa, Setaria italica
  Transcript Sequence Number=SeqID_9914
  Gene Ontology: Mol. function=binding; Cellular component=nucleus; Biological process=mitotic chromosome condensation
  Homolog annotation: Hit_ID=B9H949; Match level="QueryCoverage=100%, HitCoverage=18%, E-value=1e-103, Identity=73%"; Hit description =Condensin complex components subunit
KIQKQKRKNENSQPISEDPQLDASKSSEAQGINAELGLGATIDIAIESLAERAEKEIVCCSSEKNLIGHCGPFLSKLCRNLTLLQKFPELQASAMLALCRLMIIDPEFCEANLQILFTVAESAPSEIVRSNCTIALGDLAVRFPNLLEPWTEYIYARLRDPSASVRKNAVLVISHLILNDMMKVKGYINEMAVRIEDENERISSLAKLFFHELSKKGSNPIYNLLPDILGRLCNQHLKDETFRNIMQFLI

SEQ ID NO: 75889 - protein, 85 aa, Setaria italica
  misc_feature (76)..(76): Xaa can be any naturally occurring amino acid
  Transcript Sequence Number=SeqID_9915
  Gene Ontology: Mol. function=protein serine/threonine kinase activity; Cellular component=integral to membrane; Biological process=protein amino acid phosphorylation
  Homolog annotation: Hit_ID=Q8SB69; Match level="QueryCoverage=100%, HitCoverage=9%, E-value=4e-23, Identity=54%"; Hit description =Leucine Rich Repeat family protein, expressed
  Pfam annotation: Domain name=LRR_1; Domain location=12-34; Score=8.9; E_value=6.1; Accession=PF00560.25; Description=Leucine Rich Repeat
  Pfam annotation: Domain name=LRR_1; Domain location=36-58; Score=9.4; E_value=4.9; Accession=PF00560.25; Description=Leucine Rich Repeat
  Pfam annotation: Domain name=LRR_1; Domain location=62-81; Score=5.2; E_value=31; Accession=PF00560.25; Description=Leucine Rich Repeat
  Pfam module annotation: Pfam domain module=LRR_1::LRR_1::LRR_1; Domain location=12-34::36-58::62-81
GTIPPEIGKLSQLQGLYLYKNNLSGEMPTEITQLRKLREISLFSNNFTGVLPQALGLNTTPGLAQVDLTGNRFHGXLPPGLCTGG

SEQ ID NO: 75890 - protein, 108 aa, Setaria italica
  Transcript Sequence Number=SeqID_9916
  Subcellular localization annotation: CTP_CleavageSite=63; ConfidenceScore=5.34e-01
GEVSGGHQVPARRASWPTIYTPPPAGAPAPRSRRSFPRRRRPFLYPHLRLGCGDAGGVTVPVPVPLPWARPGTWVRWRWPPAPLSRGTAAGRARPCWATRCRRSTTTR

SEQ ID NO: 75891 - protein, 190 aa, Setaria italica
  Transcript Sequence Number=SeqID_9917
  Gene Ontology: Mol. function=cysteine-type endopeptidase activity; Cellular component=endoplasmic reticulum lumen; Biological process =proteolysis
  Homolog annotation: Hit_ID=Q41522; Match level="QueryCoverage=94%, HitCoverage=48%, E-value=5e-46, Identity=56%"; Hit description=Thiol protease
  Pfam annotation: Domain name=Peptidase_C1; Domain location=2-190; Score=147.9; E_value=3.1e-41; Accession=PF00112.15; Description =Papain family cysteine protease
YRVNWTAEGKVTEVKNQRHCGSCWAFAAVAVIESAYAIAKRVQPPVLSEQELIDCDSYDSGCSSGLPWSAMKWVKKHGGIALDSQYPYKERKDACQEKKRLPHAVSVRDFEFVKKKSEEELMKAVARRPVAVGFDSNDDCFQHYTHGVYNSMCIKNGELVGPACSGNNLTHDMAIVGYVGNGKGNEQRQV

SEQ ID NO: 75892 - protein, 84 aa, Setaria italica
  misc_feature (50)..(50): Xaa can be any naturally occurring amino acid
  Transcript Sequence Number=SeqID_9918
  Gene Ontology: Mol. function=protein kinase activity; Biological process=protein amino acid phosphorylation
  Homolog annotation: Hit_ID=B9S235; Match level="QueryCoverage=100%, HitCoverage=19%, E-value=8e-26, Identity=65%"; Hit description=ATP binding protein, putative
IRLYEGSCVQGPLRGTQAVFKVYPGARAGASEADLMALNELRTHAFLQVXSDASDICDNIQFLLGAFETATGEQWLAFRDDGRY

SEQ ID NO: 75893 - protein, 137 aa, Setaria italica
  Transcript Sequence Number=SeqID_9919
  Gene Ontology: Mol. function=aspartic-type endopeptidase activity; Cellular component=mitochondrion; Biological process=DNA integration
  Homolog annotation: Hit_ID=Q7XKS2; Match level="QueryCoverage=95%, HitCoverage=15%, E-value=5e-31, Identity=52%"; Hit description =OSJNBa0038P21.9 protein
  Pfam annotation: Domain name=PPR; Domain location=32-66; Score=29.4; E_value=1.5e-05; Accession=PF01535.12; Description=PPR repeat
IMIAVMFKTRRTEGAKDLFASIPASGLVPCVKTYHLMMTNFIKEGLLEEADDVFSSMENAGYDPDSRMLNHVARALLEKHEIVRAGTYLSKIDERNFSLEDSTTMLLVDLFTSRGTCQEQIKYLPEKYHFLAGAGSS

SEQ ID NO: 75894 - protein, 436 aa, Setaria italica
  Transcript Sequence Number=SeqID_9920
  Gene Ontology: Mol. function=nucleoside-triphosphatase activity; Cellular component=DNA replication factor C complex; Biological process=defense response
  Homolog annotation: Hit_ID=Q2R2B4; Match level="QueryCoverage=82%, HitCoverage=35%, E-value=1e-173, Identity=83%"; Hit description =BRCA1 C Terminus domain containing protein, expressed
  Pfam annotation: Domain name=RFC1; Domain location=149-312; Score =304.4; E_value=2.4e-88; Accession=PF08519.4; Description=Replication factor RFC1 C terminal do
  Subcellular localization annotation: CTP_CleavageSite=58; ConfidenceScore=5.35e-01
MLIRLPNAIQGRWKKQWCCAGKVAAVSSWGLLLASSTRCSSPLPTSSPSSHLQYMSLSQSVVKYDDIRERLNSSAKDEDISPFTAVDKLFGFNGGRLRMDERIDFGMSDPDLVPLIIQENYINYRPNTIGKDESGVKRMNALARAAESIADGDLVNVQIRRYRQWQLSQAACFASSIVPAAFMHGNREILEAGERNFNRFGGWLGKYSTTNKNRRLLEDAHSHILASQQANLDRETLRLDYLTLLLRQLTDPLKTMPKDEAVQKVVEFMDTYSLSQEDFDTIVEISKFKGHPSPMDGIQPAVKSALTKAYKQGSSSRVVRAADLINIPGMKKPLKKRVAAILEPVEESLADENGVASAEADEEDSSDTENNDELVPSDSMPKLDLQSDKKKGIQVQLDLKSNGNGSSGKKTPASRSRAAPGSGGKSAGGSAGKRKR

SEQ ID NO: 75895 - protein, 72 aa, Setaria italica
  Transcript Sequence Number=SeqID_9921
CSTNKLRSFSYSQEQRAQTTKEPKETDCVVSSLIEYLNSRYMCMNDSCYPKIWATWMVISVSHIKLIGHLQM

SEQ ID NO: 75896 - protein, 101 aa, Setaria italica
  Transcript Sequence Number=SeqID_9922
  Subcellular localization annotation: CTP_CleavageSite=89; ConfidenceScore=5.04e-01
PFLQDGDQVSFGAGAAAAALEASTACQPLLKTVAPPPPPPESSSSNKIFSDGLTPVLDSDCALSLLSSPANSSSVDVSRMVQPTEHIPVAQPLVPNLHQST

SEQ ID NO: 75897 - protein, 86 aa, Setaria italica
  Transcript Sequence Number=SeqID_9923
DNCNRDEKLIVVVMGERAAVANATQPGAGLAPSPNSGPYSAYSPPPPFGIEISPAAYPPPSAASSKVAGIAGTAALAIGALFYALV

SEQ ID NO: 75898 - protein, 116 aa, Setaria italica
  misc_feature (35)..(35): Xaa can be any naturally occurring amino acid
  Transcript Sequence Number=SeqID_9924
  Gene Ontology: Mol. function=zinc ion binding
EELSDKGEFVENDQSHQMRSSVGVDHDNLRASKKXKKESKHQPFEYEISKCSPPANLTLKNMQKRRHISPSSGKHSHGENKGFSDGVIKTSDTENSGLSDLSIKKRKLKQRQSKPA

SEQ ID NO: 75899 - protein, 111 aa, Setaria italica
  Transcript Sequence Number=SeqID_9925
  Subcellular localization annotation: CTP_CleavageSite=40; ConfidenceScore=5.44e-01
RRRYGRPSRFCRRRPWQPTPPRSRRRRRRRRCRPQQLQVRRRRRWTHPQQSRRPLSSLPHPLRRRCYHPPPHLLRHPRRLPPPPPPPRTRRRRSSRCLTPVSASRTIPRRR

SEQ ID NO: 75900 - protein, 170 aa, Setaria italica
  Transcript Sequence Number=SeqID_9926
  Subcellular localization annotation: CTP_CleavageSite=74; ConfidenceScore=5.69e-01
MHAGTPAPTVDSPAAVPTSTVVTATPAAAALLPSSSSPPATPAASSATATTAADTAPKKFPLPHPGVGEPYNPAAEVASALPVPTPDELPSASSLGFDGHGLGFGGPGDVCCGGGGYGWFGGPGGYGPGTYGYTGPLYWGAAPAGGWGSVAAANVVVPLVVACVSAALAY

SEQ ID NO: 75901 - protein, 82 aa, Setaria italica
  Transcript Sequence Number=SeqID_9927
  Gene Ontology: Mol. function=nucleic acid binding; Cellular component= nuclear chromosome; Biological process=response to cadmium ion
  Homolog annotation: Hit_ID=A9RXJ1; Match level="QueryCoverage=76%, HitCoverage=5%, E-value=8e-26, Identity=77%"; Hit description=SNF2 family DNA-dependent ATPase
SKVLNFLNNNDDDDEEGTLWNYVILDEGHLIKNNNTQRAKSLFEIPCAHRIVISGTPIQNKLEGMWALFNFCCPDVLGDKQQ

SEQ ID NO: 75902 - protein, 999 aa, Setaria italica
  misc_feature (585)..(585): Xaa can be any naturally occurring amino acid
  misc_feature (901)..(901): Xaa can be any naturally occurring amino acid
  Transcript Sequence Number=SeqID_9928
  Gene Ontology: Mol. function=nucleic acid binding; Cellular component= condensed chromosome kinetochore; Biological process=response to cadmium ion
  Homolog annotation: Hit_ID=B9HEY5; Match level="QueryCoverage=72%, HitCoverage=65%, E-value=0.0, Identity=61%"; Hit description =Chromatin remodeling complex subunit
  Pfam annotation: Domain name=Helicase_C; Domain location=676-754; Score=90.2; E_value=7.1e-24; Accession=PF00271.23; Description =Helicase conserved C-terminal domain
  Pfam annotation: Domain name=ResIII; Domain location=279-453; Score= -15.3; E_value=0.001; Accession=PF04851.7; Description=Type III restriction enzyme, res subunit
  Pfam annotation: Domain name=SNF2_N; Domain location=285-592; Score =279.6; E_value=7.2e-81; Accession=PF00176.15; Description=SNF2 family N-terminal domain
  Pfam module annotation: Pfam domain module=Helicase_C::ResIII::SNF2 _N; Domain location=676-754::279-453::285-592
SPPFEICDDLDDDIDEPATAVPADRHHPAAAPTPNGLNDRLLRLARSCFPSINPLIPSLLAEAAAAEEEGRKVKLAGRRRLCKLAATATHQLLQDEEEDHDDCESIRDIMDDLTTRLDSLSVRKPNPTARPTQQQLAPLPCAITADPDAEDGASSPLRISSSDDEATAITRRAELKPQPTSVASAFTDYACGAVRGKGKGKATAYAAKDVARKRRPPKASTFRNNDDSSDDGLGQEKENRGVVENDPEDVGWEKTEDFKMEPTGTAATSKPYKLPGRIFKMLYPHQREGLRWLWVLHCRGTGGILGDDMGLGKTMQVSAFLAGLFHSHLIKRVLIVAPKTLLAHWTKELSVVGLKQKIRDYSGPSTNIRSYELQYAFKEGGVLLTTYDIVRNNYKLIRGNSYNNDDDDEEGTLWNYVILDEGHLIKNNNTQRAKSLFEIPCAHRIVISGTPIQNNLKEMWALFNFCCPDVLGDKQQFKTRYESAILRGNDKSATAREKHVGSNVAKELRERIKPYFLRRMKSEVFLDSGASEEKTLAKKNELIVWLKLTPCQRKLYEAFLKSELVHLAIQPKGSPLAAITILKKXCDHPLLLTKKAAEGVLEGMDEMLNDQDIGMVEKMAMNLADMAHDDNVLEVGQDVSCKLSFIMSLLRNLVKEGHHVLIFSQTRKMLNLIQEAILLEGYKFLRIDGTTKVSERERIVKDFQEGPGAPIFLLTTQVGGLGLTLTKATRVIVVDPAWNPSTDNQSVDRAYRIGQTKDVIVYRLMTSATIEEKIYKLQVFKGALFRTATEQKEQTRYFSKSEIHELFSLPQQGFDVSLTQKQLQEEHGQQVVMDESLRQHIQFLEQQGIAGVSHHSLMFSKTATLPTLSENDALDSKPRGMPMMPQHYYKGSSSDYVASGXAFALKPKDEKFTAPRYSPSNRHAESPEEIKARINRLSQTLSNAVLVSKLPDGGEKIRRQISELDEKLTSAEKEKKDKATEVICLDDLSADMESNVLSV

SEQ ID NO: 75903 - protein, 151 aa, Setaria italica
  Transcript Sequence Number=SeqID_9929
  Gene Ontology: Mol. function=electron carrier activity; Cellular component=integral to membrane; Biological process=oxidation reduction
  Homolog annotation: Hit_ID=B6SWS3; Match level="QueryCoverage=98%, HitCoverage=28%, E-value=5e-50, Identity=67%"; Hit description =Cytochrome P450 CYP84A33v1
MAVAVPKIAMEWLQDPLSWALLALVAFVLLQLRRRGKGPLPPGPKPLPIIGNMTMMDQLTHRGLAALAEQYGGLLHLRLGRLHAFAVSTPEYAREVLQVQDGAFSNRPATIAIAYLTYDRADMAFAHYGPFWRQMRKLCVMKLFSRRRAET

SEQ ID NO: 75904 - protein, 87 aa, Setaria italica
  Transcript Sequence Number=SeqID_9930
LPDLVPSDLRDPHDGLWGPANPWPLPFDPVNVDRPLINAGTTRTHLTFDPLTWSTFTNQLQPTCGQTQNLTCGPLTYLFKFRKYFNI

SEQ ID NO: 75905 - protein, 159 aa, Setaria italica
  Transcript Sequence Number=SeqID_9931
  Gene Ontology: Mol. function=protein serine/threonine kinase activity; Biological process=protein amino acid phosphorylation
  Homolog annotation: Hit_ID=Q53MD2; Match level="QueryCoverage=91%, HitCoverage=15%, E-value=2e-57, Identity=75%"; Hit description =Leucine Rich Repeat family protein, expressed
LRHRRRQGPADDSSDSAVSTCFAGTHGYLAPELAYSLKVTEKTDVYSYGVVLLELVTGRSPIDPGFGEGRDIVSWLSGKLATESLDGVLDPRVAAAATASEREDMLRVLRIAVLCTAKLPAGRPTMRDVVKMLTDAAGTGPCSPRGQPPARICSNKSCR

SEQ ID NO: 75906 - protein, 86 aa, Setaria italica
  Transcript Sequence Number=SeqID_9932
MAPPRGDRKKGKGGGGGKTDLRPDRKQFKKHRKEEAASEQGDCDGERQQPGSAALLAAASDEADFPRGGRSFLSKDEVAEARAEAE

SEQ ID NO: 75907 - protein, 83 aa, Setaria italica
  Transcript Sequence Number=SeqID_9933
  Gene Ontology: Mol. function=ATP binding; Cellular component =chloroplast; Biological process=protein folding
  Homolog annotation: Hit_ID=B4F848; Match level="QueryCoverage=100%, HitCoverage=33%, E-value=1e-36, Identity=92%"; Hit description =Chaperonin
  Pfam annotation: Domain name=Cpn10; Domain location=1-82; Score=99.2; E_value=1.4e-26; Accession=PF00166.13; Description=Chaperonin 10 Kd subunit
VAEAEDKTPGGLLLTETTKEKPSIGTVVAVGPGPLDEEGNRSPLSVSAGSTVLYSKYAGSEFKGADGTNYIVLRVSDLMAVLS

SEQ ID NO: 75908 - protein, 254 aa, Setaria italica
  Transcript Sequence Number=SeqID_9934
  Gene Ontology: Mol. function=ATP binding; Cellular component =chloroplast; Biological process=protein folding
  Homolog annotation: Hit_ID=B4F848; Match level="QueryCoverage=85%, HitCoverage=88%, E-value=1e-100, Identity=83%"; Hit description =Chaperonin
  Pfam annotation: Domain name=Cpn10; Domain location=160-253; Score =145.2; E_value=2e-40; Accession=PF00166.13; Description=Chaperonin 10 Kd subunit
  Pfam annotation: Domain name=Cpn10; Domain location=62-153; Score =130.7; E_value=4.8e-36; Accession=PF00166.13; Description=Chaperonin 10 Kd subunit
  Pfam module annotation: Pfam domain module=Cpn10::Cpn10; Domain location=160-253::62-153
  Subcellular localization annotation: CTP_CleavageSite=51; ConfidenceScore=5.40e-01
MASVQLSGAGVGAAAFSAKGKASLEKLRLPAMVTVGEVRPARRAFRGLVVRAATVVAPKYKTLKPLADRVLVKIKSSEEKTTGGILLPTTAQSRPQGGEVVAVGEGRTIGDKKVDVSIQVGAQVVYSKYAGTEVELNDYNHLVLKEDDIIGILETDDVKDMKPLNDRVLIKVAEAEDKTPGGLLLTETTKEKPSIGTVVAVGPGPLDEEGNRSPLSVSAGSTVLYSKYAGSEFKGADGTNYIVLRVSDLMAVLS

SEQ ID NO: 75909 - protein, 118 aa, Setaria italica
  Transcript Sequence Number=SeqID_9935
  Gene Ontology: Mol. function=metal ion binding
  Homolog annotation: Hit_ID=B9S9Y2; Match level="QueryCoverage=100%, HitCoverage=36%, E-value=3e-24, Identity=46%"; Hit description=Ring finger protein, putative
PFNSPGWLALELGVIVAQMVLTTAVVATSPRERPAWPLRLWVAAYNVGNVLSLPLLYWRHRHSSAGGRGDAMSDDLEMHAANDALRNSSFLMNKARAFLELFFAMWFVMGNVWVFDAR

SEQ ID NO: 75910 - protein, 195 aa, Setaria italica
  misc_feature (38)..(38): Xaa can be any naturally occurring amino acid
  Transcript Sequence Number=SeqID_9936
  Gene Ontology: Mol. function=metal ion binding
  Homolog annotation: Hit_ID=B9S9Y2; Match level="QueryCoverage=83%, HitCoverage=53%, E-value=3e-53, Identity=59%"; Hit description=Ring finger protein, putative
  Pfam annotation: Domain name=zf-C3HC4; Domain location=150-190; Score= 34.6; E_value=3.9e-07; Accession=PF00097.17; Description=Zinc finger, C3HC4 type (RING finger)
LLFTLTVRTYRKVLLRRLPDDLHAANDALRNSSFLMNXARAFLELFFAMWFVMGNVWVFDARLGSFHRAPRLYALCIGLLAWNAVVYSLPFLLFLLLCCFVPMVGYALGYNMNSASVGRGASDEQLAALPRWRFKEPDVPRDRDHDDQECCICLAQYREKEEVRQLPCTHMFHLKCVDRWLRIISSCPLCKQELK

SEQ ID NO: 75911 - protein, 79 aa, Setaria italica
  Transcript Sequence Number=SeqID_9937
  Gene Ontology: Mol. function=serine-type endopeptidase activity; Biological process=negative regulation of catalytic activity
  Homolog annotation: Hit_ID=Q6MW77; Match level="QueryCoverage=100%, HitCoverage=10%, E-value=6e-24, Identity=65%"; Hit description =B1248C03.20 protein
PHVAGVVALLKVLHPQWSHAALKSAIITSASTKDEHGTPILAEALPRKVADPFDYGGGNINPNGAADPGLIYDIDPREY

SEQ ID NO: 75912 - protein, 117 aa, Setaria italica
  misc_feature (75)..(75): Xaa can be any naturally occurring amino acid
  Transcript Sequence Number=SeqID_9938
  Homolog annotation: Hit_ID=B6SRJ9; Match level="QueryCoverage=54%, HitCoverage=34%, E-value=2e-27, Identity=92%"; Hit description=F-box domain containing protein
MRAEGEKMKAAAQELDNLERVRRASVALNVWQPQVVHGRQKQLVQQCTVPVDSRLSDLNMELKVCKQQIATYKNXSKEKHKLNEYEEALKRAKYHPLQDSHTSGIIKEPRAKRKKLK

SEQ ID NO: 75913 - protein, 148 aa, Setaria italica
  Transcript Sequence Number=SeqID_9939
  Homolog annotation: Hit_ID=B6SRJ9; Match level="QueryCoverage=52%, HitCoverage=41%, E-value=1e-33, Identity=91%"; Hit description=F-box domain containing protein
RIAEARRRAVFEAEARVLACRRRLAELEESMRAEGEKMKAAAQELDNLERVRRASVALNVWQPQVVHGRQKQLVQQCTVPVDSRLSDLNMELKVCKQQIATYKNSYSKEKHKLNEYEEALKRAKYHPLQDSHTSGIIKEPRAKRKKLK

SEQ ID NO: 75914 - protein, 122 aa, Setaria italica
  misc_feature (58)..(58): Xaa can be any naturally occurring amino acid
  Transcript Sequence Number=SeqID_9940
  Gene Ontology: Mol. function=peptidase activity
  Homolog annotation: Hit_ID=B6TYH4; Match level="QueryCoverage=83%, HitCoverage=29%, E-value=8e-41, Identity=82%"; Hit description =Stress regulated protein
RDQYRQAICHGEGFYKPLFRTKQMLNKFSCIALAGIATEYLLYGVAEGGLADINKLDXGLLKSLGFTQKKADSQLRWAVLNTVLMLRRHEKARSQLAEAMSSGKSVGTCIEVIEGNINTDDI

SEQ ID NO: 75915 - protein, 81 aa, Setaria italica
  Transcript Sequence Number=SeqID_9941
  Gene Ontology: Cellular component=exocyst; Biological process =exocytosis
LWPHQLFDKFTSSFEMTYRVQKTWKITDPLIRQKLREAIFQKVIPEYRMHMENYSEKQQKSATARYSIKQLESQLQELFEG

SEQ ID NO: 75916 - protein, 101 aa, Setaria italica
  misc_feature (7)..(7): Xaa can be any naturally occurring amino acid
  Transcript Sequence Number=SeqID_9942
  Gene Ontology: Mol. function=peptidase activity
  Homolog annotation: Hit_ID=B6TYH4; Match level="QueryCoverage=77%, HitCoverage=21%, E-value=6e-22, Identity=70%"; Hit description =Stress regulated protein
TLGSIEXNLQIAAVLGGLSISAALEISQLQILFLVLGLLSLWSVDFLSRYILGGGVRNLILDTIGHYLSQKYHNRVIQVTLHSVLLCQAWVLNTVLEVALT

SEQ ID NO: 75917 - protein, 213 aa, Setaria italica
  misc_feature (28)..(28): Xaa can be any naturally occurring amino acid
  Transcript Sequence Number=SeqID_9943
  Gene Ontology: Mol. function=peptidase activity
  Homolog annotation: Hit_ID=B6TYH4; Match level="QueryCoverage=86%, HitCoverage=53%, E-value=1e-94, Identity=90%"; Hit description =Stress regulated protein
EAALFLVHGSQGEDGGLRGFGAARQLSXVYFGGGVRNLILDTIGHYLSQKYHNRVIQHEAGHFLIAYLLGVLPKGYTITSLDTLIKQGSLNVQAGTAFVDYEFLEEINTGKLSATMLNKFSCIALAGIATEYLLYGVAEGGLADINKLDGLLKSLGFTQKKADSQVRWAVLNTVLMLRRHEKARSQLAEAMSSGKSVGTCIEVIEGNINTDDI

SEQ ID NO: 75918 - protein, 318 aa, Setaria italica
  misc_feature (161)..(161): Xaa can be any naturally occurring amino acid
  Transcript Sequence Number=SeqID_9944
  Gene Ontology: Mol. function=peptidase activity
  Homolog annotation: Hit_ID=B6TYH4; Match level="QueryCoverage=93%, HitCoverage=86%, E-value=1e-125, Identity=78%"; Hit description =Stress regulated protein
  Subcellular localization annotation: CTP_CleavageSite=31; ConfidenceScore=5.14e-01
MSTRLGGAPCGCFGFTRLPLPAARLRLPPARAADTSASQSPARLRGVLEQVDEALSKGNDEAALFLVHGSQGEDGGLRGFGAARQVPQRLYKLDELKLNGIDTSAFLSPVDLTLGSIERNLQIAAVLGGLSISAALEISQLQILFLVLGLLSLWSVDFLCXFGGGVRNLILDTIGHYLSQKYHNRVIQHEAGHFLIAYLLGVLPKGYTITSLDTLIKQGSLNVQAGTAFVDYEFLEEINTGKLSATMLNKFSCIALAGIATEYLLYGVAEGGLADINKLDGLLKSLGFTQKKADSQLLSDQRISNFPSLLHTVGHLER

SEQ ID NO: 75919 - protein, 230 aa, Setaria italica
  misc_feature (198)..(198): Xaa can be any naturally occurring amino acid
  Transcript Sequence Number=SeqID_9945
  Subcellular localization annotation: CTP_CleavageSite=42; ConfidenceScore=5.27e-01
MLRKSGAKEGSIGSKGAIDVNRSPVSSAIAGRPSDFMIKICTCSGGSSSSPPRNLKNIDISMTCKGCTCESTTDRGGPSCSSKPNSMGLELPRPINPEVRWKTVNRRQRAARRARTFFGQDGRKDGIGSFYLFGSALNQEMAQEDAPVSESEKLGVSILGRRFSDPVENVPIKKRRFHMDCSPSPPPTPLLVDPYEKXLGRSSRGIRSYEKHRKVKMLGSECKDESRGPL

SEQ ID NO: 75920 - protein, 149 aa, Setaria italica
  Transcript Sequence Number=SeqID_9946
  Gene Ontology: Mol. function=heat shock protein binding
  Homolog annotation: Hit_ID=B6U2P5; Match level="QueryCoverage=100%, HitCoverage=61%, E-value=5e-54, Identity=72%"; Hit description=Heat shock protein binding protein
MAPQPQEDKSDRPSGGGGAGAPREQERRPSKAWGILIFGLIGATTATFAITQVRRSVDWFYTQLNKMQTTSSWRYTSNNSSRGSFSEEAKKRYYQRMQQEYEEEQERVQRIRHMQSVFNRERNKFRRGYESWRENGPPGGYNYIPRDDW

SEQ ID NO: 75921 - protein, 99 aa, Setaria italica
  Transcript Sequence Number=SeqID_9947
WRMSWDGSLALLNPCECYDFSQHPAKRENDQSPDGSPLHEQMNPHEITLSSGGRRPGGVRAQGRGVDWVGREEAGADLWRPYRRAAASGCGCEGAGGGF

SEQ ID NO: 75922 - protein, 230 aa, Setaria italica
  misc_feature (89)..(89): Xaa can be any naturally occurring amino acid
  Transcript Sequence Number=SeqID_9948
  Gene Ontology: Cellular component=membrane
  Homolog annotation: Hit_ID=Q69PB3; Match level="QueryCoverage=96%, HitCoverage=64%, E-value=4e-82, Identity=66%"; Hit description =Putative MtN21
  Pfam annotation: Domain name=DUF6; Domain location=112-230; Score =14.1; E_value=0.012; Accession=PF00892.12; Description=Integral membrane protein DUF6
  Pfam annotation: Domain name=TPT; Domain location=103-230; Score= -35.3; E_value=0.074; Accession=PF03151.8; Description=Triose -phosphate Transporter family
  Pfam module annotation: Pfam domain module=DUF6::TPT; Domain location= 112-230::103-230
VHGSLFGATVNQNLCYHGLHLGTSSLATTMTNLIPAITFAMAVAVGQERVNIKEVASIAKVLGTAVCIGGAITIAFFKGPKLLKLSLHXFVHAYPSSSDWVMGALFLIGSSSCWSLWLILQAPICRSYMDPLTLSAWTCFLSTLQSAAVTFFLLPNRSSWKIHSLFELSCYIFAGVFGSGVVFYLQSWCISVRGPLYSAMFTPLCTVVTTALSAVVLHEELHIGSMVGAV

SEQ ID NO: 75923 - protein, 102 aa, Setaria italica
  misc_feature (67)..(67): Xaa can be any naturally occurring amino acid
  misc_feature (85)..(85): Xaa can be any naturally occurring amino acid
  Transcript Sequence Number=SeqID_9949
  Subcellular localization annotation: CTP_CleavageSite=40; ConfidenceScore=5.41e-01
MATPPRFHGRPGSSRKPPLGLDGGVRSGSLGFFLGVSLLRTMAATSAAATAAASWIPSLLGWARGYXPLDFFLACRDQRQFLFQXSCLVETEGLLAPVGFLS

SEQ ID NO: 75924 - protein, 162 aa, Setaria italica
  Transcript Sequence Number=SeqID_9950
GRPRTTVPATTTSDAEEEAAPAGGAGGDLEGVQPYPEDGSGRGRPPWYYTAFRGGRQQRGYGMSDTRLYQNGRYYYDVDAGRYGYGRESNPVRTRPEEEYPGSGYGRPAGGDRRGRYGNNAAAGYRRYGGNDDEFGNGAMDQNSNGNGFQEEEGRQNGRYIP

SEQ ID NO: 75925 - protein, 137 aa, Setaria italica
  misc_feature (12)..(12): Xaa can be any naturally occurring amino acid
  Transcript Sequence Number=SeqID_9951
LPPSLLWRRRSXDAAAATDNHRLPPQPLQEDQVLHGRGAARRMRRRPGAAGASTSRDVAEDDAEEEDEEVPDAPRSSKKEKKRQERQAQREAEEAARDSRRNKQDRYEEMRRRKDEEREAQERQLEEEARARKAKEE

SEQ ID NO: 75926 - protein, 147 aa, Setaria italica
  Transcript Sequence Number=SeqID_9952
  Homolog annotation: Hit_ID=B6T3J5; Match level="QueryCoverage=27%, HitCoverage=13%, E-value=9e-15, Identity=90%"; Hit description =VGPW2523
MDAGGGGVLGAVLCMLLVFGIFPLLLWRRRSDAAAATDNHRLPPQPLQEDQVLHGRGAARRMRRRPGAAGASTSRDVAEDDAEEEDEEVPDAPRSSKKEKKRQERQAQREAEEAARDSRRDTTATLELPELYFNNKNMYTLNFTRHG

SEQ ID NO: 75927 - protein, 98 aa, Setaria italica
  Transcript Sequence Number=SeqID_9953
  Subcellular localization annotation: CTP_CleavageSite=36; ConfidenceScore=5.63e-01
QGASNFSTVLRHIPSISTLKILKRRLFFVRHSFRSVSSRGKYIFTTVRSYSLIQFGLLLPSSREIRTSQPPPPIHRCRPCGPRRRSLVTSPLSFVLVR

SEQ ID NO: 75928 - protein, 110 aa, Setaria italica
  Transcript Sequence Number=SeqID_9954
  Homolog annotation: Hit_ID=B4FWA7; Match level="QueryCoverage=100%, HitCoverage=100%, E-value=1e-56, Identity=96%"; Hit description =Brain protein 44
  Pfam annotation: Domain name=UPF0041; Domain location=1-110; Score =135.7; E_value=1.4e-37; Accession=PF03650.5; Description =Uncharacterised protein family (UPF0041)
MAATKLQAFWNHPAGPKTIHFWAPTFKWGISIANIADFAKPPEKISYPQQVAVACTGLIWSRYSLVITPKNWNLFSVNVAMAGTGLYQLSRKIRQDYLSDEKDAAPQPEA

SEQ ID NO: 75929 - protein, 107 aa, Setaria italica
  Transcript Sequence Number=SeqID_9955
  Gene Ontology: Mol. function=damaged DNA binding; Cellular component =nucleus; Biological process=proteasomal ubiquitin-dependent protein catabolic process
  Homolog annotation: Hit_ID=B6T790; Match level="QueryCoverage=96%, HitCoverage=27%, E-value=4e-46, Identity=88%"; Hit description=DNA repair protein RAD23-1
  Pfam annotation: Domain name=UBA; Domain location=63-99; Score=37.4; E_value=5.8e-08; Accession=PF00627.23; Description=UBATS-N domain
  Pfam annotation: Domain name=XPC-binding; Domain location=5-40; Score= 19.1; E_value=0.0014; Accession=PF09280.3; Description=XPC-binding domain
  Pfam module annotation: Pfam domain module=UBA::XPC-binding; Domain location=63-99::5-40
FKFTLSFFIQELSKQNPQILRLIQENHAEFLQLLNEPFEGGEGDFLEQPEQDEMPHAISVTPEEQEAIGRLESMGFERARVIVAFFACDRNEELAANYLLEHAGEED

SEQ ID NO: 75930 - protein, 363 aa, Setaria italica
  Transcript Sequence Number=SeqID_9956
  Gene Ontology: Mol. function=damaged DNA binding; Cellular component =nucleus; Biological process=proteasomal ubiquitin-dependent protein catabolic process
  Homolog annotation: Hit_ID=B6T790; Match level="QueryCoverage=100%, HitCoverage=98%, E-value=1e-147, Identity=73%"; Hit description=DNA repair protein RAD23-1
  Pfam annotation: Domain name=UBA; Domain location=139-178; Score =47.3; E_value=5.8e-11; Accession=PF00627.23; Description=UBATS-N domain
  Pfam annotation: Domain name=UBA; Domain location=319-355; Score =37.4; E_value=5.8e-08; Accession=PF00627.23; Description=UBATS-N domain
  Pfam annotation: Domain name=XPC-binding; Domain location=238-296; Score=113.3; E_value=8.2e-31; Accession=PF09280.3; Description=XPC -binding domain
  Pfam annotation: Domain name=ubiquitin; Domain location=1-73; Score =60.4; E_value=6.6e-15; Accession=PF00240.15; Description=Ubiquitin family
  Pfam module annotation: Pfam domain module=UBA::UBA::XPC -binding::ubiquitin; Domain location=139-178::319-355::238-296::1-73
KTIKGANFEIRVQPNDTIMAVKQKIEEKLGKDSYPWGQQLLIFTGKILKDESTLDENKVSEKDFLVVMSSGKSKMSGSSGASSAQLSSTPATSQAPPVDAPRQAPQPPVAATTISQPEGPPAQAPSNTYAASNLLSGSNLDTMINQLMEMGGGSWDRDKVQQALRAAYNNPERAVEYLYSGIPVTAEVAVPVGGQGSNTTDRAPTGEASLSGIPNTAPLNLFPQGGSNAGGGAGGGPLDFLRNNQQFQALREMVHTNPQILQPMLQELSKQNPQILRLIQENHAEFLQLLNEPFEGGEGDFLEQPEQDEMPHAISVTPEEQEAIGRLESMGFERARVIVAFFACDRNEELAANYLLEHAGEED

SEQ ID NO: 75931 - protein, 77 aa, Setaria italica
  Transcript Sequence Number=SeqID_9957
LAREVRPIFGRLFPASLGKLGRSMVHTSRDRATQQLGLSVIQVRPKILRSGAQIVTTSYTFTEKPRMNPYFKLSPCS

SEQ ID NO: 75932 - protein, 186 aa, Setaria italica
  Transcript Sequence Number=SeqID_9958
  Gene Ontology: Mol. function=ATP binding; Biological process=apoptosis
  Homolog annotation: Hit_ID=Q2RA84; Match level="QueryCoverage=98%, HitCoverage=38%, E-value=1e-32, Identity=39%"; Hit description=NB -ARC domain containing protein, expressed
FAKLGTTRAVTLKYLSEEAYWYFFKTHAFGSTDPTMHPRMAYVAMEIARMSNRSLLSATITACLLRDNFDIHFWCKLLAFLRRFIKWHASSFGEHPGDALNQNKPAHLWSMVRTSKEIVVHHQYDCSSQEEVPKISLASVMYGGVKPPSGKFEAIVWRSPIPPCYNYIYTCEVRNLKTGAVKRKRS

SEQ ID NO: 75933 - protein, 90 aa, Setaria italica
  Transcript Sequence Number=SeqID_9959
HTHYMVTTRIHERIHAPTIHGAHNNVDRQNKHAAKVYILLCPVCDITSKKNAKGSKNYVKDLPLHILLSDMNGGNPKYGMIWPHTPPRAE

SEQ ID NO: 75934 - protein, 121 aa, Setaria italica
  Transcript Sequence Number=SeqID_9960
  Homolog annotation: Hit_ID=B6U078; Match level="QueryCoverage=83%, HitCoverage=23%, E-value=1e-09, Identity=41%"; Hit description=F-box domain containing protein
EGRIGIVSLTFGREITQSLRYSIRQNEGEIANKHPVETTIPLPSDYDEYWVVAAAEGYIFLLGARYISQGGTSTHCVGSSEFLTLEIKTLKIERVCSARGGVCGHIIPYFGFPPFMSLRRI

SEQ ID NO: 75935 - protein, 174 aa, Setaria italica
  Transcript Sequence Number=SeqID_9961
  Gene Ontology: Mol. function=DNA binding; Cellular component=nucleus
  Homolog annotation: Hit_ID=B9S7K7; Match level="QueryCoverage=100%, HitCoverage=16%, E-value=7e-40, Identity=43%"; Hit description =Transcription factor, putative
  Pfam annotation: Domain name=FYRC; Domain location=14-109; Score =95.5; E_value=1.8e-25; Accession=PF05965.6; Description=FY rich C -terminus
QMAYYISEILDAGLQGPLFMVTLENCPGEVFINVSPTKCWSLVRERLNMEIRRQLSMGRANLPTLQPPGSVDGLEMFGFSSPAIVQAIEAQDVDSICTEYWRSTAHVVAGDHDSRHMPPPQGPPHIALRGLFQRASRDELRALRSLLTSNSSLDDRTRQQAAQILDEEIAKQWR

SEQ ID NO: 75936 - protein, 68 aa, Setaria italica
  Transcript Sequence Number=SeqID_9962
MQEVFNPPEMEGETEAKNGPCTSIRNDVVFEQDLGSSYQLWGNMKFEEHGQLLSQAKRDLSCVVQAFS

SEQ ID NO: 75937 - protein, 175 aa, Setaria italica
  misc_feature (74)..(74): Xaa can be any naturally occurring amino acid
  misc_feature (112)..(112): Xaa can be any naturally occurring amino acid
  misc_feature (151)..(151): Xaa can be any naturally occurring amino acid
  Transcript Sequence Number=SeqID_9963
  Gene Ontology: Mol. function=protein serine/threonine kinase activity; Biological process=protein amino acid phosphorylation
  Homolog annotation: Hit_ID=B9A1H1; Match level="QueryCoverage=92%, HitCoverage=15%, E-value=2e-63, Identity=70%"; Hit description =Putative LRR-kinase protein
  Pfam annotation: Domain name=Pkinase_Tyr; Domain location=31-175; Score=-147.2; E_value=0.00061; Accession=PF07714.9; Description =Protein tyrosine kinase
EKEKYKLIPTAIDEQHERVSYQALANGTDHFSQVNLLGQGSYGAVYKCTLQDKGITAAVKVFNVWQSGSTRSFXAECEALRRVRHRCLIKIITCCLSIDHQGQEFKALVLEXMPNGNLNGWLHPASKIQSLSNTLSLAQRLDIAVDIMDAXLDYLHNQCQPPIIHCDLKPSTSSL

SEQ ID NO: 75938 - protein, 184 aa, Setaria italica
  Transcript Sequence Number=SeqID_9964
  Gene Ontology: Mol. function=protein serine/threonine kinase activity; Biological process=protein amino acid phosphorylation
  Homolog annotation: Hit_ID=B9A1H1; Match level="QueryCoverage=98%, HitCoverage=26%, E-value=6e-46, Identity=49%"; Hit description =Putative LRR-kinase protein
  Pfam annotation: Domain name=LRR_1; Domain location=1-23; Score=16.8; E_value=0.089; Accession=PF00560.25; Description=Leucine Rich Repeat
  Pfam annotation: Domain name=LRR_1; Domain location=120-144; Score =2.2; E_value=1.2e+02; Accession=PF00560.25; Description=Leucine Rich Repeat
  Pfam annotation: Domain name=LRR_1; Domain location=25-47; Score =11.7; E_value=1.7; Accession=PF00560.25; Description=Leucine Rich Repeat
  Pfam annotation: Domain name=LRR_1; Domain location=49-71; Score=6.0; E_value=21; Accession=PF00560.25; Description=Leucine Rich Repeat
  Pfam annotation: Domain name=LRR_1; Domain location=73-95; Score =18.7; E_value=0.025; Accession=PF00560.25; Description=Leucine Rich Repeat
  Pfam annotation: Domain name=LRR_1; Domain location=97-118; Score =4.5; E_value=42; Accession=PF00560.25; Description=Leucine Rich Repeat
  Pfam module annotation: Pfam domain module=LRR_1::LRR_1::LRR_1::LRR _1::LRR_1::LRR_1; Domain location=1-23::120-144::25-47::49-71::73 -95::97-118
NLNELILSGNKLSGTIPASVGNCISLVRLLLDNNLLEGSIPQSLKNIKGLALLNLTMNKLSGSIPDALASIGHLQQLYLAHNNLSGSIPKVLQNLTLLAKLDLSFNDLQGEVPKGGPFANATHLSIDGNDELCGGNPQLHLAPCSTAAAGKNRGRMSRSLMVTVASICALLFLGLVVCLIHLIP

SEQ ID NO: 75939 - protein, 127 aa, Setaria italica
  Transcript Sequence Number=SeqID_9965
  Gene Ontology: Mol. function=protein serine/threonine kinase activity; Biological process=protein amino acid phosphorylation
  Homolog annotation: Hit_ID=B9A1H1; Match level="QueryCoverage=97%, HitCoverage=11%, E-value=7e-52, Identity=75%"; Hit description =Putative LRR-kinase protein
  Pfam annotation: Domain name=Pkinase_Tyr; Domain location=3-125; Score=-168.3; E_value=0.015; Accession=PF07714.9; Description =Protein tyrosine kinase
MSSYGAVYKCTLQDKGITAAVKVFNVWQSGSTRSFVAECEALRRVRHRCLIKIITCCLSIDHQGQEFKALVFEFMPNGNLNGWLHPASKIQSLSNTLSLAQRLDIAVDIMDALDYLHNQCQPPIIHC

SEQ ID NO: 75940 - protein, 88 aa, Setaria italica
  Transcript Sequence Number=SeqID_9966
EKARVEAGKAASLTARGKEEDEKAKPVAAAPPHATEKARPGGHRDDQDEKARAEHREKVAREAARRIEAARARVAEAKAKAERERQCE

SEQ ID NO: 75941 - protein, 294 aa, Setaria italica
  Transcript Sequence Number=SeqID_9967
  Gene Ontology: Mol. function=cyclin-dependent protein kinase activity; Cellular component=cytoplasm; Biological process=protein amino acid phosphorylation
  Homolog annotation: Hit_ID=P29618; Match level="QueryCoverage=100%, HitCoverage=100%, E-value=1e-164, Identity=93%"; Hit description =Cyclin-dependent kinase A-1
  Pfam annotation: Domain name=Pkinase; Domain location=4-287; Score =393.9; E_value=2.8e-115; Accession=PF00069.17; Description=Protein kinase domain
  Pfam annotation: Domain name=Pkinase_Tyr; Domain location=4-287; Score=27.5; E_value=1.5e-15; Accession=PF07714.9; Description =Protein tyrosine kinase
  Pfam module annotation: Pfam domain module=Pkinase::Pkinase_Tyr; Domain location=4-287::4-287
MEQYEKKEKIGEGTYGVVYKALDKATNETIALKKIRLEQEDEGVPSTAIREISLLKEMNHGNIVRLHDVVHSEKRIYLVFEYLDLDLKKFMDSCPEFAKNPTLIKSYLYQILRGVAYCHSHRVLHRDLKPQNLLIDRRTNAVKLADFGLARAFGIPVRTFTHEVVTLWYRAPEILLGARQYSTPVDVWSVGCIFAEMVNQKPLFPGDSEIDELFKIFRVLGTPNEQSWPGVSCLPDFKTAFPRWPAQDLAAIVPNLEPAGLDLLSKMLRYEPSKRITARQALEHEYFKDLEMVQ

SEQ ID NO: 75942 - protein, 292 aa, Setaria italica
  Transcript Sequence Number=SeqID_9968
  Gene Ontology: Mol. function=cyclin-dependent protein kinase activity; Cellular component=cytoplasm; Biological process=protein amino acid phosphorylation
  Homolog annotation: Hit_ID=P29619; Match level="QueryCoverage=100%, HitCoverage=100%, E-value=1e-162, Identity=94%"; Hit description =Cyclin-dependent kinase A-2
  Pfam annotation: Domain name=Pkinase; Domain location=4-286; Score =389.8; E_value=4.6e-114; Accession=PF00069.17; Description=Protein kinase domain
  Pfam annotation: Domain name=Pkinase_Tyr; Domain location=4-286; Score=15.5; E_value=9.2e-15; Accession=PF07714.9; Description =Protein tyrosine kinase
  Pfam module annotation: Pfam domain module=Pkinase::Pkinase_Tyr; Domain location=4-286::4-286
MDQYEKVEKIGEGTYGVVYKAKDRHTNETIALKKIRLEQEDEGVPSTAIREISLLKEMHHRNIVRLQDVVHNDKCIYLVFEYLDLDLKKHMDSSPDFKNHRIVKSFLYQILRGIAYCHSHRVLHRDLKPQNLLIDRRTNLLKLADFGLARAFGIPVRTFTHEVVTLWYRAPEILLGARHYSTPVDVWSVGCIFAEMVNQKPLFPGDSEIDELFKIFRILGTPNEETWPGVASLPDYKSTFPKWPSVDFATVVPTLEPAGIDLLSKMLRLDPSKRINARSALEHEYFKDLEVA

SEQ ID NO: 75943 - protein, 75 aa, Setaria italica
  Transcript Sequence Number=SeqID_9969
QVQPPVLLIQCKINMNWFFTNSLKHHISYFIARSTNNAIMLSIQWAAPQQPQTYVLSVIISRKLHYFLTHCTVQH

SEQ ID NO: 75944 - protein, 59 aa, Setaria italica
  Transcript Sequence Number=SeqID_9970
FPGRYRSNSPTVESWCLFWRRLEQLPVPVPRLLPLLLCRQVLHCHSGRLVAICNCCILM

SEQ ID NO: 75945 - protein, 288 aa, Setaria italica
  Transcript Sequence Number=SeqID_9971
  Gene Ontology: Mol. function=metal ion binding
  Homolog annotation: Hit_ID=Q852N7; Match level="QueryCoverage=94%, HitCoverage=74%, E-value=3e-72, Identity=51%"; Hit description =Putative zinc finger protein
  Pfam annotation: Domain name=zf-C3HC4; Domain location=1-32; Score =17.7; E_value=0.00097; Accession=PF00097.17; Description=Zinc finger, C3HC4 type (RING finger)
DSNPSTVTNCKHDYHLQCILEWCQRSSQCPMCWQPISMKDPMSQELLEAVEQERNMRANRSHSTALFRHPMLGDFEIPVGADDAELEERIIQHLAAAAAVRRSHRHHRRDGHHSRSGANSHPQVLVLSTDEHTTSGQEGDYEQAPAVFSGHRLGTLVQQERTTRGLEGAINPPLYCSTPADSNERIAGMQSTPVDQDRAGPSDLPSFSDTLRSRLQSASMKYKDSITKSASGWRERWFSRSNTISDISSEVRREVNAGIAAVSRMMERMDTRDGTGPSATSASGSGSH

SEQ ID NO: 75946 - protein, 355 aa, Setaria italica
  Transcript Sequence Number=SeqID_9972
  Gene Ontology: Mol. function=nucleoside-triphosphatase activity; Cellular component=membrane; Biological process=transport
  Homolog annotation: Hit_ID=B9SDN1; Match level="QueryCoverage=100%, HitCoverage=46%, E-value=1e-151, Identity=70%"; Hit description=ATP -binding cassette transporter, putative
  Pfam annotation: Domain name=ABC2_membrane; Domain location=112-321; Score=177.3; E_value=4.3e-50; Accession=PF01061.16; Description=ABC -2 type transporter
MPYFQSIGCTPLFAMNPAEFLLDLANGNTNDVSVPSELDDKVHMENHNLENNNSKNDCRPSAQDVHEYLVDAYETRVAFKEKKKLLAPLPISDDLKATITSSKREWGTSWWQQYSILFCRGIKERRHDYLSWMRITQVIATSVILGLLWWRSDPRTLKGLEDQAGLLFFIAVFWGFFPVFTAIFTFPQERAMLNKERAVDMYKLSAYFLARTTSDLPLDLFLPVVFMVIVYFMAGLKATATHFFLSMLTVFLSIIAAQGLGLVIGASLLDIKKATTLASVTVMTFMLAGGFFVKTVPPFISWLRYLSFNYHTYRLLLKVQYDPVPEILTTTKHMDNGATEVAALVAMIIGYRVLA

SEQ ID NO: 75947 - protein, 63 aa, Setaria italica
  Transcript Sequence Number=SeqID_9973
  Gene Ontology: Mol. function=aspartic-type endopeptidase activity; Biological process=proteolysis
  Homolog annotation: Hit_ID=Q10M98; Match level="QueryCoverage=100%, HitCoverage=16%, E-value=4e-16, Identity=65%"; Hit description =Eukaryotic aspartyl protease family protein
LDLPRENYMFDAVEEGRSITCLAINAGGGSMTIVGNYQQQNMHVLYDLANGKLSFVPAQCEKL

SEQ ID NO: 75948 - protein, 142 aa, Setaria italica
  Transcript Sequence Number=SeqID_9974
  Gene Ontology: Mol. function=drug transporter activity; Cellular component=membrane; Biological process=multidrug transport
  Homolog annotation: Hit_ID=B9RZD1; Match level="QueryCoverage=83%, HitCoverage=23%, E-value=8e-31, Identity=54%"; Hit description =Multidrug resistance pump, putative
  Pfam annotation: Domain name=MatE; Domain location=4-126; Score=12.6; E_value=0.00045; Accession=PF01554.10; Description=MatE
MHDMLLHLIGKCCGLFSIRVSNELGANRPKETKFAVVVSVSTSIFMGAIFMGVFLIWRTSLPKFFSDSHEVIHGASRLGYLLAVTVFMSSIWPVLSGVAVGAGWQVPVAFINVGCYYLVGIPLGILFGFKLKRGAMVKYSLK

SEQ ID NO: 75949 - protein, 135 aa, Setaria italica
  Transcript Sequence Number=SeqID_9975
  Gene Ontology: Mol. function=drug transporter activity; Cellular component=membrane; Biological process=multidrug transport
  Homolog annotation: Hit_ID=B9RZD1; Match level="QueryCoverage=60%, HitCoverage=17%, E-value=6e-12, Identity=44%"; Hit description =Multidrug resistance pump, putative
GAVLGVHAALTYVAVRRLGFGLRGAAVVGDVSHWLVVAAQFAYMAGGRFPDAWKGFTARAFNNLGAFVKLSLGSAVMIWFVVSVDIARFFQDFNCLISSSSLRSHSFFCLLHECWACFLVRVVDRKLLTFNFFNK

SEQ ID NO: 75950 - protein, 327 aa, Setaria italica
  Transcript Sequence Number=SeqID_9976
  Gene Ontology: Mol. function=drug transporter activity; Cellular component=membrane; Biological process=multidrug transport
  Homolog annotation: Hit_ID=B9RZD1; Match level="QueryCoverage=92%, HitCoverage=60%, E-value=6e-70, Identity=44%"; Hit description =Multidrug resistance pump, putative
  Pfam annotation: Domain name=MatE; Domain location=72-235; Score =112.3; E_value=1.7e-30; Accession=PF01554.10; Description=MatE
AVLGVHAALTYVAVRRLGFGLRGAAVVGDVSHWLVVAAQFAYMAGGRFPDAWKGFTARAFNNLGAFVKLSLGSAVMICLEFWYYTTLLVLVGLLKHAKLQLDIMSVCLNYEFMTIMVALGFSTAVGIRVSNELGANRPKETKFAVVVSVSTSIFMGAIFMGVFLIWRTSLPKFFSDSHEVIHGASRLGYLLAVTVFMSSIWPVLSGVAVGAGWQVPVAFINVGCYYLVGIPLGILFGFKLKRGAMGIWMGMMIGTFLQMVILFAIIFTTKWEKQAVLAEARMLQWGGKNENLPLMKSPPADDQMVPAEDDEMLAQGSQKNIEFVRTD

SEQ ID NO: 75951 - protein, 131 aa, Setaria italica
  Transcript Sequence Number=SeqID_9977
  Gene Ontology: Cellular component=nucleus
  Homolog annotation: Hit_ID=B6T9G6; Match level="QueryCoverage=83%, HitCoverage=44%, E-value=2e-59, Identity=97%"; Hit description=DCN1 -like protein 4
MRRASKKSTSSAATASAGPTKAVSKEVERIDQFFYTYADSSSGMIDPEGIETLCSHLEVPHTDVRILMLAWKMGCEKQGYFTLDEWRTGLKALRADSISKLKKAFPELVQEVTRPSNFQDFYTYAFRIASQ

SEQ ID NO: 75952 - protein, 79 aa, Setaria italica
  misc_feature (15)..(15): Xaa can be any naturally occurring amino acid
  Transcript Sequence Number=SeqID_9978
  Homolog annotation: Hit_ID=B6T9G6; Match level="QueryCoverage=100%, HitCoverage=31%, E-value=1e-36, Identity=92%"; Hit description=DCN1 -like protein 4
  Pfam annotation: Domain name=DUF298; Domain location=1-75; Score =22.9; E_value=3.1e-06; Accession=PF03556.7; Description=Domain of unknown function (DUF298)
LSCELLNLVLGLQFXPQVDKLNNYLKYQNDYKVINMDQWMGFIRFCNEINFPSLDNYDLDLAWPLILDNFVEWLRENKS

SEQ ID NO: 75953 - protein, 247 aa, Setaria italica
  Transcript Sequence Number=SeqID_9979
  Gene Ontology: Cellular component=nucleus
  Homolog annotation: Hit_ID=B6T9G6; Match level="QueryCoverage=100%, HitCoverage=100%, E-value=1e-131, Identity=91%"; Hit description =DCN1-like protein 4
  Pfam annotation: Domain name=DUF298; Domain location=125-243; Score =148.1; E_value=2.7e-41; Accession=PF03556.7; Description=Domain of unknown function (DUF298)
  Subcellular localization annotation: CTP_CleavageSite=48; ConfidenceScore=5.51e-01
MRRASKKSTSSAATASAGAEQVNEKQNRKRKGVSTNLTSRKAQRGPTKAVSKEVERIDQFFYTYADSSSGMIDPEGIETLCSHLEVPHTDVRILMLAWKMGCEKQGYFTLDEWRTGLKALRADSISKLKKAFPELVQEVTRPSNFQDFYTYAFRYCLTEDKKKCIEIPVACELLNLVLGLQFRPQVDKLNNYLKYQNDYKVINMDQWMGFIRFCNEINFPSLDNYDLDLAWPLILDNFVEWLRENKS

SEQ ID NO: 75954 - protein, 119 aa, Setaria italica
  Transcript Sequence Number=SeqID_9980
FLKLVLDRVKLEQYDCRIGWITNDSSDAVLAIYHAKQEENIEIDTIWIALLAHSTWHCRFAAQHIHTVFEGAHHTASYFEDLSYVLLHAFVIILTLVGLLQIAHVMELAAPMLFGCSVK

SEQ ID NO: 75955 - protein, 80 aa, Setaria italica
  Transcript Sequence Number=SeqID_9981
LYYRNAAAKPPPSTAKPQQGHAATAKGAAILDDAAAVAAADGTVVCDMHGALLRSTTLFPYFMLVAFEGGSLLRAMLLLC

SEQ ID NO: 75956 - protein, 256 aa, Setaria italica
  misc_feature (25)..(25): Xaa can be any naturally occurring amino acid
  misc_feature (38)..(38): Xaa can be any naturally occurring amino acid
  misc_feature (53)..(53): Xaa can be any naturally occurring amino acid
  misc_feature (89)..(89): Xaa can be any naturally occurring amino acid
  misc_feature (196)..(196): Xaa can be any naturally occurring amino acid
  Transcript Sequence Number=SeqID_9982
  Homolog annotation: Hit_ID=Q6YZW0; Match level="QueryCoverage=31%, HitCoverage=7%, E-value=1e-28, Identity=78%"; Hit description=Auxin response factor 21
RNLYKRLAAADMSRQISFQPQFLQXNNIQFNTSLLPPXNQQTEQLAKVIATPXQSGSVIVSEKVVQDCNPEQKQHAITQPVQGSQPIVXKLSAQPQFVVQNQLQQPQVILQAQPQQPQVILQAQIQQQQPLVQNHTVLHGDLQQAQLLQQQEPHLQQQPQQVQQSVQEQQQIKIQPVQVLNGTNVITQLSDHQMKXQLLKALQPQQPLIMEQQKMILDLQHQMVNSNSQSAAQQCAQVTTQAGGMHSSNTIQYPLG

SEQ ID NO: 75957 - protein, 169 aa, Setaria italica
  Transcript Sequence Number=SeqID_9983
  Gene Ontology: Mol. function=cysteine-type endopeptidase activity; Cellular component=vacuole; Biological process=proteolysis
  Homolog annotation: Hit_ID=Q10716; Match level="QueryCoverage=98%, HitCoverage=45%, E-value=2e-90, Identity=94%"; Hit description =Cysteine proteinase 1
  Pfam annotation: Domain name=Peptidase_C1; Domain location=2-167; Score=140.6; E_value=5e-39; Accession=PF00112.15; Description=Papain family cysteine protease
ILQCDPSEPDSCDSGCNGGLMTTAFSYLQKAGGLESEKDYPYTGSNGKCKFDKSKIVASVQNFSVVSVDEDQIAANLIKHGPLAIGINAAYMQTYIGGVSCPYICGRHLDHGVLLVGYGAAGFAPIRLKEKPYWIIKNSWGENWGENGYYKICRGSNVRNKCGVDSIGS

SEQ ID NO: 75958 - protein, 180 aa, Setaria italica
  Transcript Sequence Number=SeqID_9984
  Gene Ontology: Mol. function=cysteine-type endopeptidase activity; Cellular component=vacuole; Biological process=proteolysis
  Homolog annotation: Hit_ID=Q10716; Match level="QueryCoverage=98%, HitCoverage=47%, E-value=9e-98, Identity=95%"; Hit description =Cysteine proteinase 1
  Pfam annotation: Domain name=Peptidase_C1; Domain location=2-172; Score=161.3; E_value=3e-45; Accession=PF00112.15; Description=Papain family cysteine protease
ILQCDPSEPDSCDSGCNGGLMTTAFSYLQKAGGLESEKDYPYTGSNGKCKFDKSKIVASVQNFSVVSVDEDQIAANLIKHGPLAIGINAAYMQTYIGGVSCPYICGRHLDHGVLLVGYGAAGFAPIRLKEKPYWIIKNSWGENWGENGYYKICRGSNVRNKCGVDSMVSTVSAIHASKEE

SEQ ID NO: 75959 - protein, 286 aa, Setaria italica
  misc_feature (132)..(132): Xaa can be any naturally occurring amino acid
  misc_feature (159)..(159): Xaa can be any naturally occurring amino acid
  Transcript Sequence Number=SeqID_9985
  Gene Ontology: Mol. function=cysteine-type endopeptidase activity; Cellular component=vacuole; Biological process=proteolysis
  Homolog annotation: Hit_ID=Q10716; Match level="QueryCoverage=97%, HitCoverage=74%, E-value=1e-146, Identity=90%"; Hit description =Cysteine proteinase 1
  Pfam annotation: Domain name=Peptidase_C1; Domain location=48-278; Score=374.4; E_value=2e-109; Accession=PF00112.15; Description =Papain family cysteine protease
LSFFRTFYPRSVVSVRYLTFGLRKSRRALLRELGDSAHEAPVLPTDGLPEDFDWRDHGAVGPVKNQGSCGSCWSFSASGALEGAHYLATGKLEVLSEQQFVDCDHECDPSEPDSCDSGCNGGLMTTAFSYLXQKAGGLESEKDYPYTGSNGKCKFRTKXSKIVASVQNFSVVSVDEDQIAANLIKHGPLAIGINAAYMQTYIGGVSCPYICGRHLDHGVLLVGYGAAGFAPIRLKEKPYWIIKNSWGENWGENGYYKICRGSNVRNKCGVDSMVSTVSAIHASKEE

SEQ ID NO: 75960 - protein, 1111 aa, Setaria italica
  misc_feature (18)..(18): Xaa can be any naturally occurring amino acid
  misc_feature (392)..(392): Xaa can be any naturally occurring amino acid
  misc_feature (478)..(478): Xaa can be any naturally occurring amino acid
  misc_feature (810)..(810): Xaa can be any naturally occurring amino acid
  misc_feature (1073)..(1073): Xaa can be any naturally occurring amino acid
  misc_feature (1103)..(1103): Xaa can be any naturally occurring amino acid
  Transcript Sequence Number=SeqID_9986
  Gene Ontology: Mol. function=protein dimerization activity; Cellular component=nucleus; Biological process=regulation of transcription, DNA-dependent
  Homolog annotation: Hit_ID=Q6YZW0; Match level="QueryCoverage=97%, HitCoverage=98%, E-value=0.0, Identity=75%"; Hit description=Auxin response factor 21
  Pfam annotation: Domain name=AUX_IAA; Domain location=919-1074; Score= -101.8; E_value=0.04; Accession=PF02309.8; Description=AUXIAA family
  Pfam annotation: Domain name=Auxin_resp; Domain location=261-344; Score=196.5; E_value=7.4e-56; Accession=PF06507.5; Description=Auxin response factor
  Pfam annotation: Domain name=B3; Domain location=134-239; Score =102.0; E_value=2e-27; Accession=PF02362.13; Description=B3 DNA binding domain
  Pfam annotation: Domain name=PB1; Domain location=991-1085; Score =6.5; E_value=0.058; Accession=PF00564.16; Description=PB1 domain
  Pfam module annotation: Pfam domain module=AUX_IAA::Auxin _resp::B3::PB1; Domain location=919-1074::261-344::134-239::991-1085
REWEAPGTSSGGAGGGGXAGGGTKVNQELWYACAGPLVALPPAGSLVVYFPQGHSEQVAASMGKDADAKIPSYPNLPSKLICILNSVTMHADTDTDEVYARMTLQPVSNVTQCDKETLLASELALKQTRPQTEFFCKTLTASDTSTHGGFSVPRRAAERIFPHLDFSMQPPAQELQARDLHDSIWTFRHIYRGQPKRHLLTTGWSLFVSGKKLLAGDSVLFIRDARQQLLLGIRRANRQPVNLSSSVLSSDSMHIGILAAAAHAAANNSQFTVFYNPRASPSEFVIPFAKYQKAVYSNQLSLGMRFRMMFETEESGTRRYMGTITGISDLDPVRWKNSQWRNIQVAWDEAAPSERRTRVSLWDIEPVIAPFFIYPSPLFTAKRPRQPGITAXIISVDDETADMENLFKRTMPWFGEEIYKKDLNTQNNLVPGLSLVQWMQQNPSLTSTVVQPELLNSLAGKPVQTLAAADMSRQIRLXSPQFLQQNNIQFNTSLLPPQNQQTEQLAKVIATPNQSGSVIVSQKVVQDCNPEQKQHAITQPVQGSQPMISAAQPQFVVQNQLQQPQVILQAQPQQPQVILQAQIQQQQPLVQNHTVLHGDLQQAQLLQQQEPHLQQQPQQVQQSVQEQQQIKIQPVQVLNGTNVITQLSDHQMKIQLLKALQPQQPLIMEQQKMILDLQHQMVNSNSQSAAQQCAQVTTQAGGMHSSNTIQYPTQQKTQPHQPIQDFPRHAVSVANPEIATSMGTRSLHVPGGVQLLKTEDVPSSSTSPPTNNNPVLLQSVQCSSKNQSLLTAAKTPQSSAVVGPTLGQGXRPYESAQQMVMIPKGAEQKPVTRQDYVNNTPQMDYLDTSSSATSVCLSQADGSLHQNFPPSSFNQHQLLRETVPDSEFEVTDPGNNFLFGVNIDGHLDSLNADALLANNFETEKYMDHMPGHGISNYISSKDSQQELSSSMISHSFGVADIAFNSIDSSINDAPFLNRNSRPPAPAHQRIRTYTKVHKRGAVGRSIDINRYSGYDELKHDVARMFGIEGQLSDQNRGGWKLVYEDHEKDVLLVGDDPWEDFVNCVRCIRILSXPQEEMQMRLASDFGDSFLHNQACSSSDGGXHPWRVTGD

SEQ ID NO: 75961 - protein, 79 aa, Setaria italica
  Transcript Sequence Number=SeqID_9987
  Subcellular localization annotation: CTP_CleavageSite=45; ConfidenceScore=5.35e-01
FRDIHFGRISSVWLLLVGAASPPAPTLCSLFPRRVSGLFFPRRKPSAHAVNFHGLVNWHLWKSARWGSPARLNLIFHAE

SEQ ID NO: 75962 - protein, 320 aa, Setaria italica
  Transcript Sequence Number=SeqID_9988
  Gene Ontology: Mol. function=nucleic acid binding; Cellular component= nucleus; Biological process=DNA replication
  Homolog annotation: Hit_ID=Q4LAW1; Match level="QueryCoverage=81%, HitCoverage=87%, E-value=2e-50, Identity=42%"; Hit description =Putative replication factor A (Fragment)
  Pfam annotation: Domain name=RPA_C; Domain location=208-312; Score =53.5; E_value=8.1e-13; Accession=PF08784.3; Description=Replication protein A C terminal
  Pfam annotation: Domain name=tRNA_anti; Domain location=117-191; Score=25.7; E_value=0.00019; Accession=PF01336.17; Description=OB -fold nucleic acid binding domain
  Pfam module annotation: Pfam domain module=RPA_C::tRNA_anti; Domain location=208-312::117-191
  Subcellular localization annotation: CTP_CleavageSite=31; ConfidenceScore=5.21e-01
PNQTVPPALSPSPFPLPPFLPRQALGFRALGAAMYGGGGGNYDGGGGAANANSLFGGGGFMPSQSTAAPESGGGGSLSKGRNAQTLLPLTVKQIMDAAQASDDKSNFAINGVEVSTIRLVGRMLGKVERVTDVAFILDDGTGKIDVNRWENESSDTKEMADVNDGNYVIVNGGLKGFQGKRHVVAYSVRRVTNFNDITHHFLHCIYVHLELTKSNSRLPSQINASTGIPGHANQVRLPNNQATTFSASGNTAGNDVSSLVMSVFHDPAIIDREDGITVAYIIDRLKLPEEVIKEVMQKHIDDGNIYNTIDDLHYRSAMNG

SEQ ID NO: 75963 - protein, 73 aa, Setaria italica
  misc_feature (47)..(47): Xaa can be any naturally occurring amino acid
  Transcript Sequence Number=SeqID_9989
  Subcellular localization annotation: CTP_CleavageSite=22; ConfidenceScore=5.33e-01
MASLSSAARAAVASRRSSVVVRASLGKAAGTAAVAVAASALLAGGAXAQEVLLGANGGVLVFEPSEFSVKAGD

SEQ ID NO: 75964 - protein, 90 aa, Setaria italica
  Transcript Sequence Number=SeqID_9990
  Gene Ontology: Mol. function=electron carrier activity; Cellular component=chloroplast; Biological process=electron transport chain
  Homolog annotation: Hit_ID=P08248; Match level="QueryCoverage=62%, HitCoverage=36%, E-value=1e-21, Identity=87%"; Hit description =Plastocyanin, chloroplastic
  Pfam annotation: Domain name=Copper-bind; Domain location=38-88; Score=9.9; E_value=0.00014; Accession=PF00127.12; Description=Copper binding proteins, plastocyaninaz
  Subcellular localization annotation: CTP_CleavageSite=21; ConfidenceScore=5.51e-01
MASLSSAAVTAPSFAAARPARAAVARRPSAGNGGAMAQEVLLGANGGVLVFEPSEFSVKAGDTITFKNNAGYPHNVVFDEDEVPSGVERT

SEQ ID NO: 75965 - protein, 84 aa, Setaria italica
  Transcript Sequence Number=SeqID_9991
  Gene Ontology: Mol. function=electron carrier activity; Cellular component=chloroplast; Biological process=electron transport chain
  Homolog annotation: Hit_ID=P08248; Match level="QueryCoverage=89%, HitCoverage=48%, E-value=1e-32, Identity=88%"; Hit description =Plastocyanin, chloroplastic
  Pfam annotation: Domain name=Copper-bind; Domain location=1-83; Score= 103.2; E_value=9.1e-28; Accession=PF00127.12; Description=Copper binding proteins, plastocyaninaz
MEELLGSNGGVLVFEPSEFSVKAGDTITFKNNAGYPHNVVFDEDEVPSGVDAAKISQEEYLNAPGETYSVTLTVPGTYSSLVRL

SEQ ID NO: 75966 - protein, 24 aa, Setaria italica
  Transcript Sequence Number=SeqID_9992
GKTYVVQDGDIIFFKFNVSGGGKK

SEQ ID NO: 75967 - protein, 120 aa, Setaria italica
  Transcript Sequence Number=SeqID_9993
  Gene Ontology: Mol. function=electron carrier activity; Cellular component=chloroplast; Biological process=electron transport chain
  Homolog annotation: Hit_ID=B6SSB9; Match level="QueryCoverage=80%, HitCoverage=62%, E-value=7e-46, Identity=90%"; Hit description =Plastocyanin
  Pfam annotation: Domain name=Copper-bind; Domain location=24-120; Score=195.1; E_value=1.9e-55; Accession=PF00127.12; Description =Copper binding proteins, plastocyaninaz
MASLSSAAVAVAASALLAGGAMAQEVLLGANGGVLVFEPSEFSVKAGDTITFKNNAGYPHNVVFDEDEVPSGVDAAKISQEEYLNAPGETYSVTLTVPGTYSFYCEPHQGAGMVGKVTVN

SEQ ID NO: 75968 - protein, 337 aa, Setaria italica
  misc_feature (231)..(231): Xaa can be any naturally occurring amino acid
  Transcript Sequence Number=SeqID_9994
  Gene Ontology: Cellular component=chloroplast
  Homolog annotation: Hit_ID=Q9SFB3; Match level="QueryCoverage=88%, HitCoverage=79%, E-value=1e-114, Identity=61%"; Hit description =F17A17.35 protein
  Pfam annotation: Domain name=DUF1092; Domain location=54-331; Score =507.6; E_value=1.7e-149; Accession=PF06485.3; Description=Protein of unknown function (DUF1092)
SSESSTAASAASDTVEEEAEPAETYDEDEDEELDPQAEVCYLDPDADPEAIREWELDFCSRPILDARGKKVWELVVCDATLSLQFTRYFPNNAINSVTLRDALASVPEALGVPLPDRVRFFRSQMQTIITRACGELGLKAVPSRRCVSLLLWLDERYEAVYSRHPGFQAGTRPLLALDNPFPTTLPENLVGDKWAFVQLPFSAVREEVESLERRYAFGAGLDLDLLGFGSXDDSTLVPGVAVESSRAKPLAAWMNGLEICAMEVDTGRGSLILSAGVSTRYIYSGYEKTPAATQEAEAWEAAKKACGGLHFLAIQENLNSDGCVGFWLLLDLPPPPV

SEQ ID NO: 75969 - protein, 393 aa, Setaria italica
  Transcript Sequence Number=SeqID_9995
  Gene Ontology: Mol. function=GTP binding; Cellular component =intracellular; Biological process=response to cadmium ion
  Homolog annotation: Hit_ID=B4FUE0; Match level="QueryCoverage=96%, HitCoverage=96%, E-value=0.0, Identity=90%"; Hit description=GTP -binding protein PTD004
  Pfam annotation: Domain name=MMR_HSR1; Domain location=24-159; Score =109.6; E_value=1.1e-29; Accession=PF01926.15; Description=GTPase of unknown function
  Pfam annotation: Domain name=YchF-GTPase_C; Domain location=303-386; Score=199.0; E_value=1.3e-56; Accession=PF06071.5; Description =Protein of unknown function (DUF933)
  Pfam module annotation: Pfam domain module=MMR_HSR1::YchF-GTPase_C; Domain location=24-159::303-386
MPPKAKKDAAPAERPILGRFSSHLKIGIVGLPNVGKSTFFNIVTKLAIPAENFPFCTIEPNEARVNVPDERFDWLCQLFKPKSSVPAYLEITDIAGLIRGAHAGDGLGNAFLSHIRAVDGIFHVLRAFDDADVTHVDDTVDPVRDLETITEELRLKDIDFMSKKIEDLEKSMKRSNDKQLKIEHELCERVIKHLQDGKDIRLGDWKAADIEILNTFQLLTAKPVVYLVNMSEKDFQRKKNKFLPKIHAWVQEHGGETILPFSCAFEQKLVDMPEDEAAKYCAENQITSMIPKIIKTGFAAIHLIYFFTAGPDEVKCWQIRRQTKAPQAAGAIHTDFERGFICAEVMKFDELKELGSESAVKAAGKYRQEGKTYVVQDGDIIFFKFNVSGGGKK

SEQ ID NO: 75970 - protein, 200 aa, Setaria italica
  misc_feature (153)..(153): Xaa can be any naturally occurring amino acid
  Transcript Sequence Number=SeqID_9996
  Gene Ontology: Mol. function=electron carrier activity; Cellular component=chloroplast; Biological process=electron transport chain
  Homolog annotation: Hit_ID=B6SSB9; Match level="QueryCoverage=49%, HitCoverage=62%, E-value=2e-43, Identity=87%"; Hit description =Plastocyanin
  Pfam annotation: Domain name=Copper-bind; Domain location=103-200; Score=182.8; E_value=9.6e-52; Accession=PF00127.12; Description =Copper binding proteins, plastocyaninaz
  Subcellular localization annotation: CTP_CleavageSite=76; ConfidenceScore=5.71e-01
MARKWRPPQAFLAASQASASCVAAGVFSCSSIITTHLPLATSMASLSSAAVTAPSFAAARPARAAVASRRSSVVVRASLGKAAGTAAVAVAASALLAGGAMAQEVLLGANGGVLVFEPSEFSVKAGDTITFKNNAGYPHNVVFDEDEVPRRGXDAAKISQEEYLNAPGETYSVTLTVPGTYSFYCEPHQGAGMVGKVTVN

SEQ ID NO: 75971 - protein, 65 aa, Setaria italica
  Transcript Sequence Number=SeqID_9997
ICIGSVLCRCIFMELVSDSAQLHDTFCNHNHRTCNFSFSGGITIRKFLLNYQQVLVFTLDVFLLV

SEQ ID NO: 75972 - protein, 432 aa, Setaria italica
  Transcript Sequence Number=SeqID_9998
  Gene Ontology: Mol. function=metal ion binding; Cellular component =nucleus; Biological process=regulation of transcription, DNA -dependent
  Homolog annotation: Hit_ID=B6TF72; Match level="QueryCoverage=100%, HitCoverage=99%, E-value=1e-127, Identity=58%"; Hit description =Squamosa promoter-binding-like protein 11
  Pfam annotation: Domain name=SBP; Domain location=159-237; Score =181.5; E_value=2.4e-51; Accession=PF03110.6; Description=SBP domain
MGSFGMNWDQKNSMVWDCENLAPSVPNEIVRHGSANSSGGTLTSSSELGHGSSKSSISGSIDSPFGVGNSIEFNFAAVERHVKDMGKNGRVDDSRTSPSSMIAFSHGEPSISLKLGKRAYVENVCGRQDNKSSAPSTVTSASTVVKKTKVSHQNVKNSYCQVEGCKVDLSSAKAYHRKHKVCEDHAKAPKVVVAGLERRFCQQCSRFHGLAEFDQNKRSCRRRLTHHNARRRKPQTDTISFNSSRLSTMFYDTSQQTNLFFSQPLFSQVRSNALSSWDNLGGFKFVETKHMSMHPMKTVGLDELPFSNLQISTSVAAQTARHHNFDGLMPVKGTNTKVLNQGVEASTAASNSNGAPELGRALSLLSDGSWGSSSTVIQQHNSHVHTGAMPPLGTIAVSNPVTNHLDPSPGGFWHDDPATLDGTLQIQASTHL

SEQ ID NO: 75973 - protein, 46 aa, Setaria italica
  misc_feature (1)..(14): Xaa can be any naturally occurring amino acid
  Transcript Sequence Number=SeqID_9999
XXXXXXXXXXXXXXSHWIKDNRFHETFTHIYTTMLDYLNSEENIYR

SEQ ID NO: 75974 - protein, 106 aa, Setaria italica
  Transcript Sequence Number=SeqID_10000
GLRFWSFFIGCVESKSPSWDIELRGIKDLLSHQSVAAKHFLPPTSLICMNVDPGEIWRICRGCGGDVSGSRQHNDAWYLCSYWCFHPHVIGLVKCGEIWLRCRSCR

SEQ ID NO: 75975 - protein, 189 aa, Setaria italica
  Transcript Sequence Number=SeqID_10001
  Gene Ontology: Mol. function=serine-type endopeptidase activity; Cellular component=plasma membrane
  Homolog annotation: Hit_ID=Q9XI10; Match level="QueryCoverage=91%, HitCoverage=22%, E-value=2e-24, Identity=37%"; Hit description =F8K7.10 protein
  Subcellular localization annotation: CTP_CleavageSite=47; ConfidenceScore=5.29e-01
GRLGYHRFRGAGATGDSVVPYLQPVRSPVRSIRMLRVNGTFPSFSPDASHIAVNGDFFATPGVMVLRSDGTRRWTISKEPSLFFTTWSPTERGVVFTSAGPIFETPKATVRIARVEFDPSELTDDRKEVSAATVRALTRPEAGNDAFPAVSPCGRWLVFRSGRTGHKNLYVIDTARGEEEGSGGAAVRR

SEQ ID NO: 75976 - protein, 108 aa, Setaria italica
  Transcript Sequence Number=SeqID_10002
  Gene Ontology: Mol. function=actin binding; Cellular component=actin cytoskeleton; Biological process=cytoskeleton organization and biogenesis
MAADWLSARRAWEKWTTKHVGPSGKQVQAALLLNYDPSGPSRLLPVIAEQEGTQLTAIDMRPFLDFVKRGNLQTEFFSIRPNQYLVTSIHDNWYCARCVNSTKSGGER

SEQ ID NO: 75977 - protein, 91 aa, Setaria italica
  Transcript Sequence Number=SeqID_10003
  Gene Ontology: Biological process=steroid metabolic process
  Homolog annotation: Hit_ID=B6U0I9; Match level="QueryCoverage=100%, HitCoverage=22%, E-value=1e-40, Identity=89%"; Hit description =Oxysterol-binding protein OBPa
VSLEGGLAAELRPANLVRRVLSLFRNVSPGSDLSHFQLPATFNLPKSQLQMYGEGLYCAGEDLLGRCARGKDSLERLTSVVAWSISTTRPP

SEQ ID NO: 75978 - protein, 115 aa, Setaria italica
  Transcript Sequence Number=SeqID_10004
  Gene Ontology: Mol. function=calcium ion binding; Cellular component =nucleus; Biological process=regulation of transcription, DNA -dependent
  Homolog annotation: Hit_ID=Q7XKR4; Match level="QueryCoverage=95%, HitCoverage=11%, E-value=7e-36, Identity=62%"; Hit description =OSJNBa0053B21.7 protein
  Pfam annotation: Domain name=CG-1; Domain location=11-115; Score =193.6; E_value=5.4e-55; Accession=PF03859.8; Description=CG-1 domain
MQQQGLDIHKLQQEVKTRWLKPQEVLQILQNHELFMVSHKPPQKPPSGSWFLFNRRVLRYFRNDGFEWQKKKNGKTINEAHERLKVDNVEALNCYYARGEYYPTFQRRIRSMLDP

SEQ ID NO: 75979 - protein, 60 aa, Setaria italica
  Transcript Sequence Number=SeqID_10005
  Gene Ontology: Mol. function=hydrolase activity
  Homolog annotation: Hit_ID=B6SPD1; Match level="QueryCoverage=85%, HitCoverage=10%, E-value=2e-12, Identity=64%"; Hit description =Purple acid phosphatase
FREYSYGHAVLDIKNHTHTHYAWYRNYDGNKVTAGTTWFTNRYHMPNHDDSVYDSNVAYA

SEQ ID NO: 75980 - protein, 481 aa, Setaria italica
  Transcript Sequence Number=SeqID_10006
  Gene Ontology: Mol. function=acid phosphatase activity; Cellular component=extracellular region; Biological process=biological_process
  Homolog annotation: Hit_ID=B6SPD1; Match level="QueryCoverage=89%, HitCoverage=85%, E-value=0.0, Identity=69%"; Hit description=Purple acid phosphatase
  Pfam annotation: Domain name=Metallophos; Domain location=171-368; Score=72.9; E_value=1.1e-18; Accession=PF00149.20; Description =Calcineurin-like phosphoesterase
  Pfam annotation: Domain name=PhoD; Domain location=78-423; Score= -244.3; E_value=0.036; Accession=PF09423.2; Description=PhoD-like phosphatase
  Pfam module annotation: Pfam domain module=Metallophos::PhoD; Domain location=171-368::78-423
CVAAMERKPAAAAALVVVVVVVLAAALFSVGEAAHPRRCVTSTYRRKHQASDDMPMDADVFAVPPGRNAPQQVHITLGDQTGTAMLVSWVTVEAEGNSTVLYGRAADRLDLAAEGTTTRYTFYNYTSGFIHHCTLTGLDHGTRYYYAMGFGDTVRTFWFTTPPPPGPGAPLRLGLIGDLGQTPDSNSTLTHYEQHPGDAVLFVGDLSYADKHPLHDNNRWDTWGRFSERSVAYQPWIWTAGNHEIDYAPEIGETVAFKPFSHRYPTPYRASDSSEPYWYSVKMGPAHIIVLSSYSAFGKYTPQWKWLEQELKRVDRETTPWLFISAHVPWYNSNNFHFMEGEPTRVQFEQMAVDARVDIVFAGHVHAYERSHRYSNIKYNITDGKCTPVADRRAPVYIVIGDGGNIEGLADELTWPQPAYSAFREYSYGHAVLDIKNHTHAHYAWYRNHDGNKVTADTTWFTNRYHMPNHDDSVYSNTAYV

SEQ ID NO: 75981 - protein, 124 aa, Setaria italica
  misc_feature (24)..(24): Xaa can be any naturally occurring amino acid
  misc_feature (53)..(53): Xaa can be any naturally occurring amino acid
  Transcript Sequence Number=SeqID_10007
  Homolog annotation: Hit_ID=Q9M897; Match level="QueryCoverage=95%, HitCoverage=54%, E-value=6e-25, Identity=47%"; Hit description =F16B3.6 protein
  Pfam annotation: Domain name=DUF679; Domain location=1-119; Score =172.0; E_value=1.8e-48; Accession=PF05078.4; Description=Protein of unknown function (DUF679)
LCALSCFVLSFTDSFRDVEGKVRXGFATFKGLWVIDGGAPLEPLAAAEYRMRXLDFVHAIVSAMIFVAIALFDQNVVSCFYPIPSEDAKQLLTALPVVIGVIGSMLFVSFPTTRHSIGSTFSSQ

SEQ ID NO: 75982 - protein, 328 aa, Setaria italica
  Transcript Sequence Number=SeqID_10008
  Gene Ontology: Mol. function=molecular_function; Cellular component =cellular_component; Biological process=biological_process
  Homolog annotation: Hit_ID=Q54TH4; Match level="QueryCoverage=93%, HitCoverage=88%, E-value=8e-33, Identity=32%"; Hit description =UPF0363 protein
  Pfam annotation: Domain name=DUF410; Domain location=51-327; Score =26.7; E_value=3.9e-10; Accession=PF04190.5; Description=Protein of unknown function (DUF410)
MSRSLSMRGSMRSRRDLPPPEKTIEKLEAMVDGGNFYEAQQMYKSTSARYIAAQKYSEALDILQSGALVQLKHGQVTCGGELAVLFVDTLVAGELPYSEETFGRIRKIYDAFPRISVPHFLGDDYDDEGHQLSEAISAAKVRAESCSSFLKAAIRWSAEFGTSRNGSPELHVMLAEYIYSESPETDMTKVSSHFVRGNDPKKFASMLVNFMGKCYPGEDDTAIARGVLMYLSQGNLRDANLLMDEMKEQLKSANSEFPKTDLIQFIKYLLPTLERDAYPLFRTLRQKYRTSTDRDPVFQELLDEIAAKFYNIQRQNPLEGLFGEMFKI

SEQ ID NO: 75983 - protein, 51 aa, Setaria italica
  misc_feature (39)..(39): Xaa can be any naturally occurring amino acid
  Transcript Sequence Number=SeqID_10009
HNIHSLRYLSQGNLRDANLLMDEMKEQLKSANSEFPKTXDLIQFIKFLLPT

SEQ ID NO: 75984 - protein, 153 aa, Setaria italica
  Transcript Sequence Number=SeqID_10010
  Gene Ontology: Mol. function=oxidoreductase activity; Biological process=oxidation reduction
  Homolog annotation: Hit_ID=B6TAL8; Match level="QueryCoverage=92%, HitCoverage=38%, E-value=1e-69, Identity=84%"; Hit description =Retinol dehydrogenase 12
KRSDGTCFELDKLNDKARYKPFIAYSHSKLANILHANELSRRFQEEGCNLTANSLHPGVIFTNIVRYIAGNSALLSVVSPVAKLVLKGVPQGAATTCYLALHPDLKDVSGKYFADCNEATPTPVARDAELAKKLWLFSEELLGADAVEEYHDS

SEQ ID NO: 75985 - protein, 348 aa, Setaria italica
  Transcript Sequence Number=SeqID_10011
  Gene Ontology: Mol. function=oxidoreductase activity; Cellular component=integral to membrane; Biological process=oxidation reduction
  Homolog annotation: Hit_ID=B6TAL8; Match level="QueryCoverage=86%, HitCoverage=82%, E-value=1e-146, Identity=82%"; Hit description =Retinol dehydrogenase 12
  Pfam annotation: Domain name=Epimerase; Domain location=54-310; Score= -60.5; E_value=0.013; Accession=PF01370.13; Description=NAD dependent epimerasedehydratase family
  Pfam annotation: Domain name=adh_short; Domain location=52-201; Score= 2.0; E_value=1e-05; Accession=PF00106.17; Description=short chain dehydrogenase
  Pfam module annotation: Pfam domain module=Epimerase::adh_short; Domain location=54-310::52-201
MLEQVLDYWFLAKEAVSGMGLWGWPWGRRGPSGFGSASTAEEVTAGVDASHLTAIVTGATNGIGKETARVLALRGAEVIIPARTLESGLKVKESLAEQVPGSKLHVMEMDLSSLSSVRNFAQSFNSSHKHLNILINNAGIMACPYQLSEDGIELQFATNHLGHFLLTNLLLDKMKSTASQTGVQGRIINVASVAHKRSDGTCFELDKLNDKARYKPFIAYSHSKLANILHANELSRRFQEEGCNLTANSLHPGVIFTNIVRYIAGNSALLSVVSPVAKLVLKGVPQGAATTCYLALHPDLKDVSGKYFADCNEATPTPVARDAELAKKLWLFSEELLGADAVEEYHDS

SEQ ID NO: 75986 - protein, 79 aa, Setaria italica
  Transcript Sequence Number=SeqID_10012
SEHIHAICIPIFTNICIYVCMYVSHLMFSYREGKKNEYKKKLVHQNQKRANAKQRTKKVWLNNYTLPIFLCCIQINYRP

SEQ ID NO: 75987 - protein, 135 aa, Setaria italica
  misc_feature (41)..(41): Xaa can be any naturally occurring amino acid
  Transcript Sequence Number=SeqID_10013
  Gene Ontology: Biological process=vesicle-mediated transport
  Homolog annotation: Hit_ID=B9SYF6; Match level="QueryCoverage=100%, HitCoverage=100%, E-value=6e-24, Identity=40%"; Hit description =Vesicle transport protein GOT1B, putative
  Pfam annotation: Domain name=Got1; Domain location=29-127; Score =89.5; E_value=1.2e-23; Accession=PF04178.4; Description=Got1-like family
MAYEISEIKKIGIGLVGFGILFSFLGVILFFDRGLLALGNXFFLTGVGLLLGWQSMWQLFTKKANLKGSVPFFIGLFLLFVRWPVAGIIMELYGSFVLFSGYGPPIQAFLYQIPIIGWILQYPFQLFAQLRRKRA

SEQ ID NO: 75988 - protein, 79 aa, Setaria italica
  Transcript Sequence Number=SeqID_10014
FASEHMLMLPASCLRTCPILRGQAGGRVNCLVEAWSKHRVMALIKIQAATSNAGTRFWWPGEGSSCLVHKNREIAVIRA

SEQ ID NO: 75989 - protein, 85 aa, Setaria italica
  Transcript Sequence Number=SeqID_10015
SRPDADADSDGREKSSRRRRLPLPSPPLIDVDRSRLSAGDADRGPGGAVCVQSREEVCSSLQLAATISRAFHHWSNKLLVLYLRI

SEQ ID NO: 75990 - protein, 452 aa, Setaria italica
  Transcript Sequence Number=SeqID_10016
  Gene Ontology: Mol. function=protein serine/threonine kinase activity; Cellular component=plasma membrane; Biological process =protein amino acid phosphorylation
  Homolog annotation: Hit_ID=C4P7S1; Match level="QueryCoverage=96%, HitCoverage=97%, E-value=0.0, Identity=93%"; Hit description=CBL -interacting protein kinase 09
  Pfam annotation: Domain name=NAF; Domain location=316-378; Score =91.9; E_value=2.2e-24; Accession=PF03822.6; Description=NAF domain
  Pfam annotation: Domain name=Pkinase; Domain location=23-278; Score =333.2; E_value=5.1e-97; Accession=PF00069.17; Description=Protein kinase domain
  Pfam annotation: Domain name=Pkinase_Tyr; Domain location=23-276; Score=35.6; E_value=4.3e-16; Accession=PF07714.9; Description =Protein tyrosine kinase
  Pfam module annotation: Pfam domain module=NAF::Pkinase::Pkinase_Tyr; Domain location=316-378::23-278::23-276
MAESAAPKATAAAAGRKTRVGPYELGKTIGEGSFAKVKLARDSRTGAVCAIKVLDRNHVLRHKMVEQIKREISTMKLIKHPNVVQLHEVMASKTKIYMVLEFVDGGELFDKIVNSGRLSEDEARRYFHQLINAVDYCHSRGVYHRDLKPENLLLDSHGSLKVSDFGLSAFAPQTKEDGLLHTTCGTPNYVAPEVLADKGYNGMAADVWSCGIILFVLMAGYLPFDDSNLMRLYKLICQANISCPTWFSSGAKKFIKRIIDPNPDTRITIAEILEDEWFKKDYKPPRFEQGEDVNLDDVDAVFNDSEEHLVAEKREKPESMNAFALISRSQGFNLGNLFEKEMMGMAKRETSFTSQCTAQEIMSKIEEACGPLGFNVRKQNYKMKLKGDKTGRKGHLSVATEVFEVAPSLHMVELRKTGGDTLEFHNFYKNFSTELKDIVWKAESDTSKKQTK

SEQ ID NO: 75991 - protein, 54 aa, Setaria italica
  Transcript Sequence Number=SeqID_10017
PCNYNYPNVNSQPTLTNSQRSMVNFNTCNHYLQMIAIYIALRHPCTFESPNKES

SEQ ID NO: 75992 - protein, 53 aa, Setaria italica
  misc_feature (49)..(49): Xaa can be any naturally occurring amino acid
  Transcript Sequence Number=SeqID_10018
  Homolog annotation: Hit_ID=B6U174; Match level="QueryCoverage=98%, HitCoverage=6%, E-value=3e-10, Identity=71%"; Hit description=ATPase, coupled to transmembrane movement of substances
MSRFVDKLPFFDRRSSPMEEAEDIPRNGLLHMHHQPHQHHHSGLLMQPXPSPR

SEQ ID NO: 75993 - protein, 94 aa, Setaria italica
  Transcript Sequence Number=SeqID_10019
  Gene Ontology: Mol. function=transferase activity
  Homolog annotation: Hit_ID=Q2QV89; Match level="QueryCoverage=100%, HitCoverage=16%, E-value=8e-27, Identity=64%"; Hit description=HGA6, putative, expressed
PLCDTSDSRADVCDLTGDVRMDASASAFVVVVGSAGGADGQTYKVRPYPRKGDATSMGRVTEITVRTAAGAGAAPRCTASHAEPAVVFSIGGYT

SEQ ID NO: 75994 - protein, 144 aa, Setaria italica
  misc_feature (133)..(133): Xaa can be any naturally occurring amino acid
  misc_feature (139)..(139): Xaa can be any naturally occurring amino acid
  Transcript Sequence Number=SeqID_10020
  Gene Ontology: Mol. function=protein serine/threonine kinase activity; Biological process=protein amino acid phosphorylation
  Homolog annotation: Hit_ID=B9V0L1; Match level="QueryCoverage=75%, HitCoverage=13%, E-value=1e-45, Identity=83%"; Hit description=S -domain receptor-like protein kinase
DDSPNLRSNSSCYFIRVIIPASIIGSGLLILTLLFMIWRKKFKWCGAPLYDSQGGGGIIAFRYTDLVHATKNFSEKLGAGGFGCVFKGALSDSTAIAVKRLDGASQGEKQFRAEVSSIGLIQHINLVKLIGFXCEGDKXLLVYE

SEQ ID NO: 75995 - protein, 282 aa, Setaria italica
  misc_feature (188)..(188): Xaa can be any naturally occurring amino acid
  misc_feature (240)..(240): Xaa can be any naturally occurring amino acid
  misc_feature (266)..(266): Xaa can be any naturally occurring amino acid
  misc_feature (270)..(270): Xaa can be any naturally occurring amino acid
  misc_feature (276)..(276): Xaa can be any naturally occurring amino acid
  misc_feature (281)..(281): Xaa can be any naturally occurring amino acid
  Transcript Sequence Number=SeqID_10021
  Gene Ontology: Mol. function=proteasome activator activity; Cellular component=proteasome complex; Biological process=RNA elongation from RNA polymerase II promoter
  Homolog annotation: Hit_ID=B9SJW7; Match level="QueryCoverage=99%, HitCoverage=29%, E-value=2e-85, Identity=56%"; Hit description =Nucleotide binding protein, putative
  Pfam annotation: Domain name=WD40; Domain location=143-181; Score =24.8; E_value=0.00035; Accession=PF00400.24; Description=WD domain, G-beta repeat
  Pfam annotation: Domain name=WD40; Domain location=227-264; Score =15.9; E_value=0.17; Accession=PF00400.24; Description=WD domain, G -beta repeat
  Pfam annotation: Domain name=WD40; Domain location=96-134; Score=2.6; E_value=20; Accession=PF00400.24; Description=WD domain, G-beta repeat
  Pfam module annotation: Pfam domain module=WD40::WD40::WD40; Domain location=143-181::227-264::96-134
KVSRVFEAPLSFLKTLQQATLLKPDVSDDFDNVQVVGANMSALGLSQKPIYTHGVKESLSSNSTDGPDSMETIPDAVPTVFTEPPVEDQLAWNTLWPESHKLYGHGNELFSICCDYEGKLVASSCKAQSAPVAEIWLWEIGTWKAVGRLQSHNLTVTQMEFSRDNVFLLSVSRDRHLSIFSIRKTSKXNLQSCSSLKLLLYICLFSHTVFLCDYDSANVILEEGVEHHLVAKHEAHKRIXWAAHGTPWYEFATGSRDKTVKIWCVXDASXVKLLAXLPQFXD

SEQ ID NO: 75996 - protein, 748 aa, Setaria italica
  misc_feature (344)..(344): Xaa can be any naturally occurring amino acid
  misc_feature (451)..(451): Xaa can be any naturally occurring amino acid
  Transcript Sequence Number=SeqID_10022
  Gene Ontology: Mol. function=proteasome activator activity; Cellular component=proteasome complex; Biological process=RNA elongation from RNA polymerase II promoter
  Homolog annotation: Hit_ID=B9SJW7; Match level="QueryCoverage=100%, HitCoverage=87%, E-value=0.0, Identity=63%"; Hit description =Nucleotide binding protein, putative
  Pfam annotation: Domain name=WD40; Domain location=119-165; Score =34.7; E_value=3.7e-07; Accession=PF00400.24; Description=WD domain, G-beta repeat
  Pfam annotation: Domain name=WD40; Domain location=14-56; Score=7.8; E_value=4.8; Accession=PF00400.24; Description=WD domain, G-beta repeat
  Pfam annotation: Domain name=WD40; Domain location=204-252; Score =24.1; E_value=0.00058; Accession=PF00400.24; Description=WD domain, G-beta repeat
  Pfam annotation: Domain name=WD40; Domain location=310-349; Score =15.5; E_value=0.22; Accession=PF00400.24; Description=WD domain, G -beta repeat
  Pfam annotation: Domain name=WD40; Domain location=363-403; Score =17.0; E_value=0.079; Accession=PF00400.24; Description=WD domain, G -beta repeat
  Pfam annotation: Domain name=WD40; Domain location=499-537; Score =2.6; E_value=20; Accession=PF00400.24; Description=WD domain, G-beta repeat
  Pfam annotation: Domain name=WD40; Domain location=546-584; Score =24.8; E_value=0.00035; Accession=PF00400.24; Description=WD domain, G-beta repeat
  Pfam annotation: Domain name=WD40; Domain location=594-632; Score =41.1; E_value=4.2e-09; Accession=PF00400.24; Description=WD domain, G-beta repeat
  Pfam annotation: Domain name=WD40; Domain location=639-682; Score =9.4; E_value=3.1; Accession=PF00400.24; Description=WD domain, G -beta repeat
  Pfam annotation: Domain name=WD40; Domain location=69-112; Score=3.7; E_value=14; Accession=PF00400.24; Description=WD domain, G-beta repeat
  Pfam module annotation: Pfam domain module=WD40::WD40::WD40::WD40::WD4 0::WD40::WD40::WD40::WD40::WD40; Domain location=119-165::14-56::204 -252::310-349::363-403::499-537::546-584::594-632::639-682::69-112
AIMAWKIGSGKGDWSHVLQLPGMHKKGITCLAGRMVSDTVAIFASTSSDSIVVIWEMVIEPTPGGSCKVSCLHTLSIGSKPMVSLSLAVLPEQGSHLILAMGGLDHKIHIYCGDKSGKFIKACELKGHSDWIRSLDFSLPVMMSSGKHNLFLVSSSQDRTIRIWKMDSEAVSSGSTAQLRKANIEMTSYIEGPLFVAGNTSYQVSLESLLVGHEDWVYSVEWQPPTLLPGDEAHQAMSILSASMDKMMMIWRPEKNTGLWINSVTVGELSHSALGFYGGHWQPDGKSILAHGYGGSFHMWRDVGLDSENWQPQIVPSGHFAPVSDLTWARSGQYLLSVSHDQTXLRIFAPWRNQVKPGDMIYWREIARPQIHGHDINCVAFIQGSGNHRFVSGADEKVSRVFEAPLSFLKTLQQATLLKPDVSDDFDNVQVVGANMSALGLSQKPIYTHGXISHTSRVKESLSSNSTDGPDSMETIPDAVPTVFTEPPVEDQLAWNTLWPESHKLYGHGNELFSICCDYEGKLVASSCKAQSAPVAEIWLWEIGTWKAVGRLQSHNLTVTQMEFSRDNVFLLSVSRDRHLSIFSIRKTKEGVEHHLVAKHEAHKRIVWACSWNPFGYEFATGSRDKTVKIWCVQDASSVKLLATLPQFRDSVTALAWMGRDRASNAGILAVGMDNGLIELWGVSGGRVSADSTPDSSPLSAACMLRFDPLLCHVSTVHRLRWREPNSSDEKSALELASCGADHCVRVF

SEQ ID NO: 75997 - protein, 145 aa, Setaria italica
  misc_feature (133)..(133): Xaa can be any naturally occurring amino acid
  Transcript Sequence Number=SeqID_10023
  Gene Ontology: Mol. function=oxidoreductase activity, acting on CH-OH group of donors
  Homolog annotation: Hit_ID=Q8W5N7; Match level="QueryCoverage=100%, HitCoverage=20%, E-value=3e-31, Identity=49%"; Hit description =Putative alcohol oxidase
GYSVPDVDRPQEDLSEAAPSPSPRPLDSGVVETRSLDDAALLRSLMDKGLAVKADVSGPHHTVQCDVVIVGSGCGGGVAAAVLAAAGHKVVVVEKGDYFTAEDYSSIEGPSMERLYEKGGIFCTSNASTIMFXGATVGGGSAINW

SEQ ID NO: 75998 - protein, 120 aa, Setaria italica
  Transcript Sequence Number=SeqID_10024
  Homolog annotation: Hit_ID=B6TDA2; Match level="QueryCoverage=97%, HitCoverage=21%, E-value=5e-36, Identity=65%"; Hit description =Protein binding protein
VGLCIGNGQRAAAAASSRRKEGNGCKIECCCNWVFVARGADVEVWSQVELAPEAGGKKVMKRNWVGSGPSMEVGAGEEAIKEKAKIVSWAFGGSRMVLTRADQRSVEVWDSAPAAICANT

SEQ ID NO: 75999 - protein, 47 aa, Setaria italica
  Transcript Sequence Number=SeqID_10025
  Gene Ontology: Mol. function=hydrolase activity; Biological process =metabolic process
  Homolog annotation: Hit_ID=B6THA2; Match level="QueryCoverage=100%, HitCoverage=19%, E-value=6e-17, Identity=85%"; Hit description =Haloacid dehalogenase-like hydrolase domain-containing protein 1A
SSENAGMSAVMVPDPRLDVSYHKGADQVLSSLLDFKPSEWGLPPFNE

SEQ ID NO: 76000 - protein, 106 aa, Setaria italica
  Transcript Sequence Number=SeqID_10026
  Gene Ontology: Mol. function=hydrolase activity; Biological process =metabolic process
  Homolog annotation: Hit_ID=B6THA2; Match level="QueryCoverage=62%, HitCoverage=27%, E-value=4e-27, Identity=87%"; Hit description =Haloacid dehalogenase-like hydrolase domain-containing protein 1A
ADEASAAAQPRAAITHVIFDMDGLLLDTEGFYTEVQEKILARYGKVFDWSLKAKMMGKKAAESARSFVQDGKSAWSMLSRSSRNCSGVSSPSRPHSSTKIVGPVLG

SEQ ID NO: 76001 - protein, 55 aa, Setaria italica
  misc_feature (11)..(11): Xaa can be any naturally occurring amino acid
  Transcript Sequence Number=SeqID_10027
  Gene Ontology: Mol. function=hydrolase activity; Biological process =metabolic process
  Homolog annotation: Hit_ID=B6THA2; Match level="QueryCoverage=100%, HitCoverage=22%, E-value=9e-22, Identity=90%"; Hit description =Haloacid dehalogenase-like hydrolase domain-containing protein 1A
EDAPSGVAAAXNAGMSAVMVPDPRLDVSYHKGADQVLSSLLDFKPSEWGLPPFNE

SEQ ID NO: 76002 - protein, 242 aa, Setaria italica
  Transcript Sequence Number=SeqID_10028
  Gene Ontology: Mol. function=hydrolase activity; Cellular component =cellular_component; Biological process=metabolic process
  Homolog annotation: Hit_ID=B6THA2; Match level="QueryCoverage=94%, HitCoverage=95%, E-value=1e-127, Identity=94%"; Hit description =Haloacid dehalogenase-like hydrolase domain-containing protein 1A
  Pfam annotation: Domain name=Hydrolase; Domain location=19-210; Score= 101.4; E_value=3.1e-27; Accession=PF00702.18; Description=haloacid dehalogenase-like hydrolase
MASAGADEASAAAQPRAAITHVIFDMDGLLLDTEGFYTEVQEKILARYGKVFDWSLKAKMMGKKAAESARIFVDECGLDGLLTPEQFLEERESMLQALFPSCTKLPGVLRLIHHLHANGIPMAVATGSHKRHFALKTQNHQEMFSLMHHVVMGDDPEVKAGKPSPDIFLTAMRRFEGNVEPSKCLVFEDAPSGVAAAKNAGMSAVMVPDPRLDVSYHKGADQVLSSLLDFKPSEWGLPPFNE

SEQ ID NO: 76003 - protein, 76 aa, Setaria italica
  Transcript Sequence Number=SeqID_10029
LQLHILSLSGLNLHVNMHQQINLSPVHISQAHHDSQARDRWRLSSLALPLCGEARNLSINNANLILSEQVNLIIIY

SEQ ID NO: 76004 - protein, 182 aa, Setaria italica
  misc_feature (141)..(141): Xaa can be any naturally occurring amino acid
  Transcript Sequence Number=SeqID_10030
  Gene Ontology: Mol. function=hydrolase activity, acting on ester bonds; Biological process=DNA catabolic process
  Homolog annotation: Hit_ID=Q25A98; Match level="QueryCoverage=82%, HitCoverage=37%, E-value=6e-50, Identity=65%"; Hit description =H0410G08.16 protein
  Pfam annotation: Domain name=S1-P1_nuclease; Domain location=34-173; Score=-26.8; E_value=2.8e-10; Accession=PF02265.8; Description=S1P1 Nuclease
MASGGKGLLAGSFLRAAALGLVVLASAAPVARSWSKEGHMMTCQIAQGLLEPDAAHAVRNLLPEDVGGDLSALCVWPDQVRHWYKYRWTGPLHFIDTPDKACTFDYSSKFFQFPSSSHAVEGPSCRVSLVMKCNAMVMDRXAGDCHGPDGAKDMCVAGAIANFTSQLLHYKHGSADRKYNLT

SEQ ID NO: 76005 - protein, 84 aa, Setaria italica
  Transcript Sequence Number=SeqID_10031
  Subcellular localization annotation: CTP_CleavageSite=52; ConfidenceScore=5.24e-01
GTQLGSDGIQQVLHSFPCSHVLAVAALILATSVRAQTPAPTPAPTPAPAPVPAPTPTPTPAPTPTPTPAPTPAPTPAPTPAPTP

SEQ ID NO: 76006 - protein, 232 aa, Setaria italica
  Transcript Sequence Number=SeqID_10032
  Gene Ontology: Mol. function=protein dimerization activity
  Homolog annotation: Hit_ID=Q2R3V9; Match level="QueryCoverage=93%, HitCoverage=27%, E-value=2e-37, Identity=39%"; Hit description=HAT family dimerisation domain containing protein
  Pfam annotation: Domain name=DUF659; Domain location=71-223; Score =213.9; E_value=4.3e-61; Accession=PF04937.7; Description=Protein of unknown function (DUF 659)
TRAIDPKATKSESLQQQKLNKEVWKERTHEVHKYIARWVYTHAIPFNACDNDEFKQMCEAIGQFGPGLQPPPLRDLRESLLGEEYARTKSLLGEREAEKVKNGCSVMTDAWLDRKRRSIMNLCTKCADGSSFVSSKEMSDVSHTSEVIFELVDKAIEDIGLDDVVQVVTDNASNNMGAKKLLLEKRPNIFWSSCATHTINLMLQGIGNMPRFKKVIDQAKAFTIFVYGHTRT

SEQ ID NO: 76007 - protein, 114 aa, Setaria italica
  Transcript Sequence Number=SeqID_10033
  Gene Ontology: Mol. function=ARF GTPase activator activity; Cellular component=plasma membrane; Biological process=regulation of ARF GTPase activity
  Homolog annotation: Hit_ID=Q49U73; Match level="QueryCoverage=92%, HitCoverage=32%, E-value=4e-40, Identity=84%"; Hit description=Zinc finger protein F35
YEVFLPEGYQKPHPDSSQEEREKFIRSKYELQEFLKPSLRIVSHHTSDDCGKHAGSASHSDGSKSEIGMIEFIGILNVKVIGGTNLAIRDMSSSDPYVVLTLGHQVILVRLSYF

SEQ ID NO: 76008 - protein, 324 aa, Setaria italica
  Transcript Sequence Number=SeqID_10034
  Gene Ontology: Mol. function=ARF GTPase activator activity; Cellular component=plasma membrane; Biological process=regulation of ARF GTPase activity
  Homolog annotation: Hit_ID=Q49U73; Match level="QueryCoverage=98%, HitCoverage=99%, E-value=1e-144, Identity=80%"; Hit description=Zinc finger protein F35
  Pfam annotation: Domain name=ArfGap; Domain location=15-136; Score =173.2; E_value=7.3e-49; Accession=PF01412.10; Description=Putative GTPase activating protein for Arf
  Pfam annotation: Domain name=C2; Domain location=170-249; Score =110.1; E_value=7.3e-30; Accession=PF00168.22; Description=C2 domain
  Pfam module annotation: Pfam domain module=ArfGap::C2; Domain location=15-136::170-249
MSAGHGDTGASAMMAKLKELLHRSENRICADCSVPDPKWASANIGVFICVKCSGVHRSLGTHISKVLSVTLDKWTDNEVESMIEVGGNSNANAIYEVFLPEGYQKPHPDSSQEEREKFIRSKYELQEFLKPSLRIVSHHTSDDCGKHAGSASHSDGSKSEIGMIEFIGILNVKVIGGTNLAIRDMSSSDPYVVLTLGHQKVQSSVIKGNLNPVWNEELKLSVPREYGPLKLQVFDHDMMSKDDLMGEAEIDLQTMINAAAAFGNPELLGDMQIGRWLKSEDNALVRDSAVVVAGGKVKQGVSLKLQHTESGELELEMEWMPLNM

SEQ ID NO: 76009 - protein, 89 aa, Setaria italica
  Transcript Sequence Number=SeqID_10035
MAKGGGAREGGALKTAVIVAGGIALAWVTVETAFKPFLDRLRGAVSRNTDPAGDPDQEEAPAAAAEAKEEEKAPAPAATATPMGTGGAE

SEQ ID NO: 76010 - protein, 196 aa, Setaria italica
  misc_feature (39)..(39): Xaa can be any naturally occurring amino acid
  Transcript Sequence Number=SeqID_10036
  Gene Ontology: Mol. function=protein serine/threonine kinase activity; Biological process=protein amino acid phosphorylation
  Homolog annotation: Hit_ID=B6TWH0; Match level="QueryCoverage=98%, HitCoverage=48%, E-value=6e-70, Identity=67%"; Hit description=ATP binding protein
  Pfam annotation: Domain name=Pkinase; Domain location=1-196; Score =53.2; E_value=9.9e-13; Accession=PF00069.17; Description=Protein kinase domain
  Pfam annotation: Domain name=Pkinase_Tyr; Domain location=2-196; Score=-4.3; E_value=1.9e-13; Accession=PF07714.9; Description =Protein tyrosine kinase
  Pfam module annotation: Pfam domain module=Pkinase::Pkinase_Tyr; Domain location=1-196::2-196
GFGTVYKGVWGDGTTFAAKVLSSESEQGIKEFLAEIEKXNLPKVKHANLVRLLGCCIQRKNRILIYEYLENNSLDHALQALGSANGVTCLSWTTRSAICVGTAKGLSYLHEEHEPNIVHRDIKASNVLLDRDYRPKIGDFGLAKLFPDNVTHISTGVVGTCGYLAPEYFVHGQLTKKADVYSFGVLILEIISGRRI

SEQ ID NO: 76011 - protein, 106 aa, Setaria italica
  Transcript Sequence Number=SeqID_10037
HLQTNSWYTLCQFTSQMIISKKYFQATKVDLVKIFWQLALVQMITHKRRKRESCTFTDIYSLILFYLYIHIGGGTNVAQMLKQHCHNRSLLTGSMLVLLFNTFIHG

SEQ ID NO: 76012 - protein, 90 aa, Setaria italica
  Transcript Sequence Number=SeqID_10038
MVMDEPLDFEKEEDPLLPSPRPAKRKKVIGLDDLLLDYFENGKDLRKVRAAKSKHGPRGGYVSDEEDKEVREDEICKIFEDCEEKAKGLD

SEQ ID NO: 76013 - protein, 150 aa, Setaria italica
  Transcript Sequence Number=SeqID_10039
  Gene Ontology: Mol. function=RNA-3'-phosphate cyclase activity; Cellular component=phagocytic vesicle; Biological process=ribosome biogenesis
  Homolog annotation: Hit_ID=B9T7D2; Match level="QueryCoverage=99%, HitCoverage=39%, E-value=4e-49, Identity=64%"; Hit description=RNA 3' terminal phosphate cyclase, putative
  Pfam annotation: Domain name=RTC_insert; Domain location=51-144; Score=87.0; E_value=6.8e-23; Accession=PF05189.5; Description=RNA 3'- terminal phosphate cyclase (RTC), insert domain
MTTLHMLKHFGVPLEGLELRIDSRGSPPLGGGEVFLRVPNINGTLTAANWVDEGMVKRIRGVSFSTRVSPQIENRIIYAARGIFNRFIPDVHIFTDHRSGSAGGRSPGYGVSLVAETTTGCLLSVDATVSYPSVNEMNEESEKPELMSPE

SEQ ID NO: 76014 - protein, 226 aa, Setaria italica
  Transcript Sequence Number=SeqID_10040
  Gene Ontology: Mol. function=transcription factor activity; Cellular component=nucleus
  Homolog annotation: Hit_ID=B6T4R5; Match level="QueryCoverage=95%, HitCoverage=90%, E-value=1e-42, Identity=51%"; Hit description=DNA binding protein
  Pfam annotation: Domain name=AP2; Domain location=64-115; Score=66.8; E_value=8e-17; Accession=PF00847.12; Description=AP2 domain
MTASEPPPPPRARVVRILVHDADATDSSSSEDEAPPPPRRARVGSSSVGARRRVMEAAGANPPVRFRGVRRRAWGRWAAEIRDPHGSRRIWLGTFNSAEEAAAAYDVANIRFRGASAHTNFPPARYLLPLEPAKPIISLTPGPGKVITLPPVPVKSTVPLQVKVKEEGGSCDGQGEEGSSEVKAFAPRPMWEMIPGKRKKRPGCGSGTRLRAIHAASVCVEEVGGA

SEQ ID NO: 76015 - protein, 167 aa, Setaria italica
  Transcript Sequence Number=SeqID_10041
  Gene Ontology: Mol. function=exonuclease activity; Cellular component= intracellular
  Homolog annotation: Hit_ID=B4FYY5; Match level="QueryCoverage=97%, HitCoverage=32%, E-value=5e-81, Identity=88%"; Hit description =Exonuclease
  Pfam annotation: Domain name=Exonuc_X-T; Domain location=5-159; Score= 72.0; E_value=2.1e-18; Accession=PF00929.16; Description=Exonuclease
PRSPAGAGQGYALLEFGAILVCPRRLVEVASYATLIRPADPASAVSAASVRCNGITRDAVSGAPPFRDVADAVYDLLNGRVWAGHNIVRFDSARIREAFAEVGRPPPEPKGLIDTLPLLTQRFGRRAGDMKMASLANYFGLGKQRHRSLDDVRMNLEVLKYCATVVV

SEQ ID NO: 76016 - protein, 61 aa, Setaria italica
  Transcript Sequence Number=SeqID_10042
SCAGAQAASGLVQWRPCGPTLRHGALGYGGGVWPWHDRCNRLFLVRAMVSALQLVDLCRWL

SEQ ID NO: 76017 - protein, 220 aa, Setaria italica
  Transcript Sequence Number=SeqID_10043
  Gene Ontology: Cellular component=integral to membrane
  Homolog annotation: Hit_ID=Q2HSS2; Match level="QueryCoverage=91%, HitCoverage=63%, E-value=1e-79, Identity=71%"; Hit description =F5O11.19, related
  Pfam annotation: Domain name=SNARE_assoc; Domain location=14-135; Score=114.0; E_value=5.1e-31; Accession=PF09335.3; Description=SNARE associated Golgi protein
VLVASLALFPVILVPSGPSMWLAGMIFGYGWGFLIIMVGTTIGMVVPYWIGSLFRERLHVWLTKWPQQIALIKLAGEGNWFQQFRVVALFRISPFPYTIFNYAVTVTEIKFNPYLCGSIAGMVPEAFIYIYSGRLIRTLADMKYGNYKMTPVEITYNVISFIIAIVLTVAFTVYAKRALNNIKSSEGICKEEVLSPAGSGARLKHHQERSGSCSVELDVV

SEQ ID NO: 76018 - protein, 204 aa, Setaria italica
  Transcript Sequence Number=SeqID_10044
  Gene Ontology: Mol. function=oxidoreductase activity; Cellular component=plasma membrane; Biological process=negative regulation of transcription
  Homolog annotation: Hit_ID=Q5EI63; Match level="QueryCoverage=99%, HitCoverage=100%, E-value=9e-94, Identity=83%"; Hit description =Quinone reductase 2
  Pfam annotation: Domain name=FMN_red; Domain location=3-174; Score= -31.9; E_value=0.01; Accession=PF03358.7; Description=NADPH-dependent FMN reductase
  Pfam annotation: Domain name=Flavodoxin_1; Domain location=7-138; Score=87.6; E_value=4.5e-23; Accession=PF00258.17; Description =Flavodoxin
  Pfam module annotation: Pfam domain module=FMN_red::Flavodoxin_1; Domain location=3-174::7-138
MAVKVYVVFYSMYGHVSKLAEEIKKGAASVEGVEVKIWQVSETLSEEVLGKMGAPPKTDAPIITPQELAEADGILFGFPTRFGMMAAQMKAFFDATGGLWREQSLAGKPAGIFFSTGTQGGGQETTPLTAVTQLTHHGMVFVPVGYTFGAKMFGMESVQGGSPYGAGTFAGDGSRWPTEVELEHAFHQGKYFAGIAKRLKGGSA

SEQ ID NO: 76019 - protein, 324 aa, Setaria italica
  misc_feature (13)..(13): Xaa can be any naturally occurring amino acid
  misc_feature (24)..(24): Xaa can be any naturally occurring amino acid
  Transcript Sequence Number=SeqID_10045
  Gene Ontology: Mol. function=amino acid transmembrane transporter activity; Cellular component=integral to membrane; Biological process=amino acid transport
  Homolog annotation: Hit_ID=Q75G90; Match level="QueryCoverage=99%, HitCoverage=65%, E-value=1e-145, Identity=79%"; Hit description =Amino acid permease family protein, putative, expressed
LTYMNYRGLTIVXGWVAVFLGVFXLLPFFVMGLIAIPRIEPSRWLEMDLGSVNWGLYLNTLFWNLNYWDSISTLAGEVENPKRTLPRALSYALVLVVGGYLYPLITCTAAIPVVREHWSDGYFSDIARILGGVWLHSWIQGAAALSNMGNFLTEMSSDSYQLLGMAERGMLPEFFAKRSRYGTPLIGILFSAFGVILLSWMSFQEIVAAENYLYCFGMILEFIAFIKLRMTHPDTSRPYKIPLGTIGAVLMIIPPALLIVVVMALASFKVMAVSIMAMIIGFVLQPCLVYVEKRRWLRFSISADLPDLPDSHEATSDDAVPLVF

SEQ ID NO: 76020 - protein, 118 aa, Setaria italica
  misc_feature (12)..(12): Xaa can be any naturally occurring amino acid
  misc_feature (35)..(35): Xaa can be any naturally occurring amino acid
  misc_feature (72)..(72): Xaa can be any naturally occurring amino acid
  Transcript Sequence Number=SeqID_10046
  Gene Ontology: Mol. function=aspartic-type endopeptidase activity; Cellular component=chromatin; Biological process=DNA integration
  Homolog annotation: Hit_ID=O24438; Match level="QueryCoverage=83%, HitCoverage=6%, E-value=1e-27, Identity=54%"; Hit description =Retrofit
QRGHLAPSCWHXFDENYEPNECLVAAAMGSYNVDXKWYVDIGATDHVTSDLEKLAIWDKYKGGEQIHTTCGXGMGISHVGHSVIPAHTQNFYLKNILHVLVGRARRDQELEGKRRHTI

SEQ ID NO: 76021 - protein, 83 aa, Setaria italica
  Transcript Sequence Number=SeqID_10047
PYLRRLELCGLREQRKKHREEDEQEMVRPRHWRWEDFSIKKHCSHCSTLFFIKQHEPAECKSLSTKLGLSLPDLGSVSPDQEQ

SEQ ID NO: 76022 - protein, 47 aa, Setaria italica
  Transcript Sequence Number=SeqID_10048
FIRYFFFILLFLNIHSQCHGTFYFLTGTTPEIFPARKTIVERTEGNR

SEQ ID NO: 76023 - protein, 151 aa, Setaria italica
  Transcript Sequence Number=SeqID_10049
  Subcellular localization annotation: CTP_CleavageSite=59; ConfidenceScore=5.47e-01
SRRRCRRPGGPRKKSRPPIQPVGHRRRRRSPPGRRDRTSPPRQDRPPPTAIPATTTKKRCSPGSPLPAWIFFSFFLSNCAARTRTKTKNPIPPARGSNQIPPNPRRGGRTSQPINQPEKQLGGQEQGESGAGRNRSTKKPAPSATFLRPKS

SEQ ID NO: 76024 - protein, 79 aa, Setaria italica
  Transcript Sequence Number=SeqID_10050
ACSTIADEASRSTSNSSKSVTDAKADTVKKKSSRGSKKEVDGDMKEKKVHTKKKRIFARTRNAATKTTESNSVKQEDKK

SEQ ID NO: 76025 - protein, 389 aa, Setaria italica
  Transcript Sequence Number=SeqID_10051
  Gene Ontology: Cellular component=chloroplast
  Homolog annotation: Hit_ID=Q9S7A6; Match level="QueryCoverage=81%, HitCoverage=79%, E-value=5e-34, Identity=31%"; Hit description =F21O3.2 protein
  Pfam annotation: Domain name=DUF760; Domain location=1-389; Score =807.6; E_value=8.1e-240; Accession=PF05542.3; Description=Protein of unknown function (DUF760)
  Subcellular localization annotation: CTP_CleavageSite=56; ConfidenceScore=5.41e-01
PSPATASSSSSSCGVIRPRAAAVEAGRLFCKGFPCSMRSKAGFQINGYRTRTFKIKAKAESGDGYTRLAPLRFESPSGQLLVQILQSHPHLLPATVDQQLENLQSEKDAQKEEASKVPQDLLYKRIAEVKEKERQNTLEEIIYCWIIYKFMDNDISMTPALAPGGGPVRDISSLPNQEDKLQSIHSPDAFEMIQNHLNLIMGEKIAAPLDTVVEISNLNLGKLYAASIMYGYFLKRVDERFQLEKTMKTLPPNPKQQIVFENLKPNPFWDMESLVQITPDGEEISLDDEESNPNKLRSYVSQLDADTLQRYATIRSKEAVSLIEKQTQSLFGRPDIKVLDDGSVNARDGQMITITFIELNHLVLEAVAFGSFLWEAESYVESKYHFVNS

SEQ ID NO: 76026 - protein, 153 aa, Setaria italica
  misc_feature (1)..(15): Xaa can be any naturally occurring amino acid
  Transcript Sequence Number=SeqID_10052
XXXXXXXXXXXXXXXFFWLMERDAESVVKEESKNSSDNWGTKCGRDNNRSPRPRVRQLLLAAAARPESSGARPPAGPIPHNRLLPSILIRWHRLRAPFLFFLSSFPELPVASLADLSLWSARVYISYTGAPVTCAAAAGTARRAPAAPRPAAR

SEQ ID NO: 76027 - protein, 87 aa, Setaria italica
  Transcript Sequence Number=SeqID_10053
  Subcellular localization annotation: CTP_CleavageSite=60; ConfidenceScore=5.54e-01
RFTGARDGIMAAAAASSLSVLPLAPRRPLPLRRAARNAEGGGASRPLRLARLRLRRGRPAAAAVAGDAELPLEEAEAAMRVAADDDS

SEQ ID NO: 76028 - protein, 383 aa, Setaria italica
  misc_feature (119)..(119): Xaa can be any naturally occurring amino acid
  misc_feature (298)..(298): Xaa can be any naturally occurring amino acid
  misc_feature (344)..(344): Xaa can be any naturally occurring amino acid
  Transcript Sequence Number=SeqID_10054
  Homolog annotation: Hit_ID=Q108Z7; Match level="QueryCoverage=93%, HitCoverage=15%, E-value=1e-101, Identity=58%"; Hit description =Transcriptional regulator, putative, expressed
GFNYVKLLVSEVSSGTISSLTHVELQPEINITSRAISLPNVLNQYAAPVRVPPTSTVEDENVALMMLEQSSLAQVSPAQTQSPSPSLFSVNQLMAVIPRDEIRFKINPKLGSLGPQLQXAIMDLALDKANREIIQPVIQRSVTIASRTTKELIVKDYALESDNNTITRSAHLMVGTLAGRLAHVTCKEPLRVALYSHLRNLIQNLMSGSETIEQLIHMLVNDNLDLGCAIIESVATRQAVEVIDGEIAQSFSQQKKQREATGPAYYDTYAQGLFDRIPEALRPKPGHLSATQQRVYEXFVHVWHGHGQNVGATSSGPSGAATVSSTLGVPRAYSPNSMSTTSSXFSTVQMGSLTSLTQPTELVSEESVPGIAQFSSVAPAQVV

SEQ ID NO: 76029 - protein, 101 aa, Setaria italica
  Transcript Sequence Number=SeqID_10055
  Subcellular localization annotation: CTP_CleavageSite=30; ConfidenceScore=5.20e-01
DGLIDGGHARPCIFRQRAHSAIKARIRFCRAGPSVSQLTRPAGKRRQLGPAVENVLFVSSDFPARRNKDRAGSGGVSRPAGGHRSSWLSLALPTGRPAGDR

SEQ ID NO: 76030 - protein, 299 aa, Setaria italica
  Transcript Sequence Number=SeqID_10056
  Homolog annotation: Hit_ID=B6TU48; Match level="QueryCoverage=94%, HitCoverage=76%, E-value=1e-102, Identity=71%"; Hit description=F -box domain containing protein
ADGGDGADALGLAGAPRPRAVLSHLLKAMLNAVLKPFAHCDAKSGAHGGKHSQQQQHHSPAQVLKNFSSIRNLRMELPVSDVGTDDGVILKWKAVFGSTLQSCVILGGTKVERAAAGTHAPMAAAAAATDSDGAGDESGSIPESFYTNGGLKLRVVWTISSLIAAATRHYLLREIVKEHPTLEQVALTDAHGQGTLSMGRDQLKEFRDKPLAAAAAANRTQVPACNMKLRYAPLLELSDGTRIHGATLVVIKPVGESGGIGGGRKELDDFVADTFNGPFREAVGVLSKRRTYLLEMNGF

SEQ ID NO: 76031 - protein, 57 aa, Setaria italica
  Transcript Sequence Number=SeqID_10057
LGVLGAFSLQKSEIPKRESIGNLCKTGEPEPQSTRQWATGLPVSLMSYTQYTAFSEH

SEQ ID NO: 76032 - protein, 55 aa, Setaria italica
  Transcript Sequence Number=SeqID_10058
RKEIMMGERCQPLDFSGVIYYDAEGHRLAQPPPPRSPLRSPLPASVKLAANAGGY

SEQ ID NO: 76033 - protein, 293 aa, Setaria italica
  misc_feature (21)..(21): Xaa can be any naturally occurring amino acid
  Transcript Sequence Number=SeqID_10059
  Gene Ontology: Mol. function=hydrolase activity, hydrolyzing O -glycosyl compounds; Cellular component=extracellular region; Biological process=carbohydrate metabolic process
  Homolog annotation: Hit_ID=B4FYP4; Match level="QueryCoverage=97%, HitCoverage=65%, E-value=1e-126, Identity=80%"; Hit description =Glucan endo-1,3-beta-glucosidase 7
  Pfam annotation: Domain name=Glyco_hydro_17; Domain location=1-203; Score=60.9; E_value=4.7e-15; Accession=PF00332.10; Description =Glycosyl hydrolases family 17
ASEVVGNYEQISTVHSMAVLXSASDPPSSGAFHPDLAGSLDPVLDFLHQNGAPFMINPYPYFAYASDTRPETLAFCLFQPNAGRVDAASGLTYTNMFDAQLDAIRAALDAKGYTDVDIVIAETGWPYKGDADEAGATVDNARAYNGNLVAHLKSQAGTPRTPGKSVDTYIFALYDEDLKGGPESERSFGLYKTDLTANYDAGLAKSGSTAAPTILTPSPPQQGMLQPSRGATPTPTGFCQTTAAVPGSTQGQQVTQTSSCYIPAEAVSRRADAGTRQLVWFGVLLCLAMVAGK

SEQ ID NO: 76034 - protein, 192 aa, Setaria italica
  Transcript Sequence Number=SeqID_10060
  Gene Ontology: Mol. function=zinc ion binding; Cellular component =intracellular; Biological process=RNA processing
  Homolog annotation: Hit_ID=B6TR71; Match level="QueryCoverage=100%, HitCoverage=100%, E-value=2e-75, Identity=69%"; Hit description=XIAP associated factor-1
  Pfam annotation: Domain name=zf-TRAF; Domain location=30-81; Score =8.9; E_value=0.0069; Accession=PF02176.10; Description=TRAF-type zinc finger
MAAADSDPTVTASTCANCQREIPSSNIALHSVHCARNLQKCEHCGDMVPRKLMDEHYNENHAPMNCSLCKCTVERGLWDLHTGIQCPQRMLACQYCEFELPVIDLLEHQDECENRTEYCETCRKYIRLREWIGHELQFHTGSNSSDGASAAAEPKPARPAAHGSHRKQLLLTIAIAGFAVLIGSILYQRKGQ

SEQ ID NO: 76035 - protein, 169 aa, Setaria italica
  misc_feature (11)..(11): Xaa can be any naturally occurring amino acid
  misc_feature (38)..(38): Xaa can be any naturally occurring amino acid
  misc_feature (45)..(45): Xaa can be any naturally occurring amino acid
  Transcript Sequence Number=SeqID_10061
  Gene Ontology: Mol. function=hydrolase activity, hydrolyzing O -glycosyl compounds; Biological process=carbohydrate metabolic process
  Homolog annotation: Hit_ID=Q7Y073; Match level="QueryCoverage=94%, HitCoverage=32%, E-value=7e-62, Identity=69%"; Hit description=Latex cyanogenic beta glucosidase
  Pfam annotation: Domain name=Glyco_hydro_1; Domain location=1-162; Score=-236.8; E_value=9.4e-07; Accession=PF00232.10; Description =Glycosyl hydrolase family 1
AHHQNPEDIYXYQVQQVERIEKWNSGEKIGERAASEWXFIVPWGXLRKILNYIAKKYNNPTIYVTENGMDEEDDQSATLDQVLNDTTRVGYFKGCLASVAQAIKDGADVRGYFAWSFLDNFEWAMGYTKRFGIVYVDYKNGLSRHPKASALWFSRFLKGEAAENKADTN

SEQ ID NO: 76036 - protein, 219 aa, Setaria italica
  Transcript Sequence Number=SeqID_10062
  Gene Ontology: Mol. function=hydrolase activity, hydrolyzing O -glycosyl compounds; Biological process=carbohydrate metabolic process
  Homolog annotation: Hit_ID=A8TVR1; Match level="QueryCoverage=97%, HitCoverage=43%, E-value=6e-81, Identity=63%"; Hit description=Beta -glucosidase G4
  Pfam annotation: Domain name=Glyco_hydro_1; Domain location=5-219; Score=-1.7; E_value=1.5e-18; Accession=PF00232.10; Description =Glycosyl hydrolase family 1
MLLLSERVLDRSNGDVAVDHYHRYKEDIELMASLGFAAYRFSISWARIFPDGLGGKVNEQGVAFYNNLINFMIAKGIEPYATLYHWDLPNHLQKTLGGWLSDKIVDYFALYAEACFANFGDRVKRWITINEPLQTAFNGYGIGVFAPGGCEGETARCYLAAHHQILAHAAAVDVYRRKFKVAQGGEVGLVVDCEWAEPFSEKVEDQIAAQRRVDFQLGW

SEQ ID NO: 76037 - protein, 44 aa, Setaria italica
  Transcript Sequence Number=SeqID_10063
  Gene Ontology: Mol. function=hydrolase activity, hydrolyzing O -glycosyl compounds; Biological process=carbohydrate metabolic process
  Homolog annotation: Hit_ID=Q7Y073; Match level="QueryCoverage=81%, HitCoverage=7%, E-value=3e-10, Identity=75%"; Hit description=Latex cyanogenic beta glucosidase
MQAASEWLFIVPWGLRKILNYIAKKYNNPTIYVTENGKASILPK

SEQ ID NO: 76038 - protein, 482 aa, Setaria italica
  Transcript Sequence Number=SeqID_10064
  Gene Ontology: Mol. function=hydrolase activity, hydrolyzing O -glycosyl compounds; Cellular component=cytosolic ribosome; Biological process=carbohydrate metabolic process
  Homolog annotation: Hit_ID=Q7Y073; Match level="QueryCoverage=97%, HitCoverage=96%, E-value=0.0, Identity=66%"; Hit description=Latex cyanogenic beta glucosidase
  Pfam annotation: Domain name=Glyco_hydro_1; Domain location=11-475; Score=707.0; E_value=1.5e-209; Accession=PF00232.10; Description =Glycosyl hydrolase family 1
MGSTGGEAEVARADFPDGFVFGVATSAYQIEGARREGGKGDSIWDVFTEDKERVLDRSNGDVAVDHYHRYKEDIELMASLGFAAYRFSISWARIFPDGLGGKVNEQGVAFYNNLINFMIAKGIEPYATLYHWDLPNHLQKTLGGWLLTGMDYFALYAEACFANFGDRVKRWITINEPLQTAFNGYGIGVFAPGGCEGETARCYLAAHHQILAHAAAVDVYRRKFKVAQGGEVGLVVDCEWAEPFSEKVEDQIAAQRRVDFQLGWYLDPIYFGDYPESMRQRLGSDLPTFSEKDKEFIRNKIDFVGLNHYTSRFIAHHQNPEDIYFYQVQQVERIEKWNSGEKIGERAASEWLFIVPWGLRKILNYIAKKYNNPTIYVTENGMDEEDDQSATLDQVLNDTTRVGYFKGYLASVAQAIKDGADVRGYFAWSFLDNFEWAMGYTKRFGIVYVDYKNGLSRHPKASALWFSRFLKGEAAENKADTN

SEQ ID NO: 76039 - protein, 157 aa, Setaria italica
  misc_feature (145)..(145): Xaa can be any naturally occurring amino acid
  Transcript Sequence Number=SeqID_10065
  Gene Ontology: Mol. function=hydrolase activity, acting on ester bonds; Biological process=lipid metabolic process
  Homolog annotation: Hit_ID=Q672R1; Match level="QueryCoverage=98%, HitCoverage=40%, E-value=8e-43, Identity=54%"; Hit description =Lipase 1
FESLKPPSCAHNPRVQGFFGRSLFFLGELGFNDYSFSMNKGKNVQQLRSLVPHVIRTISMAIERLIKHGATSLLVSGMVPAGCDPPILTFFPSADPASYEPRTGCLKGMNELSTYHNSMLQESLDKIRSKHLDVEIGYADFFSPXMEMVKSPAKFWV

SEQ ID NO: 76040 - protein, 285 aa, Setaria italica
  Transcript Sequence Number=SeqID_10066
  Gene Ontology: Mol. function=hydrolase activity, acting on ester bonds; Biological process=lipid metabolic process
  Homolog annotation: Hit_ID=Q672R1; Match level="QueryCoverage=96%, HitCoverage=71%, E-value=2e-81, Identity=54%"; Hit description =Lipase 1
  Pfam annotation: Domain name=Lipase_GDSL; Domain location=5-273; Score=39.3; E_value=1.5e-08; Accession=PF00657.14; Description=GDSL -like LipaseAcylhydrolase
GPRPLVPPFLAHDGSFRRGANFAVGAATAIDAAFFHDGEPPGTDNKFPFNTSLGVQLQWFESLKPSLCATTQECKDFFGRSLFFLGELGFNDYSFSMNKGKNVQQLRSLVPHVIRTISMAIERLIKHGATSLLVSGMVPAGCDPPILTFFPSADPASYEPRTGCLKGMNELSTYHNSMLQESLDKIRSKHLDVEIGYADFFSPVMEMVKSPAKFGFEEDALTVCCGGPGRYHFSGVVVCGDPGSTTCKDPSARLFWDGAHLTEAANRYIADGWLRSISSPATATN

SEQ ID NO: 76041 - protein, 343 aa, Setaria italica
  misc_feature (20)..(20): Xaa can be any naturally occurring amino acid
  Transcript Sequence Number=SeqID_10067
  Gene Ontology: Mol. function=binding; Cellular component=chloroplast
  Homolog annotation: Hit_ID=B9RT56; Match level="QueryCoverage=100%, HitCoverage=87%, E-value=1e-153, Identity=35%"; Hit description =Pentatricopeptide repeat-containing protein, putative
  Pfam annotation: Domain name=PPR; Domain location=110-144; Score =19.1; E_value=0.019; Accession=PF01535.12; Description=PPR repeat
  Pfam annotation: Domain name=PPR; Domain location=145-179; Score =27.7; E_value=4.8e-05; Accession=PF01535.12; Description=PPR repeat
  Pfam annotation: Domain name=PPR; Domain location=180-214; Score =47.8; E_value=4.2e-11; Accession=PF01535.12; Description=PPR repeat
  Pfam annotation: Domain name=PPR; Domain location=215-249; Score =38.7; E_value=2.3e-08; Accession=PF01535.12; Description=PPR repeat
  Pfam annotation: Domain name=PPR; Domain location=250-284; Score =47.4; E_value=5.5e-11; Accession=PF01535.12; Description=PPR repeat
  Pfam annotation: Domain name=PPR; Domain location=285-319; Score =40.9; E_value=5e-09; Accession=PF01535.12; Description=PPR repeat
  Pfam annotation: Domain name=PPR; Domain location=40-74; Score=40.2; E_value=8.1e-09; Accession=PF01535.12; Description=PPR repeat
  Pfam annotation: Domain name=PPR; Domain location=5-39; Score=30.7; E_ value=6e-06; Accession=PF01535.12; Description=PPR repeat
  Pfam annotation: Domain name=PPR; Domain location=75-109; Score=37.3; E_value=6.3e-08; Accession=PF01535.12; Description=PPR repeat
  Pfam module annotation: Pfam domain module=PPR::PPR::PPR::PPR::PPR::PP R::PPR::PPR::PPR; Domain location=110-144::145-179::180-214::215 -249::250-284::285-319::40-74::5-39::75-109
FPNLLTVNIMVDRFCKAKKXEEAYKIFETASQRGCNPDSVTYCSLIDGLGKKGMVDDAYRLYENMLDAGHNANPVVYTSLIRNFFMHGRKEDGHKIFKEMNRRGCHPDLTLLNTYMDCIFKAGDIERGRAIFDDIKGYGFLPDVRSYSILIHGLTKAGHARETSNIFHAMKQQGFILDARAYNAVVDGFCKSGKVDKAYEVLEEMKVKRVPPTVATYGSIIDGLAKIDRLDEAYMLFEEAKSKGIELNVIVYSSLIDGFGKVGRIDEAYLILEEMMKKGLTPNVYTWNSLLDALVKAEEINEALICFQSMKEMKCSPNTYTYSILINGLCRVQKYNKAFVFWQ

SEQ ID NO: 76042 - protein, 152 aa, Setaria italica
  misc_feature (16)..(16): Xaa can be any naturally occurring amino acid
  misc_feature (26)..(26): Xaa can be any naturally occurring amino acid
  Transcript Sequence Number=SeqID_10068
  Gene Ontology: Mol. function=ATP binding
  Homolog annotation: Hit_ID=Q84T10; Match level="QueryCoverage=98%, HitCoverage=5%, E-value=3e-58, Identity=71%"; Hit description=Unknow protein
WVASSMDEDLHYATDXYDFENVRSLXGSVAPYAVPQVSSSSLRKDIGFKTEASYCDALMVLKSWITSQVPFSASMSQMCKFYTFLSEGVADSKIDIKREFLSSPSIFTPLQRPRSSEVIPGKFLPPKDLYWHDPTGCSEITEEFVATKSRSM

SEQ ID NO: 76043 - protein, 845 aa, Setaria italica
  misc_feature (9)..(9): Xaa can be any naturally occurring amino acid
  Transcript Sequence Number=SeqID_10069
  Gene Ontology: Mol. function=hydrolase activity, acting on acid anhydrides, catalyzing transmembrane movement of substances; Cellular component=integral to membrane; Biological process=copper ion transport
  Homolog annotation: Hit_ID=B9RIA4; Match level="QueryCoverage=98%, HitCoverage=86%, E-value=0.0, Identity=73%"; Hit description=Copper -transporting atpase p-type, putative
  Pfam annotation: Domain name=E1-E2_ATPase; Domain location=259-499; Score=258.8; E_value=1.3e-74; Accession=PF00122.12; Description=E1 -E2 ATPase
  Pfam annotation: Domain name=Hydrolase; Domain location=503-737; Score=124.9; E_value=2.5e-34; Accession=PF00702.18; Description =haloacid dehalogenase-like hydrolase
  Pfam module annotation: Pfam domain module=E1-E2_ATPase::Hydrolase; Domain location=259-499::503-737
LQMVPGVKXAAVGLALEEAKVHYDPNVTSRDLIIEAVEDAGFGADLISSGDDVNKVHLKLEGLSSPEDTKLIQTALETAEGANHVEWDTVQQTIKVAYDPDITGPRLLIQCIQNAAQPPKCFNATLHSPPKQREAERNHEIRNYRNQFLWSCLFSVPVFLFSMVLPMISPYGDWLSYRICNNMTIGMLLRWLLCSPVQFIVGWRFYIGAYHALKRGYSNMDVLVALGTNAAYFYSVYIVLKALTSASFEGQDFFETSAMLVSFILLGKYLEVVAKGKTSDALSKLTELAPETACLLSFDKDGNVISETEISTQLLQRNDVIKIVPGTKVPVDGVVIKGQSHVNESMITGEARPIAKKPGDRVIGGTVNDNGCIIVKATHVGSETALSQIVQLVEAAQLARAPVQKLADKISRFFVPTVVVVAFLTWLGWFIPGQFHLYPAQWIPKGMDSFELALQFGISVLVVACPCALGLATPTAVMVATGKGASQGVLIKGGNALEKAHKIKAIIFDKTGTLTVGKPSVVQTKIFSKIPLLELCDLAAGAEANSEHPLSKAIVEHTKKLREQYGSHSDHMMESRDFEVHPGAGVSANVEGKLVLVGNKRLMQEFEIPLSPEVEAYMSETEELARTCVLVAIDKIICGALAVSDPLKPEAGHVISYLNSMGISSIMVTGDNWATAKSIAKEVGISQVFAEIDPVGKAEKIKDLQMQGLTVAMVGDGINDSPALAAADVGMAIGAGTDVAIEAADIVLMKSSLEDVITAIDLSRKTLSRIRLNYVWALGYNVLGMPVAAGVLFPFTGIRLPPWLAGACMAASSVSVVCSSLLLQLYKKPLHVEDAPRPTDGSDLV

SEQ ID NO: 76044 - protein, 251 aa, Setaria italica
  Transcript Sequence Number=SeqID_10070
  Gene Ontology: Mol. function=protein serine/threonine kinase activity; Biological process=protein amino acid phosphorylation
  Homolog annotation: Hit_ID=C0LGQ5; Match level="QueryCoverage=90%, HitCoverage=60%, E-value=3e-74, Identity=40%"; Hit description =Leucine-rich repeat receptor-like protein kinase (Fragment)
  Pfam annotation: Domain name=LRR_1; Domain location=117-139; Score =13.8; E_value=0.68; Accession=PF00560.25; Description=Leucine Rich Repeat
  Pfam annotation: Domain name=LRR_1; Domain location=141-163; Score =12.8; E_value=1.1; Accession=PF00560.25; Description=Leucine Rich Repeat
  Pfam annotation: Domain name=LRR_1; Domain location=165-187; Score =11.4; E_value=2; Accession=PF00560.25; Description=Leucine Rich Repeat
  Pfam annotation: Domain name=LRR_1; Domain location=189-211; Score =16.4; E_value=0.12; Accession=PF00560.25; Description=Leucine Rich Repeat
  Pfam annotation: Domain name=LRR_1; Domain location=21-43; Score =15.5; E_value=0.22; Accession=PF00560.25; Description=Leucine Rich Repeat
  Pfam annotation: Domain name=LRR_1; Domain location=213-235; Score =9.8; E_value=4.1; Accession=PF00560.25; Description=Leucine Rich Repeat
  Pfam annotation: Domain name=LRR_1; Domain location=45-67; Score =14.5; E_value=0.43; Accession=PF00560.25; Description=Leucine Rich Repeat
  Pfam annotation: Domain name=LRR_1; Domain location=69-91; Score =15.6; E_value=0.2; Accession=PF00560.25; Description=Leucine Rich Repeat
  Pfam annotation: Domain name=LRR_1; Domain location=93-115; Score =11.9; E_value=1.6; Accession=PF00560.25; Description=Leucine Rich Repeat
  Pfam module annotation: Pfam domain module=LRR_1::LRR_1::LRR_1::LRR _1::LRR_1::LRR_1::LRR_1::LRR_1::LRR_1; Domain location=117-139::141 -163::165-187::189-211::21-43::213-235::45-67::69-91::93-115
AASPGDLCGGAGASDEAESSSLEHLMLSTNNFTGEIPEGLSRCQALTQLDLANNSLSGAIPAALGELGNLTDLMLNNNSLSGELPPELFNLTELQTLALYHNKLTGRLPDAIGRLVNLEVLYLYENQFAGEIPESIGDCTSLQMIDIFGNRFNGSIPASMGNLSQLAFIDFRQNELSGSIPPELGECRQLQVLDLADNALSGPIPETFGKLRSLQQFMLYNNSLSGTIPDSMFECRNITRVNIAHNRLTGT

SEQ ID NO: 76045 - protein, 72 aa, Setaria italica
  Transcript Sequence Number=SeqID_10071
  Subcellular localization annotation: CTP_CleavageSite=32; ConfidenceScore=5.08e-01
GSKVAGDLLGQPVGFQGRRRRSRAGSGGPNASASNGSVHSIADARRRGGEDSIYSIATTIVGFTIWNMYIYG

SEQ ID NO: 76046 - protein, 104 aa, Setaria italica
  Transcript Sequence Number=SeqID_10072
RARGRRGAEKAEEAEAKRKAEEAEARRKKEEEERDAELAAYYQEQWANEEEEGAADAAAAETAPLYGASGLRCGITENPGWGEFAGPNFVLLRIPYRCSTHFNI

SEQ ID NO: 76047 - protein, 644 aa, Setaria italica
  Transcript Sequence Number=SeqID_10073
  Gene Ontology: Mol. function=transporter activity; Cellular component= integral to membrane; Biological process=transport
  Homolog annotation: Hit_ID=B9T6T6; Match level="QueryCoverage=83%, HitCoverage=71%, E-value=0.0, Identity=63%"; Hit description=Purine permease, putative
  Pfam annotation: Domain name=Xan_ur_permease; Domain location=118 -541; Score=180.6; E_value=4.6e-51; Accession=PF00860.12; Description= Permease family
GRRGGGGGGGRGDAMRRNGGVERDQAAPNAGRNGNGALADAEARKKAEEAEAKRKAEEAEARRKKEEEERDAELAAYYQEQWANEEEEGAADAAAAETAPLYGASGLRCGITENPGWAPLIFYGIQHYLSIAGSLVFVPLILVPTMGGSDEDTATVISTMLLVSGLTTILHTFLGSRLPLVQGSSFVYLAPALVIANSEEFRNLSDNKFKHVMRELQGAILIGSVFQILLGYTGLMSLFLRLINPVVVAPTIAAVGLAFFSYGFPQAGSCVEISLPLILLVLLCTLYMRKISLFGNRIFLVYAVPLSVAIVWAYAFFLTAGGAYNFKGCSSNIPSSNILLDSCRRHLETMKRCRTDVSTAWKTAAWVRVPYPFQWGPPTFHFKTGIIMIIVSLVASVDSLSSYHAASLLVNLSPPTRGVVSRGIGLEGISTFIAGVWGTGTGSTTLTENIHTLETTKMASRRALQLGAALLVVFSFFGKIGALLASIPVALAASVLCFTWALIVALGLSTLRYTQAASSRNMIIVGFTLFISLSIPAYFQQYEPSSTLILPSYLLPYAAASSGPVRTASSGLNYAVNALLSINVVVALLVAVLLDNTVPGSRQERGVYIWSDPKSLEVDPATLEPYRLPEKVSCWFRWAKCVGI

SEQ ID NO: 76048 - protein, 208 aa, Setaria italica
  misc_feature (134)..(134): Xaa can be any naturally occurring amino acid
  Transcript Sequence Number=SeqID_10074
  Gene Ontology: Mol. function=catalytic activity; Cellular component =membrane
  Homolog annotation: Hit_ID=B9SYU5; Match level="QueryCoverage=98%, HitCoverage=50%, E-value=1e-64, Identity=59%"; Hit description =Sphingosine-1-phosphate phosphohydrolase, putative
MMGYLLHYVLTYGDAGNVMIAAGLSLAFLFVMLIGIARIYLGMHSLIDVIAGICFGIVILAFWLVVHDHVDAFVVSGQNVASFWAGLSLLMCFAYPKPEFPTPSFEYHTAFNGVAFGIVYGIQQTYFHFHTPDXPLIFSSRLPLLAFAGRVLVGIPTILVVKFCSKALSKWLLPVMCSTLGIPIVSSCYVPALKVRTNKTRQRNKDLE

SEQ ID NO: 76049 - protein, 416 aa, Setaria italica
  Transcript Sequence Number=SeqID_10075
  Gene Ontology: Mol. function=catalytic activity; Cellular component =membrane; Biological process=sphingolipid biosynthetic process
  Homolog annotation: Hit_ID=B9SYU5; Match level="QueryCoverage=96%, HitCoverage=98%, E-value=1e-145, Identity=61%"; Hit description =Sphingosine-1-phosphate phosphohydrolase, putative
  Pfam annotation: Domain name=PAP2; Domain location=101-233; Score =79.1; E_value=1.6e-20; Accession=PF01569.13; Description=PAP2 superfamily
MEAAVAGAGGAGLTRWQAAALSAVAGWVWAASFYDLTRRARALVQPWVTRRVHAETPAILRFQRLQHKLLDNFFSVLSCVVSVPFYTGFLPLLFWSGHNKLARQMTLLMALCDYLGNSVKDMISAPRPCSPPVRRVTATEDEKENAMEYGLPSSHALNTVCLMGYLLHYVLTYGDAGNVMIAAGLSLAFLFVMLIGIARIYLGMHSLIDVIAGICFGIVILAFWLVVHDHVDAFVVSGQNVASFWAGLSLLMCFAYPKPEFPTPSFEYHTAFNGVAFGIVYGIQQTYFHFHTPDAPLIFSSRLPLLAFAGRVLVGIPTILVVKFCSKALSKWLLPVMCSTLGIPIVSSCYVPALKVDNSSKNKPDAKQGAGYLQRVFSLFPQKAYDVDTGIRFVQYASLAWSVVDLVPAIFTHLNL

SEQ ID NO: 76050 - protein, 237 aa, Setaria italica
  Transcript Sequence Number=SeqID_10076
  Gene Ontology: Mol. function=nucleoside-triphosphatase activity; Cellular component=membrane; Biological process=transport
  Homolog annotation: Hit_ID=Q8GU82; Match level="QueryCoverage=99%, HitCoverage=17%, E-value=1e-108, Identity=78%"; Hit description=PDR -like ABC transporter
  Pfam annotation: Domain name=ABC_tran; Domain location=1-91; Score= -49.2; E_value=0.022; Accession=PF00005.19; Description=ABC transporter
DLRSAMVGIPGVTGLSAEQRKRLTIAVELVASPSIIFMDEPTTGLDARAAAIVMRTVRKTVNTGRTVVCTIHQPSIEIFESFDELLLMNRGGQLIYSGSLGPLSSTMINYFEAIRGVPRIKEGQNPAAWALDISSHAMEYAIGVDYSEIYRNSSLHRENMALVAELSKPRAGKKYLHFPPRYWPNFKAQCIACLWKQHCSFWKNPELNVARLFCTFGVSITFGMVFWHVGSTIKDEQ

SEQ ID NO: 76051 - protein, 529 aa, Setaria italica
  Transcript Sequence Number=SeqID_10077
  Homolog annotation: Hit_ID=B9R8W0; Match level="QueryCoverage=82%, HitCoverage=84%, E-value=2e-75, Identity=37%"; Hit description =Electron transporter, putative
  Pfam annotation: Domain name=DUF547; Domain location=309-447; Score =244.7; E_value=2.2e-70; Accession=PF04784.6; Description=Protein of unknown function, DUF547
MARESRSGVLSETGSCAGTPRSVQSSCSLQHRYSSRSILKTHEGALDMSPRFSYCKPTTHREKMFDRRHSLNLPEQLPGHYSRKVTERTQRATSKSVADLVGEIAALEQEVIRKELHLLALYRRAFDQYVSESCSFTSEQVDQETLKTIDEGALRLRDIKHSAAFNLPTVSKSEVIKSGARHSSLVNFLSASISEYVPKISCKLSEDILSCIAAVYCKLSSTQPQDAESKTSPSPSVSSSSTFSPRRRNDSWSPRYNFDSPRQYGLQKERNEQNIGMIVIPRIRIDADKFDYASKMLETIRSLIQRLEKVDPLKMTHEEQLCFWINIHNALVMHAFLAYGLHDKRMKSTDMILKAAYNVGGQSVNAQTIQNSILGCQSHRPSLWVRALFTPAKRSTAGTARHPYALQQPEPIAHFALSTGAFSDPPVRLYTAKKIHEQLEAARTEFIQGSVAVRKQALLLPKVLHYYARDAGLELRHLVELVCESMSDAQRDAAQQLQQCLRRRADRCVEWMPYKSSFRYVVHRDLADD

SEQ ID NO: 76052 - protein, 75 aa, Setaria italica
  Transcript Sequence Number=SeqID_10078
YSFQFICLFIHFCTTNLFNNTLLLLSYEVQVQQELEGEGELEGEGRGAGAGSDAGGRARGRGGNSRSLAALLGRD

SEQ ID NO: 76053 - protein, 77 aa, Setaria italica
  Transcript Sequence Number=SeqID_10079
  Subcellular localization annotation: CTP_CleavageSite=59; ConfidenceScore=5.22e-01
YRMYIANGKHDTQASLPSNAAKLLEFPPLPLALPPASEPAPAPLPSPSSSPSPSSSCCTCTSLFHGLGVALSLAVLV

SEQ ID NO: 76054 - protein, 583 aa, Setaria italica
  misc_feature (282)..(282): Xaa can be any naturally occurring amino acid
  misc_feature (299)..(299): Xaa can be any naturally occurring amino acid
  misc_feature (351)..(351): Xaa can be any naturally occurring amino acid
  misc_feature (364)..(364): Xaa can be any naturally occurring amino acid
  misc_feature (553)..(553): Xaa can be any naturally occurring amino acid
  Transcript Sequence Number=SeqID_10080
  Gene Ontology: Mol. function=transposase activity; Biological process= transposition, DNA-mediated
  Homolog annotation: Hit_ID=Q10PZ8; Match level="QueryCoverage=98%, HitCoverage=67%, E-value=0.0, Identity=68%"; Hit description =Transposon protein, putative, Mutator sub-class
  Pfam annotation: Domain name=MULE; Domain location=196-292; Score =102.9; E_value=1.1e-27; Accession=PF10551.1; Description=MULE transposase domain
  Pfam annotation: Domain name=MuDR; Domain location=2-73; Score=52.4; E_value=1.7e-12; Accession=PF03108.7; Description=MuDR family transposase
  Pfam annotation: Domain name=SWIM; Domain location=443-475; Score =21.7; E_value=0.0016; Accession=PF04434.9; Description=SWIM zinc finger
  Pfam module annotation: Pfam domain module=MULE::MuDR::SWIM; Domain location=196-292::2-73::443-475
MEEARCGHQCKSVVTHHAILNDHAFEIVKKDKSRFRAICKRAEQGCNWKFYASTSKNYIGCKVKTSGPKHTCGSVNNYGDTMASKKWVADRVVDLLREEPEMGQRELQYRLKKKYSIEVPYYRVVRGKMRALDMIYGKWDDSYDLLPTYQDERLRFVPSSIVELDTEDHNGDVCFTRFFVALKPCIDGFLQGCRPYIAMDATHLTGRSRGQLAAAVAVDGHNWLFLVAYGVIETESKDNWTWFINNLKNAIGHPTGLIISTDAGKEIEGVVEDVYLGLEHRXYMRHLWKNMKKNGFHGXLYGKNMWAAAKSFTTDKFNYFMSKIEEKDPNAVAWLDENHPYVWSRSKFSKXCNIDYINNNLSEXFNSWVSKCKYFQIVDMHDRIRQMIIEKFVLRDKIARKMSGIIIPSITNALNAKSKTIKDHEVLICGVGTVVVTVNRFRHVVNLEQKTCSCRAWQVTGKPYSHTLAFIAKLSRHVQMDAFVHEYFSVERFRKAYASTFNPMTSKDSWPRVDLGYKIKKPKLRRKPGRPRKSRIKVYDEASTSKRKRPCSXCHDLDHTAKHCQGGPTTSQKRKLSSSQNGS

SEQ ID NO: 76055 - protein, 102 aa, Setaria italica
  Transcript Sequence Number=SeqID_10081
  Subcellular localization annotation: CTP_CleavageSite=72; ConfidenceScore=5.11e-01
MVLVLRSPSLSLCSCGSSGGVGAGTRATCVGAAPGIGSGTRAPYAGLVPGIGASTRAPGAAHPRARARLPPPATVGAGRGNTGAPLAGPPPGWPPAVRRRRQ

SEQ ID NO: 76056 - protein, 89 aa, Setaria italica
  Transcript Sequence Number=SeqID_10082
  Subcellular localization annotation: CTP_CleavageSite=60; ConfidenceScore=5.23e-01
YRMYIANGKHDTQASLPSNAAKLLEFPPLPLALPPASEPAPAPLPSPSSSPSPSSSCCTCTSYDKSKSSLFHGLGVALSLAVLVLMWVV

SEQ ID NO: 76057 - protein, 212 aa, Setaria italica
  Transcript Sequence Number=SeqID_10083
  Gene Ontology: Mol. function=nucleotide binding; Biological process =defense response
  Homolog annotation: Hit_ID=Q9ZNV6; Match level="QueryCoverage=98%, HitCoverage=36%, E-value=1e-34, Identity=35%"; Hit description=Pib
  Pfam annotation: Domain name=NACHT; Domain location=39-210; Score= -40.0; E_value=0.1; Accession=PF05729.4; Description=NACHT domain
  Pfam annotation: Domain name=NB-ARC; Domain location=21-212; Score= -84.4; E_value=0.0004; Accession=PF00931.14; Description=NB-ARC domain
  Pfam module annotation: Pfam domain module=NACHT::NB-ARC; Domain location=39-210::21-212
ELGSGRATKASAFEESLLIGRAEEKAEVIKMISTAEQRSVISVWGMGGIGKTTLVKGVYQSPELAGLFRKHAWVTVKHPFSLEVFLRGLAERLQENEQSVSSGEKKRPDITRMAGRYGKNVATMAYEDLKRELAGLLQEPECLIVLDDVSSTLEWDAIKRYMGQTRRIIVTTRERSVAKHCSSLESDIYQLHAMGEEDDFKLFKKEGSHFFF

SEQ ID NO: 76058 - protein, 50 aa, Setaria italica
  Transcript Sequence Number=SeqID_10084
RVSAFLPSGESATPTTGLAAALGLVFVGRFAADNHQTGTDWLCKYLLIDY

SEQ ID NO: 76059 - protein, 298 aa, Setaria italica
  Transcript Sequence Number=SeqID_10085
  Gene Ontology: Mol. function=sequence-specific DNA binding; Cellular component=intracellular; Biological process=regulation of transcription, DNA-dependent
  Homolog annotation: Hit_ID=B4FWZ1; Match level="QueryCoverage=63%, HitCoverage=75%, E-value=2e-65, Identity=68%"; Hit description =Nuclear transcription factor Y subunit C-2
  Pfam annotation: Domain name=CBFD_NFYB_HMF; Domain location=141-205; Score=89.0; E_value=1.6e-23; Accession=PF00808.15; Description =Histone-like transcription factor (CBFNF-Y) and archaeal histone
  Pfam annotation: Domain name=Histone; Domain location=135-208; Score =51.1; E_value=4.3e-12; Accession=PF00125.16; Description=Core histone H2AH2BH3H4
  Pfam module annotation: Pfam domain module=CBFD_NFYB_HMF::Histone; Domain location=141-205::135-208
  Subcellular localization annotation: CTP_CleavageSite=41; ConfidenceScore=5.18e-01
RRVGDADDGASGRPWPGLRRALRRRQPSNRVRTIIDFGQTRSSMEPSSSQPQPVTGVGSQAYPAAYVPPAMVPGAPSVVPPGSQPAAPFPNPAQLSAQHQMVYQQAQQFHQQLQQQQQQQLREFWTTQMDEIDQTTDFKNHTLPLARIKKIMKADEDVRMISAEAPVVFAKACEVFILELTLRSWMHTEENKRRTLQKNDIAAAITRTDIYDFLVDIIPRDEMKEEGLGLPRVGLPPAMGASADSYPPYYYMPAQQMPPGGGMMYGGQQGHQVTYMWQQPQGQEEEPPEEQQQQQRSA

SEQ ID NO: 76060 - protein, 594 aa, Setaria italica
  misc_feature (297)..(297): Xaa can be any naturally occurring amino acid
  Transcript Sequence Number=SeqID_10086
  Gene Ontology: Mol. function=mismatched DNA binding; Cellular component=synaptonemal complex; Biological process=mismatch repair
  Homolog annotation: Hit_ID=Q69MM0; Match level="QueryCoverage=100%, HitCoverage=44%, E-value=1e-135, Identity=46%"; Hit description=DNA mismatch repair protein-like
  Pfam annotation: Domain name=DNA_mis_repair; Domain location=21-152; Score=24.0; E_value=2.6e-05; Accession=PF01119.11; Description=DNA mismatch repair protein, C-terminal domain
NELLYTAPSSSPLPLISKNFGDDVSRCLHEIAASDESWVLSGHVSGPSDVFHTKDFQYLYINSRFVNRNPIHNMLNNLASSFHSSVTRRNEEIDVQSRKRQKTDIYPAFLLNFCCSRSSYDLHFEPTKTIVEFKDWQTVLLFFEQTVTNYYKNVVPRKNDVKLNKGLLRHHNVQNNEEYADFQNTKQKNAVRDTNSDDMSATRAPKDSRCFSFDTEPSIQHVSFSGRITNSPWPNDNVVSIDYKLGYKVMHSPERLNYWWLEDGPSQLDDDVSSVNPTGSKRQRTEGIFHECAYSGXFGMLEDVPTEGFFSSQQKSELIGSEVEMQEPCFGSLNRPNKMSSELVQNQTNIKAHTSGWDGLYVEFDKSNGDCLVNEATDTITDISYPEMWKLNDGFYHDDGNTSRGFCRVLRKCSTNKKLGTAAGCIEGLETDTVSQINFPDIHAVWNSDLMDRSSIEDTFRHFPHLSSLADTPCSYARTGLTLDKKSDKNFGSWSCENIDSSIRIALDRFSNVSSITCEGAKHLDNFDYEIQPLNYFNNDCSSTDQFVSEDDLIMWKPKFDTRFSADISPERSDNGCHLNVPSSNMANDSTLTQ

SEQ ID NO: 76061 - protein, 175 aa, Setaria italica
  misc_feature (62)..(62): Xaa can be any naturally occurring amino acid
  Transcript Sequence Number=SeqID_10087
  Gene Ontology: Mol. function=structural constituent of ribosome; Cellular component=intracellular; Biological process=translation
  Homolog annotation: Hit_ID=B6SKA6; Match level="QueryCoverage=79%, HitCoverage=97%, E-value=3e-56, Identity=72%"; Hit description=50S ribosomal protein L27
  Pfam annotation: Domain name=Ribosomal_L27; Domain location=40-117; Score=130.7; E_value=4.6e-36; Accession=PF01016.11; Description =Ribosomal L27 protein
MAFSSVFRRVNVKELISNASVYACAAESSGAMSLVFRRWATKKTAGSTKNGRDSNPKYLGVXKKVEPGNIIVRQRGTRFHPGNYVSMGKDHTLFCLKEGHVRFEHNKLTGRKWVHADLMAGHLLHPVYARGSTTAADLDAQLTMQLLMLFPRTVPSCAYHHHHQVPLITQCNLFQ

SEQ ID NO: 76062 - protein, 146 aa, Setaria italica
  Transcript Sequence Number=SeqID_10088
  Gene Ontology: Mol. function=structural constituent of ribosome; Cellular component=intracellular; Biological process=translation
  Homolog annotation: Hit_ID=B6SKA6; Match level="QueryCoverage=97%, HitCoverage=97%, E-value=2e-64, Identity=78%"; Hit description=50S ribosomal protein L27
  Pfam annotation: Domain name=Ribosomal_L27; Domain location=40-121; Score=170.8; E_value=4e-48; Accession=PF01016.11; Description =Ribosomal L27 protein
  Subcellular localization annotation: CTP_CleavageSite=22; ConfidenceScore=5.06e-01
MAFSSVFRRVNVKELVSNASVYASAAESSGAMSLVFRRWATKKTAGSTKNGRDSNPKYLGVKKFGGEKVEPGNIIVRQRGTRFHPGNYVGMGKDHTLFCLKEGHVRFERNKLTGRKWVHVEPVAGHVLHPVYVNGSTTAADLDAQL

SEQ ID NO: 76063 - protein, 348 aa, Setaria italica
  misc_feature (333)..(333): Xaa can be any naturally occurring amino acid
  Transcript Sequence Number=SeqID_10089
  Homolog annotation: Hit_ID=Q53NA2; Match level="QueryCoverage=99%, HitCoverage=66%, E-value=8e-74, Identity=43%"; Hit description =D8Ertd354e protein, putative
  Pfam annotation: Domain name=DUF2261; Domain location=2-324; Score= -30.8; E_value=2.2e-12; Accession=PF10019.1; Description =Uncharacterized conserved protein (DU
FVMPFFLFIVGMAIPLSLKRIPDRGQAIRRVVIRTLKLLFWGILLQGGYSHAPDKLTYGVDMKHVRWGGILQRIALAYLVAAVLEIVTKDAKIQDQSSSGFSIFRMYLSQWIVACCILVVYLSLVYGIYVPDWEFRVQNVDSPNYGKVLTVTCGTRGILSPPCNAVGYIDRKILGINHLYQRPAWRRHQACTDSSPHEGPFKNDAPAWCVAPFEPEGILSSFSAVLSTIIGVHYGHVLVHMKSHTERLRQWFTMGIALLVLGIILHFSHAIPLNKQLYTFSYICVTAGAAGVVFSIFYFLVDILNHGYAFAPLRWIGMNAMLVYVMAAAGIFXGFLNGWYYEGNQQTT

SEQ ID NO: 76064 - protein, 580 aa, Setaria italica
  misc_feature (395)..(395): Xaa can be any naturally occurring amino acid
  Transcript Sequence Number=SeqID_10090
  Gene Ontology: Mol. function=DNA binding; Cellular component=nucleus; Biological process=transcription initiation
  Homolog annotation: Hit_ID=B9RZ59; Match level="QueryCoverage=90%, HitCoverage=81%, E-value=1e-138, Identity=51%"; Hit description=RNA polymerase-associated protein RTF1, putative
  Pfam annotation: Domain name=Plus-3; Domain location=198-308; Score =136.5; E_value=8.3e-38; Accession=PF03126.10; Description=Plus-3 domain
AGRAGGWRGDGDEDDEEDDDDDGRRSGGEDSDSAPSVGSDLYKDEEDKEKLEKMSELDRELILAERSSRIDDYKLKQMARSKTGKAGARKDSSPPPPPSRMRSSTRADKSGSATKSALNELRAKRMRQQDPEAYRNRFKDLLPQSGSPTRHRAGSPPSDGSNDGDNRGRLKDHGRIADDGRDDEFDESPSRIDPLKFDDVKSITLRRSKLVKWFMEPFFEETVSGCFVRLGIGKTKSGTPRYRLCIVRNVDASDPDRKYKLESYTTCKYLNVVWDSEANAARWQMTQVSDSPPNEEEFKEWLQEAEKNGVRIPTRQEVLEKKDAIQKAYNYVYSADAVKNMLREKSAVRRTINVAAEKDRLRNELEIALSRRNEAEAERIRVKLNNLQNMPQPMXKNDKAARLEAMNRKNRAENFKNASEMKPINTSLKAGEAGYDPFSRRWTRSRNYYTAKPGGDNAEEAANGSSGNAVAGNEDGKNKAHTGTAATAAAQVAAADAGKLIDTNAPVDLGTESNVLHTFELPISLSALQEFGGAKGLFDGYMARKQKIEATMGYKVPDNDGRRHALTLSVSDYKRRRGLL

SEQ ID NO: 76065 - protein, 219 aa, Setaria italica
  Transcript Sequence Number=SeqID_10091
  Homolog annotation: Hit_ID=B6U2B1; Match level="QueryCoverage=98%, HitCoverage=89%, E-value=2e-98, Identity=80%"; Hit description=VAMP protein SEC22
  Pfam annotation: Domain name=Hin1; Domain location=38-175; Score =169.7; E_value=8.5e-48; Accession=PF07320.5; Description=Harpin -induced protein 1 (Hin1)
MSKEKHHRDWILRRCCGSICACFLTLAAVVGFIVLVIYLALHPSKPSFYLQDVQLRSIDLSDPAISLNLQVTIASRNPNERVGVYYKTLDAFTTYRDEPVTVPVSLPSIYQGHKDASVWSPVMSGDAVPVSQYVADAMRQDISAGYVLLHVKLEGRVKWKVGSWVSGGYHLFVNCPALLATSGAAVGGAFAVSGAAVPAGVNTTVSLKFTHPADCTVDV

SEQ ID NO: 76066 - protein, 450 aa, Setaria italica
  Transcript Sequence Number=SeqID_10092
  Gene Ontology: Mol. function=nucleic acid binding; Cellular component= intracellular; Biological process=transport
  Homolog annotation: Hit_ID=B9RLM4; Match level="QueryCoverage=85%, HitCoverage=81%, E-value=4e-56, Identity=35%"; Hit description=RNA binding protein, putative
  Pfam annotation: Domain name=NTF2; Domain location=1-109; Score =113.4; E_value=7.4e-31; Accession=PF02136.12; Description=Nuclear transport factor 2 (NTF2) domain
  Pfam annotation: Domain name=RRM_1; Domain location=290-359; Score =31.2; E_value=4.1e-06; Accession=PF00076.14; Description=RNA recognition motif. (a.k.a. RRM, RBD, o
  Pfam module annotation: Pfam domain module=NTF2::RRM_1; Domain location=1-109::290-359
LSHLHEQPDQVHKFYQESSMLGRPESNGTMVYVTTLGNINEKIMSMDFRNCLTEIETADAQLSHEDGVLIVVTGSLTSDEGVCRRFTQSFFLAPQESGGYFVLNDVFRFISERKPAEINQVVTQENESSQNGRSASESCSALPEPTPADRSVISDHVTTENIVTERQISNPPVNGTAVENNVHAEPPVQVAKEDPKKAPVAAPPPPAPTPTDVTKKSYASIVKDMKEGPPTPQVAKTTPSVAKQKPAPKPVSKAVEGPEKSSAKPTQANETSDGIVAQNNSSRNEPGYSIFIKNLPFSANIEIVEEEFKRFGTIKPGGVQVRHNKDDRFVFGFVQYESQQSMQAAIEASPIHMEEKEVHIEAKRANSRGGRFQSGRGVYHGDNFRGRGGSYVDNANYRGSDNFNRRNEGEGYNRRNDGDFYNRRNDGEIYRRNDGEIYNRRNDGENYHRR

SEQ ID NO: 76067 - protein, 189 aa, Setaria italica
  Transcript Sequence Number=SeqID_10093
MQMSMGTQTLYNVVGGRFQSGRGVYHGDNFSRRGGSYVDNANYRGSDNFNRRNEGEGYNRRNDGDFYNRRNDGEIYRRNDGEIYNRRNDGENYHRRNDGDNYNIRNERSDGDNYNRRNERSDGENFNRRNDGENFNRRNDGDNYNRRNDGGENFNRRNDGGENLNRRNNFRNHNEFSGRGRGPPPPGNG

SEQ ID NO: 76068 - protein, 126 aa, Setaria italica
  Transcript Sequence Number=SeqID_10094
HDNYNIRNERSDGDNYNRRNERSDGENFNRRNDGENFNRRNDGDNYNRRNDGGENFNRRNDGGENLNRRNNFRNHNEFSGRGRGPPPPGNGYHQNGNGLHPARPFQNGNGRFGRVNSGPKQSPVAV

SEQ ID NO: 76069 - protein, 227 aa, Setaria italica
  Transcript Sequence Number=SeqID_10095
  Gene Ontology: Mol. function=peptidase activity
  Homolog annotation: Hit_ID=B6U3W2; Match level="QueryCoverage=84%, HitCoverage=84%, E-value=1e-110, Identity=97%"; Hit description =Cysteine-type peptidase
  Pfam annotation: Domain name=OTU; Domain location=94-206; Score =126.6; E_value=7.9e-35; Accession=PF02338.11; Description=OTU-like cysteine protease
MSEQQERVSKSSSSSISSSTQESEEELTIGTLITEAANTTNSAKSLGRRLSHLDSIPHTPRVNGKIPDFNNATIDHESLLERLGTYGLAEYQIEGDGNCQFRALADQIFRNPDYHKHVRKAVVKQLKEFKKHYEGYVPMEYKVYLKKMKRSGEWGDHVTLQAAADRFAAKICLLTSFRDTCLVEIVPRDATPTRELWLSFWCEVHYNSLYAIEDLPSRKTKKKHWLF

SEQ ID NO: 76070 - protein, 38 aa, Setaria italica
  Transcript Sequence Number=SeqID_10096
QQVFLLNQFAAKICLLTSFRDTCLVEIVPRDIATPTRG

SEQ ID NO: 76071 - protein, 48 aa, Setaria italica
  Transcript Sequence Number=SeqID_10097
WWLFNYQTRTSIQVDKINFAYVCLCLQKLVLSILFIYEQFSVQISKAT

SEQ ID NO: 76072 - protein, 279 aa, Setaria italica
  Transcript Sequence Number=SeqID_10098
  Homolog annotation: Hit_ID=Q9LPT5; Match level="QueryCoverage=98%, HitCoverage=40%, E-value=4e-27, Identity=36%"; Hit description =F11F12.2 protein
LEKGIVREAERLREAICSTKINGIKEFSYKPLLLQRTFFAVFEELKQREDTAEKVIVQCNGNWPKSCASKAHTDSPETDIFLEKQANRYCNQPRTHNEEAEDDSGWETVSQVEENGSSNSPGGSEPSVNGFCGENDASVSGTDWDENCDNDQAHSEISEVCSATAGRSWSKRSFVGLWRSSNSVDQKKMGSNILNGRLSNARMSNVAESPDLKNGEVCDSPQSAGQWRPELLNPDIVRAIKGCIEWPRGVQKHSLKSKLLEAKLDGSKVQLRQALKQKI

SEQ ID NO: 76073 - protein, 264 aa, Setaria italica
  Transcript Sequence Number=SeqID_10099
  Gene Ontology: Mol. function=protein serine/threonine kinase activity; Cellular component=plasma membrane; Biological process =protein amino acid phosphorylation
  Homolog annotation: Hit_ID=B6SXI8; Match level="QueryCoverage=97%, HitCoverage=46%, E-value=1e-149, Identity=97%"; Hit description =Transposon protein
  Pfam annotation: Domain name=Pkinase; Domain location=47-263; Score =216.0; E_value=9.8e-62; Accession=PF00069.17; Description=Protein kinase domain
  Pfam annotation: Domain name=Pkinase_Tyr; Domain location=47-263; Score=-8.8; E_value=3.9e-13; Accession=PF07714.9; Description =Protein tyrosine kinase
  Pfam module annotation: Pfam domain module=Pkinase::Pkinase_Tyr; Domain location=47-263::47-263
AHAEVRLGGSFANKARGEQVAAGWPAWLSAVAGEAIDGWTPRRADSFEKIDKIGQGTYSNVYKARDTVSGKIVALKKVRFDNLEPESVRFMAREILILRRLDHPNVVKLDGLVTSRMSCSLYLVFEYMEHDLAGLAASPDIKFTEPQVKCYMHQLLSGLEHCHDRGVLHRDIKGSNLLLDNNGMLKIADFGLASFFDPDRKQPMTSRVVTLWYRPPELLLGATDYGVGVDLWSAGCILAELLAGRPIMPGRTEVEQLHKIFKLC

SEQ ID NO: 76074 - protein, 388 aa, Setaria italica
  Transcript Sequence Number=SeqID_10100
  Gene Ontology: Mol. function=nucleic acid binding; Cellular component= intracellular; Biological process=ATP synthesis coupled proton transport
  Homolog annotation: Hit_ID=Q10DW2; Match level="QueryCoverage=66%, HitCoverage=69%, E-value=1e-116, Identity=79%"; Hit description =Splicing factor 3A subunit 3, putative, expressed
MASTVLEATRAAHEDLERLERLAVRELQRDPANARDRLFQSHRVRHMLDLVVSTSDKLVEIYEDNDNARKDEINTHLTAPTQSLLFSKYYERLKEIRDYHRRNPSARFVSTTDDYEELLKEEPVIEFTGEDSFGRYLDLHELYNEFINSKFGAPMEYSAYVGSFSQMEKISQSHKATRQYREYLEHILEYLTSFLYRTEPLQDIEKIFAKLESEFEERWANEEVPGWGNKSTEESEIDLDYYSTVEELVELGPEKLKHALAARGLKSGGTVQQRAERLFLLKHTPLEQLDRKHFAKVPRTKDVSDASSNGNHFKDDLKKEIALMEVKMRRLCELLDEVFVRTKENAEKKLTLTYEEMEAEREEEEVQADTESDDDEQQIYNPLKLPMG

SEQ ID NO: 76075 - protein, 80 aa, Setaria italica
  Transcript Sequence Number=SeqID_10101
  Subcellular localization annotation: CTP_CleavageSite=34; ConfidenceScore=5.53e-01
SWPAPAGGEVTLHIQVEKQGHACRRLPPRAPPARSMASGSLSSATSSNSSVIRDVMMFMVVMHCICIHVRSNRKFGRDVN

SEQ ID NO: 76076 - protein, 64 aa, Setaria italica
  Transcript Sequence Number=SeqID_10102
FFVRISRISLFFLECVHLEKERNPRNSHKKQNIRPSIDRFQIIIAIGSIIFSKKLPTYAIMKIA

SEQ ID NO: 76077 - protein, 61 aa, Setaria italica
  Transcript Sequence Number=SeqID_10103
FLINNYSMHFFIHIHTFFILYHTSNPPYIMFSIQINVFHRFHMYMHKWSKWWHSSYVYILT

SEQ ID NO: 76078 - protein, 77 aa, Setaria italica
  Transcript Sequence Number=SeqID_10104
TSEKTNFYLFQCIKSTVIHPIARWQKTRTTRAITSCRLEVELKQDDSLLAPTQYIFVPEASSVVVPLWWPFSCLHGG

SEQ ID NO: 76079 - protein, 58 aa, Setaria italica
  Transcript Sequence Number=SeqID_10105
RSTEVHLEVELKQDDSLLAPTQYIFVPNLCSKWMRHQYFRTKANLICLSTFLVLFLRS

SEQ ID NO: 76080 - protein, 111 aa, Setaria italica
  Transcript Sequence Number=SeqID_10106
  Gene Ontology: Mol. function=signal transducer activity; Cellular component=integral to membrane
  Homolog annotation: Hit_ID=B9T094; Match level="QueryCoverage=98%, HitCoverage=20%, E-value=1e-25, Identity=54%"; Hit description =Signal transducer, putative
ADGEAGAYREFKALAEAADRKFARARDLPLYGGGDHHSRKAFKAYTRLWRLQQERRRELVAGGLRRWEIGEVASRIGQLYYARYLRTAEPRSLVGAYVFYEAIYSRGYFGA

SEQ ID NO: 76081 - protein, 111 aa, Setaria italica
  misc_feature (98)..(98): Xaa can be any naturally occurring amino acid
  Transcript Sequence Number=SeqID_10107
  Homolog annotation: Hit_ID=A5HEH4; Match level="QueryCoverage=74%, HitCoverage=36%, E-value=1e-39, Identity=95%"; Hit description=GIF2
FQNNGKVEECERHQAKLQHNLMYLAAIADSQPPQTAPLSQYPSNLMMQPGPRYMPPQSGQMMSPQSLMAARSSMMYGHPALSPLQQQQAAHGQLGMAXGGGGGGGTTSGFN

SEQ ID NO: 76082 - protein, 115 aa, Setaria italica
  Transcript Sequence Number=SeqID_10108
  Gene Ontology: Cellular component=exocyst; Biological process =exocytosis
  Homolog annotation: Hit_ID=B9RAG8; Match level="QueryCoverage=93%, HitCoverage=16%, E-value=1e-16, Identity=42%"; Hit description =Exocyst complex component, putative
LLTLLLQKMDDKSRLYDHAGLRNIFLMNNLHYVVQKVRESPPLRELLGDDWLRRHRGQIRQYETGYLRASWMAVLSTHLRRDDGAAARPPAGHRAPVGPSAKSFNAAFQELYRSQ

SEQ ID NO: 76083 - protein, 105 aa, Setaria italica
  Transcript Sequence Number=SeqID_10109
  Gene Ontology: Mol. function=transferase activity; Cellular component= chloroplast; Biological process=isoprenoid biosynthetic process
  Homolog annotation: Hit_ID=B9SUY3; Match level="QueryCoverage=55%, HitCoverage=15%, E-value=4e-11, Identity=55%"; Hit description =Geranyl geranyl pyrophosphate synthase, putative
  Subcellular localization annotation: CTP_CleavageSite=36; ConfidenceScore=5.76e-01
SSPRILSPSPWLSPPPSSPSPKLLSSSRSHHLLPVRASSAAPAASASFDLRRYWTSLIADVESELDAAMPMRPPESIHSAMRYAVLPGAGKEGGAKRAPPVLCVA

SEQ ID NO: 76084 - protein, 65 aa, Setaria italica
  Transcript Sequence Number=SeqID_10110
MEVRPMVALRAALVGGIAAFAKIGGVMKAAGGVKIGAAAAAVTAAASAAISGKDTSKDTPKAETK

SEQ ID NO: 76085 - protein, 332 aa, Setaria italica
  Transcript Sequence Number=SeqID_10111
  Gene Ontology: Mol. function=electron carrier activity; Cellular component=extracellular region; Biological process=response to oxidative stress
  Homolog annotation: Hit_ID=Q5U1N2; Match level="QueryCoverage=81%, HitCoverage=80%, E-value=3e-75, Identity=56%"; Hit description=Class III peroxidase 61
  Pfam annotation: Domain name=peroxidase; Domain location=49-277; Score=305.9; E_value=8.3e-89; Accession=PF00141.15; Description =Peroxidase
MARRGNALAMGTLLLAAAVVCAAAAAEADDLLVELQLQQDPCPQVEDIVRSAVQKAVRRNIQLTAGLLRIFFHDCFPQGCDASVLLAGERDVPPNAGSLQPEALKLIEDIRREVHGKCGGPKVSCADILALATRDAVVAAGLPFFPITRGRMDTRTPAPDVLGNLPSPSDSVGNLLDMFRRKGLGDDPRVLVALSGGHTVGKTSCGLIRGNDDFSRALAANCSASRSRKQSLDVITPDAFDNRYFVALRNGKGVLGSDQGLADHPSTRDIVRDFANDQQLFFTQFRASMTKLSQLKAPAGGSRFEIRLDCSKPNARVGDEDDAAAGQLAAAA

SEQ ID NO: 76086 - protein, 90 aa, Setaria italica
  Transcript Sequence Number=SeqID_10112
  Gene Ontology: Cellular component=chloroplast
  Homolog annotation: Hit_ID=Q9LQ36; Match level="QueryCoverage=98%, HitCoverage=35%, E-value=1e-15, Identity=40%"; Hit description =F14M2.3 protein
  Pfam annotation: Domain name=DUF567; Domain location=1-90; Score =15.6; E_value=9.5e-06; Accession=PF04525.4; Description=Protein of unknown function (DUF567)
KSLTGGDFTVTDPSDAVVLQFKGSVWSVRNRRVLVDAAGQPILSMHEKVLSMHNRWEVFRGDSSNASDLLFTVKRSTLLQLRTELEVFLA

SEQ ID NO: 76087 - protein, 181 aa, Setaria italica
  Transcript Sequence Number=SeqID_10113
  Homolog annotation: Hit_ID=Q9XIC8; Match level="QueryCoverage=69%, HitCoverage=20%, E-value=9e-41, Identity=59%"; Hit description =F23M19.10
  Pfam annotation: Domain name=DUF292; Domain location=75-181; Score =183.0; E_value=8.6e-52; Accession=PF03398.6; Description=Eukaryotic protein of unknown function, DUF292
VGCCQVLPGGAPVSHGTGWIRLDFRINQAGGEVFFARPRRRRTEAAAEMHKTKGKLSGVLHKGFKPDKCKTSLRMAVARIKLLRNRKEVQVRQMRREVAQLLEANQDMTARIRVEHVIREEKFMQAYDLIEVYCELIVARLSIIDSQKACPIDLKEAIASVIFASMRCSDVTELADVRKHF

SEQ ID NO: 76088 - protein, 67 aa, Setaria italica
  Transcript Sequence Number=SeqID_10114
  Pfam annotation: Domain name=DUF584; Domain location=1-67; Score= -54.1; E_value=0.012; Accession=PF04520.5; Description=Protein of unknown function, DUF584
EFDDDDDDFRRGDATMQPPHEMVARASAGGAGPTAPFSMLEGAGRTLKGRDLRRVRDAVLRQTGFLD

SEQ ID NO: 76089 - protein, 107 aa, Setaria italica
  Transcript Sequence Number=SeqID_10115
  Gene Ontology: Mol. function=prephenate dehydratase activity; Biological process=L-phenylalanine biosynthetic process
  Homolog annotation: Hit_ID=A8CF65; Match level="QueryCoverage=93%, HitCoverage=27%, E-value=6e-50, Identity=94%"; Hit description =Arogenate dehydratase mutant
  Pfam annotation: Domain name=ACT; Domain location=9-89; Score=28.4; E_ value=3e-05; Accession=PF01842.17; Description=ACT domain
MIQIGDLQTSIVFSLEEGPGQLFKALAVFALRKINLTKMESRPHKKRPLRVADDNCSAPLKHFDYLFYVDIEASMADPNAQNALGNLKEFATFLRVLGSYPTDVSEA

SEQ ID NO: 76090 - protein, 357 aa, Setaria italica
  misc_feature (242)..(242): Xaa can be any naturally occurring amino acid
  Transcript Sequence Number=SeqID_10116
  Gene Ontology: Mol. function=prephenate dehydratase activity; Biological process=L-phenylalanine biosynthetic process
  Homolog annotation: Hit_ID=A8CF65; Match level="QueryCoverage=81%, HitCoverage=81%, E-value=1e-158, Identity=92%"; Hit description =Arogenate dehydratase mutant
  Pfam annotation: Domain name=ACT; Domain location=266-346; Score =27.4; E_value=5.9e-05; Accession=PF01842.17; Description=ACT domain
  Pfam annotation: Domain name=PDT; Domain location=81-256; Score =244.6; E_value=2.4e-70; Accession=PF00800.10; Description=Prephenate dehydratase
  Pfam module annotation: Pfam domain module=ACT::PDT; Domain location =266-346::81-256
  Subcellular localization annotation: CTP_CleavageSite=44; ConfidenceScore=5.38e-01
DRSTGWWPRRPHPRSPPPGWEGGARRQPPRTLSMPLRASRRSISASATGDLPVPAARDPISLPRPLTTADLMEPTGDGLKVAYQGCPGAYSEAAARKAYPSCHTVPCEYFETAFQAVEGCVADRAVLPLENSLGGSIHRNYDLLLRHRLHIVGEVRLAVHHCLLANPGVKIQNLRSAMSHPQALAQCEQTLTKLGIEHREAVDDTAGAAKLIAEQKLQDTGAVASSLAAELYGLNILAENIXDNVTRFMMLAREPIIPRTDKPFKTSIVFSLEEGPGQLFKALAVFALRKINLTKMESRPHKKRPLRVADDNCSAPLKHFDYLFYVDIEASMADPNAQNALGNLKVLLYQFLVMALW

SEQ ID NO: 76091 - protein, 83 aa, Setaria italica
  Transcript Sequence Number=SeqID_10117
  Subcellular localization annotation: CTP_CleavageSite=25; ConfidenceScore=5.05e-01
LPRLYLFLRRPCHRPPPCRGLMLLLAATARRRRSGQWVLSRPSPSPPWTPGCSCTLELAAHSKLILPAVHTRLYTSSLLAPPP

SEQ ID NO: 76092 - protein, 195 aa, Setaria italica
  misc_feature (110)..(110): Xaa can be any naturally occurring amino acid
  Transcript Sequence Number=SeqID_10118
  Gene Ontology: Mol. function=transposase activity; Biological process= transposition, DNA-mediated
  Homolog annotation: Hit_ID=Q7EZN4; Match level="QueryCoverage=74%, HitCoverage=50%, E-value=5e-39, Identity=53%"; Hit description =OJ1005_B10.22 protein
  Pfam annotation: Domain name=Plant_tran; Domain location=55-143; Score=-53.6; E_value=0.077; Accession=PF04827.6; Description=Plant transposon protein
NKAFEGTACCAPDMQFAYALAGWEGSAADARVLRDALARPNGLKVPRGCYYLVDAGYKNCDGFLAPYRGQHYHLKEWSNPPTKKEELFNMRHSSARNVIERTFGLLKLRXWGIIRNGSYYPIDTQNGIILACCYLHNLIRQQMSSDPFEAQVDAFLEHEGSTAGVIDRTESSTEWTEFREGVASKMWDAWKAKHR

SEQ ID NO: 76093 - protein, 358 aa, Setaria italica
  Transcript Sequence Number=SeqID_10119
  Gene Ontology: Cellular component=chloroplast
  Homolog annotation: Hit_ID=B9T1W6; Match level="QueryCoverage=78%, HitCoverage=77%, E-value=1e-100, Identity=68%"; Hit description=Sec -independent protein translocase protein tatC, putative
  Pfam annotation: Domain name=TatC; Domain location=140-341; Score =300.4; E_value=4e-87; Accession=PF00902.10; Description=Sec -independent protein translocase protein (TatC)
  Subcellular localization annotation: CTP_CleavageSite=55; ConfidenceScore=5.59e-01
MGSAGTPLSHPRPHLHSGGVYISQSRTLPRARNLPLLSLPAAAPGPQRGRRRCLRCAAVNGDGRPREEGPPPPREEYPSSGLGAALEDPASGPPVENGSFGGLSQEEDQSALYNFLYPSKELLPDDKEMSIFDHLEELRERIFISVLAVGAAILGCFAFSKDLILLLEAPVTVQGVRFLQLSPGEFFFTTLKVSGYCGLLLGSPIILYEIIAFVLPGLTRDERKFLGPIVLGSSVLFYLGIFFSYTVLSPAALNFFVNYADGAVESLWSIDQYFEFVLVLMFSTGLSFQVPVIQLLLGQVGLVSGDQMLSIWRYVVVGAVVAAAVLTPSTDPLTQMLLAGPLLGLYLGGAWMVKLIGR

SEQ ID NO: 76094 - protein, 107 aa, Setaria italica
  misc_feature (88)..(88): Xaa can be any naturally occurring amino acid
  Transcript Sequence Number=SeqID_10120
  Gene Ontology: Mol. function=protein tyrosine phosphatase activity; Biological process=protein amino acid dephosphorylation
  Homolog annotation: Hit_ID=Q5RIN6; Match level="QueryCoverage=96%, HitCoverage=79%, E-value=1e-21, Identity=48%"; Hit description=Novel protein
  Pfam annotation: Domain name=PTH2; Domain location=9-106; Score= -55.7; E_value=0.012; Accession=PF01981.8; Description=Peptidyl-tRNA hydrolase PTH2
PRTDAWPMGSVVAQGCHAAVAAVWAHRDHPDTAAYCAPDNLDRMHKVTLEVKGETQLKNLAEKLQAAGVRHKLWIEQPENIPTCIATXAPCPKSQISSFFKKLKLCK

SEQ ID NO: 76095 - protein, 135 aa, Setaria italica
  misc_feature (19)..(19): Xaa can be any naturally occurring amino acid
  Transcript Sequence Number=SeqID_10121
  Homolog annotation: Hit_ID=Q4JF22; Match level="QueryCoverage=82%, HitCoverage=9%, E-value=8e-44, Identity=79%"; Hit description =OSJNBa0029H02.30 protein
IARLFGTLGYKRKAAFFSXRQVAQLYLQQDNAYAAMSAMQVLTMTTNAYHVQSRKASKINHDSSKEPHASSTDSGKVHPQSIVSLFESQWSTIQMVVLREILMSSIRAADPLSSWSAAARLLRSFYPLITPAGQS

SEQ ID NO: 76096 - protein, 132 aa, Setaria italica
  misc_feature (94)..(94): Xaa can be any naturally occurring amino acid
  Transcript Sequence Number=SeqID_10122
  Subcellular localization annotation: CTP_CleavageSite=50; ConfidenceScore=5.26e-01
GPKTDGRVDNQSPAKGRLTDLTKSSPRKTEGPPSTSGRILICRRSSSAIAAAPGKPSSAVVTVGEQTLGIDINLPTLYKATRRFPGPPPSPAPXSGRRRGKGPAESRRQGDPPPSRLFRPLATVDGEKSGGK

SEQ ID NO: 76097 - protein, 50 aa, Setaria italica
  Transcript Sequence Number=SeqID_10123
TQINYRDLILTPLFFLMLPQGHDIITQPSNQTDFHPHIVQSSFFMPALVR

SEQ ID NO: 76098 - protein, 47 aa, Setaria italica
  Transcript Sequence Number=SeqID_10124
PLTRNQLFVSFFSFIILWIQMEARVTKLKYNKQKKRHYQTTTMVNTN

SEQ ID NO: 76099 - protein, 137 aa, Setaria italica
  misc_feature (122)..(122): Xaa can be any naturally occurring amino acid
  Transcript Sequence Number=SeqID_10125
  Gene Ontology: Mol. function=transporter activity; Cellular component= membrane; Biological process=oligopeptide transport
  Homolog annotation: Hit_ID=B9RUL7; Match level="QueryCoverage=94%, HitCoverage=20%, E-value=4e-38, Identity=56%"; Hit description =Nitrate transporter, putative
VEEAVDAAMMISATVIIYVQSNLSWPIGLGIPTGLMFLACVLFFMGTKLYVRVTPEGSPFTSVVQVLAAAFKKRSLKQPKDPKQDLFNPPHTSAIVTKLAHTDQFRCLDKAAIVASTEEVRXGGAAPADPWRLCSVQ

SEQ ID NO: 76100 - protein, 154 aa, Setaria italica
  Transcript Sequence Number=SeqID_10126
  Gene Ontology: Mol. function=transporter activity; Cellular component= membrane; Biological process=oligopeptide transport
  Homolog annotation: Hit_ID=B9RUL8; Match level="QueryCoverage=91%, HitCoverage=26%, E-value=2e-45, Identity=58%"; Hit description =Nitrate transporter, putative
GRSYSLASTEEVRPGGAAPADPWRLCSVQQVEEVKCLIRIAPVWSTGIIYYVAVVQQSTYVVLSALQSDRHLGRGSFEIPAASFTVFAMLAQTLWIPLYDRILLPKLRKMTGKEEGFTLLQRQGIGIALSTVAMVISAIVEDRSVVVLFRSFFV

SEQ ID NO: 76101 - protein, 589 aa, Setaria italica
  Transcript Sequence Number=SeqID_10127
  Gene Ontology: Mol. function=transporter activity; Cellular component= membrane; Biological process=oligopeptide transport
  Homolog annotation: Hit_ID=B9RUL7; Match level="QueryCoverage=95%, HitCoverage=89%, E-value=0.0, Identity=56%"; Hit description=Nitrate transporter, putative
  Pfam annotation: Domain name=MFS_1; Domain location=49-535; Score =8.4; E_value=0.015; Accession=PF07690.8; Description=Major Facilitator Superfamily
  Pfam annotation: Domain name=PTR2; Domain location=111-523; Score =279.4; E_value=8e-81; Accession=PF00854.13; Description=POT family
  Pfam module annotation: Pfam domain module=MFS_1::PTR2; Domain location=49-535::111-523
MRGGGGGREDDEVSRKLKSMEVDKMGDGDGEDSPRPAVKYYGWKAMPFIIGNETFEKLGTLGTSANLLVYLTQVFHMRSVDAATLLNGLNGTTSLAPIIGAFLSDAYLGRYLALAIASIASLIGMFFLTLTAAADSLHPPECGVGETCEKATSYQFAVLFIAFAFLVLGSAGIRPCSMPFGADQFDPNTESGKRGINSFFNWYYFTFTAAMMISATVIIYVQSNLSWPIGLGIPTGLMFLACVLFFMGTKLYVRVTPEGSPFTSVVQVLAAAFKKRSLKQPKDPKQDLFNPPHTSAIVTKLAHTDQFRCLDKAAIVASTEEVRPGGAAPADPWRLCSVQQVEEVKCLIRIAPVWSTGIIYYVAVVQQSTYVVLSALQSDRHLGRGSFEIPAASFTVFAMLAQTLWIPLYDRILLPKLRKMTGKEEGFTLLQRQGIGIALSTVAMVISAIVEDRRRAIALSQPTLGKTMMGGDISAMSSLWMVPQLMILGLSEAFNLISQIEFYYKEIPEHMRSVAGALAFCNLALGNYLSGFLVTIVHRTTGSGRNWLAQDLNKGRLDLFYWTIAGIGVFNLIYFLICARWYRFKGASN

SEQ ID NO: 76102 - protein, 207 aa, Setaria italica
  Transcript Sequence Number=SeqID_10128
  Gene Ontology: Mol. function=transferase activity, transferring glycosyl groups; Cellular component=integral to membrane; Biological process=protein amino acid glycosylation
  Homolog annotation: Hit_ID=B9RJC3; Match level="QueryCoverage=98%, HitCoverage=51%, E-value=1e-105, Identity=83%"; Hit description=Beta- 1,3-galactosyltransferase sqv-2, putative
  Pfam annotation: Domain name=Galactosyl_T; Domain location=1-150; Score=111.5; E_value=2.9e-30; Accession=PF01762.13; Description =Galactosyltransferase
DEIHHDFLRLDHVEGYHKLSAKTKIFFSTAVALWDADFYVKVDDDVHLNIGMLVATLGRHKLKPRVYIGCMKSGPVLSDKNAKYHEPEFWKFGEDGNKYFRHATGQIYAISKDLATYISINQPILHKYANEDVSLGAWFIGLDVEHIDDRDMCCGTPPDCEWKAQAGSVCVASFDWKCSGVCNPVERLKYVHSRCSEGEDAIWSTSF

SEQ ID NO: 76103 - protein, 391 aa, Setaria italica
  Transcript Sequence Number=SeqID_10129
  Gene Ontology: Mol. function=protein dimerization activity; Cellular component=nucleus; Biological process=regulation of transcription, DNA-dependent
  Homolog annotation: Hit_ID=B6SXT0; Match level="QueryCoverage=99%, HitCoverage=60%, E-value=1e-168, Identity=76%"; Hit description=DNA binding protein
PGIHFPWVPGYAMRPHGSHVPLVPIPRLKPQQAAAAAKVSKKPEVKKTVENKSKTKTKKVASVSLLGLLFVALIFGAFVPGFNHNFGMSGRRDDVMFGNFGHSDARVFSVTNHGKGPKGGLNSSDMTDTDPGMMTGNSDGAGPKHRPAHNSSEILPALLYVPRNGKHVKINGNLIIHSVLASEKAVAHRASNGQSVKDHKETSVAIARYLSPSGKDENSKGTFPPDAALPQWFREGMEGPILNSGMCSEVFQFDISAASAKSGGIIPASPTVNSSSVNATQKIPKSGGKLKNRRIMYNEAIPLTGKTVNSTEPRTFNSTSESSKVPDSKPASSVVVSVLADPREAGNGDGDPRVSPKPLSRIFVVVLLDGVRYVTYSCTLPFKSASPHLVN

SEQ ID NO: 76104 - protein, 99 aa, Setaria italica
  Transcript Sequence Number=SeqID_10130
TSDIAIFACARISLASNCYITLRGHWAVFKNSGYLPYSREAYWRVEILALVNWQTFVILLTFVAQKAFNACSDMKHVVYFPPFMISYFIHKTICSQCPV

SEQ ID NO: 76105 - protein, 66 aa, Setaria italica
  Transcript Sequence Number=SeqID_10131
  Gene Ontology: Mol. function=serine-type endopeptidase activity; Cellular component=plasma membrane; Biological process=protein modification process
  Homolog annotation: Hit_ID=Q0WRN6; Match level="QueryCoverage=95%, HitCoverage=95%, E-value=5e-19, Identity=76%"; Hit description =Polyubiquitin 4 UBQ4
  Pfam annotation: Domain name=ubiquitin; Domain location=8-65; Score =58.0; E_value=3.6e-14; Accession=PF00240.15; Description=Ubiquitin family
RIAEACGKNDLGRVVCSEQHDNVKAKIQDKEGIPPDQQRLIFAGKQLEDGRTLADYNIQKESTLIW

SEQ ID NO: 76106 - protein, 99 aa, Setaria italica
  Transcript Sequence Number=SeqID_10132
  Gene Ontology: Mol. function=aspartic-type endopeptidase activity
LSLPSQLAAQRGFGGRFALCLPAFAAFGDTPVYLGTESRGLVEYTGSIPYALLLANPRNPSGYYIPVKGISVSWHGVDVAASLPNGALDLDGRTGRGGV

SEQ ID NO: 76107 - protein, 88 aa, Setaria italica
  Transcript Sequence Number=SeqID_10133
NPGGSRGFVTVSFATSIFGCPAQTAWVKSNHELIYFVSLILDGDNRRHRRRGARRRTRTQKAQSLQLELVEWLIEEEARFHCRAAAGE

SEQ ID NO: 76108 - protein, 86 aa, Setaria italica
  Transcript Sequence Number=SeqID_10134
QAQIDLKRRNEQIEPRKRTRSTRNTTKPPKKIQRTGTKPQRKKADRSSTAKLTSCETQQINRSSNKSLKTTDQSQLQNNRSEAGRK

SEQ ID NO: 76109 - protein, 68 aa, Setaria italica
  Transcript Sequence Number=SeqID_10135
STYTHIIETLYCTNDWKHEVLAFLEDLIVVLVWIGLSSNMAACFASQKHLQTEKIGPILFQNDFSSNF

SEQ ID NO: 76110 - protein, 148 aa, Setaria italica
  Transcript Sequence Number=SeqID_10136
GGVVLPLHTLQAAAPDGNVAAAEGDAEGAEANAKDADFKDAADSSEVPVPEAGAEGEEAAQPLAESGIAPTPDLPAVTFKWKDIFKAGGGEAKDRKKVERRVSSVSGNAELININIWPFSRSRSAGHSAGGAAAAGSLSRAKPNQNAN

SEQ ID NO: 76111 - protein, 104 aa, Setaria italica
  misc_feature (101)..(101): Xaa can be any naturally occurring amino acid
  Transcript Sequence Number=SeqID_10137
  Gene Ontology: Mol. function=hydrolase activity, acting on acid anhydrides, catalyzing transmembrane movement of substances; Cellular component=integral to membrane; Biological process=copper ion transport
  Homolog annotation: Hit_ID=Q6ZDR8; Match level="QueryCoverage=95%, HitCoverage=10%, E-value=2e-35, Identity=74%"; Hit description =Putative potential copper-transporting ATPase
MLREDSVVFDKTGTLTIGRPVVTKVITSRGRGDANTKDFGDNQWTEAEILSFAAGVESNTNHPLGKAIMEAAGAANCISMKANDGSFMEEPGSGAVATIGXNRF

SEQ ID NO: 76112 - protein, 341 aa, Setaria italica
  misc_feature (209)..(209): Xaa can be any naturally occurring amino acid
  Transcript Sequence Number=SeqID_10138
  Gene Ontology: Mol. function=binding
  Homolog annotation: Hit_ID=Q10D20; Match level="QueryCoverage=99%, HitCoverage=9%, E-value=1e-147, Identity=77%"; Hit description=WD-40 repeat family protein, putative, expressed
VFGKPVYPRVPEVRMLDDYALMPSDGNYGELKFVDLLDTIIAMAKATFDSLIMKSMLAHQNSNLSHLSGTLVADLDEATSDMGGDLQGEALMHKTYAARLMGGEAAAPAVATSILRFMVDLAKMCAPFSAVCRRHDFLESCVDLYFSCVRSDCALRMAKDLTTAATDEKNVHDNDNGSSKDTFSSLPHDQEQSANTMSVTSFPQEPKSXSSESTGVPNAFETAEVKADDSSNREQELSTKVLNGQANQMFNNAHDQGRITAPSANGIAESHQVTDSPNSVSMNNVGSPVLSERSTHRAASTPSASPMAPFTSWPGSAGSYSDGRHLTASPSMASSIPDIDE

SEQ ID NO: 76113 - protein, 233 aa, Setaria italica
  Transcript Sequence Number=SeqID_10139
  Gene Ontology: Mol. function=calcium ion binding; Cellular component =flagellin-based flagellum; Biological process=ciliary or flagellar motility
  Homolog annotation: Hit_ID=Q5SND2; Match level="QueryCoverage=98%, HitCoverage=94%, E-value=6e-56, Identity=61%"; Hit description =Probable calcium-binding protein CML30
  Pfam annotation: Domain name=efhand; Domain location=159-187; Score =32.8; E_value=1.4e-06; Accession=PF00036.24; Description=EF hand
  Pfam annotation: Domain name=efhand; Domain location=203-231; Score =39.6; E_value=1.3e-08; Accession=PF00036.24; Description=EF hand
  Pfam annotation: Domain name=efhand; Domain location=59-87; Score =23.0; E_value=0.0013; Accession=PF00036.24; Description=EF hand
  Pfam annotation: Domain name=efhand; Domain location=95-123; Score =17.5; E_value=0.055; Accession=PF00036.24; Description=EF hand
  Pfam module annotation: Pfam domain module=efhand::efhand::efhand::efh and; Domain location=159-187::203-231::59-87::95-123
LGGLCALFSLTTSSRSTAAKKCVGDVKCGDAGKGSASEGEEEEAARRRKQARGPDPEADLGIVFSTFDHDGDGFITAVELEESLRRLGIAVSADEGAAMVARVDANSDGLIDIHEFRELYDSIPKKRKHQHPAAAEAREVPVEDEEEEAEEEEEEEERDLREAFDVFDGNKDGLISAEELGTVLGSLGLRRAGAGAGRPAVAECRDMIRLVDSDGDGMVSFEEFKRMMTVVKA

SEQ ID NO: 76114 - protein, 444 aa, Setaria italica
  Transcript Sequence Number=SeqID_10140
  Gene Ontology: Mol. function=N-acetyltransferase activity; Biological process=metabolic process
  Homolog annotation: Hit_ID=Q6ZA58; Match level="QueryCoverage=99%, HitCoverage=31%, E-value=2e-55, Identity=38%"; Hit description=PHD finger transcription factor-like
LETKHSCPSVFGFKPVEPSKNKKIKSVNLLIINGTGLLEKRLLPTGKVDGQTTAKPANAVGSDKTDAKVFGEASGSATPVHVSREFDVANDLEIKCHESPRSLNGNSACLTSDQPPAAEENDVKRTLERTSPVSVGDDELHTLPGVNCGDNMQLKAEADNTQEEKCREINGKLITENTVAEQKCEDKPNSCHSNSREVGTMDPCSCLSNEVGKIENRPSSELFVGAAPIAGKTESNLTSDSPSIHCANQEHEKSGAAPVDTNTPLVIMDEKPDSHELKTVVADGSIQSSMEAKSLEDRTNIVNGTSKDSYIDKDTSEDHRASAVDSGVSVKGSIKQTEIIKDKVGSLLPGLKHPSCKDILEKLTESKSFTSDMVETGGVAMKVGMTVESCNEAGKSAPMLDISNAVCKVVVKPTQTCGEGQLCGEDAICSNRESDLASREPVNA

SEQ ID NO: 76115 - protein, 96 aa, Setaria italica
  Transcript Sequence Number=SeqID_10141
THTNHANQIHPQKPLKIPTRNPQIHPPGEPPKQMPLPPWHYHNHYNTATTTNKTLTTTVLLDPTKTRARGRGGRRRLSGGGRRRGARPGRQRRAAP

SEQ ID NO: 76116 - protein, 65 aa, Setaria italica
  misc_feature (58)..(58): Xaa can be any naturally occurring amino acid
  Transcript Sequence Number=SeqID_10142
  Homolog annotation: Hit_ID=Q9M1U9; Match level="QueryCoverage=86%, HitCoverage=12%, E-value=3e-17, Identity=73%"; Hit description=N -acetylglucosaminyl-phosphatidylinositol-like protein
MLGAVPHAQVLPDDMIVLAESTPEDMVRAVKKAIDMLPGINPQFMHLQMKKLYSWDDXAKRTEIA

SEQ ID NO: 76117 - protein, 73 aa, Setaria italica
  misc_feature (16)..(16): Xaa can be any naturally occurring amino acid
  misc_feature (53)..(53): Xaa can be any naturally occurring amino acid
  Transcript Sequence Number=SeqID_10143
  Gene Ontology: Mol. function=transferase activity; Biological process= GPI anchor biosynthetic process
  Homolog annotation: Hit_ID=B9STX3; Match level="QueryCoverage=100%, HitCoverage=22%, E-value=3e-29, Identity=64%"; Hit description =Glycosyltransferase, putative
  Pfam annotation: Domain name=PIGA; Domain location=1-59; Score=72.8; E_value=1.3e-18; Accession=PF08288.4; Description=PIGA (GPI anchor biosynthesis)
PWRPFLMQNTLPTLFXTLPIVRTIIIREKISVVHGHQAFSTLCHEALMHARTXGFTLADIDQAICVSHTSKEN

SEQ ID NO: 76118 - protein, 79 aa, Setaria italica
  misc_feature (20)..(20): Xaa can be any naturally occurring amino acid
  misc_feature (52)..(52): Xaa can be any naturally occurring amino acid
  Transcript Sequence Number=SeqID_10144
  Gene Ontology: Mol. function=phosphatidylinositol N-acetylglucosaminyl transferase activity; Biological process=GPI anchor biosynthetic process
  Homolog annotation: Hit_ID=B9STX3; Match level="QueryCoverage=100%, HitCoverage=19%, E-value=1e-23, Identity=65%"; Hit description =Glycosyltransferase, putative
EAASCGLLTVSTRVGGVPEXPAPEDMVRAVKKAIDMLPGIDPQVMHLRMKKXLYSWDDVAKRTEIVYDRAMQSSTTNLL

SEQ ID NO: 76119 - protein, 66 aa, Setaria italica
  Transcript Sequence Number=SeqID_10145
  Homolog annotation: Hit_ID=Q9M1U9; Match level="QueryCoverage=72%, HitCoverage=10%, E-value=4e-13, Identity=68%"; Hit description=N -acetylglucosaminyl-phosphatidylinositol-like protein
LLLYFSSRSKAEDMVRAVKKAIDMLPGINPQFMHLQMKKLYSWDDLAKRTEIAYDRAVQSLTVCVY

SEQ ID NO: 76120 - protein, 159 aa, Setaria italica
  misc_feature (116)..(116): Xaa can be any naturally occurring amino acid
  Transcript Sequence Number=SeqID_10146
  Gene Ontology: Mol. function=transferase activity; Cellular component= glycosylphosphatidylinositol-N-acetylglucosaminyltransferase (GPI -GnT) complex; Biological process=GPI anchor biosynthetic process
  Homolog annotation: Hit_ID=B9STX3; Match level="QueryCoverage=97%, HitCoverage=37%, E-value=8e-67, Identity=78%"; Hit description =Glycosyltransferase, putative
  Pfam annotation: Domain name=Glycos_transf_1; Domain location=35-159; Score=20.8; E_value=1.8e-05; Accession=PF00534.12; Description =Glycosyl transferases group 1
RLYVVSHTSKENTVLRSGISPEKVFMVPNAVDTAMFTPSPKRLSCDEIVIVVISRLYRKGADLLVEVIPDVCRLFPKVRFIIGGDGPKRVRLEEMREKFSLQDRVEMLGAVPHAQXLTEAFCIAILEAASCGLLTVSTRVGGVPEVLPDDMIVLAEPAP

SEQ ID NO: 76121 - protein, 112 aa, Setaria italica
  Transcript Sequence Number=SeqID_10147
QSMRFLLGGGGSGHQSTLPSSAGELEHDVERERRQLLFPFSSSDLLIFLSRLLQSSERSSVAEQRWWHRCERGSCTNPMAGRAKRGSWRATAKLARIGVAATRRRHSQQYQA

SEQ ID NO: 76122 - protein, 83 aa, Setaria italica
  misc_feature (48)..(48): Xaa can be any naturally occurring amino acid
  misc_feature (74)..(74): Xaa can be any naturally occurring amino acid
  Transcript Sequence Number=SeqID_10148
  Gene Ontology: Mol. function=transferase activity; Cellular component= glycosylphosphatidylinositol-N-acetylglucosaminyltransferase (GPI -GnT) complex; Biological process=GPI anchor biosynthetic process
  Homolog annotation: Hit_ID=B9STX3; Match level="QueryCoverage=89%, HitCoverage=19%, E-value=8e-27, Identity=73%"; Hit description =Glycosyltransferase, putative
EAIVGLVACEVRFIVGGDGPKRVRLGEMREKFSLQDRVEMLGAVPHAXSLTEAFCIAILEAASCGLLTVSASVXGVPEVLPDD

SEQ ID NO: 76123 - protein, 222 aa, Setaria italica
  misc_feature (52)..(52): Xaa can be any naturally occurring amino acid
  misc_feature (80)..(80): Xaa can be any naturally occurring amino acid
  misc_feature (200)..(200): Xaa can be any naturally occurring amino acid
  Transcript Sequence Number=SeqID_10149
  Gene Ontology: Mol. function=transferase activity; Cellular component= glycosylphosphatidylinositol-N-acetylglucosaminyltransferase (GPI -GnT) complex; Biological process=GPI anchor biosynthetic process
  Homolog annotation: Hit_ID=B9STX3; Match level="QueryCoverage=99%, HitCoverage=58%, E-value=8e-94, Identity=68%"; Hit description =Glycosyltransferase, putative
  Pfam annotation: Domain name=Glycos_transf_1; Domain location=92-220; Score=23.8; E_value=1.1e-05; Accession=PF00534.12; Description =Glycosyl transferases group 1
  Pfam annotation: Domain name=PIGA; Domain location=1-53; Score=39.3; E_value=7.3e-10; Accession=PF08288.4; Description=PIGA (GPI anchor biosynthesis)
  Pfam module annotation: Pfam domain module=Glycos_transf_1::PIGA; Domain location=92-220::1-53
WRPFLMQNTLPTLFLTFPVVRTIIIRERISVMHGHQAFSTLCHEALMNARMXDIDQAICVSHTSKENTVLRSGISPEKVXFMVPNAVDTAMFTPSPERLGCDEIVIVVISRLVYRKGADLLVEVIPEVCRLFPKVRFIVGGDGPKRVRLGEMREKFSLQDRVEMLGAVPHAQVRSLTEAFCIAILEAASCGLLTVSASVXGVPEVLPDDMIVLAESTPEDMG

SEQ ID NO: 76124 - protein, 306 aa, Setaria italica
  Transcript Sequence Number=SeqID_10150
  Gene Ontology: Mol. function=transferase activity; Cellular component= glycosylphosphatidylinositol-N-acetylglucosaminyltransferase (GPI -GnT) complex; Biological process=GPI anchor biosynthetic process
  Homolog annotation: Hit_ID=B9STX3; Match level="QueryCoverage=96%, HitCoverage=65%, E-value=1e-127, Identity=76%"; Hit description =Glycosyltransferase, putative
  Pfam annotation: Domain name=Glycos_transf_1; Domain location=45-213; Score=100.5; E_value=5.8e-27; Accession=PF00534.12; Description =Glycosyl transferases group 1
NNGFTLADIDQAICVSHTSKENTVLRSGISPEKVFMVPNAVDTAMFTPSPKRLSCDEIVIVVISRLVYRKGADLLVEVIPDVCRLFPKVRFIIGGDGPKRVRLEEMREKFSLQDRVEMLGAVPHAQVRSVLISGHIFLNSSLTEAFCIAILEAASCGLLTVSTRVGGVPEVLPDDMIVLAEPAPEDMVRAVKKAIDMLPGIDPQVMHLRMKKLYSWDDVAKRTEIVYDRAMQSSTTNLLDRLPRYLTCGSWAGKLFCIVMIINYLLWRLLEFLQPAEGIEEVPDIRPLHSQLDSRDDSCEAQEKQI

SEQ ID NO: 76125 - protein, 175 aa, Setaria italica
  Transcript Sequence Number=SeqID_10151
  Subcellular localization annotation: CTP_CleavageSite=72; ConfidenceScore=5.78e-01
QSMRFLLGGGGSGHQSTLPSSRAPPVSLSMTLRGKGGSFSSPSLLLIFSSFSLGFSNPASVAVWLSNGGGTAASAAPTQIQWRAERSAAAGELRRSSHASALRPRGVVTRSNTRLNRARPVERPACLAQFSGSGRRTVSQATSPTMASHFTTGENFLLKDNDYLLPNPVALVKFH

SEQ ID NO: 76126 - protein, 364 aa, Setaria italica
  misc_feature (19)..(19): Xaa can be any naturally occurring amino acid
  misc_feature (236)..(236): Xaa can be any naturally occurring amino acid
  misc_feature (261)..(261): Xaa can be any naturally occurring amino acid
  misc_feature (307)..(307): Xaa can be any naturally occurring amino acid
  Transcript Sequence Number=SeqID_10152
  Gene Ontology: Mol. function=transferase activity; Cellular component= glycosylphosphatidylinositol-N-acetylglucosaminyltransferase (GPI -GnT) complex; Biological process=GPI anchor biosynthetic process
  Homolog annotation: Hit_ID=B9STX3; Match level="QueryCoverage=91%, HitCoverage=78%, E-value=1e-147, Identity=74%"; Hit description =Glycosyltransferase, putative
  Pfam annotation: Domain name=Glycos_transf_1; Domain location=155 -307; Score=61.8; E_value=2.6e-15; Accession=PF00534.12; Description =Glycosyl transferases group 1
  Pfam annotation: Domain name=PIGA; Domain location=16-105; Score =227.0; E_value=4.7e-65; Accession=PF08288.4; Description=PIGA (GPI anchor biosynthesis)
  Pfam module annotation: Pfam domain module=Glycos_transf_1::PIGA; Domain location=155-307::16-105
EAIVGLVACEVVVMTHAYXNRSGVRYVTNGLKVYYVPWRPFLMQNTLPTLFLTFPVVRTIIIRERISVMHGHQAFSTLCHEALMNARMMGYKVVFTDHSLYGFADAGSIHIQFTLPDIDQAICVSHTSKENTVLRSGISPEKVFMVPNAVDTAMFTPSPERLGCDEIVIVVISRLVYRKGADLLVEVIPEVCRLFPKVRFIVGGDGPKRVRLGEMREKFSLQDRVEMLGAVPHAQXLTEAFCIAILEAASCGLLTVSASVXGVPEVLPDDMIVLAESTPEDMVRAVKKAIDMLPGINPQFMHLQMKXLYSWDDLAKRTEIAYDRAVQSLTTNLLDRLPRLQSWYVLHLQDPYDVILLRNFFQCF

SEQ ID NO: 76127 - protein, 464 aa, Setaria italica
  misc_feature (17)..(17): Xaa can be any naturally occurring amino acid
  misc_feature (73)..(73): Xaa can be any naturally occurring amino acid
  misc_feature (108)..(108): Xaa can be any naturally occurring amino acid
  misc_feature (123)..(123): Xaa can be any naturally occurring amino acid
  Transcript Sequence Number=SeqID_10153
  Gene Ontology: Mol. function=oxidoreductase activity, acting on the CH-OH group of donors, NAD or NADP as acceptor; Cellular component =chloroplast; Biological process=malate metabolic process
  Homolog annotation: Hit_ID=P43279; Match level="QueryCoverage=69%, HitCoverage=50%, E-value=1e-163, Identity=86%"; Hit description=NADP- dependent malic enzyme, chloroplastic
  Pfam annotation: Domain name=Malic_M; Domain location=359-463; Score=- 140.3; E_value=0.012; Accession=PF03949.7; Description=Malic enzyme, NAD binding domain
  Pfam annotation: Domain name=malic; Domain location=168-357; Score =404.8; E_value=1.4e-118; Accession=PF00390.11; Description=Malic enzyme, N-terminal domain
  Pfam module annotation: Pfam domain module=Malic_M::malic; Domain location=359-463::168-357
  Subcellular localization annotation: CTP_CleavageSite=58; ConfidenceScore=5.53e-01
MLSARTAVASAASPASXPWKAVGGSKGGSCDGCRTYRESVRRRAATVRVHAAEQRRVQAVAVGTAAETQEGVXAAADGGVVDPYAEDEELPVMPWAYSVASGYTLLRXDPHHNKGLAFTEKEXRDAHYLRGLLPPAVVSQEVQIKKFMHNLRQYQLPLQRYMAMMDLQERNERLFYRLLIDNVEELLPFVYTPTVGEACQKYGSIFRQPQGLYVSLRDKGRVLEVLRNWPQRDIQVICVTDGGRILGLGDLGAQGMGIPVGKLALYTALGGVRPSACLPITIDVGTNNEKLLNDEFYIGLRQKRATGKEYHELIEEFMSAVVQIYGEKVLIQFEDFANHNDFDLLEKYSKSHLVFNDDIQGTAPVVLAGLLASLKVVGGTLAEHTYLFLGAGEAGTGIAELIALQISKQVKVKKFMVDVRSINSLDTCPSHELSQDNNLNETSQARQDLAEGSHCLSKGSSHQW

SEQ ID NO: 76128 - protein, 69 aa, Setaria italica
  Transcript Sequence Number=SeqID_10154
  Gene Ontology: Mol. function=structural constituent of ribosome; Cellular component=ribonucleoprotein complex; Biological process =translation
  Homolog annotation: Hit_ID=Q8GVY2; Match level="QueryCoverage=100%, HitCoverage=100%, E-value=6e-31, Identity=94%"; Hit description=60S ribosomal protein L38, putative, expressed
  Pfam annotation: Domain name=Ribosomal_L38e; Domain location=2-69; Score=170.1; E_value=6.7e-48; Accession=PF01781.10; Description =Ribosomal L38e protein family
MPKQIHEIKDFLLTARRKDARSVRIKRSKDAVKFKVRCSKYLYTLCVFDTEKANKLKQSLPPGLSVQEV

SEQ ID NO: 76129 - protein, 172 aa, Setaria italica
  Transcript Sequence Number=SeqID_10155
  Gene Ontology: Mol. function=protein serine/threonine kinase activity; Cellular component=plasma membrane; Biological process =protein amino acid phosphorylation
  Homolog annotation: Hit_ID=B9SRU2; Match level="QueryCoverage=94%, HitCoverage=18%, E-value=2e-29, Identity=47%"; Hit description =Kinase, putative
MAHLIRCLTLLCILSLAVAADNTTIGSGQIRLDCGASSPTAPDANERTWDSDTGSKFAPLLKGTAATASYQDPALPSTTPYMTARIFTSNYTYSFPVGPGRMFVRLYLYPSTYGNHAPANAYFGVTAANLTLLDNFNSSQTALATNSASFVLEYSVNVSASKLDLTFSPIHH

SEQ ID NO: 76130 - protein, 185 aa, Setaria italica
  misc_feature (44)..(44): Xaa can be any naturally occurring amino acid
  Transcript Sequence Number=SeqID_10156
  Gene Ontology: Mol. function=nucleoside-triphosphatase activity; Cellular component=mitochondrion; Biological process=DNA metabolic process
  Homolog annotation: Hit_ID=Q7F1X7; Match level="QueryCoverage=96%, HitCoverage=52%, E-value=2e-64, Identity=68%"; Hit description =Putative RecA protein
  Pfam annotation: Domain name=MipZ; Domain location=42-181; Score= -183.2; E_value=0.1; Accession=PF09140.3; Description=ATPase MipZ
  Pfam annotation: Domain name=RecA; Domain location=2-185; Score =158.6; E_value=1.9e-44; Accession=PF00154.13; Description=recA bacterial DNA recombination protein
  Pfam module annotation: Pfam domain module=MipZ::RecA; Domain location=42-181::2-185
NHAYSRKGIPVISTGSFTLDTALGIGGTSKGKVVEIYGPEASGXTTLALHVIAEAQKTGGNCAFIDAEHALDPALAESIGVKAEHMLLSQPDCGEQALGLADILIRSGSIDVVVVDSVAALVPKTELDGEMGDAHVALQARLMSQALRKLSHSLSRSRTILLFINQVRSKLSTFSGFGVPAEVTC

SEQ ID NO: 76131 - protein, 91 aa, Setaria italica
  Transcript Sequence Number=SeqID_10157
  Gene Ontology: Mol. function=phosphatidylinositol phosphate kinase activity; Biological process=phosphatidylinositol metabolic process
  Homolog annotation: Hit_ID=Q652R9; Match level="QueryCoverage=95%, HitCoverage=5%, E-value=2e-25, Identity=62%"; Hit description=Finger- containing phosphoinositide kinase-like
SGFPVAFFSGSGAFMGVPVAHKSDSWSAELAMADCGGLGVRPINGGRGGAVEQRESGENGPPVSPPERVFTPPVPRMAAWRRMSSPGPLRC

SEQ ID NO: 76132 - protein, 108 aa, Setaria italica
  Transcript Sequence Number=SeqID_10158
HGCESNCDLHIGSCDVLMCVHMLKVSIYSLKSYSMRLVSAYVLTSIKTYSLLPLFALSGLILGICHFVIWIGDFIRTWLFVNVVEKQLVIFVLWYNIATSKLVWMCVE

SEQ ID NO: 76133 - protein, 71 aa, Setaria italica
  Transcript Sequence Number=SeqID_10159
FSSNLLIMIFKVVAIDLVYYLMLPILFFCYSMLHLCLTIHLFSRGVRSAYTQLLAILLLALSYCGLLEHQM

SEQ ID NO: 76134 - protein, 93 aa, Setaria italica
  misc_feature (28)..(28): Xaa can be any naturally occurring amino acid
  misc_feature (59)..(59): Xaa can be any naturally occurring amino acid
  Transcript Sequence Number=SeqID_10160
  Gene Ontology: Mol. function=protein dimerization activity; Cellular component=nucleus; Biological process=regulation of transcription, DNA-dependent
  Homolog annotation: Hit_ID=B6TT61; Match level="QueryCoverage=68%, HitCoverage=28%, E-value=2e-22, Identity=77%"; Hit description=IAA16- auxin-responsive Aux/IAA family member
GYDTLSAAVDHLFRGLLAAQTSGGSRRXITGVLNGSGEYTLVYEDEEGDQMLVGDVPWXMFIGTARRLRVLRSSDLSPSSLRAASRKRAAAEC

SEQ ID NO: 76135 - protein, 64 aa, Setaria italica
  misc_feature (36)..(64): Xaa can be any naturally occurring amino acid
  Transcript Sequence Number=SeqID_10161
SLTNEIMYASLYVLMCLCNGQSRVMNTIKTGLDFFXXXXXXXXXXXXXXXXXXXXXXXXXXXXX

SEQ ID NO: 76136 - protein, 181 aa, Setaria italica
  Transcript Sequence Number=SeqID_10162
  Gene Ontology: Mol. function=heat shock protein binding
  Homolog annotation: Hit_ID=Q5GAN9; Match level="QueryCoverage=91%, HitCoverage=38%, E-value=2e-59, Identity=73%"; Hit description=AT hook-containing MAR binding 1-like protein
  Subcellular localization annotation: CTP_CleavageSite=55; ConfidenceScore=5.41e-01
SRLVLPAAAGTSHVNRGNFQSPPKPASAGTANVDVQIVENNGRPINANSTPANVQLANKSGVRGSAAGPSRGRMKKTTARKKVGAVLKKHASSGVESGIEPSMLGSDSWNGNAGSSSGQTVGTREININEVAKPTDGATVLNFGGDEDIGFDLDVDATDAILGNLQHLPFLREYDNTRRMF

SEQ ID NO: 76137 - protein, 60 aa, Setaria italica
  Transcript Sequence Number=SeqID_10163
  Gene Ontology: Mol. function=protein binding
  Homolog annotation: Hit_ID=B6T273; Match level="QueryCoverage=53%, HitCoverage=31%, E-value=2e-11, Identity=100%"; Hit description =Enhancer of rudimentary
  Pfam annotation: Domain name=ER; Domain location=23-58; Score=-21.8; E_value=0.0031; Accession=PF01133.9; Description=Enhancer of rudimentary
MLCTLEVLAHVDVDLIDCSIQAGRHTIILMQPSQNRASRTFMDYNSINHALDGTYDLEKD

SEQ ID NO: 76138 - protein, 58 aa, Setaria italica
  Transcript Sequence Number=SeqID_10164
  Gene Ontology: Mol. function=protein binding; Cellular component =cellular_component; Biological process=cell cycle
  Homolog annotation: Hit_ID=B6T273; Match level="QueryCoverage=100%, HitCoverage=56%, E-value=3e-27, Identity=98%"; Hit description =Enhancer of rudimentary
  Pfam annotation: Domain name=ER; Domain location=3-58; Score=63.4; E _value=8.3e-16; Accession=PF01133.9; Description=Enhancer of rudimentary
MAGRHTIILMQPSQNRASRTFMDYNSINHALDGICGLYERKIRDINPMVPNITYDISD

SEQ ID NO: 76139 - protein, 515 aa, Setaria italica
  Transcript Sequence Number=SeqID_10165
  Gene Ontology: Mol. function=nucleoside-triphosphatase activity; Cellular component=mitochondrion; Biological process=protein catabolic process
  Homolog annotation: Hit_ID=Q8LQJ8; Match level="QueryCoverage=86%, HitCoverage=62%, E-value=0.0, Identity=76%"; Hit description=Cell division protease ftsH homolog 5, mitochondrial
  Pfam annotation: Domain name=AAA; Domain location=50-234; Score =320.2; E_value=4.1e-93; Accession=PF00004.21; Description=ATPase family associated with various cellular activities (AAA)
  Pfam annotation: Domain name=AAA_2; Domain location=47-176; Score= -37.7; E_value=0.0093; Accession=PF07724.6; Description=ATPase family associated with various
  Pfam annotation: Domain name=AAA_5; Domain location=50-181; Score =20.5; E_value=1.9e-05; Accession=PF07728.6; Description=ATPase family associated with various
  Pfam annotation: Domain name=Peptidase_M41; Domain location=241-440; Score=413.9; E_value=2.6e-121; Accession=PF01434.10; Description =Peptidase family M41
  Pfam module annotation: Pfam domain module=AAA::AAA_2::AAA _5::Peptidase_M41; Domain location=50-234::47-176::50-181::241-440
NEEVQPSTNSTTKFSDVKGVDEAKAELEEIVHYLRDPKRFTRLGGKLPKGVLLVGPPGTGKTMLARAIAGEAGVPFFSCSGSEFEEMFVGVGARRVRDLFNAAKKRSPCIIFIDEIDAIGGSRNPKDQQYMKMTLNQLLVELDGFKQNDGIIVIAATNFPQSLDKALVRPGRFDRHIVVPNPDVEGRRQILETHMSKVLKADDVDLMIIARGTPGFSGADLANLVNVAALKAAMDGAKAVTMQDLEFAKDRIMMGSERKSAVISQECRKMTAYHEGGHALVAIHTDGANPVHKATIVPRGMALGMVTQLPEKDQHSVSRKQMLARLDVCMGGRVAEELIFGESEVTSGASSDLRQATRLARAMVTKYGMSERVGLVSYSDDNGSMSAQTRGMIDREVKDILERAYNNAKTILTEHDKELHALANALLEHETLSGAQIKKLLAQVKNSDNKQKKVAKVPKKTPVAPPSPQSPAAAAAAAAAAAAQEAAAKAKGVAGTAAAAQEAAVNAEGVAGIGS

SEQ ID NO: 76140 - protein, 133 aa, Setaria italica
  misc_feature (107)..(107): Xaa can be any naturally occurring amino acid
  Transcript Sequence Number=SeqID_10166
  Homolog annotation: Hit_ID=A5HEG0; Match level="QueryCoverage=100%, HitCoverage=32%, E-value=2e-43, Identity=78%"; Hit description =Putative growth-regulating factor 1
  Pfam annotation: Domain name=QLQ; Domain location=59-95; Score=73.2; E_value=9.3e-19; Accession=PF08880.3; Description=QLQ
  Subcellular localization annotation: CTP_CleavageSite=36; ConfidenceScore=5.64e-01
MAMPYASLSPAGADHRSPTATASLLPFCRSTPLSVSAASGGGGLAEGAQMSARWAARPVPFTPAQYEELEQQALIYKYLVAGVPVPPDLVLPIRRGLDSLATRFYGXPTLGYGSYFGKKLDPEPGRCRRTDGK

SEQ ID NO: 76141 - protein, 49 aa, Setaria italica
  Transcript Sequence Number=SeqID_10167
  Gene Ontology: Cellular component=integral to membrane
  Homolog annotation: Hit_ID=P57758; Match level="QueryCoverage=87%, HitCoverage=15%, E-value=1e-10, Identity=69%"; Hit description =Cystinosin homolog
MMLFILQMIPVAANDVAFSLHAVALTSFTVFQVFIYERGIQKVSKVCIS

SEQ ID NO: 76142 - protein, 107 aa, Setaria italica
  misc_feature (39)..(39): Xaa can be any naturally occurring amino acid
  Transcript Sequence Number=SeqID_10168
  Gene Ontology: Cellular component=integral to membrane; Biological process=transport
  Homolog annotation: Hit_ID=B9SLS0; Match level="QueryCoverage=77%, HitCoverage=34%, E-value=1e-27, Identity=73%"; Hit description =Cystinosin, putative
  Pfam annotation: Domain name=PQ-loop; Domain location=5-49; Score =9.0; E_value=0.0052; Accession=PF04193.6; Description=PQ loop repeat
GMTAISTSQAIMNFRRKSTIGWSIGNILLDLTGGVLNFXGQMGVQSIDQHTMVNFYGNIGKTLLSLETVFFDVLFIIQHYVLYPAKKDENAHDFPVLPIDVKHVAAQ

SEQ ID NO: 76143 - protein, 275 aa, Setaria italica
  Transcript Sequence Number=SeqID_10169
  Gene Ontology: Mol. function=L-cystine transmembrane transporter activity; Cellular component=integral to membrane; Biological process=transport
  Homolog annotation: Hit_ID=P57758; Match level="QueryCoverage=97%, HitCoverage=98%, E-value=1e-100, Identity=63%"; Hit description =Cystinosin homolog
  Pfam annotation: Domain name=PQ-loop; Domain location=10-76; Score =72.5; E_value=1.6e-18; Accession=PF04193.6; Description=PQ loop repeat
  Pfam annotation: Domain name=PQ-loop; Domain location=163-215; Score =28.8; E_value=1.8e-05; Accession=PF04193.6; Description=PQ loop repeat
  Pfam module annotation: Pfam domain module=PQ-loop::PQ-loop; Domain location=10-76::163-215
MSSSWNSVGLEVLYQVLGWVAFFAWSFSFYPQALLNYKRKSVVGLNFDFLVLNLTKHSSYLIYNAAMFFSPFIQRQYHDKYSDKEMIPVAANDVAFSLHAVALTSFTVFQVFIYERGIQKVSKVCISITAIVWTAAIVCLIIAWPKSDWLWLIDVFNSIQVGMTAIKYIPQAIMNFRRKSTIGWSIGNILLDLTGGVLNFGQMGVQSIDQHTMVNFYGNIGKTLLSLETVFFDVLFIIQHYVLYPAKKDENGKAIISERVAPLIRPSDKPEEDNV

SEQ ID NO: 76144 - protein, 265 aa, Setaria italica
  Transcript Sequence Number=SeqID_10170
  Gene Ontology: Mol. function=catalytic activity; Cellular component =nucleus; Biological process=base-excision repair
  Homolog annotation: Hit_ID=B9R7V3; Match level="QueryCoverage=82%, HitCoverage=59%, E-value=4e-89, Identity=71%"; Hit description=DNA-3- methyladenine glycosylase, putative
  Pfam annotation: Domain name=HhH-GPD; Domain location=56-201; Score =90.9; E_value=4.6e-24; Accession=PF00730.17; Description=HhH-GPD superfamily base excision DNA repair protein
KPRLTFAVPGRPLSFAGEVAAAIRHLRDADPALAAVIDAHEPPVFQCPHRPFHSLVRSILYQQLAFKAAASVYSRFLSLLGGEASVTPDAVLALTPQQLRQIGVSPRKASYLHDLARKYVSGILSDSAIINMDDRSLAAMLTMVKGIGAWSVHMFMIFSLARPDVLPSADLGVRKGVQMLHGLEDVPRPSQMDKLCERWRPYRSVGAWYMWRLIESKVPQPAPAIPVGPLALPSPDGQIMLQQQQQQQQSVIQMIDPLQMLPGMG

SEQ ID NO: 76145 - protein, 214 aa, Setaria italica
  misc_feature (27)..(27): Xaa can be any naturally occurring amino acid
  Transcript Sequence Number=SeqID_10171
  Gene Ontology: Mol. function=ATPase activity, coupled to transmembrane movement of substances; Cellular component=integral to membrane; Biological process=transport
  Homolog annotation: Hit_ID=Q6Y3I1; Match level="QueryCoverage=100%, HitCoverage=14%, E-value=1e-73, Identity=72%"; Hit description =Multidrug resistance associated protein 1
AAAPYLVRSLVWVALAASLHVQPDRPXRAVAVLWWVLFSLLVTAYNAEMLISGGALDAMEVIAWPVNLLLLLCALGSVLRRSHGQCRDASDDGNGSLSEPLIGKDGKAVPTSELYRAGLFRQLAFSWLNPLLRLGRSKALDLDDIPLIAGDDTAEHASQKFAEAWSRHVNDKARSRRSVGSNSLALVLGKCFLGEILLTGFYAFLRMLSIAVAP

SEQ ID NO: 76146 - protein, 377 aa, Setaria italica
  misc_feature (17)..(17): Xaa can be any naturally occurring amino acid
  Transcript Sequence Number=SeqID_10172
  Gene Ontology: Mol. function=sequence-specific DNA binding; Cellular component=nucleus; Biological process=regulation of transcription, DNA-dependent
  Homolog annotation: Hit_ID=Q9LEE7; Match level="QueryCoverage=94%, HitCoverage=44%, E-value=1e-178, Identity=85%"; Hit description=OCL4 protein
CVHNGDEGTWSVLIPAXGFQLEALQTSSVVKCQRRPSGCIIQDMPNGYSRVVWVEHMEMVGEEKPLHQVFKDYVANGTAFGATRWVSLLQRQCERLASELAGNIADQTVIRTPEARTNMMKLSQRMITTFCANISASGSQSWTALSESTEDTIRVTTRKNTDPGQPSGVILTAVSTSWLSFSHQQVFELLADEQQRCQLEILSNGGSLHEVAHIANGSHPRNCISLLRINAASNSSQNVELLLQESSTHPDGGSLVVFATVDVDAIQVTMSGEDPSYIPLLPLGFAIFPATNPSPAATSTSSGNGESSPGNTDEPASGCLLTVGMQVLASAVPSAKLNLSSITAINSHVCNAIHQITTALKGTGASRAELAAVGGSD

SEQ ID NO: 76147 - protein, 243 aa, Setaria italica
  Transcript Sequence Number=SeqID_10173
  Homolog annotation: Hit_ID=Q8YVJ3; Match level="QueryCoverage=62%, HitCoverage=97%, E-value=1e-11, Identity=31%"; Hit description =All1984 protein
  Subcellular localization annotation: CTP_CleavageSite=18; ConfidenceScore=5.78e-01
MVAVPTAAMASSLLLRPRASFRRTLPPPPPSSRRALPATLLQAASTQQKQPGLSARSYEGERRQPAGTRLYSLAPYPLLLAALLPGAEPVTAVFAPFVELVKTLDLPGWLVHWGHPGNMAVVLFAMGGYGTYLGFRIKLSDDPEEKAKAKDLHPKLLAGMFFFFALGATGGVTALLTSDKPIFESPHAVTGVIGLALLTIQSILPKLFEGNPGLRTTHGLLGSGIMTLFLIHAAFGLQLGLSF

SEQ ID NO: 76148 - protein, 123 aa, Setaria italica
  Transcript Sequence Number=SeqID_10174
FHPSSSLVSFTRTPLSVTNRDATRTDGGAGAGAGDGDGGGAESLSGCCLPQSPAPDGDDAGSRSLQGDCRISDMGYPTPASECLGPHASSLRALVRPVWCNGSLLSSHSYRVLHSQCRVFLHL

SEQ ID NO: 76149 - protein, 107 aa, Setaria italica
  Transcript Sequence Number=SeqID_10175
  Gene Ontology: Mol. function=hydrolase activity, hydrolyzing O -glycosyl compounds; Cellular component=cytosolic ribosome; Biological process=carbohydrate metabolic process
  Homolog annotation: Hit_ID=B9SY45; Match level="QueryCoverage=100%, HitCoverage=21%, E-value=3e-40, Identity=69%"; Hit description=Beta -glucosidase, putative
VKHWITFNEPHNFAIEGYDLGIQAPGRCSILSHMFCRDGKSSTEPYIVAHNILLAHAKALHTYSYVLKNEQGGLIGIALDSKWYEPWTDVDEDTQAAARAMDFELGW

SEQ ID NO: 76150 - protein, 60 aa, Setaria italica
  Transcript Sequence Number=SeqID_10176
  Gene Ontology: Mol. function=hydrolase activity, hydrolyzing O -glycosyl compounds; Cellular component=cytosolic ribosome; Biological process=carbohydrate metabolic process
  Homolog annotation: Hit_ID=B9SY45; Match level="QueryCoverage=93%, HitCoverage=11%, E-value=5e-18, Identity=69%"; Hit description=Beta -glucosidase, putative
AYRHGKRIGETAASRWLHIVPWGMFKLMKHIKEKYGNPPVIVTENGMDDANLPFSRLEDV

SEQ ID NO: 76151 - protein, 188 aa, Setaria italica
  Transcript Sequence Number=SeqID_10177
  Gene Ontology: Mol. function=protein serine/threonine kinase activity; Cellular component=integral to membrane; Biological process=protein amino acid phosphorylation
  Homolog annotation: Hit_ID=B9ST85; Match level="QueryCoverage=100%, HitCoverage=17%, E-value=2e-79, Identity=76%"; Hit description =Serine/threonine-protein kinase bri1, putative
  Pfam annotation: Domain name=Pkinase; Domain location=1-188; Score= -30.5; E_value=1.1e-06; Accession=PF00069.17; Description=Protein kinase domain
  Pfam annotation: Domain name=Pkinase_Tyr; Domain location=8-188; Score=-75.9; E_value=1.1e-08; Accession=PF07714.9; Description =Protein tyrosine kinase
  Pfam module annotation: Pfam domain module=Pkinase::Pkinase_Tyr; Domain location=1-188::8-188
TGQGDREFTAEMETIGNNTTSQPCGPLLGYCKIGDERLLVYEYMKNGSLDVMLHEKAKIDVNLDWKARKKIAISSARGLAFLHHSCVPHIIHRDMKSSNVLLDDNLDAYVSDFGMARLVNALDSHLTVSKLLGTPGYVAPEYFQSIICTTKGDVYSYGVVLLELLSGKKPIDPTEFGDSNLVDWTKQM

SEQ ID NO: 76152 - protein, 213 aa, Setaria italica
  Transcript Sequence Number=SeqID_10178
  Gene Ontology: Mol. function=hydrolase activity, hydrolyzing O -glycosyl compounds; Cellular component=cytosolic ribosome; Biological process=carbohydrate metabolic process
  Homolog annotation: Hit_ID=B9SY45; Match level="QueryCoverage=99%, HitCoverage=42%, E-value=7e-86, Identity=66%"; Hit description=Beta -glucosidase, putative
  Pfam annotation: Domain name=Glyco_hydro_1; Domain location=1-213; Score=-210.7; E_value=4.6e-08; Accession=PF00232.10; Description =Glycosyl hydrolase family 1
SEHWITFNEPHNFAIEGYDLGIQAPGRCSILSHMFCRDGKSSTEPYIVAHNILLAHAGAFHTYKQHFKNEQGGLIGIALDSKWYEPWTDVDEDTQAAARAMDFELGWFLDPLMFGHYPPSMQKLAGDRLPQFSTQASKLVSGSLDFVGINHYTTLYVRNDRMQIRKLVMNDASTDSATIPTAYRHGKRIGETAASRWLHIVPWGMFKLMKHIK

SEQ ID NO: 76153 - protein, 403 aa, Setaria italica
  misc_feature (201)..(201): Xaa can be any naturally occurring amino acid
  Transcript Sequence Number=SeqID_10179
  Gene Ontology: Mol. function=hydrolase activity, hydrolyzing O -glycosyl compounds; Cellular component=cytosolic ribosome; Biological process=carbohydrate metabolic process
  Homolog annotation: Hit_ID=B9SY45; Match level="QueryCoverage=94%, HitCoverage=79%, E-value=1e-160, Identity=65%"; Hit description=Beta- glucosidase, putative
  Pfam annotation: Domain name=Glyco_hydro_1; Domain location=1-401; Score=421.3; E_value=1.5e-123; Accession=PF00232.10; Description =Glycosyl hydrolase family 1
MKDIGMDAYRFSISWSRIFPNGTGEPNEEGLNYYNSLIDAVLDKGMQPYVTLFHWDLPQALEDRYGGWLNSQIVDDFVHYASTCFKEFGDRVKHWITFNEPHNFAIEGYDLGIQAPGRCSILSHMFCRDGKSSTEPYIVAHNILLAHAGAFHTYKQHFKNEQGGLIGIALDSKWYEPWTDVDKDTQAAARAMDFELGFFYXKLAGDRLPQFSTQASKLVSGSLDFVGINHYTTLYVRNDRMQIRKLVMNDASTDSATIPTAYRHGKRIGETAASRWLHIVPWGMFKLMKHIKEKYGNPPVIVTENGMDDANLPFSRLEDVLQDDKRIRYHNDYMSNLLDAIRKEGCNVHGYFVWSLLDNWEWNSGYTVRFGLYYIDYNNNLTRIPKASVEWFSRFLAQETAII

SEQ ID NO: 76154 - protein, 102 aa, Setaria italica
  Transcript Sequence Number=SeqID_10180
  Homolog annotation: Hit_ID=Q6H8E0; Match level="QueryCoverage=77%, HitCoverage=22%, E-value=3e-20, Identity=64%"; Hit description=Kelch repeat-containing F-box-like
  Subcellular localization annotation: CTP_CleavageSite=22; ConfidenceScore=5.24e-01
AQAQPAAPADDAAPAAHKHSSTAASGGPANSYRMVLLDPVEGRWAPLPALPGPTESLPLFCQVAALDGGQGRKRLVVVGGWDPETWAPMDAVFVYDFLTGAW

SEQ ID NO: 76155 - protein, 46 aa, Setaria italica
  Transcript Sequence Number=SeqID_10181
FVSIYLPTVIKSSLAPWCHTRSIICVSGSSFTHTMTSANIKYSVIT

SEQ ID NO: 76156 - protein, 210 aa, Setaria italica
  Transcript Sequence Number=SeqID_10182
  Gene Ontology: Mol. function=zinc ion binding; Biological process =metabolic process
  Homolog annotation: Hit_ID=Q8H3L3; Match level="QueryCoverage=68%, HitCoverage=13%, E-value=4e-13, Identity=31%"; Hit description =Putative far-red impaired response protein
  Pfam annotation: Domain name=FAR1; Domain location=80-162; Score =79.8; E_value=9.6e-21; Accession=PF03101.7; Description=FAR1 family
  Pfam annotation: Domain name=MuDR; Domain location=64-159; Score= -16.4; E_value=0.074; Accession=PF03108.7; Description=MuDR family transposase
  Pfam module annotation: Pfam domain module=FAR1::MuDR; Domain location=80-162::64-159
MVAEEGPEAAVTSAQDPEQDGGDHVSNDEENDDFKGCQKDRTEAEVDGDEDYFFPSVEDVEKARPPEVGMVFPTLQDAHRFLNVYGLLTGFVVKKGCNYKHKKITFVCNKSSKMKVTETGQKKRRSNAIEKTGCRMKVLVKLVEGRWEIKTVVNEHNHPLMSSPSLSTFFISHKYMSEEERIFSRILQESKIKPSQIMEIFKKLRSRLKH

SEQ ID NO: 76157 - protein, 86 aa, Setaria italica
  misc_feature (1)..(11): Xaa can be any naturally occurring amino acid
  Transcript Sequence Number=SeqID_10183
XXXXXXXXXXXVNATTDSSITSQSKLRALSLRTHCNLQHTHTAHIHPCSIHLLAYTREKPLMTPFARQPSTFFPAAAGARRRRRWR

SEQ ID NO: 76158 - protein, 96 aa, Setaria italica
  Transcript Sequence Number=SeqID_10184
AKCILRSVGHPRRIYKSAPCVGSSNSRPAEEIPDLLPLPSGLKSMGLGSRSARLPSLVAAERDGGEHSPDGGCHHDGASRRRREVHGEWHYYRRRF

SEQ ID NO: 76159 - protein, 78 aa, Setaria italica
  Transcript Sequence Number=SeqID_10185
  Gene Ontology: Mol. function=oxidoreductase activity; Biological process=oxidation reduction
  Homolog annotation: Hit_ID=B6UA92; Match level="QueryCoverage=84%, HitCoverage=19%, E-value=3e-25, Identity=71%"; Hit description =Hyoscyamine 6-dioxygenase
LSPVCLAYRLLRVSADYFEGDISGGDVILNINHYPTCPNPSKTLGLPPHCDRNLITLLLPGKVYGLDVAYKGDWIKVE

SEQ ID NO: 76160 - protein, 340 aa, Setaria italica
  Transcript Sequence Number=SeqID_10186
  Gene Ontology: Mol. function=oxidoreductase activity; Biological process=oxidation reduction
  Homolog annotation: Hit_ID=B6T4W5; Match level="QueryCoverage=100%, HitCoverage=100%, E-value=1e-136, Identity=67%"; Hit description =Hyoscyamine 6-dioxygenase
  Pfam annotation: Domain name=2OG-FeII_Oxy; Domain location=186-285; Score=130.1; E_value=7.3e-36; Accession=PF03171.12; Description=2OG -Fe(II) oxygenase superfamily
MENMLHLAPSQALPLDRCIFSSELQLPQAISATASLPVIDMSRGRSEVRRAILDAGMEFGFFMVVNHGIPEEVTRDMEDVCEEFFQLPAADKAYMYSEDRHKPNRIFSGTTYETGGEKYWRDCLRLACPFPIGDGTKDWPHTPQRLRGVIENFTTLTRGVGMELLQLLCEAMGLRPDYFEGDISGGDVILNINHYPTCPNPSKTLGLPPHCDRNLITLLLPGKVYGLDVAYKGDWIKVEPVPGAFIVNFGQQLEVVTNGLLKSIEHRVVTSSTLPRTAVATFIMPTPDCLIGPAKEFITEDKPPCYRTVKFRDFMRIYNVVKLGSSINLTTDLKNVQKEI

SEQ ID NO: 76161 - protein, 44 aa, Setaria italica
  Transcript Sequence Number=SeqID_10187
  Homolog annotation: Hit_ID=B6T035; Match level="QueryCoverage=88%, HitCoverage=28%, E-value=1e-13, Identity=92%"; Hit description =SAUR33-auxin-responsive SAUR family member
LVEYYAGCTVVGCEVVLFEHLLWMLENADPQPESLDELVEYYAC

SEQ ID NO: 76162 - protein, 226 aa, Setaria italica
  Transcript Sequence Number=SeqID_10188
  Gene Ontology: Mol. function=aminoacyl-tRNA ligase activity; Cellular component=cytoplasm; Biological process=tRNA aminoacylation for protein translation
  Homolog annotation: Hit_ID=B9RGT2; Match level="QueryCoverage=99%, HitCoverage=45%, E-value=1e-102, Identity=79%"; Hit description =Tyrosyl-tRNA synthetase, putative
  Pfam annotation: Domain name=tRNA-synt_1b; Domain location=1-186; Score=49.0; E_value=4.1e-13; Accession=PF00579.17; Description=tRNA synthetases class I (W and Y)
RVGTTNRIAKESVKKRLASEDGMSYTEFTYQLLQGYDFLHMFKNMGVNVQIGGSDQWGNITAGTELIRKILQVEGAHGLTFPLLLKSDGTKFGKTEDGAIWLSSKMLSPYKFYQYFFAVPDVDVIRFMKILTFLSLDEIQELEESMKKPGYVPNTVQKRLAEEVTRFVHGEEGLVEALKATEALRPGAQTQLDAQTIEGIADDVPSCSLAYDQVLKSPLVDLAVST

SEQ ID NO: 76163 - protein, 78 aa, Setaria italica
  Transcript Sequence Number=SeqID_10189
  Subcellular localization annotation: CTP_CleavageSite=38; ConfidenceScore=5.07e-01
GAPTCRRRMPRRHQQLQLLPTRSSRRQKNNHRPQQQLRCMVLVAINVTTKIMHLNFISFHYQRHPCSVKYIHLIYYHL

SEQ ID NO: 76164 - protein, 115 aa, Setaria italica
  Transcript Sequence Number=SeqID_10190
  Homolog annotation: Hit_ID=B6STV5; Match level="QueryCoverage=98%, HitCoverage=73%, E-value=6e-34, Identity=66%"; Hit description =Acetyltransferase, GNAT family protein
  Subcellular localization annotation: CTP_CleavageSite=31; ConfidenceScore=5.53e-01
MAASAKVARLTTLALFSPTPTPSGPKPINPRARAPPPISISMDPALVDPTHLQSLMLACAHSCALRLSPATPASAIEPVDLGKLRTALAHSFIVVSVFCGARYLADAGEEEGQRF

SEQ ID NO: 76165 - protein, 75 aa, Setaria italica
  Transcript Sequence Number=SeqID_10191
  Pfam annotation: Domain name=DUF2523; Domain location=1-66; Score =22.1; E_value=0.0022; Accession=PF10734.1; Description=Protein of unknown function (DUF2523)
MLAGAGLTLASTAVMTTLVNQYISTLKNQTAGISADMLAILHLSGLDFALSVILSAIVARMTMNATNLTLKKATT

SEQ ID NO: 76166 - protein, 82 aa, Setaria italica
  Transcript Sequence Number=SeqID_10192
  Gene Ontology: Cellular component=origin recognition complex; Biological process=DNA replication
  Homolog annotation: Hit_ID=Q945C7; Match level="QueryCoverage=65%, HitCoverage=14%, E-value=8e-14, Identity=72%"; Hit description =Origin recognition complex subunit 2
MAPRGGRAAAAASSGSEDEEEEAGFSRSYFLAKEKEPSSGKKRARAAAGKLSDLNLVDEQVLRASLSEIPPKHEEEVEALTR

SEQ ID NO: 76167 - protein, 91 aa, Setaria italica
  Transcript Sequence Number=SeqID_10193
FSTVARLGVTCNLVDLGYCYASTHDWEICLRVKGDDRNFGGHELLVSNCDNSPRNRNRIEKEIRLAPRNRRVLDKLWLQLMNRDRVADYIN

SEQ ID NO: 76168 - protein, 347 aa, Setaria italica
  Transcript Sequence Number=SeqID_10194
  Gene Ontology: Mol. function=heat shock protein binding; Cellular component=cytoplasm; Biological process=protein folding
  Homolog annotation: Hit_ID=B6TA99; Match level="QueryCoverage=95%, HitCoverage=76%, E-value=1e-134, Identity=73%"; Hit description =Chaperone protein dnaJ
  Pfam annotation: Domain name=DnaJ; Domain location=24-86; Score =129.5; E_value=1.1e-35; Accession=PF00226.23; Description=DnaJ domain
  Pfam annotation: Domain name=DnaJ_C; Domain location=255-341; Score= -37.7; E_value=0.0025; Accession=PF01556.10; Description=DnaJ C terminal region
  Pfam annotation: Domain name=DnaJ_CXXCXGXG; Domain location=162-242; Score=88.8; E_value=1.9e-23; Accession=PF00684.11; Description=DnaJ central domain (4 repeats)
  Pfam module annotation: Pfam domain module=DnaJ::DnaJ_C::DnaJ _CXXCXGXG; Domain location=24-86::255-341::162-242
VPPFSSPSSAHRFFHGTRPVAARDYYDVLGVSKNASQAEIKKAYYGLAKKLHPDTNKGDADAERKFQEVQRAYETLKDEQKRSFYDQVGADQYEKASAAGGGTGNPFEGGFGNPFEDIFSGGGGGGGGGMNDFFRNIFRDREFGGRDVKVELELTFMEAVQGCTKTINFQTSVICETCSGAGVPPGTKPETCVTCRGTGFMFMQTGPFRMQSTCTKCGGSGKTVKDFCKTCKGNKVVTGTKSVRLDILPGSDDEDTIKVMRSGGADPDGRPGDLYVTLKVHEDPVFRRERGDIHVDAVLNVTQVIYCMFLQFVHVHPTDMIKCSYGASPLSTVLRLCNNLLYIDCVH

SEQ ID NO: 76169 - protein, 201 aa, Setaria italica
  Transcript Sequence Number=SeqID_10195
  Gene Ontology: Mol. function=heat shock protein binding; Cellular component=mitochondrion; Biological process=protein folding
  Homolog annotation: Hit_ID=B6TA99; Match level="QueryCoverage=96%, HitCoverage=44%, E-value=8e-98, Identity=89%"; Hit description =Chaperone protein dnaJ
  Pfam annotation: Domain name=DnaJ_C; Domain location=63-183; Score =181.4; E_value=2.6e-51; Accession=PF01556.10; Description=DnaJ C terminal region
  Pfam annotation: Domain name=DnaJ_CXXCXGXG; Domain location=2-50; Score=-0.6; E_value=1.2e-05; Accession=PF00684.11; Description=DnaJ central domain (4 repeats)
  Pfam module annotation: Pfam domain module=DnaJ_C::DnaJ_CXXCXGXG; Domain location=63-183::2-50
  Subcellular localization annotation: CTP_CleavageSite=45; ConfidenceScore=5.22e-01
VTCRGTGFMFMQTGPFRMQSTCTKCGGSGKTVKDFCKTCKGNKVVTGTKSVRLDILPGSDDEDTIKVMRSGGADPDGRPGDLYVTLKVHEDPVFRRERGDIHVDAVLNVTQAILGGTVQVPTLSGDVVLKVKPGTQPGQKVVLRGKGIKTRNSSYYGDQYVHFNVNIPVNLTPKQRELIEEFAKEEQGEDEKDAKAASASG

SEQ ID NO: 76170 - protein, 56 aa, Setaria italica
  Transcript Sequence Number=SeqID_10196
RALEIPVYPKGVSVLMPGQDVPTFIAHPAPAPCPPERIQWPSHQPPPFAGSSSNPS

SEQ ID NO: 76171 - protein, 90 aa, Setaria italica
  Transcript Sequence Number=SeqID_10197
  Gene Ontology: Mol. function=thiamin diphosphokinase activity; Biological process=thiamin diphosphate biosynthetic process
  Homolog annotation: Hit_ID=B6SN96; Match level="QueryCoverage=98%, HitCoverage=34%, E-value=2e-33, Identity=75%"; Hit description =Thiamin pyrophosphokinase 1
  Pfam annotation: Domain name=TPK_catalytic; Domain location=20-90; Score=-16.4; E_value=0.002; Accession=PF04263.8; Description=Thiamin pyrophosphokinase, catalytic domain
  Subcellular localization annotation: CTP_CleavageSite=39; ConfidenceScore=5.20e-01
PSTPPSNDAATTTYALVVLNQRLPRFAPLIWARARVRVCADGGANRVFDGMPELLPGEDPAEVRSRYKPDVIKGDMDSIRPEVKEYYSNS

SEQ ID NO: 76172 - protein, 40 aa, Setaria italica
  Transcript Sequence Number=SeqID_10198
ETRKFCKQMIIYHICVGNYTRSYTAYAPVQAFWLVTKENH

SEQ ID NO: 76173 - protein, 147 aa, Setaria italica
  Transcript Sequence Number=SeqID_10199
  Gene Ontology: Mol. function=hydrolase activity, hydrolyzing O -glycosyl compounds; Cellular component=extracellular region; Biological process=carbohydrate metabolic process
  Homolog annotation: Hit_ID=Q0JJD4; Match level="QueryCoverage=97%, HitCoverage=31%, E-value=1e-43, Identity=57%"; Hit description =Mannan endo-1,4-beta-mannosidase 2
  Pfam annotation: Domain name=UCR_Fe-S_N; Domain location=51-94; Score= -3.2; E_value=0.088; Accession=PF10399.1; Description=Ubiquitinol -cytochrome C reductase Fe-S su
SIHLYPDTWLQKQHATVNEKLQFVKRWVSSHIEDGDKELNKPVLTTEFGLSHRAQGFDPSHRDVFYKAIYDIVYASASRGGAGAAALVWQLAPEGMEEFHDDYSVVPSEHPSLRRLIKKQSCRLAKLRPGVGEEAKRVLAACAAGSS

SEQ ID NO: 76174 - protein, 116 aa, Setaria italica
  Transcript Sequence Number=SeqID_10200
  Gene Ontology: Mol. function=transcription regulator activity; Cellular component=nucleus; Biological process=regulation of transcription
  Homolog annotation: Hit_ID=Q9ZPN6; Match level="QueryCoverage=100%, HitCoverage=16%, E-value=1e-58, Identity=92%"; Hit description =Transcription factor MYC7E (Fragment)
IEALKKERDARPAPHAAGLGGHDAGPRCHAVEIDAKILGLEAMIRVQCHKRNHPSARLMTALRELDLDVYHASVSVVKDLMIQQVAVKMASRVYSQEQLNAALYSRLAEPGTAMGR

SEQ ID NO: 76175 - protein, 129 aa, Setaria italica
  Transcript Sequence Number=SeqID_10201
  Gene Ontology: Mol. function=protein dimerization activity
  Homolog annotation: Hit_ID=B6SWU7; Match level="QueryCoverage=96%, HitCoverage=17%, E-value=1e-29, Identity=51%"; Hit description =Transposon protein
  Pfam annotation: Domain name=zf-BED; Domain location=11-59; Score =61.2; E_value=3.8e-15; Accession=PF02892.7; Description=BED zinc finger
PTTARRRRKNSIIWEHFTTETDSDGCTRACCNYCKRIFACSKTAGTSHLKRHITLGSCPVMKGQVLPLSGRTGNHGSGAVEKPSKRLCLYAGPGNDAFNQNSNTSYLGNIDILTEPLTTKQGNEYSISK

SEQ ID NO: 76176 - protein, 111 aa, Setaria italica
  Transcript Sequence Number=SeqID_10202
VNSIGSGAVEKPSKRLCLYAGPGNDAFNQNSNTSYLGNIDILTEPLTTKQGNEYSISKCLKVLHDMDDMSDEIKHLAYHVLKDATNREIFMSYESRLRGLWLKKEVNKLGI

SEQ ID NO: 76177 - protein, 61 aa, Setaria italica
  Transcript Sequence Number=SeqID_10203
  Gene Ontology: Mol. function=protein serine/threonine kinase activity
  Homolog annotation: Hit_ID=Q2R8X2; Match level="QueryCoverage=78%, HitCoverage=7%, E-value=1e-11, Identity=62%"; Hit description =Protein kinase domain containing protein, expressed
MDHSSSGSPRKIPFHLLQEITDCFSDERKLGSGGFGKVYMGVHNDGEKIAVKMLHYMLGFE

SEQ ID NO: 76178 - protein, 248 aa, Setaria italica
  Transcript Sequence Number=SeqID_10204
  Gene Ontology: Mol. function=protein serine/threonine kinase activity; Biological process=protein amino acid phosphorylation
  Homolog annotation: Hit_ID=B9V0H3; Match level="QueryCoverage=77%, HitCoverage=27%, E-value=1e-66, Identity=62%"; Hit description =Protein kinase domain containing protein
  Pfam annotation: Domain name=Pkinase; Domain location=46-245; Score =37.4; E_value=1e-10; Accession=PF00069.17; Description=Protein kinase domain
  Pfam annotation: Domain name=Pkinase_Tyr; Domain location=46-245; Score=-33.1; E_value=1.6e-11; Accession=PF07714.9; Description =Protein tyrosine kinase
  Pfam module annotation: Pfam domain module=Pkinase::Pkinase_Tyr; Domain location=46-245::46-245
MSNHPLEWTRQPADIFQERHIAMDHSSSGSPRKIPFHLLQEITDCFSDERKLGSGGFGKVYMGVHNDGEKIAVKMLHYMLGFEEEQFLKEFNNLARLQHPNIVRLVGYCYDVQKNIVEYEGRLVFAERIYRALCFEYMHHGSLDKYVSDEYPGLDWNTRYTLIKGICKGLEYLHEELKPPMYHLDLKPANILLGKNMLPKIADFGLSRFFGEEQTHITKSSIGTRHTRTGGLDCRQHQCTCSSHIQNK

SEQ ID NO: 76179 - protein, 190 aa, Setaria italica
  misc_feature (139)..(139): Xaa can be any naturally occurring amino acid
  Transcript Sequence Number=SeqID_10205
  Gene Ontology: Mol. function=protein serine/threonine kinase activity; Cellular component=plasma membrane; Biological process =protein amino acid phosphorylation
  Homolog annotation: Hit_ID=Q2RAX3; Match level="QueryCoverage=96%, HitCoverage=40%, E-value=6e-85, Identity=86%"; Hit description=CBL -interacting protein kinase 33
  Pfam annotation: Domain name=Pkinase; Domain location=13-188; Score =105.1; E_value=2.4e-28; Accession=PF00069.17; Description=Protein kinase domain
  Pfam annotation: Domain name=Pkinase_Tyr; Domain location=13-184; Score=-96.8; E_value=2.7e-07; Accession=PF07714.9; Description =Protein tyrosine kinase
  Pfam module annotation: Pfam domain module=Pkinase::Pkinase_Tyr; Domain location=13-188::13-184
MSTTKVKRCVGKYELGRTIGEGTFAKVRFAKNIQTGEFVAIKILDKEKVLKHKMVEQRGILAMKLIEHPNVVRIYEVMGSKTKIYIVLECVPYGDLLDTIVNSGRMRECEARRYFQQLINAVDYCHSRDVYHRDLKPEXNLLLDSHGNLKVSDFGLSALSQQIKDDGLLHTTCGTPNYVAPEVMPGNFTN

SEQ ID NO: 76180 - protein, 231 aa, Setaria italica
  misc_feature (100)..(100): Xaa can be any naturally occurring amino acid
  misc_feature (136)..(136): Xaa can be any naturally occurring amino acid
  Transcript Sequence Number=SeqID_10206
  Gene Ontology: Mol. function=protein serine/threonine kinase activity; Cellular component=plasma membrane; Biological process =protein amino acid phosphorylation
  Homolog annotation: Hit_ID=Q2RAX3; Match level="QueryCoverage=98%, HitCoverage=55%, E-value=1e-120, Identity=85%"; Hit description=CBL -interacting protein kinase 33
  Pfam annotation: Domain name=Pkinase; Domain location=1-177; Score =108.7; E_value=2e-29; Accession=PF00069.17; Description=Protein kinase domain
  Pfam annotation: Domain name=Pkinase_Tyr; Domain location=1-193; Score=-121.8; E_value=1.2e-05; Accession=PF07714.9; Description =Protein tyrosine kinase
  Pfam module annotation: Pfam domain module=Pkinase::Pkinase_Tyr; Domain location=1-177::1-193
MKLIKHPNVVRMYEVMGSKTKIYIVLEYATGGELFDKIVNHGRMREDEARRYFQQLINAVDYCHSRGVYHRDLKVSDFGLSALSQQIKDDGLLHTTCGTXPNYVAPEVLEDQGYDGAMADLWSCGVILFVLLAGYXNAEFTFPPWTSFPAKRLLTRILDPNPMTRITIPEILEDEWFKKGYKRPEFDEKYDTTLDDVDAVFNDSEEHHVTEKKKNEPVALNAFELIQCQQA

SEQ ID NO: 76181 - protein, 128 aa, Setaria italica
  Transcript Sequence Number=SeqID_10207
  Gene Ontology: Mol. function=protein serine/threonine kinase activity; Biological process=protein amino acid phosphorylation
  Homolog annotation: Hit_ID=B9V0H3; Match level="QueryCoverage=100%, HitCoverage=18%, E-value=3e-39, Identity=60%"; Hit description =Protein kinase domain containing protein
KPANILLGKNMLPKIADFGLSRFFGEEQTHITKSSIGTRGYLPPEYIERNIVSRKFDIFSLGVIIIKIMTGPTGYRESAEMSPQEFIDFAHKNWRTRLQATPMHLFESYSKQVKRCMEIALSCVEVGR

SEQ ID NO: 76182 - protein, 85 aa, Setaria italica
  Transcript Sequence Number=SeqID_10208
TTHPLNISGIVILCQGLPKHKPNVMEPRENYEGPFNLKLDSAHAHDEDEPQSSFTSSFLSGSCNSLLTQRVSFGNMNCLYLFLKE

SEQ ID NO: 76183 - protein, 226 aa, Setaria italica
  Transcript Sequence Number=SeqID_10209
  Gene Ontology: Mol. function=protein serine/threonine kinase activity; Cellular component=plasma membrane; Biological process =protein amino acid phosphorylation
  Homolog annotation: Hit_ID=Q2RAX3; Match level="QueryCoverage=74%, HitCoverage=38%, E-value=1e-72, Identity=82%"; Hit description=CBL -interacting protein kinase 33
  Pfam annotation: Domain name=Pkinase; Domain location=55-224; Score =68.2; E_value=3e-17; Accession=PF00069.17; Description=Protein kinase domain
  Pfam annotation: Domain name=Pkinase_Tyr; Domain location=55-224; Score=-104.0; E_value=8.1e-07; Accession=PF07714.9; Description =Protein tyrosine kinase
  Pfam module annotation: Pfam domain module=Pkinase::Pkinase_Tyr; Domain location=55-224::55-224
MIYRTRLRDLSSYDQGSSMDQESETIGLCREASCNSRGVIRQGMSTTKVGCVGNYELGRTIGKGTFAKFKFARNIHTGEFVAIKILDKEKVLKHKMVEQIKRGILAMKLIEHPNVVRIYEVMGSKTKIYIVLECVPYGDLLDTIVNSGRMRECEARRYFQQLINAVDYCHSRDVYHRDLKPENLLLDSHGNLKVSDFGLSALSQQIKVMTTCLYASKLPIYLSMRG

SEQ ID NO: 76184 - protein, 376 aa, Setaria italica
  misc_feature (137)..(137): Xaa can be any naturally occurring amino acid
  misc_feature (161)..(161): Xaa can be any naturally occurring amino acid
  misc_feature (221)..(221): Xaa can be any naturally occurring amino acid
  misc_feature (251)..(251): Xaa can be any naturally occurring amino acid
  Transcript Sequence Number=SeqID_10210
  Gene Ontology: Mol. function=protein serine/threonine kinase activity; Cellular component=plasma membrane; Biological process =protein amino acid phosphorylation
  Homolog annotation: Hit_ID=Q2RAX3; Match level="QueryCoverage=100%, HitCoverage=87%, E-value=0.0, Identity=82%"; Hit description=CBL -interacting protein kinase 33
  Pfam annotation: Domain name=NAF; Domain location=302-362; Score =127.0; E_value=6e-35; Accession=PF03822.6; Description=NAF domain
  Pfam annotation: Domain name=Pkinase; Domain location=13-263; Score =210.9; E_value=3.4e-60; Accession=PF00069.17; Description=Protein kinase domain
  Pfam annotation: Domain name=Pkinase_Tyr; Domain location=13-261; Score=-51.6; E_value=2.7e-10; Accession=PF07714.9; Description =Protein tyrosine kinase
  Pfam module annotation: Pfam domain module=NAF::Pkinase::Pkinase_Tyr; Domain location=302-362::13-263::13-261
MSTTKVKRRVGKYELGRTIGEGTFAKVRFAKNTETGEPVAIKILDKEKVLKHKMVEQIKREISTMKLIKHPNVVRIYEVMGSKAKIYIVLEYATGGELFDKIVNHGRMREDEARRYFQQLINAVDYCHSRDVYHRDXKPEIYCLIHMENLKEKGKLTKNFXGLSALSQQIKDDGLLHTTCGTPNYVAPEVLEDQGYDGAMADLWSCGVILFVLLAGYLPFXEDSNLMTLYKKISNAEFTFPPWTSFPAKRXITIPEILEDEWFKKGYKRPEFDEKYDTTLDDVDAVFNDSEEHHVTEKKEEEPVALNAFELISMSAGLNLGNLFDSEQEFKRETRFTSKCPPKEIVRKIEEAAIPLGFDVQKKNYKLRLEKLKAGR

SEQ ID NO: 76185 - protein, 379 aa, Setaria italica
  Transcript Sequence Number=SeqID_10211
  Gene Ontology: Mol. function=protein serine/threonine kinase activity; Cellular component=plasma membrane; Biological process =protein amino acid phosphorylation
  Homolog annotation: Hit_ID=Q2RAX3; Match level="QueryCoverage=99%, HitCoverage=86%, E-value=0.0, Identity=84%"; Hit description=CBL -interacting protein kinase 33
  Pfam annotation: Domain name=NAF; Domain location=252-312; Score =127.0; E_value=6e-35; Accession=PF03822.6; Description=NAF domain
  Pfam annotation: Domain name=Pkinase; Domain location=1-213; Score =193.5; E_value=5.8e-55; Accession=PF00069.17; Description=Protein kinase domain
  Pfam annotation: Domain name=Pkinase_Tyr; Domain location=2-211; Score=-111.7; E_value=2.7e-06; Accession=PF07714.9; Description =Protein tyrosine kinase
  Pfam module annotation: Pfam domain module=NAF::Pkinase::Pkinase_Tyr; Domain location=252-312::1-213::2-211
MQIKRGILAMKLIEHPNVVRIYEVMGSKAKIYIVLEYATGGELFDKIVNRGRMRECEARRYFQQLINAVDYCHSRDVYHLDLKPENLLLDSRGNLKVSEFGLGALSQQIKTDGVLHTTYGTPNYVAPEVLEDQGYDGAMADLWSCGVILFVLLAGYLPFEDSNLMTLYKKISNAEFTFPPWTSFPAKRLLTRILDPNPMTRITIPEILEDEWFKKGYKRPEFDEKYDTTLDDVDAVFNDSEEHHVTEKKEEEPVALNAFELISMSAGLNLGNLFDSEQEFKRETRFTSKCPPKEIVRKIEEAAIPLGFDVQKKNYKLRLEKIEAGRKGNLHVAAEILQIAPSFHVIEVRKGEGDTLEFHKFYKDLSKTLKDIVWKFDDL

SEQ ID NO: 76186 - protein, 161 aa, Setaria italica
  Transcript Sequence Number=SeqID_10212
  Gene Ontology: Mol. function=protein serine/threonine kinase activity; Cellular component=plasma membrane; Biological process =protein amino acid phosphorylation
  Homolog annotation: Hit_ID=Q2RAX3; Match level="QueryCoverage=96%, HitCoverage=37%, E-value=9e-65, Identity=75%"; Hit description=CBL -interacting protein kinase 33
  Pfam annotation: Domain name=NAF; Domain location=28-88; Score=127.0; E_value=6e-35; Accession=PF03822.6; Description=NAF domain
LPSSSTDDVNVIFNDSEEHHVTEKKEEEPVALNAFELISMSAGLNLGNLFDSEQEFKRETRFTSKCPPKEIVRKIEEAAIPLGFDVQKKNYKLRLEKLKAGRKGNLNVATEILQVAPSLHMVEVRKAKGDTLEFHKFFKNLSKTLKDVVWKSEDLPMQPAA

SEQ ID NO: 76187 - protein, 342 aa, Setaria italica
  Transcript Sequence Number=SeqID_10213
  Gene Ontology: Mol. function=metal ion binding; Cellular component =plasma membrane
  Homolog annotation: Hit_ID=Q6ZFR4; Match level="QueryCoverage=83%, HitCoverage=39%, E-value=2e-89, Identity=63%"; Hit description=Zinc finger (C3HC4-type RING finger) protein family-like
  Pfam annotation: Domain name=VWA; Domain location=104-288; Score =90.7; E_value=5.2e-24; Accession=PF00092.20; Description=von Willebrand factor type A domain
  Pfam annotation: Domain name=VWA_CoxE; Domain location=31-261; Score=- 65.2; E_value=0.0042; Accession=PF05762.6; Description=VWA domain containing CoxE-like protei
  Pfam module annotation: Pfam domain module=VWA::VWA_CoxE; Domain location=104-288::31-261
MHHVQPPPIRYRPFHSVQPPPQPAEPEVFDDDEPVELPSGHDGQRQAAAAASRGALAAVETHTEYSAVARDSSPDNFAVLVHVKAPGIVDGEAAAGDAPRAPLDLVTVLDVSGSMSGEKLALLKQAMGFVIDNLGPHDRLSVVSFSSGAQRVTRLLRMSDAGKGLAMSAVESLVARGGTNIAEGLRTAAKVLDERRHRNAVSSVILLSDGQDNYTMTRSAQGRIPNYEDLVPPSFMRTGTGDWSAAIHTFGFGNDHDAAAMHVIAEATGGTFSYIENEAVIQDAFAQCIGGLLTVVVQEARIAISSGHPGVRIASIKSGRYESRVDVDGRSASIAVGELYAD

SEQ ID NO: 76188 - protein, 41 aa, Setaria italica
  Transcript Sequence Number=SeqID_10214
MAQAAVESALNGDSLIGRQPVVPRMKRKTPSELRGEQLKRR

SEQ ID NO: 76189 - protein, 135 aa, Setaria italica
  Transcript Sequence Number=SeqID_10215
GGSQDGCRDLQKLAGFLQEYGIQNNYVDLNSRIKEEHGKDRMFTDHGLLQNTDSPFRLTSECSSSSSLNCCSSNLITPSRNQASNSDLTWNTTKKLFGVDIGNLAKHSDSQVSQMVKVSSRSDAASRPTSRHSLP

SEQ ID NO: 76190 - protein, 336 aa, Setaria italica
  misc_feature (51)..(51): Xaa can be any naturally occurring amino acid
  misc_feature (157)..(157): Xaa can be any naturally occurring amino acid
  Transcript Sequence Number=SeqID_10216
  Homolog annotation: Hit_ID=Q9LDG2; Match level="QueryCoverage=94%, HitCoverage=67%, E-value=1e-117, Identity=62%"; Hit description =F28L1.1 protein
  Pfam annotation: Domain name=DUF231; Domain location=150-314; Score =245.5; E_value=1.3e-70; Accession=PF03005.7; Description=Arabidopsis proteins of unknown function
LSSENGRPDASYTKWRWQPTRCDLPRFDAKSMLEKLRNRRVVFVGDSIGRXQWESLLCMLSTAVHNKSSIYEVNGSPITKHMGFLIFNFRDYSCTVEYYRSPFIVLQGRAPAGAPEIVKYTIRVDAMDWMSDRGKWKDADVLIFNTGHWWNIEKTIXGGAYFQEGDEVEMDMTVTDAYRRSIHTLSDWLHREVNTSKTHVIYRTYAPVHFRGGDWKTGGSCHLETLPDLTPPESLEEWDDLLKPVNDVLGNNLRPKLSGLDMLNVTQMTAQRKDGHLSVYLSPSGPVPRYKQDCSHWCLPGVPDTWNELLYALVMKRHTKTDQNLSLSGTITPNTG

SEQ ID NO: 76191 - protein, 98 aa, Setaria italica
  Transcript Sequence Number=SeqID_10217
MLAARSPVSLHHRIVAGGQRRRCVGGSERKCGRTQGRHFTQALESLWRQSPRISPPAAAAATGGEVNPLWQPPALENAAFEEYYKKRTWFQDLVHLDV

SEQ ID NO: 76192 - protein, 60 aa, Setaria italica
  Transcript Sequence Number=SeqID_10218
RVFTPRSCGYSSMICMKINKENSSKCVLVTSCYHSLVAHHQSGSFYVCPTIWQMSRSSVS

SEQ ID NO: 76193 - protein, 72 aa, Setaria italica
  Transcript Sequence Number=SeqID_10219
  Subcellular localization annotation: CTP_CleavageSite=53; ConfidenceScore=5.32e-01
AIYGFLKNPLSQGSGPIGSTISKFLLSLFSTHRFDGSEMVITSLLFKKFSILCVMHKTSMFFYTSYLCYIGT

SEQ ID NO: 76194 - protein, 125 aa, Setaria italica
  Transcript Sequence Number=SeqID_10220
  Gene Ontology: Mol. function=protein serine/threonine kinase activity; Biological process=protein amino acid phosphorylation
  Homolog annotation: Hit_ID=Q2V338; Match level="QueryCoverage=81%, HitCoverage=20%, E-value=4e-41, Identity=70%"; Hit description =Probable serine/threonine-protein kinase WNK9
MAALQVQSNGGGAGEGLLADDPGYVEVDPTGRYGRYNEILGKGSSKTVYRAFDEHRGMEVAWNRVPVHDFLRSPGELERLYGEIHLLRSLRHRAVMRLHASWADAPRRAVCFVTQLFTSGTLRQY

SEQ ID NO: 76195 - protein, 124 aa, Setaria italica
  Transcript Sequence Number=SeqID_10221
  Gene Ontology: Mol. function=protein serine/threonine kinase activity; Cellular component=plasma membrane; Biological process =protein amino acid phosphorylation
  Homolog annotation: Hit_ID=A5A494; Match level="QueryCoverage=86%, HitCoverage=82%, E-value=7e-35, Identity=71%"; Hit description =Barren inflorescence2-like serine/threonine protein kinase (Fragment)
  Pfam annotation: Domain name=Pkinase; Domain location=1-124; Score= -113.1; E_value=0.093; Accession=PF00069.17; Description=Protein kinase domain
RLRRWKRRSSAAPRPRFVAEPVDARSSSFVGTHEYVAPEVARGGGHGAAVDWWAYGVFLYELIYGRTPFVGETNEATLRNIVRRPLEFPTAASSHGSGGDDAAARDLIARLLDKDPRTRLGSKR

SEQ ID NO: 76196 - protein, 97 aa, Setaria italica
  Transcript Sequence Number=SeqID_10222
LIMQVYMEVHKFGTWKPTHYQQKNETELKTLKFRIPGLDIKTWLVDMLNLIAVIQSAHFYILENAETTCCTKQNINSISHFLYASATNCRTLSSNNS

SEQ ID NO: 76197 - protein, 99 aa, Setaria italica
  Transcript Sequence Number=SeqID_10223
  Pfam annotation: Domain name=AT_hook; Domain location=11-23; Score =18.8; E_value=0.015; Accession=PF02178.11; Description=AT hook motif
GVEEEVQVEVKRGRGRPRKAVADDNAEQARALRELGVRASQYNNEERKKIRTKYLSKRQSRPASSRPTKVNTLEFATGCDEEHTLVLYTDTVYYIVECM

SEQ ID NO: 76198 - protein, 1115 aa, Setaria italica
  misc_feature (80)..(80): Xaa can be any naturally occurring amino acid
  Transcript Sequence Number=SeqID_10224
  Gene Ontology: Mol. function=zinc ion binding; Cellular component =nucleus; Biological process=regulation of transcription, DNA -dependent
  Homolog annotation: Hit_ID=Q7XTS2; Match level="QueryCoverage=75%, HitCoverage=84%, E-value=0.0, Identity=43%"; Hit description =OSJNBa0008M17.13 protein
  Pfam annotation: Domain name=AT_hook; Domain location=231-243; Score =18.8; E_value=0.015; Accession=PF02178.11; Description=AT hook motif
  Pfam annotation: Domain name=CBFB_NFYA; Domain location=252-308; Score=2.1; E_value=0.084; Accession=PF02045.7; Description=CCAAT -binding transcription factor (CBF-BNF-YA) subunit B
  Pfam annotation: Domain name=CCT; Domain location=267-313; Score=9.4; E_value=0.028; Accession=PF06203.6; Description=CCT motif
  Pfam annotation: Domain name=FAR1; Domain location=379-466; Score =121.7; E_value=2.4e-33; Accession=PF03101.7; Description=FAR1 family
  Pfam annotation: Domain name=MULE; Domain location=565-661; Score =104.8; E_value=2.9e-28; Accession=PF10551.1; Description=MULE transposase domain
  Pfam annotation: Domain name=SWIM; Domain location=832-879; Score =32.1; E_value=2.3e-06; Accession=PF04434.9; Description=SWIM zinc finger
  Pfam module annotation: Pfam domain module=AT_hook::CBFB _NFYA::CCT::FAR1::MULE::SWIM; Domain location=231-243::252-308::267 -313::379-466::565-661::832-879
GGWCVGSPAGGPGERCLAMMEVVAKDGAGGKWKVSRLVVEHNHELQVAPGEVAATVPALGMEFDSVDAAKEFYYGYGERXGFKARTGSNRRSGGDGEKIMQRFLCWRGSYANRRSKGKETEEVVEAAAATAAEKRKREPYRTRSRNPAKKDAEIIEVAKGVGMGGAENGRGSRRGRSKKGMVEQEESVAGLEVEKDVVEDASAPPPPDKEAEEGEGEDQEGVEEEVQVEVKRGRGRPRKAVADDNAEQARALRELGVRASQYNNEERKKIRTKYLSKRQSRPASSRPTKIASRQALAERRKRGDGGRFLSSEGQQPSGQPSERRSKRLEKQSLKMEEKAESKEDEIIEAEPDPEEEVVAGPGGEPKIGMVFLDEDKAYEFYVNYAGAEGFSVRKGCLDKTAKNVTKSRAYVCSKEGFRTKSISSESKKPRPETRTGCQAHMTIKITESGKYVVTEFVSDHNHDREAPLVDIQILKSQKLLAKVQQPPDPPKVVLIPNEYKNYTRTKCIKDMQLGDAQAISEYLRRMKGENPSFFYAIQVDEDDQFTNVFWADFKSIMDYNYFGDVVCIDTRYCTSDYGRPLLLFIGVNHHKQPIIFGTALIYDDSVQSFRWLFETFKSAMSGKQPKTVLTDQSTELSDAISSVWPGTTHRFSLLHLYLTASKVLRDNFQASETFALDFSRWLYDYEEEDFISSWEILSEKYNLKDNEWLNKLYEDRERWGSPYGRDTFCADIAATLRSDNTDTILKDLLKPEVDLQNFFNSYNKFLEEKRLAEQQADYLGAQMTQRVAPLRLLWQAANSYTPTLFEMFRMEFEQISNCMVFSCGEIGPISEYQVTAKDKPRGQFVRFDSTECVVVCSCKKFEFLGLPCCHVLKILELRNIKELPPHYILKRWRKDARSESPGESYGYATIEEDPRFSLSRRYNTLYRTLYKIAEKSSESIEAYAFLENQYEQLVEQVEVLLQARLHDKSSLNTILKGHQPHLLQSEVSNSEPRRVTAKKNKNVEPRRQQQSPLDSNKKKKARQGLLEPEEIEIPLRAVPPTVSNDIPSHLRTPTNQFLAPSHIMQAPYVAQQFGLGSLQGFPGMSAFGQIQEPAPLHQHSHLQPPPFHNGPQIPQ

SEQ ID NO: 76199 - protein, 185 aa, Setaria italica
  Transcript Sequence Number=SeqID_10225
  Subcellular localization annotation: CTP_CleavageSite=37; ConfidenceScore=5.38e-01
FFFFFFFFFFLFPKGTSDPDSKLQMSNLSSKQNCKPRLSIEFTVPFLLDQTKIYTERSTLESLTHCSVSDYSPRQKRSSIALGNTGHGRIDTRRVRAKPATGSRMSRAHRARLHFPDGTAMVWLSSLPSLIGGRLALLCFLAEVGAHRPGPPAPGLGAGGGLWWVGVDGGAAEGASGGALQPWRG

SEQ ID NO: 76200 - protein, 118 aa, Setaria italica
  Transcript Sequence Number=SeqID_10226
  Homolog annotation: Hit_ID=Q2RAB0; Match level="QueryCoverage=55%, HitCoverage=8%, E-value=1e-12, Identity=64%"; Hit description =Digalactosyldiacylglycerol synthase 1, putative, expressed
MASFGVDTRPAAAASGRGGGGGAGTGTGEGALSFLSRGLREDLRLIRARAGELETFLNAPVPEPELSARLRRAYSSSASSSRTRLDLSAIGKAFEAESWRGTRGSVSWRWEEEAEEWE

SEQ ID NO: 76201 - protein, 126 aa, Setaria italica
  Transcript Sequence Number=SeqID_10227
RRDHACRYTLVGAQRGPKDKIFRPRRDNHTHARLCLILSHHHRANTTIYYANTATTRRRSPLLESSCRRITRRRRRQWCRPPGRRPPPSWTAAAATPTLRCFFFWSIQSKHTEMPLAAASTNHHAY

SEQ ID NO: 76202 - protein, 86 aa, Setaria italica
  Transcript Sequence Number=SeqID_10228
  Gene Ontology: Mol. function=calcium ion binding; Cellular component =oxygen evolving complex; Biological process=photosynthesis
  Homolog annotation: Hit_ID=B6SP64; Match level="QueryCoverage=63%, HitCoverage=23%, E-value=5e-22, Identity=92%"; Hit description =Oxygen evolving enhancer protein 3 containing protein
IGPSFAAHAYRLRSNAFDLLALEDLLGKDASNYVNKYLRLKSTFMYYDFDKPTTATMSTVLTRPTAGTVQCFGRKKTAVAVAYTKP

SEQ ID NO: 76203 - protein, 79 aa, Setaria italica
  Transcript Sequence Number=SeqID_10229
  Gene Ontology: Mol. function=structural constituent of ribosome; Cellular component=ribonucleoprotein complex; Biological process =translation
  Homolog annotation: Hit_ID=Q0IQF7; Match level="QueryCoverage=78%, HitCoverage=41%, E-value=3e-26, Identity=98%"; Hit description=40S ribosomal protein S16
  Pfam annotation: Domain name=Ribosomal_S9; Domain location=1-79; Score=28.9; E_value=1.9e-09; Accession=PF00380.11; Description =Ribosomal protein S9S16
APIELIRPEGLRLKAFEPILLAGRSRFKDIDMRIRVRGGGKTSQIYAIRQAIAKALVAYYQKYVDEAAKEGAVVAAEDV

SEQ ID NO: 76204 - protein, 322 aa, Setaria italica
  misc_feature (21)..(21): Xaa can be any naturally occurring amino acid
  misc_feature (154)..(154): Xaa can be any naturally occurring amino acid
  Transcript Sequence Number=SeqID_10230
  Gene Ontology: Mol. function=transporter activity; Cellular component= outer membrane-bounded periplasmic space; Biological process=transport
  Homolog annotation: Hit_ID=Q7XSS1; Match level="QueryCoverage=100%, HitCoverage=76%, E-value=1e-161, Identity=83%"; Hit description =OSJNBa0041A02.11 protein
AIRKGLLEPVKNAEEQDWFSXLSDRWKVHLCRNQNGEADPNGSVWGVPYRWGTMVIAYKKNKFKRHNLKPIQDWEDLWRPELAGKIAMVDSPREVIGAVLKHLGSSYNTVDMETDVSGGREAVLKSFTQLQKQVQLFDSMNYLKSFSVGDVWVXAVGWSSDVIPAAKRMSNVAVVVPKSGSSLWADLWVVPCASRFQTDQIGGRTRGPSPLIHQWFDFCLQSARSLPFRQDIIPGASPLYLENPVPEVPQDKNKRKPKLDTNIVRGVPPPEILEKCEFLEPLSGKALEDYQWLVSRMQRPRLGLFGNALQKISSVLDLKSRL

SEQ ID NO: 76205 - protein, 149 aa, Setaria italica
  Transcript Sequence Number=SeqID_10231
  Gene Ontology: Mol. function=structural constituent of ribosome; Cellular component=ribonucleoprotein complex; Biological process =translation
  Homolog annotation: Hit_ID=Q0IQF7; Match level="QueryCoverage=100%, HitCoverage=100%, E-value=3e-73, Identity=92%"; Hit description=40S ribosomal protein S16
  Pfam annotation: Domain name=Ribosomal_S9; Domain location=17-149; Score=260.4; E_value=4.1e-75; Accession=PF00380.11; Description =Ribosomal protein S9S16
MSTVLTRPTAGTVQCFGRKKTAVAVAYTKPGRGLIKVNGAPIELIRPEGLRLKAFEPILLAGRSRFKDIDMRIRVRGGGKTSQIYAIRQAIAKALVAYYQKYVDEAAKKEVKDIFGRYDRTLLVADPRRCEPKKFGGRGARARFQKSYR

SEQ ID NO: 76206 - protein, 334 aa, Setaria italica
  misc_feature (15)..(15): Xaa can be any naturally occurring amino acid
  Transcript Sequence Number=SeqID_10232
  Gene Ontology: Mol. function=microtubule motor activity; Cellular component=microtubule associated complex; Biological process =microtubule-based movement
  Homolog annotation: Hit_ID=Q7Y1C8; Match level="QueryCoverage=99%, HitCoverage=51%, E-value=1e-166, Identity=84%"; Hit description =Putative kinesin heavy chain, 5'-partial (Fragment)
  Pfam annotation: Domain name=Kinesin; Domain location=1-320; Score =485.8; E_value=5.9e-143; Accession=PF00225.15; Description=Kinesin motor domain
MSNESGAVSYPKSGXNIGRGIELMHNAQAYSFTFDKVFDHSASQEHVFFEISQLVQSALDGYKVCIFAYGQTGSGKTYTMMGNPELDEQKGMIPRSLEQIFQASQALNSQGWKYKMQASMLEIYNETIRDLLAVNRMAAQDGASSKYTIKHDASGNTHVSDLTVVDVTSISEVSSLLRRAAQSRSVGRTHMNEESSRSHCVFTLRIFGVNEGTDQQVQGVLNLIDLAGSERLNKSGATGDRLKETQAINKSLSCLSDVIFSIAKKEEHVPFRNSKLTYLLQPCLGGDSKTLMFVNLSPEVSSTGESICSLRFAARVNSCEIGIPRRQTQLRSSQ

SEQ ID NO: 76207 - protein, 176 aa, Setaria italica
  misc_feature (75)..(75): Xaa can be any naturally occurring amino acid
  Transcript Sequence Number=SeqID_10233
  Gene Ontology: Mol. function=structural constituent of ribosome; Cellular component=ribonucleoprotein complex; Biological process =translation
  Homolog annotation: Hit_ID=Q0IQF7; Match level="QueryCoverage=78%, HitCoverage=92%, E-value=2e-67, Identity=93%"; Hit description=40S ribosomal protein S16
  Pfam annotation: Domain name=Ribosomal_S9; Domain location=43-176; Score=247.6; E_value=3.1e-71; Accession=PF00380.11; Description =Ribosomal protein S9S16
  Subcellular localization annotation: CTP_CleavageSite=40; ConfidenceScore=5.54e-01
PPQAAKALAPPPAPPPLRSQQPAPPPWLPCSPAPPRATVQCFGRKKTAVAVAYTKPGRGLIKVNGVPIELIRPDXGVRLKAFEPILLAGRSRFKDIDMRIRVRGGGKTSQIYAIRQAIAKALVSYYQKYVDEAAKKEVKDIFGRYDRTLLVADPRRCEPKKFGGRGARARFQKSYR

SEQ ID NO: 76208 - protein, 81 aa, Setaria italica
  Transcript Sequence Number=SeqID_10234
  Gene Ontology: Mol. function=phosphoprotein phosphatase activity; Biological process=response to stress
  Homolog annotation: Hit_ID=B8A7J8; Match level="QueryCoverage=98%, HitCoverage=22%, E-value=7e-40, Identity=93%"; Hit description =Serine/threonine protein phosphatase
IRGKQSLETICLLLAYKLKYPDNIYLLRGNHEDAKINRVYGFYDECKRRFNVRLWKIFCDCFNCFPMAALIDDKVLCMHGG

SEQ ID NO: 76209 - protein, 166 aa, Setaria italica
  Transcript Sequence Number=SeqID_10235
EELNDTQKGLVEVSKKKAYDNLKLVQYEGKNSVHEHQVIFGDKGNNYLPGLSSMPQSPSPLTRFHDGISPHGEVSESAPAQESPRPRQRWAKIVTVVTTLRFLNKKPQACPGEVSPTPTPTPETGFGMTYLSDNLMLGADIEMGPIPLIESSPWMTEWPLNFYEWE

SEQ ID NO: 76210 - protein, 50 aa, Setaria italica
  Transcript Sequence Number=SeqID_10236
RCLQLNPCMLHITAKRIIKPIQSSTLVSSYFTKWFSSGRCLQLNQCNGFP

SEQ ID NO: 76211 - protein, 100 aa, Setaria italica
  Transcript Sequence Number=SeqID_10237
  Subcellular localization annotation: CTP_CleavageSite=44; ConfidenceScore=5.10e-01
IYVPKLCQMLHITAKRIIKPIQSSTLVSSYFTKSYSIPNMGFLSCLRKKKSVLSCADNITTDPITASPQMIRMIAIDVQDWQKSNFHTEELFTMNRAAGK

SEQ ID NO: 76212 - protein, 297 aa, Setaria italica
  Transcript Sequence Number=SeqID_10238
  Gene Ontology: Mol. function=signal transducer activity; Cellular component=integral to membrane; Biological process=positive regulation of I-kappaB kinase/NF-kappaB cascade
  Homolog annotation: Hit_ID=Q7X7S8; Match level="QueryCoverage=100%, HitCoverage=63%, E-value=1e-153, Identity=89%"; Hit description =OSJNBa0083N12.15 protein
LPYSYLSLFIREIDETDIKTLERQLMQSIESCTAKKKKIILSQMEMERIQGSEEKLKARSFLKRIVGTVVRSVQEDQTEQDIKNLEAEVQALEELSKQLFLEIYELRQAKIAAAYSRTWRGHLQNLLGYALSVYCVYKMLKSLQSVVFKESGSVDPVTMTITIFLRHFDIGIDVALLSQYISLMFIGMLVVISVRGFLANVMKFFFAVSRVGSGSTTNVVLFLSEIMGMYFISSILLIRKSLANEYRVIITDVLGGDIQFDFYHRWFDAIFVASAFLSLLLISAQYTTRQTDKHPID

SEQ ID NO: 76213 - protein, 124 aa, Setaria italica
  Transcript Sequence Number=SeqID_10239
  Gene Ontology: Mol. function=nucleoside-triphosphatase activity; Cellular component=protein complex
  Homolog annotation: Hit_ID=Q9LIM2; Match level="QueryCoverage=77%, HitCoverage=4%, E-value=1e-15, Identity=50%"; Hit description =Similarity to 26S proteasome subunit 4
EGWLSVGLLSYRGVYESVIEVCAEVRKVLELLVGQIRTKILKKRNRFRYFHILTQVAYLDDIVNSWAYTFQRLHVDSRTGISGTKSSCSEVCQSTRHLAETIVQVAPVGNPAEVEDIPRPNQQD

SEQ ID NO: 76214 - protein, 74 aa, Setaria italica
  Transcript Sequence Number=SeqID_10240
CTAEQDNSVHLAETNVQVAPVGNPAEVEDILAQHTEDCEVVPGPNKMQDNPVQYTAEQLGTHTMVCDLDDDDVT

SEQ ID NO: 76215 - protein, 514 aa, Setaria italica
  misc_feature (73)..(73): Xaa can be any naturally occurring amino acid
  Transcript Sequence Number=SeqID_10241
  Gene Ontology: Mol. function=nucleoside-triphosphatase activity; Cellular component=protein complex
  Homolog annotation: Hit_ID=Q9LIM2; Match level="QueryCoverage=94%, HitCoverage=23%, E-value=5e-84, Identity=37%"; Hit description =Similarity to 26S proteasome subunit 4
MEKNSVPRSFWSTYLNSLIQQKGIANRIKMVLSSCGLASAQLGSHDSMLPSHVETQENFCGNRSNSTGSHIIXGLPHKLSGFRVLVAGAPRSGQQHLIRCLLHGFMGQIVIHKLDLATMVQEGNGDILSGLTQILLKCLNLGRCIIYMPRIDLWAVDKVHNQIEDNMLNMGTSNLASSTTNHIRKCSEVWNALVEQMDSLLASVSISVMSTSDLRFQDLPSGVRGFFSTHVVDQCLASSEHTIPRFSVNIDSHSSWDEMIDSCAFRLSHDLIQHHVQFLHDKSHKNNRHEQKEVFTSMEISAQGEPKSSENDQPMCGVASRENPTQLAASRAQQEPPPSNVKDNVKNVQKPLEDTVQRYPSSRIVKGNETLAIAAFGIQILQHPQFSKLCWVTSKLREGPCTDINGPWKGWPFNSCLLHSSASPDKSVNGGNNVIKGKEKTLYVRGLVAVGLLSYRGVYESVIEVCAEVRKVLELLVGQIRTKILEKRNRFRYFHILTQVAYLDDIVNSWANLD

SEQ ID NO: 76216 - protein, 65 aa, Setaria italica
  Transcript Sequence Number=SeqID_10242
  Gene Ontology: Mol. function=protein serine/threonine kinase activity; Biological process=protein amino acid phosphorylation
CCADSEFVIDALFVLNAFLALRLSGWCYKKGQLLLVYEYMPNGSLDQHLFRRGVHEQRPALSWES

SEQ ID NO: 76217 - protein, 40 aa, Setaria italica
  Transcript Sequence Number=SeqID_10243
MEVAVKRFIRGDSRGVSDFLAEVQIINRLRHKNIVPLIGT

SEQ ID NO: 76218 - protein, 558 aa, Setaria italica
  Transcript Sequence Number=SeqID_10244
  Gene Ontology: Mol. function=protein serine/threonine kinase activity; Biological process=protein amino acid phosphorylation
  Homolog annotation: Hit_ID=B9SRB8; Match level="QueryCoverage=93%, HitCoverage=75%, E-value=1e-108, Identity=41%"; Hit description =Serine-threonine protein kinase, plant-type, putative
  Pfam annotation: Domain name=Lectin_legB; Domain location=1-129; Score=-19.6; E_value=5.2e-09; Accession=PF00139.11; Description =Legume lectin domain
  Pfam annotation: Domain name=Pkinase; Domain location=206-487; Score =137.2; E_value=5.2e-38; Accession=PF00069.17; Description=Protein kinase domain
  Pfam annotation: Domain name=Pkinase_Tyr; Domain location=206-487; Score=86.3; E_value=1.1e-22; Accession=PF07714.9; Description =Protein tyrosine kinase
  Pfam module annotation: Pfam domain module=Lectin_legB::Pkinase::Pkina se_Tyr; Domain location=1-129::206-487::206-487
ATLQKAGPAANRFVAVELDTFKQVHDPDDNHVGLDVGSVVSSKTASLNDLRIATNVTTATNYTVWIQYDGVARHISVFFNVRGRPKPSSPVLESPLDLSEHVPETAYLGFSASTGTSFQLNCILDWSLSIEVIPDKKSNTWLIVVAVVVPVSLAAVAVAAFFLTKRLRARRSMERRQERLGHELNNLPGMPRVFEYDKLRKATRNFDERLQLGKGGYGMVYKGVVPADDGRPEATMEVAVKRFIRGDSRGVSDFLAEVQIINRLRHKNIVPLIGWCYKKGQLLLVYEYMPNGSLDQHLFRRGVHEQRPALSWESRYAIVRDVAAGLHYVHHEHTHMVLHRDIKASNVLLDASFRARLGDFGLARVLEHDRNSFTDLNVAGTRGFIAPEYSVGHKASRQTDVFAFGALVLEVVTGQYALRTQDLRCPLLTDWVWQMHGRGALLGAVDQGLGTAGFDHDEAGRLLQLALACSSPNPGDRPTMPEVLQVLNKASPPPEVPPFKPQFVWPPEGGAHFDLGDIELSVTTNRTTGNGASSTAMATQDTAPNSSEGYFPVLSSGR

SEQ ID NO: 76219 - protein, 220 aa, Setaria italica
  misc_feature (51)..(51): Xaa can be any naturally occurring amino acid
  Transcript Sequence Number=SeqID_10245
  Gene Ontology: Mol. function=nucleic acid binding; Biological process= response to cadmium ion
  Homolog annotation: Hit_ID=B6U4M0; Match level="QueryCoverage=90%, HitCoverage=45%, E-value=1e-100, Identity=60%"; Hit description =Polyadenylate-binding protein 2
  Pfam annotation: Domain name=RRM_1; Domain location=125-194; Score =98.2; E_value=2.9e-26; Accession=PF00076.14; Description=RNA recognition motif. (a.k.a. RRM, RBD, o
  Pfam annotation: Domain name=RRM_1; Domain location=31-103; Score =61.7; E_value=2.8e-15; Accession=PF00076.14; Description=RNA recognition motif. (a.k.a. RRM, RBD, o
  Pfam module annotation: Pfam domain module=RRM_1::RRM_1; Domain location=125-194::31-103
VLNFALLNSKPIRVMYSNRDPSSRRSGSANIFIKNLDKTIDNKTLHETFSXYFGYLFLLLCKVAMDEVGQSKGFGFVQYEKEEAAQAAIKSLNGMLINDKPVFVGPFLRKQERDHSFDKTKFNNVFVKNLSESTTREDLVKIFGEYGSITSAVVMIGMDGKSKCFGFINFENPDAAARAVQELNGKKINDKEWYVGRAQKKSEREMELKKEEFEDKRLRK

SEQ ID NO: 76220 - protein, 270 aa, Setaria italica
  Transcript Sequence Number=SeqID_10246
  Gene Ontology: Mol. function=DNA binding; Cellular component=nucleus; Biological process=regulation of transcription
  Homolog annotation: Hit_ID=B9SQP6; Match level="QueryCoverage=36%, HitCoverage=37%, E-value=1e-42, Identity=81%"; Hit description=R2r3 -myb transcription factor, putative
  Pfam annotation: Domain name=Myb_DNA-binding; Domain location=19-65; Score=56.0; E_value=1.4e-13; Accession=PF00249.23; Description=Myb -like DNA-binding domain
  Pfam annotation: Domain name=Myb_DNA-binding; Domain location=71-116; Score=45.4; E_value=2.2e-10; Accession=PF00249.23; Description=Myb -like DNA-binding domain
  Pfam module annotation: Pfam domain module=Myb_DNA-binding::Myb_DNA -binding; Domain location=19-65::71-116
MEMASDAPPPATAVVVMKKGSWSPEEDAQLTRLVEQHGPHRWSLISAAIPGRSGKSCRLRWCNQLSPEVQHRAFTAHEDAIILGAHARYGNKWATIARLLPGRTDNSIKNHWNSNLRRCRRRAAALAAAGAPSTSSRAAAAGGTQQLFLQQDMDSAPPVADQQPASGLGLLNPNNHRDDDGALHEPSTSLSLTLGLPLPEPEAGASATGMKAADQQPSPLPLRMPEEEGNAQAQLMAVVRQMVREEVQRQTGQLAYSLMAAAAWAKGHHR

SEQ ID NO: 76221 - protein, 662 aa, Setaria italica
  misc_feature (264)..(264): Xaa can be any naturally occurring amino acid
  misc_feature (472)..(472): Xaa can be any naturally occurring amino acid
  misc_feature (563)..(563): Xaa can be any naturally occurring amino acid
  misc_feature (648)..(648): Xaa can be any naturally occurring amino acid
  Transcript Sequence Number=SeqID_10247
  Gene Ontology: Mol. function=nucleic acid binding; Biological process= response to cadmium ion
  Homolog annotation: Hit_ID=B6U4M0; Match level="QueryCoverage=92%, HitCoverage=92%, E-value=0.0, Identity=86%"; Hit description =Polyadenylate-binding protein 2
  Pfam annotation: Domain name=PABP; Domain location=564-635; Score =145.6; E_value=1.5e-40; Accession=PF00658.10; Description=Poly -adenylate binding protein, unique domain
  Pfam annotation: Domain name=RRM_1; Domain location=132-201; Score =91.1; E_value=4e-24; Accession=PF00076.14; Description=RNA recognition motif. (a.k.a. RRM, RBD, o
  Pfam annotation: Domain name=RRM_1; Domain location=223-292; Score =91.3; E_value=3.3e-24; Accession=PF00076.14; Description=RNA recognition motif. (a.k.a. RRM, RBD, o
  Pfam annotation: Domain name=RRM_1; Domain location=326-395; Score =90.5; E_value=5.9e-24; Accession=PF00076.14; Description=RNA recognition motif. (a.k.a. RRM, RBD, o
  Pfam annotation: Domain name=RRM_1; Domain location=52-114; Score =58.6; E_value=2.4e-14; Accession=PF00076.14; Description=RNA recognition motif. (a.k.a. RRM, RBD, o
  Pfam module annotation: Pfam domain module=PABP::RRM_1::RRM_1::RRM _1::RRM_1; Domain location=564-635::132-201::223-292::326-395::52-114
  Subcellular localization annotation: CTP_CleavageSite=64; ConfidenceScore=5.49e-01
SDVVGSGCATPTPTPTAPGDTTAGTAPALPFATTAAATCAAIASYTPRPGGSVTDSQLYELFSQAGQVVSVRVCRDVTSRRSLGYAYVNFSNPMDAARALEVLNFALLNSKPIRVMYSNRDPSSRRSGSANIFIKNLDKTIDNKTLHETFSTFGTILSCKVAMDEVGQSKGFGFVQYEKEEAAQAAIKSLNGMLINDKPVFVGPFLRKQERDHSFDKTKFNNVFVKNLSESTTREDLVKIFGEYGSITSAVVMIGMDGKSKCFXFINFENPDAAARAVQELNGKKINDKEWYVGRAQKKSEREMELKRRFEQSLKDAADKYQGLNLYLKNLDDSIGDDQLRELFSNFGKITSCKVMCDQNGLSKGSGFVAFSTREEASQALTEMNGKMISGKPLYVAFAQRKEDRKAMLQAQFSQMRPPVPMTPTLAPRLPMYPPMAPQQLFYGQAPPAMIPPQPGYGFQQQLVPGMRPGGXPHMPNYFVPVVQQGQQGPRPGMRRGAGAQGQQPVPSFQQQMVPRARMYRYPTGRNMPEAPAMPGVAGGMIQPYDMGGFPVRDAALSPSAQXIGTLTSALANATPEQQRTILGENLYPLVEQLEPNQAAKVTGMLLEMDQTEVLHLLESPEALKSKVAEAMDVLRNVAHQQNPNTPXTSQLAALSLTEGII

SEQ ID NO: 76222 - protein, 419 aa, Setaria italica
  Transcript Sequence Number=SeqID_10248
  Gene Ontology: Mol. function=nucleic acid binding
  Homolog annotation: Hit_ID=B9GZR8; Match level="QueryCoverage=62%, HitCoverage=15%, E-value=1e-84, Identity=62%"; Hit description =Chromatin remodeling complex subunit
ANQKRALDDLVIQRGSYNTEFFKKLDPMEFFSGHTSLRVEDQQKDCSMTAGSSNDADVGLSNADVEAAIRQAEDEADYMALKKLEQEEAVDNQEFSEEAAGRPEDDDLVNEEDARHDEHIIEEHRYNSSDMEKEKNAALSNQLNEEKALTLAVGDEDTDMLADVKQMAAAAAAAGQASSSFENQLRPIDRYAMRFMELWDPVIDKAAINRQVNVEEEEWELDRIEKLKEDLEAEIDEDQEPLSYESWDVDFATTAYRQHVEALTQKQLLEEQEKQAREAAKELEEKNDNMSAHRRKSKKNKKKTGKFKSLKRGRLSSESEVILEETSVDTMSIDDNAPSPELISDESPRHYSNKRKKIMSATEEENSNRSLKKFKKATKSSSASEALSPRHLREEFNDSDPKSAARTKSDGRISIPCMS

SEQ ID NO: 76223 - protein, 89 aa, Setaria italica
  Transcript Sequence Number=SeqID_10249
  Gene Ontology: Mol. function=arginine decarboxylase activity; Biological process=putrescine biosynthetic process
  Homolog annotation: Hit_ID=C0LN13; Match level="QueryCoverage=100%, HitCoverage=14%, E-value=3e-40, Identity=85%"; Hit description =Arginine decarboxylase
  Pfam annotation: Domain name=Orn_DAP_Arg_deC; Domain location=2-89; Score=-20.4; E_value=0.087; Accession=PF00278.14; Description =Pyridoxal-dependent decarboxylase, C-terminal sheet domain
GIYSHAAELKKHGIEMYKLGKKLSKRIVGDANPIYNYHMNLSVFSLVPDFWGIKQLFPMMPVSRLNDKPGLNGTLVDITCDSDGKIEKF

SEQ ID NO: 76224 - protein, 90 aa, Setaria italica
  Transcript Sequence Number=SeqID_10250
  Gene Ontology: Mol. function=protein serine/threonine kinase activity; Cellular component=membrane; Biological process=protein amino acid phosphorylation
  Homolog annotation: Hit_ID=B6TFF8; Match level="QueryCoverage=100%, HitCoverage=26%, E-value=2e-35, Identity=77%"; Hit description =Protein kinase APK1A
GKAALPWARRMAIAFQVAMALEHLHETRDPAVIHGDIKASNVLLDASLDAKLCDFGFAHVGFSAALQPPDAAASRASARSVMGSPGYVDP

SEQ ID NO: 76225 - protein, 279 aa, Setaria italica
  Transcript Sequence Number=SeqID_10251
  Gene Ontology: Mol. function=protein serine/threonine kinase activity; Cellular component=membrane; Biological process=protein amino acid phosphorylation
  Homolog annotation: Hit_ID=B6TE49; Match level="QueryCoverage=98%, HitCoverage=77%, E-value=1e-108, Identity=75%"; Hit description =Leucine-rich repeat receptor protein kinase EXS
  Pfam annotation: Domain name=APH; Domain location=1-179; Score=-15.7; E_value=0.03; Accession=PF01636.15; Description=Phosphotransferase enzyme family
  Pfam annotation: Domain name=Pkinase; Domain location=1-261; Score =117.9; E_value=3.3e-32; Accession=PF00069.17; Description=Protein kinase domain
  Pfam annotation: Domain name=Pkinase_Tyr; Domain location=1-261; Score=60.8; E_value=9e-18; Accession=PF07714.9; Description=Protein tyrosine kinase
  Pfam module annotation: Pfam domain module=APH::Pkinase::Pkinase_Tyr; Domain location=1-179::1-261::1-261
TVYLASLSSSRLGAVKVQRSSERLHRAFRQELHVLLSLRHPHVVRLLGYCDEREEGVLVFEYAPNGDLHERLHGDGDGAAGAFPWERRVAVALQVAAALEYLHEGRDQAVIHGDIKASNVLLDANLNAKLCDFGFAHVGVSATVGGGGRPSARAVMGSPGYVDPHLLRSGVATKKSDVYSFGVLLLELLTGKEAVCRETGHRLTAAVGPKVSGGKVSDVMDQRLGAEYDAAESAAVAELAMQCVSDRPEFRPSMADVVRVLQQEKTAAAGSKSDRKMMS

SEQ ID NO: 76226 - protein, 102 aa, Setaria italica
  Transcript Sequence Number=SeqID_10252
  Subcellular localization annotation: CTP_CleavageSite=48; ConfidenceScore=5.62e-01
VWSVLGSRPAAHKGRPAKPLKLTTRLGQVGLSPTQPARRQKPGNGRARASLSPPASGPNPVKSAPGLIPSTAATRHGGGRGNRRRRRRPHPARAGAVPASRG

SEQ ID NO: 76227 - protein, 122 aa, Setaria italica
  misc_feature (9)..(9): Xaa can be any naturally occurring amino acid
  Transcript Sequence Number=SeqID_10253
  Gene Ontology: Mol. function=protein kinase CK2 regulator activity; Cellular component=protein kinase CK2 complex; Biological process =Wnt receptor signaling pathway
  Homolog annotation: Hit_ID=Q336R5; Match level="QueryCoverage=95%, HitCoverage=41%, E-value=2e-63, Identity=97%"; Hit description =Casein kinase II beta-4 subunit, putative, expressed
  Pfam annotation: Domain name=CK_II_beta; Domain location=10-122; Score=184.3; E_value=3.5e-52; Accession=PF01214.10; Description =Casein kinase II regulatory subunit
VVREGEDTXWIAWFCSLRGNEFFCEIDDDYIQDDFNLCGLSNQVPYYDYALDLILDIESSNGDVFTEEQNELIESSAEMLYGLIHARYVLTSKGLAAMLEKFKNYDFGRCPRVYCCGQPLFF

SEQ ID NO: 76228 - protein, 62 aa, Setaria italica
  Transcript Sequence Number=SeqID_10254
  Gene Ontology: Mol. function=protein kinase CK2 regulator activity; Cellular component=protein kinase CK2 complex
  Homolog annotation: Hit_ID=Q336R5; Match level="QueryCoverage=70%, HitCoverage=15%, E-value=9e-18, Identity=86%"; Hit description =Casein kinase II beta-4 subunit, putative, expressed
IFVNQLQLLALARPLLYPDIDGSYFGTTFPHLFLMTYPHLKPQKPTQQYTPRVFGFKLHKKS

SEQ ID NO: 76229 - protein, 341 aa, Setaria italica
  Transcript Sequence Number=SeqID_10255
  Gene Ontology: Mol. function=protein kinase CK2 regulator activity; Cellular component=protein kinase CK2 complex; Biological process =Wnt receptor signaling pathway
  Homolog annotation: Hit_ID=Q336R5; Match level="QueryCoverage=76%, HitCoverage=94%, E-value=1e-129, Identity=85%"; Hit description =Casein kinase II beta-4 subunit, putative, expressed
  Pfam annotation: Domain name=CK_II_beta; Domain location=154-328; Score=440.2; E_value=3.2e-129; Accession=PF01214.10; Description =Casein kinase II regulatory subunit
  Subcellular localization annotation: CTP_CleavageSite=37; ConfidenceScore=5.64e-01
FWFFLFSFSSPSALAPRLVTSPISLSRFPRLRSQETLAHKRRPATPEAPQQRRPELPRKDRKSGSSGALRGSGLFGGGGLGMDRKRIKDALEKHLERSSPSTSRGVAAKERERLAAGKLPASLGKAGKVSDGEDFESDSEDSDVSGSEGEDTSWIAWFCSLRGNEFFCEIDDDYIQDDFNLCGLSNQVPYYDYALDLILDIESSNGDVFTEEQNELIESSAEMLYGLIHARYVLTSKGLAAMLEKFKNYDFGRCPRVYCCGQPCLPAGQSDIPRSSTVKIYCPKCEELHYPRSKYQGNIDGSYFGTTFPHLFLMTYPHLKPQKPTQQYTPRVFGFKLHKKS

SEQ ID NO: 76230 - protein, 92 aa, Setaria italica
  Transcript Sequence Number=SeqID_10256
PGRGHPRLIVKECWTMHMSSSCHELMHLELEFGRPKGGLDQPSDHNGLDVIAFGIISWLGALAMGDVGRLAPGHLVPTTCCCSSVPKFGLLF

SEQ ID NO: 76231 - protein, 94 aa, Setaria italica
  misc_feature (13)..(13): Xaa can be any naturally occurring amino acid
  Transcript Sequence Number=SeqID_10257
  Gene Ontology: Mol. function=metal ion binding; Cellular component =mitochondrial intermembrane space protein transporter complex; Biological process=protein import into mitochondrial inner membrane
  Homolog annotation: Hit_ID=Q9XGX7; Match level="QueryCoverage=100%, HitCoverage=100%, E-value=4e-46, Identity=97%"; Hit description =Mitochondrial import inner membrane translocase subunit Tim9
  Pfam annotation: Domain name=zf-Tim10_DDP; Domain location=21-86; Score=101.6; E_value=2.7e-27; Accession=PF02953.7; Description =Tim10DDP family zinc finger
MDKSMLGDLDGLXPEEDKMRMAAMIDQLQIRDSLRMYNSLVERCFTDCVDTFRRKTLDKQEESCVRRCAEKFLKHSMRVGMRFAELNQGVATPD

SEQ ID NO: 76232 - protein, 95 aa, Setaria italica
  Transcript Sequence Number=SeqID_10258
  Gene Ontology: Cellular component=chloroplast envelope
GFFPPRPPGEDGAGDSDLGFSKWAEKLRGGASGEKDAQDKRKLTSKWRPTTKGTLKRTYRVRSTEEGRRILKEIASVLSEDDHFVDASTHKGCQI

SEQ ID NO: 76233 - protein, 131 aa, Setaria italica
  Transcript Sequence Number=SeqID_10259
  Gene Ontology: Cellular component=chloroplast envelope
SRSCGGASGEKDAQDKRKLTSKWRPTTKGTLKRTYRVRSTEEGRRILKEIASVLSEDDHFVDASTHKGCQIRRESAHGESVCCYNVRALFDELPTPHLVLEITPFPAGHLTDNDYRKAERLEMVLRLSASI

SEQ ID NO: 76234 - protein, 129 aa, Setaria italica
  Transcript Sequence Number=SeqID_10260
  Gene Ontology: Mol. function=hydrolase activity; Biological process =glutamine metabolic process
  Homolog annotation: Hit_ID=B9RSP8; Match level="QueryCoverage=100%, HitCoverage=28%, E-value=2e-25, Identity=51%"; Hit description=Gamma- glutamyl-gamma-aminobutyrate hydrolase, putative
FVRAVVAYQEKQLAAAHVPRSAVPTSPKLNKEMERRRRVIFRSFSLAKDMYLSGGRTKPAEPRDLEAGAEFLESNTASLSVQQEKRLKQMGATVRNASGYLNSLKVNNGREAAARALMAEMTVDQLSDL

SEQ ID NO: 76235 - protein, 112 aa, Setaria italica
  misc_feature (1)..(28): Xaa can be any naturally occurring amino acid
  Transcript Sequence Number=SeqID_10261
XXXXXXXXXXXXXXXXXXXXXXXXXXXXPAPQRALFLLFSATTLNDSRRQRRRPHRLQEHRTDHTLQTMQLHPAAIIYLALEEVLDPVAGLLAVALEAVEAVDEDEAEAVEV

SEQ ID NO: 76236 - protein, 102 aa, Setaria italica
  Transcript Sequence Number=SeqID_10262
MKAVERAKLVRSLRQESRRLRLLVLVIGFFLVTLTFVIVSKPDALLFNLNGRLSVDQAPRSLLIRQRVDADDAGSRRSADTLAAAAEDPKVVDDDNAAKEAH

SEQ ID NO: 76237 - protein, 254 aa, Setaria italica
  Transcript Sequence Number=SeqID_10263
  Gene Ontology: Mol. function=ubiquitin protein ligase binding; Cellular component=cullin-RING ubiquitin ligase complex; Biological process=ubiquitin-dependent protein catabolic process
  Homolog annotation: Hit_ID=Q9SGJ0; Match level="QueryCoverage=81%, HitCoverage=22%, E-value=5e-48, Identity=51%"; Hit description =F28J7.14 protein
MVLGLRTKTRKDSAFHVDFNILIQEISPWPPSESLKSLRSVVLFWENGERNSGKTSTVAPSIGSGSASGKIEFNEFISLQAVFQKEGSSKSGKWQKNLLELNLYEPRRDKLKGQHLGTATLDLAEHAMFHEDSSVPVPLNSKRSFKSNAQPMVYLRIQPLDGDNSSVSSRDALSKEASIDKDSKEFASATMSEEYTEDTEFASFTDDDEEEAPYPYRSGGTVPTGSNRSQESLKGKDISLAVNEGTSSTFDSQR

SEQ ID NO: 76238 - protein, 94 aa, Setaria italica
  Transcript Sequence Number=SeqID_10264
  Gene Ontology: Mol. function=transporter activity; Cellular component= integral to membrane; Biological process=transport
  Homolog annotation: Hit_ID=B6U0S4; Match level="QueryCoverage=100%, HitCoverage=20%, E-value=3e-24, Identity=65%"; Hit description =Patellin-5
  Pfam annotation: Domain name=CRAL_TRIO_N; Domain location=34-94; Score=24.3; E_value=0.00021; Accession=PF03765.7; Description =CRALTRIO, N-terminus
DSYVAAALPPSELRALADLKALLATHPDPISIWGVPLNPQSPPPAAAADGTAATPAADERADVVLLKFLRARDFRVRDAHAMLLRCAAWRAEFG

SEQ ID NO: 76239 - protein, 67 aa, Setaria italica
  Transcript Sequence Number=SeqID_10265
RGRRERRGGGGRQPAGQEARHVGRARGEPAAVRQRGEEAGEPADAEQSMSKTEQSGEGITRFTSVHS

SEQ ID NO: 76240 - protein, 138 aa, Setaria italica
  Transcript Sequence Number=SeqID_10266
  Gene Ontology: Mol. function=microtubule motor activity; Cellular component=microtubule associated complex; Biological process =microtubule-based movement
  Homolog annotation: Hit_ID=B9T432; Match level="QueryCoverage=100%, HitCoverage=13%, E-value=2e-58, Identity=77%"; Hit description =Bipolar kinesin KRP-130, putative
  Pfam annotation: Domain name=Kinesin; Domain location=1-98; Score= -81.9; E_value=5.1e-10; Accession=PF00225.15; Description=Kinesin motor domain
LVDLAGSENIARSGVREGRAREAGEMNRSLLTLGRVITALVEHSVHVPYRDSKLTRLLRESLGGKAKACIIATVSPSVHSQEETLVTLDYASRAKSIRNRPEANKTTCNIMLKDLYQEMERMKQDVKAAREKNGIYIP

SEQ ID NO: 76241 - protein, 64 aa, Setaria italica
  Transcript Sequence Number=SeqID_10267
SSFCCGNIFVMQIMFCVNMVNIKVVDNFIIYLVLNFHDHNPDGLGSIDFTISSLGFAYSMYRSE

SEQ ID NO: 76242 - protein, 93 aa, Setaria italica
  Transcript Sequence Number=SeqID_10268
  Gene Ontology: Cellular component=anchored to membrane
  Homolog annotation: Hit_ID=Q06I84; Match level="QueryCoverage=98%, HitCoverage=21%, E-value=5e-41, Identity=88%"; Hit description =Fasciclin-like protein FLA22
  Pfam annotation: Domain name=Fasciclin; Domain location=4-93; Score =23.1; E_value=1.4e-05; Accession=PF02469.14; Description=Fasciclin domain
DARAFNVAASMLEASGVADEFEADERGAGITVFAPTDDAFAGLPAGDRLQSLPADRKAVVLRFHVLHSYYPLGSLESIVNPVQPTLATEFSNA

SEQ ID NO: 76243 - protein, 309 aa, Setaria italica
  Transcript Sequence Number=SeqID_10269
  Gene Ontology: Mol. function=metal ion binding; Biological process =biological_process
  Homolog annotation: Hit_ID=B9SSQ5; Match level="QueryCoverage=73%, HitCoverage=16%, E-value=1e-51, Identity=46%"; Hit description =Protein binding protein, putative
  Pfam annotation: Domain name=PHD; Domain location=11-82; Score=9.7; E_ value=0.0023; Accession=PF00628.21; Description=PHD-finger
MDDDSAEEYDVCVICDDGGSVTCCDGVCQRAFHLGASHPVDSDDDDSEEHDDCREKLGLTLEQAKMIISTEEGFICKNCQFKQHQCFACGLLGSSDDASSHPEVFQCERDNCAHFYHPKCIAQLLYPDSEEAALFEVEVAAAREKFTCPMHECIVCKGVENKNDRNMQFAVCRRCPTAYHRQCLPSDIIFKSRRGPNGSLQRAWNDILPDRILIFCMKHKIVRNLRTPERNHIIFPEANGVPVPETLEGAPMEQDVPEEIEPPPSSEQTQPPPPAASNQNQCSCSSPLTFAPSFLYRQPYPGSCGWIDD

SEQ ID NO: 76244 - protein, 54 aa, Setaria italica
  Transcript Sequence Number=SeqID_10270
FKIINMDHEKTEKDWNITLTMKTKTKLDQGETRPPDFVLRRLCRDSNPSWLSEP

SEQ ID NO: 76245 - protein, 121 aa, Setaria italica
  misc_feature (36)..(36): Xaa can be any naturally occurring amino acid
  Transcript Sequence Number=SeqID_10271
  Gene Ontology: Mol. function=protein serine/threonine kinase activity; Biological process=protein amino acid phosphorylation
  Homolog annotation: Hit_ID=B6U6J4; Match level="QueryCoverage=57%, HitCoverage=9%, E-value=8e-19, Identity=68%"; Hit description=ATP binding protein
APSMSEYQRGVSAWNFDIEDLKAQASLICDDDPLEXKEDDDSARITDIDKDTSSDGHFGKPTQLNGNNCRRTCQRSGSLSQLGFESRHNLLKTKSGGRVSPWSSFVLFPLLLLYSNLSLFF

SEQ ID NO: 76246 - protein, 138 aa, Setaria italica
  misc_feature (96)..(96): Xaa can be any naturally occurring amino acid
  Transcript Sequence Number=SeqID_10272
  Gene Ontology: Mol. function=protein kinase activity; Biological process=protein amino acid phosphorylation
  Homolog annotation: Hit_ID=B6U6J4; Match level="QueryCoverage=100%, HitCoverage=15%, E-value=2e-45, Identity=72%"; Hit description=ATP binding protein
CNSSVSSSVLIPHLQNLVKQTVFQQDLITNLLSSLQQNERVDDQSRVQSIGSDTVVEASTAEGERSILVKIFELQSSSLPHSMLLPAIDVSLSTSXMISLTDELIAAKLKHVQLQGELNALYCQEEIVDRREDENEEA

SEQ ID NO: 76247 - protein, 182 aa, Setaria italica
  misc_feature (172)..(172): Xaa can be any naturally occurring amino acid
  Transcript Sequence Number=SeqID_10273
  Gene Ontology: Mol. function=protein serine/threonine kinase activity; Biological process=protein amino acid phosphorylation
  Homolog annotation: Hit_ID=B6U6J4; Match level="QueryCoverage=90%, HitCoverage=21%, E-value=4e-72, Identity=84%"; Hit description=ATP binding protein
TFARSTFSVTSENVDLAKVQEVPMSSASCKLQEGPSLRKSASVGDWSVNAKTMSTSHQRKELCNSSVSSSVLIPHLQNLVKQTVFQQDLITNLLSSLQQNERVDADQSRVQSIGSDTVVEASTAEGERSILVKIFELQSRMISLTDELIAAKLKHVQLQGELNALYCQEELXDRREDENEEA

SEQ ID NO: 76248 - protein, 77 aa, Setaria italica
  Transcript Sequence Number=SeqID_10274
VKENFRSDPRYKATKHEERETIFNEYIAELKSAEQEAEQAARAKVDEQAKLKERERETRKRKEREEQEMERVKNEGS

SEQ ID NO: 76249 - protein, 94 aa, Setaria italica
  Transcript Sequence Number=SeqID_10275
TSLVVFVICKNKALTYTVSCYIYILLFLDAMRLFSQSFCGTMVLYCYTSILEAGIMAISTIGATKMNAHCQKQQLKLTQQLNPDYSGSTEYTYL

SEQ ID NO: 76250 - protein, 582 aa, Setaria italica
  Transcript Sequence Number=SeqID_10276
  Gene Ontology: Mol. function=protein binding; Cellular component =nucleus; Biological process=transcription from RNA polymerase II promoter
  Homolog annotation: Hit_ID=B9RPX6; Match level="QueryCoverage=95%, HitCoverage=62%, E-value=1e-153, Identity=50%"; Hit description=Pre -mRNA-processing protein PRP40, putative
  Pfam annotation: Domain name=FF; Domain location=192-241; Score=50.0; E_value=9.1e-12; Accession=PF01846.11; Description=FF domain
  Pfam annotation: Domain name=FF; Domain location=259-309; Score=18.8; E_value=0.022; Accession=PF01846.11; Description=FF domain
  Pfam annotation: Domain name=FF; Domain location=323-372; Score=37.9; E_value=4e-08; Accession=PF01846.11; Description=FF domain
  Pfam annotation: Domain name=FF; Domain location=426-478; Score=38.9; E_value=2e-08; Accession=PF01846.11; Description=FF domain
  Pfam annotation: Domain name=FF; Domain location=485-545; Score=9.3; E_value=0.27; Accession=PF01846.11; Description=FF domain
  Pfam annotation: Domain name=WW; Domain location=20-49; Score=25.5; E_ value=0.00022; Accession=PF00397.18; Description=WW domain
  Pfam module annotation: Pfam domain module=FF::FF::FF::FF::FF::WW; Domain location=192-241::259-309::323-372::426-478::485-545::20-49
KGEPEKVATQPVPVSWDKVAGTDWSIVTTSDGKKYYYDNKQKVSSWQLPPEVAELLKNVESDSLKEGSTSLQDAATIDNKGVISIDASTPAIQTGGRDSLPLRQTVAPASPSALDLIKKKLQDAGASSAPSPLATSSSAASELNGSKPADAALKGQQVSNNCEKSKDNNGDANMSDSSSDSDDEEHGPSKEDCIRQFKEMLKERGVAPFSKWEKELPKIVFDPRFKAIPSHSTRRAIFDHYVRTRAEEERKEKKAAQKAAVEAYKELLEEASKDINEKTEYQEFKRKWGADPRFEALDRKEREALFSEKVKAIQEKVKSMRKAVVADFKSMLRESKDVTSTSRWTKVKENFRSDPRYKATKHEERETIFNEYIAELKSAEQEAEQAARAKVDEQAKLKERERETRKRKEREEQEMERVKMKVRRKEAVSSYQALLVEMIKDPKVSWTESKPKLEKDPQGRALNPDLGQSDAEKLFRDHVKDLYERCVRDFRALLSEVITPEVAARTSDEGRTAVNSWSEAKCLLRSDPRYNKLASKDRESIWRRYADDLMRKVKQSDTKEKEKEKSDTDGKQRRSSDPPRRR

SEQ ID NO: 76251 - protein, 746 aa, Setaria italica
  misc_feature (517)..(517): Xaa can be any naturally occurring amino acid
  Transcript Sequence Number=SeqID_10277
  Gene Ontology: Mol. function=protein serine/threonine kinase activity; Biological process=protein amino acid phosphorylation
  Homolog annotation: Hit_ID=B6U6J4; Match level="QueryCoverage=97%, HitCoverage=98%, E-value=0.0, Identity=65%"; Hit description=ATP binding protein
  Pfam annotation: Domain name=Pkinase; Domain location=32-293; Score =256.0; E_value=9.2e-74; Accession=PF00069.17; Description=Protein kinase domain
  Pfam annotation: Domain name=Pkinase_Tyr; Domain location=32-293; Score=79.6; E_value=1.1e-20; Accession=PF07714.9; Description =Protein tyrosine kinase
  Pfam module annotation: Pfam domain module=Pkinase::Pkinase_Tyr; Domain location=32-293::32-293
MGRNGSVKRSGSAGGSGHAAGPPTFTVNPADYRLMEEVGYGAHAVVYRAIFLPRNEVVAVKCLDLDQLNNNIDEIQREAQIMSLIDHPNVIRAYCSFVVEHSLWVIMPFMTEGSCLHLMKISYQDGFDEPVIGSILKETLKALEYLHRQGQIHRDVKAGNILIDGAGVVKLGDFGVSACMFDRGDRQRSRNTFVGTPCWMAPEVLQPGTGYNFKADIWSFGITALELAHGHAPFSKYPPMKVLLMTLQNAPPGLDYERDKRFSKSFKEMVAMCLVKDQTKRPTAEKLLKHSFFKNAKPPDLTIKSILSDLPPLWDRVKALQLKDAAQLALKKMPSSEQEALSLSEYQRGVSAWNFDIEDLKAQASLIHDDEPPEIKEDDDTARSIEVEKDSSSRNHFGKSSSNDCDSRERTFATTVNSRGNSPITNEVFDFDFDFNDTDPKKKADGCENNTRENDSLPSTSKREPESNHWTSDVGQRQQTFGGNNSSVAAERGHSFERDVAVQMISDKQRSDMRKTXASLSGPLSLPTRASANSLSAPIRSSGVYVDSSVDKSKRNVVEIKGRFSVTSENVDLAKVQEVPVPVSCLSRKSPEGSLLRKSASASDCLVNAKLMCNPNQLKELCNSSVSSSILIPHLNNLVQQTMFQQDLIMNLLSSLQQNEKADGSEPGISSQVRTMESDKEQAETANSEKERSLLVKISELQSRMITLTDELIAAKLKHAQLQQELNALYCREEIEDIRDEDNEET

SEQ ID NO: 76252 - protein, 732 aa, Setaria italica
  Transcript Sequence Number=SeqID_10278
  Gene Ontology: Mol. function=protein serine/threonine kinase activity; Biological process=protein amino acid phosphorylation
  Homolog annotation: Hit_ID=B6U6J4; Match level="QueryCoverage=97%, HitCoverage=97%, E-value=0.0, Identity=82%"; Hit description=ATP binding protein
  Pfam annotation: Domain name=Pkinase; Domain location=28-289; Score =260.8; E_value=3.3e-75; Accession=PF00069.17; Description=Protein kinase domain
  Pfam annotation: Domain name=Pkinase_Tyr; Domain location=28-289; Score=91.4; E_value=3.2e-24; Accession=PF07714.9; Description =Protein tyrosine kinase
  Pfam module annotation: Pfam domain module=Pkinase::Pkinase_Tyr; Domain location=28-289::28-289
MVRSASMRRSSVPTPAAVPAFTVSPGDYRLLEEVGYGANAVVYRAVFIPTNRTVAVKCLDLDRVNSNLDDVRKEAQTMSLIDHPNIIRSYCSFVVDHNLWVVMPFMSEGSCLHLMKVAYPDGFDEPIIASILKETLKALEYLHRQGHIHRDVKAGNILIDSPGVVKLGDFGVSACMFDRGDRQRARNTFVGTPCWMAPEVLQPGTGYNFKADIWSFGITALELAHGHAPFSKYPPMKVLLMTLQNAPPGLDYDRDKKFSKSFKEMVAMCLVKDQTKRPTAEKLLKHSFFKNAKPPELTVKSVLTDLPPLWDRVKALQLKDAAQLALKRMPSSEQEALSMSEYQRGVSAWNFDIEDLKAQASLICDDDPLELKEDDDSARITDIDKDTSSDGHFGKPTQLNGNNCSERTSAEQGQNGPERSEALSSNNGSAHSERKADGPKNPGSEIDLLPSTSPDGKNCKSEVRQKQRTYSGPIMQSGLHNSSMTERGHIVERDVGGQSVSDKQKNGTRRTNNLSGPLSLPTRASANSLSAPIRSSAGYVGSLGDKPKRTMVEIKGRFSVTSENVDLAKVQEVPMSSASCKLQEGPSLRKSASVGDWSVNAKTMSTSHQRKELCNSSVSSSVLIPHLQNLVKQTVFQQDLITNLLSSLQQNERVDDQSRVQSIGSDTVVEASTAEGERSILVKIFELQSRMISLTDELIAAKLKHVQLQGELNALYCQEEIVDRREDENEEA

SEQ ID NO: 76253 - protein, 111 aa, Setaria italica
  Transcript Sequence Number=SeqID_10279
PGRCAAGGGATGGLGRRDDPRPPAIHPGDARQRIRRRVRGGQGRAAGRPVRRLAPLLATAAFESTPLRARRVTSVRVRPLYAYNGRSVYARRVRRKYTYALCIHTLVGVLA

SEQ ID NO: 76254 - protein, 221 aa, Setaria italica
  misc_feature (146)..(146): Xaa can be any naturally occurring amino acid
  Transcript Sequence Number=SeqID_10280
  Homolog annotation: Hit_ID=Q9S9N3; Match level="QueryCoverage=97%, HitCoverage=41%, E-value=2e-58, Identity=52%"; Hit description =T24D18.12 protein
  Pfam annotation: Domain name=DUF2049; Domain location=1-221; Score= -130.9; E_value=9.9e-07; Accession=PF09761.1; Description=Protein of unknown function (DUF2049)
  Subcellular localization annotation: CTP_CleavageSite=41; ConfidenceScore=5.48e-01
QHCPPDDTLNLYTYAVLRLTPRALSSNASSWSYLRKGTSVNAGPTSSSSNGTTAGERYHSRSRDTSPDGQNQMHHNFRPLLREKLSKGKDGFVAADFATTEVRGAVPLTPILWFQQAEERMYLCIYQHKSLTILLLIPASSLINGXEEGIAHVKKQMLENASQKIVTVEQKLTRGWGGENAYHVAGYRYLLVDPDRRISRASPPGKVTTLAKDSLLALNRL

SEQ ID NO: 76255 - protein, 280 aa, Setaria italica
  Transcript Sequence Number=SeqID_10281
  Homolog annotation: Hit_ID=Q9S9N3; Match level="QueryCoverage=100%, HitCoverage=57%, E-value=5e-88, Identity=55%"; Hit description =T24D18.12 protein
  Pfam annotation: Domain name=DUF2049; Domain location=1-280; Score =162.4; E_value=1.3e-45; Accession=PF09761.1; Description=Protein of unknown function (DUF2049)
  Subcellular localization annotation: CTP_CleavageSite=45; ConfidenceScore=5.52e-01
LLVSTTLPPDDTLNLYTYAVLRLTPRALSSNASSWSYLRKGTSVNAGPTSSSSNGTTAGERPLLREKLSKGKDGFVAADFATTEVRGAVPLTPILWFQQAEERMYLCIYQHKSLTILLLIPASSLINGEEGIAHVKKQMLENASQKIVTVEQKLTRGWGGENAYHVAGYRYLLVDPDRRISRASPPGKVTTLAKDSLLALNRLRQEVDLEKSRYKRSDPCHDNDFEVCIRTKSNAWVIAKITRGRELYMALEKGGETLLYASTAVEKFSNRYCEGAFSTD

SEQ ID NO: 76256 - protein, 237 aa, Setaria italica
  misc_feature (13)..(13): Xaa can be any naturally occurring amino acid
  Transcript Sequence Number=SeqID_10282
  Homolog annotation: Hit_ID=Q9SAG9; Match level="QueryCoverage=87%, HitCoverage=43%, E-value=5e-69, Identity=56%"; Hit description =F23A5.27
  Pfam annotation: Domain name=DUF2049; Domain location=2-236; Score =56.4; E_value=6.3e-16; Accession=PF09761.1; Description=Protein of unknown function (DUF2049)
VEDCEVIESEKHXHIFYQAEPDIWMVLVVEKTKDNELTWRCGALQGILKEAHSLFAMFHGPIRTLLDRQPSAELARGHLRTFLTDYLSDFHAGKKLQFPTYRDCLKERGTVQMLTVSREVALEVQSLTTVLGSCLGNTTCQSLVLFEDLLVSTTLPPDDTLNLYTYAVLRLTPRALSSNASSWSYLRKGTSVNAGPTSSSSNGTTAGERQRSACTYAFTSTRVSLLFLYLTLLLFPF

SEQ ID NO: 76257 - protein, 61 aa, Setaria italica
  Transcript Sequence Number=SeqID_10283
NPLYLWMRGYFIFLSTVLGWSIYIYFGEGLLLTFICCAIVFTLDRIAFYCRVIVRRFVFNK

SEQ ID NO: 76258 - protein, 164 aa, Setaria italica
  Transcript Sequence Number=SeqID_10284
  Subcellular localization annotation: CTP_CleavageSite=78; ConfidenceScore=5.01e-01
MKGYDVCTTIGSLSKSHISLIDESNPRKGIVVKMFSPKCSISVSVLCDSSVAQVPDKFVVSGRCDYATTFKHPSGCARSVSASGSGWVWLGTLFITIMSLLGGYILLGAVYRYYFLGLHSVEAIPNLDFWISLPRRIKTMFVPATRSRISYNRDGLGAYAPANH

SEQ ID NO: 76259 - protein, 152 aa, Setaria italica
  Transcript Sequence Number=SeqID_10285
SETIKLYVSYKSPSLLYTPASSRRYTTSDCDSTLCLSVCCYKFPPHNGNKKTLDKKNGVHLVLRVTMRPRRNQPPGDLTLDEPRVGVAGPGVERHAGGAVGVVGAGGGEGVAERVRGVLLHRHRVVVDGGGRRRRCHRHRHHLLLQQEGLLL

SEQ ID NO: 76260 - protein, 144 aa, Setaria italica
  Transcript Sequence Number=SeqID_10286
  Gene Ontology: Mol. function=metal ion binding
  Homolog annotation: Hit_ID=B9SZJ9; Match level="QueryCoverage=79%, HitCoverage=28%, E-value=3e-21, Identity=47%"; Hit description =Protein binding protein, putative
MMDLLMRSIFSISAEIKVGFTLEKPVSFLTSHIDKLGNDIFEEIGVPNSKISIVSMQPLTSKYSTNVVFGVLPYPKDAAISLPALSVLKSSLIEMMLQHVNLSLTPSLFGHPSSFELMRFPGGITVIPSQPETRNGIGKAHEGI

SEQ ID NO: 76261 - protein, 451 aa, Setaria italica
  misc_feature (325)..(325): Xaa can be any naturally occurring amino acid
  Transcript Sequence Number=SeqID_10287
  Gene Ontology: Mol. function=metal ion binding
  Homolog annotation: Hit_ID=B9SZJ9; Match level="QueryCoverage=51%, HitCoverage=57%, E-value=3e-52, Identity=49%"; Hit description =Protein binding protein, putative
GGCVGGCGAIGRAVSFRCVFVLLLAAGVLVPALFLLVPSRHEGYVSDDPDVLAAEIKVGFTLEKPVSFLTSHIDKLGNDIFEEIGVPNSKISIVSMQPLTSKYSTNVVFGVLPYPKDAAISLPALSVLKSSLIEMMLQHVNLSLTPSLFGHPSSFELMRFPGGITVIPSQPGSPWADTYPLFNFVLNNSIYQILGNLTELKDQLKLGLNLRSYEKIYLQFRNEIGSSIEAPATIDALVLDGSSNLLPDRLKQLAQLITEPDVGNLGLNHSVFGKVKGVQLSSYLQHKISDLSPSPSPSPSPSPSPSPSQSPIPSMPPSLSPFGNXPHPSPPTYMNPNHPPQALPPSRSRYPCFPCFRCNRFPPAGSPIVKPPCIGRDPKLPPFMHSPKPSAVPSPPNPNRFPKTVPRPTSPMMPVPSPSVFHHSVPPRKKQNSKASNVPSIAPSPYTLLHT

SEQ ID NO: 76262 - protein, 93 aa, Setaria italica
  Transcript Sequence Number=SeqID_10288
  Gene Ontology: Mol. function=structural constituent of ribosome; Cellular component=intracellular; Biological process=translation
  Homolog annotation: Hit_ID=B6T1F2; Match level="QueryCoverage=100%, HitCoverage=40%, E-value=5e-21, Identity=58%"; Hit description=60S ribosomal protein L21
PHRFQNTREQKELASTKKIQISIDAKSLELLKIQALFLVTTLEINKQVNGRIISKRIHVRVEHVQPSRCTEEFRLRKAKNDQLKADAKARGEV

SEQ ID NO: 76263 - protein, 154 aa, Setaria italica
  misc_feature (108)..(108): Xaa can be any naturally occurring amino acid
  Transcript Sequence Number=SeqID_10289
  Gene Ontology: Mol. function=structural constituent of ribosome; Cellular component=ribonucleoprotein complex; Biological process =translation
  Homolog annotation: Hit_ID=B6T1F2; Match level="QueryCoverage=96%, HitCoverage=81%, E-value=4e-75, Identity=92%"; Hit description=60S ribosomal protein L21
  Pfam annotation: Domain name=Ribosomal_L21e; Domain location=2-89; Score=156.4; E_value=8.8e-44; Accession=PF01157.10; Description =Ribosomal protein L21e
MYPFARPFRKKGYIPLTTYLRTYKIGDYVDVKVNGAVHKGMPHKFYHGRTGRVWNVTKRAIGVEINKQVNGRIISKRIHVRVEHVQPSRCTEEFRLRKAKNDQLKADXLRARGEVISTKRQPVGPKPGFMVEGAMLETVTPIPYDVVNDLKGGY

SEQ ID NO: 76264 - protein, 183 aa, Setaria italica
  misc_feature (164)..(164): Xaa can be any naturally occurring amino acid
  Transcript Sequence Number=SeqID_10290
  Gene Ontology: Mol. function=structural constituent of ribosome; Cellular component=ribonucleoprotein complex; Biological process =translation
  Homolog annotation: Hit_ID=B6T1F2; Match level="QueryCoverage=86%, HitCoverage=87%, E-value=7e-86, Identity=96%"; Hit description=60S ribosomal protein L21
  Pfam annotation: Domain name=Ribosomal_L21e; Domain location=2-100; Score=191.2; E_value=2.9e-54; Accession=PF01157.10; Description =Ribosomal protein L21e
MPAGHGLRSRTRDLFARPFRKKGYIPLTTYLRTYKIGDYVDVKVNGAVHKGMPHKFYHGRTGRVWNVTKRAIGVEINKQVNGRIIRKRIHVRVEHVQPSRCTEEFRLRKAKNDQLKADAKVRGEVISTKRQPLGPKPGFMVEGATIETVTPIPYDVVNDLKGGXLGCLVGLSTCTISSISVLL

SEQ ID NO: 76265 - protein, 54 aa, Setaria italica
  Transcript Sequence Number=SeqID_10291
MEPSDLNTHLPPRKRLLAGLRTAATSCDAAEPLPSPLASGDLAARLREMALAAN

SEQ ID NO: 76266 - protein, 72 aa, Setaria italica
  misc_feature (36)..(36): Xaa can be any naturally occurring amino acid
  Transcript Sequence Number=SeqID_10292
  Gene Ontology: Mol. function=serine-type carboxypeptidase activity; Cellular component=peroxisome; Biological process=proteolysis
  Homolog annotation: Hit_ID=B9RM64; Match level="QueryCoverage=93%, HitCoverage=13%, E-value=2e-15, Identity=53%"; Hit description =Serine carboxypeptidase, putative
AFRFGMNCLIGSWELYTARIDYTHDTGTMVSYHKSXTALGYRVLIYSGDHDLCIPFPGTEAWPPSINNLVSY

SEQ ID NO: 76267 - protein, 399 aa, Setaria italica
  Transcript Sequence Number=SeqID_10293
  Gene Ontology: Mol. function=serine-type carboxypeptidase activity; Cellular component=peroxisome; Biological process=proteolysis
  Homolog annotation: Hit_ID=Q9M513; Match level="QueryCoverage=100%, HitCoverage=80%, E-value=1e-152, Identity=61%"; Hit description =Wound-inducible carboxypeptidase
  Pfam annotation: Domain name=Peptidase_S10; Domain location=1-396; Score=427.3; E_value=2.4e-125; Accession=PF00450.14; Description =Serine carboxypeptidase
NGPFNFEPGTKPGGLPRLQLNPYSWSKVSNIMYLDSPAGVGMSYSLNKSDYTTGDLKTAADAHKFLLKWFEIYPEFQSNPFYISGESYAGVYIPTLADEVVKGIEKGVEPRISFKGYLIGNGFTDVDYDFNSFVPFAHGMGLISTDMFEDVKASCHGTFFGDVDNLCQEKIERIHWELKDLNKYNILAPCYHHPEIQQVEFANSSLPLSFRRLGETNRPFPVRKRMAGRSWPLRLALRGGHVPMWPGLGGRSLPCTSDELATAWLDDEDVRAAIHAKPKSLIGSWELYTARIDYTHDTGTMVSYHKKFTALGYRVLIYSGDHDLCIPFPGTEAWVRSIGYQVVDRWRPWYFGDQVAGYAEGYDHNLTFLTIKGAGHAVPEYKPKESLAFYSRWLAGEKF

SEQ ID NO: 76268 - protein, 95 aa, Setaria italica
  Transcript Sequence Number=SeqID_10294
DNLLGTDDDAAAKFFQQLGDCASLEYEDHIFAAMFADLNRYYRSSWRRHKAEFLRDHCSSPWAVLALVVAGCAFCFALFKFSTTIYGFAHPYCHC

SEQ ID NO: 76269 - protein, 103 aa, Setaria italica
  Transcript Sequence Number=SeqID_10295
TKEREDVEHLQKRGVVDNLLGTDDDAAAKVFQQLGDCASLEYEDHSFAAMFADLNRYYRSSWRRHKAEFLRDHCSSPWAALVLVVAGCAFCFALFKFSTTGFH

SEQ ID NO: 76270 - protein, 124 aa, Setaria italica
  Transcript Sequence Number=SeqID_10296
  Pfam annotation: Domain name=GRP; Domain location=6-113; Score=21.3; E_value=4.7e-07; Accession=PF07172.3; Description=Glycine rich protein family
AHHHSARALLLPVLLLLLAAAVFAARDLDGANPLPAPTDGNKPEPAPYYGGAIPGGIPPGAFYYGGGPGNGGGIYRGGPGNGGGYGGYPGGGGFGGGWGAGYGGPGGGYAHGGVDVPTVVCQEK

SEQ ID NO: 76271 - protein, 784 aa, Setaria italica
  Transcript Sequence Number=SeqID_10297
  Gene Ontology: Mol. function=metalloendopeptidase activity; Cellular component=membrane; Biological process=cell adhesion
  Homolog annotation: Hit_ID=B9R7P8; Match level="QueryCoverage=99%, HitCoverage=92%, E-value=0.0, Identity=80%"; Hit description =Metalloendopeptidase, putative
  Pfam annotation: Domain name=EGF; Domain location=555-581; Score =14.7; E_value=0.38; Accession=PF00008.19; Description=EGF-like domain
  Pfam annotation: Domain name=EGF; Domain location=586-613; Score =23.1; E_value=0.0011; Accession=PF00008.19; Description=EGF-like domain
  Pfam annotation: Domain name=EGF_2; Domain location=555-581; Score =21.1; E_value=0.0045; Accession=PF07974.5; Description=EGF-like domain
  Pfam annotation: Domain name=EGF_2; Domain location=586-613; Score =32.0; E_value=2.4e-06; Accession=PF07974.5; Description=EGF-like domain
  Pfam annotation: Domain name=EGF_2; Domain location=618-646; Score =5.9; E_value=0.64; Accession=PF07974.5; Description=EGF-like domain
  Pfam annotation: Domain name=Peptidase_M8; Domain location=1-571; Score=144.3; E_value=3.8e-40; Accession=PF01457.8; Description =Leishmanolysin
  Pfam module annotation: Pfam domain module=EGF::EGF::EGF_2::EGF _2::EGF_2::Peptidase_M8; Domain location=555-581::586-613::555 -581::586-613::618-646::1-571
GEKDVYLSHSCIHDEILHQRRRAGRKEYSVMPQVYHEPQEKVDHVRGRHLLGLSSSRVTQRNARKPIRIYLNYDAVGHSPDRDCKRVGDIVKLGEPPVPSAPGTPICDPHGDPPLVGDCWYNCTLEDIAGEDKKQRLRKALGQTVEWFRKALAVEPVKGNLRLSGYSACGQDGGVQLPHAYVEDGVSNADLVLLVTTRPTTGNTLAWAVACERDQWGRAIAGHVNVAPRHLTAEAETLLSATLIHEVMHVLGFDPHAFTHFRDERKRRRGQVTVQTLDEKLGRMVTRVVLPRVVMHSRHHYGAFSQNFTGLELEDGGGRGTSGSHWEKRLLMNEIMTGSVDTRSVVSRMTLALLEDSGWYQANYSMAEHLDWGRNQGTEFAVSPCNSWKGAYHCNTTQLSGCTYNREAEGYCPIVSYSGDLPKWAQYFPQANKGGQSSLADYCTYYVAYSDGSCTDVNSARAPDRMLGEVRGSNSRCMASTLVRTGFVRGSMTQGNGCYQHRCTNNSLEVAVDGIWKSCPQSGGPVQFPGFNGELICPAYHELCNTVPVPVTGQCPKSCSFNGDCIDGTCHCFPGFHGRDCSRRSCPDKCSGHGICKANGICECQSGWTGIDCSTAVCDEQCSLHGGVCDNGKCEFRCSDYAGYTCLKGSTILPSLSMCHDVLVRDSDGQHCAPSELSILQQLEAVVLVPNYNRLMPSGRTFLNFFNNANCAAAAKRLACWISIQRCDEDGDNRLRVCYSACELYNSACGAGLDCSDQTLFSKREEEEKGVPCTGYGEKKSFWL

SEQ ID NO: 76272 - protein, 86 aa, Setaria italica
  misc_feature (53)..(53): Xaa can be any naturally occurring amino acid
  misc_feature (66)..(66): Xaa can be any naturally occurring amino acid
  Transcript Sequence Number=SeqID_10298
  Gene Ontology: Mol. function=transporter activity; Cellular component= integral to membrane; Biological process=transport
  Homolog annotation: Hit_ID=Q8H6D6; Match level="QueryCoverage=97%, HitCoverage=16%, E-value=4e-24, Identity=69%"; Hit description=Major facilitator superfamily antiporter
TKRRSREGCPGCRLEEANKMSTGIPYRNFFYIWIVCLTSTLPILSSFPYLYFXMIRDLKIAKQEQXISGSYAGFIGATYFLARTFT

SEQ ID NO: 76273 - protein, 126 aa, Setaria italica
  Transcript Sequence Number=SeqID_10299
FLHPLPRTQVAGINYLASERRALLKKKRGANPNVLWTPVVAAGNRSMTGRLPPVVPYHHTTPTLAHQRDELNCPQPQERPAAAVRRHACSGRLIRTRSAPARHRADGGVCRPDDRSPRCPSSMPGM

SEQ ID NO: 76274 - protein, 95 aa, Setaria italica
  Transcript Sequence Number=SeqID_10300
  Subcellular localization annotation: CTP_CleavageSite=61; ConfidenceScore=5.36e-01
MSLASAVPSAWASPALTRDTAGSCRRACIRHHPLGGAQVRSACGLACRYTRGGARRLPVALAAGGSSVGDVFVTEGSTNVKFPQELIVPGYTGSL

SEQ ID NO: 76275 - protein, 81 aa, Setaria italica
  Transcript Sequence Number=SeqID_10301
GPRTLVLMSAASDGGGSSDLIGVPIQVVQQQGVDLGDGKFDPLWHNEEELDPFSKATKSSMSIAYHHFWQVEDLSQRQRLI

SEQ ID NO: 76276 - protein, 139 aa, Setaria italica
  misc_feature (117)..(117): Xaa can be any naturally occurring amino acid
  misc_feature (130)..(130): Xaa can be any naturally occurring amino acid
  Transcript Sequence Number=SeqID_10302
  Homolog annotation: Hit_ID=Q40443; Match level="QueryCoverage=56%, HitCoverage=26%, E-value=4e-16, Identity=48%"; Hit description=Tumor- related protein
LRMFTPSWTSTTENLFLWCGGWRPTAALHLLYTKSGMQLEHQLPAFLNGGSLKADLGDLSAGQLQDADQLQRRTIKREREIEDAAASAQEALATAKILELAGGGGGVDADAMGAGRXRTKADGMKRVLEXADALRLGDD

SEQ ID NO: 76277 - protein, 93 aa, Setaria italica
  Transcript Sequence Number=SeqID_10303
  Homolog annotation: Hit_ID=Q8H3E3; Match level="QueryCoverage=94%, HitCoverage=6%, E-value=1e-20, Identity=57%"; Hit description =Transcription factor (PWWP domain protein)-like protein
TLSDPDSMPTKELIADEHAHGFSRSNSFMHNSLDSKFISEPLVDIPSLKEGSSDWCSPPNHTIGSGSDRVHSEEDSGPFDNLQFKGLNKLAGR

SEQ ID NO: 76278 - protein, 71 aa, Setaria italica
  Transcript Sequence Number=SeqID_10304
KRVGWQLGYRNEIQTSTRWNVRLTTHMAHSLHRIGLAPVSAFAEHCYNYIYTVEGGPIFYFRRFQVKQTSK

SEQ ID NO: 76279 - protein, 935 aa, Setaria italica
  Transcript Sequence Number=SeqID_10305
  Homolog annotation: Hit_ID=Q8H3E3; Match level="QueryCoverage=97%, HitCoverage=62%, E-value=0.0, Identity=53%"; Hit description =Transcription factor (PWWP domain protein)-like protein
  Pfam annotation: Domain name=DUF618; Domain location=391-459; Score =0.5; E_value=0.095; Accession=PF04818.5; Description=Protein of unknown function, DUF618
DVTLKGCTASMERSPPNNSADALVKSPKSALAESPKVSLSAHSLDAPTGQKHITQAVLLNKDAFSPVPLDLRNDDVSDSIQRDIVSEEACMDRENVPNLVHTGTDSDDCGKTPTCSMKLEEPAFVSKFDQSPSHEARGNVPMESIEGSKNAFGITIDVSAEPVSQANAVVSYTNGTCDPVDDTILAESAANICDGTSTTSLVSKVSCIHSDTSTRTFEEHSSSAIAPRDLDHGLNPKDKSISPDSMPTKELIADEHAHGFSRSNSFMHNSLDSKFISEPLVDIPSLKEGSSDWCSPPNHTIGSGSDRVHSEEDSGPFDNLQFKGLNKLAGRNEANSSRRAFEAFVGTLTRTKESISRATRLALDCAKHGIAGEVMDIIIEHLEKETNLYKRVDLFFLVDSIIRYCRNQKGGPGDAYPSLIQAVLPRIIYASAPPGNSAWENRRQCLKVLRLWLERKTLSEYIIRHHIKELEALNEASFGSSHRPSGTERALNDPLRDNEAFLVDEYGSNAGFHLPNLICTKLIEDEDGRSSEDRSFEGLTPEHEVTGANEQEASQFPVTKHQLILEEVDGELEMEDAAPSTGAEASSTCQEDLTNDASCTRTAQQRSSIPPLPDDKAPSPPPLPSSPPPQPRPPCPVSQGSQVQGALLVATDCVEHHHPGANYTVEGPHHYSVANNRGNMDACVTSSQPPVHYSSGYAGSTNQIFQPPPPPPPPPIAAFHPSGPHGSLCGPSLPHHGNNYHQPPSAPLPSSAYHIQPPPHPPGPNQFPYPPEPEQRTQPWNYGPPHPESCQYGGHDRGQHGYNRRPHFNDRGHHFDDRGHCFDGGGHYFDDGMHHFDDRWHHFHDRGQMHHEVMDGGRFPPFFPPGPPFPDHFEAPPNQFHCGPPLEPPPGPCSGWSMPHRRSKYPPDSRQTMEPPVSNGGGWRRHGRRDYDRYH

SEQ ID NO: 76280 - protein, 68 aa, Setaria italica
  Transcript Sequence Number=SeqID_10306
IPRRCMSTTLCHRDRTHFWASKYIRCCMLKDYLYQQFQISDVICFDVALFAQSVGCKLQEAYIFLKLL

SEQ ID NO: 76281 - protein, 117 aa, Setaria italica
  Transcript Sequence Number=SeqID_10307
  Subcellular localization annotation: CTP_CleavageSite=60; ConfidenceScore=5.50e-01
FLAECPHSNLMPSTLSPPTQVSLLPLTPPPSLPSCSLSNLPPISPPNPIADMILGNLTITAISRKYRPLGAYNQPTVQTVPHQNKSHPIFETADKGAHFLSEQSSISGSTGQPHYLP

SEQ ID NO: 76282 - protein, 156 aa, Setaria italica
  misc_feature (83)..(83): Xaa can be any naturally occurring amino acid
  Transcript Sequence Number=SeqID_10308
  Gene Ontology: Mol. function=nucleic acid binding
  Homolog annotation: Hit_ID=B6T3P2; Match level="QueryCoverage=36%, HitCoverage=19%, E-value=1e-24, Identity=92%"; Hit description =Nucleic acid binding protein
  Subcellular localization annotation: CTP_CleavageSite=54; ConfidenceScore=5.05e-01
SKARFEQLEFAQNKRQNAWQQFQTTKGKAKKGSLFCARPSFNLARHLSIKLGVCMSRYQPIPQAFIRYVMTENIPSIGVPIVXTSHHITESSEFGWFVFQVGFFSGRKKESIFKSPDDHRGKVGVTGSGKGLTDFQRREKHLHLKGGSADALDDEE

SEQ ID NO: 76283 - protein, 252 aa, Setaria italica
  Transcript Sequence Number=SeqID_10309
  Gene Ontology: Mol. function=nucleic acid binding
  Homolog annotation: Hit_ID=B6T3P2; Match level="QueryCoverage=99%, HitCoverage=83%, E-value=1e-134, Identity=94%"; Hit description =Nucleic acid binding protein
PLQVIMLTEELLATAKQAEGAQNVAGLSPPNYSAGMQSEGLGDLSHSHKFAVGTRVQAVWSEDGEWYNATVEALTPNGYYVAYDGWGNREEVDPDNVRLLEEEAADALRQAEKEAEATKMAIKRKIEQAATSDFQARSLPAKLRIEPSDPEDVKAAKRKKIHAFKSKARFEQLEFAQNKRQNAWQQFQTTKGKAKKVGFFSGRKKESIFKSPDDHRGKVGVTGSGKGLTDFQRREKHLHLKGGSADALDDEE

SEQ ID NO: 76284 - protein, 298 aa, Setaria italica
  Transcript Sequence Number=SeqID_10310
  Gene Ontology: Mol. function=oxidoreductase activity, acting on the CH-OH group of donors, NAD or NADP as acceptor
  Homolog annotation: Hit_ID=B9RBF0; Match level="QueryCoverage=92%, HitCoverage=88%, E-value=8e-41, Identity=37%"; Hit description=2 -hydroxyacid dehydrogenase, putative
EIPEPEAAMAMPEPSSCLTLRIFYLRVSRCEVDESMADTLILTHIPLTPDTDLEVSGADRKPSVSSGKGSSTVTCSLRRDRVDSRSEEATFVSTASIRMSGSVRFEVQSKDERLLVGILEMCDAEGKKSWVMKCQVATQRGSGFLRCGCGGREAKPPAVEVYVAGVSRGTPTVFTKAMQLRFRRRRQVKAFMDPIPECGEQVEDMKETPPKHGPQESEYRCYKPDPDADDEDSLYLKSAGLDDDEEYSELSWFTAGVRVGVGIGLGICLGVGIGAGLLVRSYQSTSRTLKRRLISNLL

SEQ ID NO: 76285 - protein, 194 aa, Setaria italica
  Transcript Sequence Number=SeqID_10311
  Gene Ontology: Mol. function=protein binding; Cellular component =endoplasmic reticulum; Biological process=vesicle-mediated transport
  Homolog annotation: Hit_ID=Q54YG5; Match level="QueryCoverage=95%, HitCoverage=99%, E-value=2e-62, Identity=58%"; Hit description =Trafficking protein particle complex subunit 5
  Pfam annotation: Domain name=TRAPP; Domain location=29-185; Score =268.7; E_value=1.3e-77; Accession=PF04051.8; Description=Transport protein particle (TRAPP) component
MIGVGKAKQYANVLDKPLSRGRQEVSLSAFAFLFSELVQYNQTQVDNIAELERRLEDAGYAVGARVLELLCHREKGNRRETRLLGILSFIHSTVWKVLFGKVADSLEKGTEHEDEYMISEKELLVNRFISVPKDMGAFNCGAFVAGIVKGVLDNAGFPAVVTAHFVPIEGQQRPRTTILIKFAEEVLHREARLG

SEQ ID NO: 76286 - protein, 71 aa, Setaria italica
  misc_feature (44)..(44): Xaa can be any naturally occurring amino acid
  Transcript Sequence Number=SeqID_10312
SPAARGSRGHRRAFSAGGAGDDAEAAPPRCFWTERDCCEKGVVXGCGVAVAVRNALATVVGGKPGHRATAA

SEQ ID NO: 76287 - protein, 73 aa, Setaria italica
  Transcript Sequence Number=SeqID_10313
  Gene Ontology: Mol. function=electron carrier activity; Biological process=oxidation reduction
  Homolog annotation: Hit_ID=B9HL41; Match level="QueryCoverage=90%, HitCoverage=12%, E-value=6e-21, Identity=62%"; Hit description =Cytochrome P450
PPHAYLPFGAGARTCLGQSFAMAELKVLLALVLSKFELSLSPAYVHSPALRLIVEPEHGVRLVLKSVVEPRSS

SEQ ID NO: 76288 - protein, 125 aa, Setaria italica
  Transcript Sequence Number=SeqID_10314
LRTSALMPTVIDLQQTITNLLGLLSSSVERGCQLVETSKVQTLHVIPVNAEIPLAVTLHSFYLFQNHLHEKTLKKGNFLNHDWVYIQQSLLACPTEVAHLSSHEELYERSIPSIQNPNILVLLVF

SEQ ID NO: 76289 - protein, 167 aa, Setaria italica
  Transcript Sequence Number=SeqID_10315
  Gene Ontology: Mol. function=hydrolase activity, acting on ester bonds; Cellular component=vacuole; Biological process=lipid metabolic process
  Homolog annotation: Hit_ID=Q7XAW7; Match level="QueryCoverage=82%, HitCoverage=86%, E-value=5e-14, Identity=34%"; Hit description =Putative lipase (Fragment)
PPPLWVFGDSYADTGNLGDLGRELTHAWYDPYGDTFPGRPTGRFSDGRVLTDFIASAMGVPTPVAYKLRRGAAPGLLARGMNFAVGGAGVLDTGNFQRNISAQIDLFQAQHRTPSNRSGGGCDAGGVAVVVVSGNDYSYAADKDNGTSAAIAYIPTVVRQLREQLRR

SEQ ID NO: 76290 - protein, 58 aa, Setaria italica
  Transcript Sequence Number=SeqID_10316
  Subcellular localization annotation: CTP_CleavageSite=50; ConfidenceScore=5.44e-01
MPPLPPPLLLRSAAPPGAVARQRLRRRRSPTPVRASWQELAGVLVFSAIPFTAVKALA

SEQ ID NO: 76291 - protein, 143 aa, Setaria italica
  Transcript Sequence Number=SeqID_10317
RKAMESALVLGHKIIESPQKLRNISTSEMEWAWAANRLIEKDDAETPDDGPLNYLPRKRLILTTQLIQQLLPAIPSAILRAQAVSAFESATYTLSMSTLRDACSMAASSSFNSSSPVDDENKDFLILLYHGLARRNILGTKLT

SEQ ID NO: 76292 - protein, 1426 aa, Setaria italica
  misc_feature (766)..(766): Xaa can be any naturally occurring amino acid
  misc_feature (873)..(873): Xaa can be any naturally occurring amino acid
  Transcript Sequence Number=SeqID_10318
  Subcellular localization annotation: CTP_CleavageSite=91; ConfidenceScore=5.25e-01
RPMGLATHQVDQSFYPMHATSSRGSGNQYSQFLGIPADSQGAMARVGPDQSEKTSRPFNSSMNEHGLHLQGASSLMQNFRGKGGFLSNSPMQSQGDNIKAGSPVTMNHLQHGFQTQDFHGRPNQVELQVGVQEKSAVQVGQASGRASLDPTEEKILFGNDEDSNWGALLRGDNDNGNSLDNDNYGGAYSSLQSGSWSALMQEALQSTTSENSPKEEWSGLSFHKPEQIIANNSMSGREENKISGLRGTNLENARPPPASSYAEGTMNNPNLASFQHAIRTPYERRDQMPHESPPSAPVNNHQSASEANNGYFQQSLKQNQSDGRQEQAHIANKFWAHQKSEMVRNNLQSTGAHATPPGTHGFWMSQQNTADHNINRESSNNQNDWKANNALGQDMSSTQNIFNSNENSWKSGGGNSNSVQRLQQRKSDITSAQMPNESSDGKNISMMSSSISMMTQDHYQMITGRSGEQVGMNRNMGHRVPETSDSPGKSADQRPSDFNQEYLNATPNERQAHLLNHGQHVTSDSAPRRHSVFSGKESENLSQSSQQAMASYMLQNRSMGSSGMNIGPSPGNPVSNSLFPPQSHQMRNNMQHHFGTNSHVSNSMPSVNEKMMMAQEQLQSRHGLPNSSSALHFGGTDTGLSQNRAVQNSQHMLQLLHKVDNSRNSNAVADVPNNSLGAVSAQQQLNHPSLQGFGLRLAPPSQRQSNSGNLWSSQTNVDAKQPDHSAPEDDRSQLPSTPSQSLTPPHTNSQSSPFHASETENTGSQXGRFPQLSSGQQYPAADDRSGPAPMLQQPQQGSSATVFKNVWTNISAQRLAGMQANKITPNILQSMMFPNNAAASNLWSSQKADDQGHKTATPSDIATSSANSQNQDXKQAVDSDSGLASSQKANFESTGATVSGGNESLQKPSLDGNFVNTVSSLAQLRQQGIMGAKHGENPGANFQAMNASHSSSNSSGGIVLHGSPAPSNIQQQNYSLLHQMQALRHTDIDPGSSIGKTIRPDVGSDASQIDWKSGQRFAHVANNSTKSSVDNIGSPGVPGSFPSDMKMLSFASRSEERNPNIPSQLPSGERPNHGLVTAQNDNQNQVQPMCTSAASNSVERSERPRINPQMAPSWFGHYGNYRNGQSVAMLNAQKTTALPYNFPKASWNNDNNNSAENRVESVLSVRPGHHLPSTKMDALVPSNVKVSSMMRRPKKRKAMESALVSWHKIIESPQKLRNISTSEMEWAWAANRLIEKDDAETPDDGPLNYLPRKRLILTTQLIQQLLPAIPSAILRAQAVSAFESATYTLSMSTLRDACSMAASSSFNSSSPVDDENNPSEQTTSAKKMEGKVSKAVEVFVGRIRKMENDFVSLNKRASMLDVQLECQDLERISIVNRLGRFHGRNHAAAVEGSSGSEMTRRIFPERHVMSFAVPGNLPEGVYCLSL

SEQ ID NO: 76293 - protein, 77 aa, Setaria italica
  Transcript Sequence Number=SeqID_10319
  Gene Ontology: Mol. function=isomerase activity
  Homolog annotation: Hit_ID=B4FDQ2; Match level="QueryCoverage=72%, HitCoverage=14%, E-value=3e-22, Identity=87%"; Hit description =Peptidyl-prolyl isomerase
MAAVEEDSAPAAAAAASDPAAGSSDNEITVEEASSVHTEPPQDGSAPPVVSSDMEVLHDKVKKQVIKEGHGKRPLKF

SEQ ID NO: 76294 - protein, 295 aa, Setaria italica
  Transcript Sequence Number=SeqID_10320
  Gene Ontology: Mol. function=cysteine-type endopeptidase activity; Biological process=proteolysis
  Homolog annotation: Hit_ID=B6UDT2; Match level="QueryCoverage=99%, HitCoverage=79%, E-value=1e-146, Identity=85%"; Hit description=LOL3
  Pfam annotation: Domain name=Peptidase_C14; Domain location=12-290; Score=157.7; E_value=3.4e-44; Accession=PF00656.14; Description =Caspase domain
AASYPGARGCKKRALLVGISYAGTRYELKGAVNDVNCMDYLLRERFGFPADCILVLTQEDRDPSRVPTRENLVRALRWLVDGATAGDSLVFHFSGHGVQKLDNNSDEADGYDEALCPVDFEDPRGGVILDDEINATIVRPLGRGVKLHAIVDTCHSGTILDLPYLCRLSRTGYWQWENQQTRFSSEQKCTSGGLAISISGCGDSQTSQDTTAFSGSTSTGAMTYSFIKAVESEPGTTYGRLLAAMRATIRDNGGELGIPGPIGTFFRRVITFSCAQEPQLCASETFDIYRKPFLL

SEQ ID NO: 76295 - protein, 290 aa, Setaria italica
  Transcript Sequence Number=SeqID_10321
  Gene Ontology: Mol. function=ATP binding; Biological process =cobalamin biosynthetic process
  Homolog annotation: Hit_ID=Q8LD16; Match level="QueryCoverage=72%, HitCoverage=39%, E-value=1e-102, Identity=84%"; Hit description=Mrp protein, putative
  Pfam annotation: Domain name=CbiA; Domain location=180-281; Score= -27.3; E_value=0.011; Accession=PF01656.15; Description=Cobyrinic acid a,c-diamide synthase
  Pfam annotation: Domain name=DUF59; Domain location=80-156; Score =69.3; E_value=1.4e-17; Accession=PF01883.11; Description=Domain of unknown function DUF59
  Pfam module annotation: Pfam domain module=CbiA::DUF59; Domain location=180-281::80-156
  Subcellular localization annotation: CTP_CleavageSite=63; ConfidenceScore=5.90e-01
MQTLHAAPASFLAPPASHLLPPTAPALRGVLSAAGPVPAAVSSRSRACFPSSRRASRRRRCSRAAASSGAAATATSVDDAKKDVLIALSQIIDPDFGTDIVSCGFVKDLEIGDALDEVSFRLELTTPACPIKDEFEQKANEVVAALPWVKKVDVTMSAQPAQPVYGGELPEGLQKISNIIAVSSCKGGVGKSTVAVNLAYTLAGMGARVGIFDADVFGPSLPTMVSPENRLLVMNPESRAILPTEYLGVKMVSFGFAGQGRAIMRGPMVSGVINQLLTTTDWGELDYLVN

SEQ ID NO: 76296 - protein, 61 aa, Setaria italica
  Transcript Sequence Number=SeqID_10322
KLEHTKLLQKAYQLQEVRALLALQQRLRRIKSLTPCMFNRRRTYVSRGQQYGLLFFSFVLF

SEQ ID NO: 76297 - protein, 599 aa, Setaria italica
  Transcript Sequence Number=SeqID_10323
  Gene Ontology: Mol. function=cysteine-type peptidase activity; Cellular component=cellular_component; Biological process=ubiquitin -dependent protein catabolic process
  Homolog annotation: Hit_ID=Q0INW1; Match level="QueryCoverage=100%, HitCoverage=92%, E-value=0.0, Identity=72%"; Hit description =Probable Ufm1-specific protease
  Pfam annotation: Domain name=Peptidase_C78; Domain location=400-591; Score=384.7; E_value=1.6e-112; Accession=PF07910.5; Description =Peptidase family C78
VAAALRPLHGDHAAPDLTREADEIRGLLPRGFDIVGALLVDGEGSDADAARALELARALRERLLGVAVSHGMVGGSMDAASGEIRFVTSESGGTDAVEGLEVVWEDEPGRLLWEKGCLLHCELPLKLPLYVPADEISGIEEWFSSLIESTTAELRDPHVSFLVEGPITSNESHHSIILHGDALSSDSHVPGNSRTKECMTSIVSCSEFFPEKRYNLSLTKENADAIEITVLSNQSVGSLKPGITPVVEYFPAPAPASLRVINLKLDILCYSSIDFPVAVAVSELVIPGLADQMSVMKKIIASEIAKQAQLCPYHFIPSGLHIPVTAIYDTRYGEIEEKQSELRKELHVRLGLPLDRPLLRISNALTFGDMGKRVKKTSRNGSSLLRDVHREIPSSGVSGGIMSLIDGSYEYYHYLHDGIDDNGWGCAYRSLQTIVSWYRLQQYSSIDVPSHREIQQVLVEIGDKDPSFIGSREWIGAIELSFVLDKLLGVSCKIINVRSGDELPEKCRELARHFETQGTPVMIGGGVLAYTLLGVDYNEASGDCAFLILDPHYTGADDLKKIVNGGWCGWKKSVDNKGRSFFLKDKFYNLLLPQRPNMV

SEQ ID NO: 76298 - protein, 54 aa, Setaria italica
  Transcript Sequence Number=SeqID_10324
KFMGKRGTQHPCIQLAVSSNLVCTSRCSYSVKLLGAEYFVLADFPLVVRENRQY

SEQ ID NO: 76299 - protein, 100 aa, Setaria italica
  Transcript Sequence Number=SeqID_10325
  Subcellular localization annotation: CTP_CleavageSite=51; ConfidenceScore=5.14e-01
PRRRHERWQPAPSTSSQALARALYQLSFSDPCFLRCHVKKNRLAAISHARRCGNERSPWTQLASRSLTKARGEISPPWEGEGGRGTADGRMWRWGGGEEG

SEQ ID NO: 76300 - protein, 617 aa, Setaria italica
  misc_feature (14)..(14): Xaa can be any naturally occurring amino acid
  Transcript Sequence Number=SeqID_10326
  Gene Ontology: Cellular component=plasma membrane
  Pfam annotation: Domain name=UBA; Domain location=153-189; Score =27.0; E_value=7.5e-05; Accession=PF00627.23; Description=UBATS-N domain
  Pfam annotation: Domain name=UBA; Domain location=218-255; Score=5.7; E_value=2.5; Accession=PF00627.23; Description=UBATS-N domain
  Pfam module annotation: Pfam domain module=UBA::UBA; Domain location =153-189::218-255
TIPKSKSKDRSGAXKVAKEQPKVAGKPMGNGTLVGSYNNLSGKFHVLEPSASLLGSQGIDKFRNTDEIDEHSRSSHGTGDFDCASNNGSCSGESEDPKEKATSTASRVDSVPGCDIDKREKIRQKNEKKHQRQKERRAQELHERCKGYLMSRKLEVLAQKLVAMGFSADQATMALIQNEGCVEESVTWLCNFDGSEETKQQLAADQQSGVNLKIDIADELAKIASLEAKYKCTKQEVERAVVSCEGDLEKAEEVLKTHKQESAAVPPKPEGSGDSSGLPNKQQVVLAQNPARPQTNGFSSVGVQQMRREEKDLNYKLLMNGNGPKESAIKGFQPLAAPIKPDIGRQQFVQPEKRRLNASSVPSVPYVASSPLPVTVPQLKSDMRHVAGGNEVKSAMPNGTLRESITVMQRPQSAGTKQSLPSTSHSMFASEPSSREWYLNGASGVDMMLNGGLGHGLRNMSLDNVSSARAFGHTNHQQSFVSNPIEIAANGWGGTWSSGGTSSSRSVASSLGAFRGWNSSESSSTLSHSDWRTNGLAPYDYTSVDWSVDTTLLNPAAKSERLSDTWSTMFMGGRSARAPGNLTGAGIAGLHDSNHPMDPAPSPRPYDWPSFCRGGSS

SEQ ID NO: 76301 - protein, 274 aa, Setaria italica
  misc_feature (117)..(117): Xaa can be any naturally occurring amino acid
  misc_feature (133)..(133): Xaa can be any naturally occurring amino acid
  Transcript Sequence Number=SeqID_10327
  Gene Ontology: Mol. function=protein serine/threonine kinase activity; Biological process=protein amino acid phosphorylation
  Homolog annotation: Hit_ID=B9RSY9; Match level="QueryCoverage=100%, HitCoverage=21%, E-value=2e-83, Identity=60%"; Hit description=ATP binding protein, putative
CLKILSDVMIVIFSDSSLTADEQTISDLKLISQKHFLPLYPSFAEDEDPIPIYAQKLLVMLMEHDCVKVCDILHKATVSQCFEFLLGDLSNTNVSNVKLCFALASAPEMDTHILSQXLQVVPKERNLLEFVAXKDMDDFLEPTLELCRAFIIRGIGSNRSAALSQNPALLVDSAFSMSIAVDQQTCVMDICDFGGNMGIFLELVGSSDPQISDLASDCMVLLLKAAPREATVGLLTNLPKLSAVMDLLKHDSSLRLTRLLYGLGFSCRQYLAQG

SEQ ID NO: 76302 - protein, 139 aa, Setaria italica
  misc_feature (62)..(62): Xaa can be any naturally occurring amino acid
  Transcript Sequence Number=SeqID_10328
  Gene Ontology: Mol. function=sequence-specific DNA binding; Cellular component=nucleus; Biological process=regulation of transcription, DNA-dependent
  Homolog annotation: Hit_ID=Q7XHZ0; Match level="QueryCoverage=87%, HitCoverage=40%, E-value=2e-62, Identity=90%"; Hit description=Heat stress transcription factor B-4b
  Pfam annotation: Domain name=HSF_DNA-bind; Domain location=26-139; Score=88.5; E_value=2.4e-23; Accession=PF00447.9; Description=HSF -type DNA-binding
MAFLVERCGEMVVSMETSPTHAKPVPAPFLTKTYQLVDDPCTDHIVSWGEDDTTFVVWRPPXFARDLLPNYFKHNNFSSFVRQLNTYGFRKIVADRWEFANEFFRKGAKHLLAEIHRRKSSQPLPTPLPPHQPYYHHHH

SEQ ID NO: 76303 - protein, 100 aa, Setaria italica
  Transcript Sequence Number=SeqID_10329
GGVVGGDPDAAHAPPGCCCCAGEEFSWLVLVPACAKKIPHTIPCPSGGFNRRGIEQPGRPRSGKKSTTLLSRTGLVGKFVFLPNSVHPRSQPARGRAQGN

SEQ ID NO: 76304 - protein, 85 aa, Setaria italica
  Transcript Sequence Number=SeqID_10330
  Homolog annotation: Hit_ID=B9S0Z8; Match level="QueryCoverage=100%, HitCoverage=18%, E-value=1e-18, Identity=56%"; Hit description =Protein AFR, putative
MRRVRVSSHNAPVHKLGDAQMALTPKFRLATTNTPAPPPPPEDLQQPAWDTPLIPGLPDDAALTCLLRLPVAAHGACRLVCRRWH

SEQ ID NO: 76305 - protein, 51 aa, Setaria italica
  Transcript Sequence Number=SeqID_10331
MASPAPPVKKVLVPITAGTEPVEASVPIDVLRRAGADVTVAAAGGADGLLV

SEQ ID NO: 76306 - protein, 87 aa, Setaria italica
  Transcript Sequence Number=SeqID_10332
  Gene Ontology: Mol. function=protein serine/threonine kinase activity; Cellular component=plasma membrane; Biological process =protein amino acid phosphorylation
  Homolog annotation: Hit_ID=B9SBN3; Match level="QueryCoverage=98%, HitCoverage=22%, E-value=3e-39, Identity=82%"; Hit description =Protein kinase APK1B, chloroplast, putative
VHDGDNSFQGHREWLAEVIFLGQLSHPNLVKLVGYCCEGEHRVLVYEYMALGSVESHLFSRTSPPLPWAARMRIALGAARGLAFLHG

SEQ ID NO: 76307 - protein, 59 aa, Setaria italica
  Transcript Sequence Number=SeqID_10333
MAEPEVEVAAAAAAAMETEAPAAAGQKREREEGGDPAAEGGEAAAEEEAAAAKKPKVEG

SEQ ID NO: 76308 - protein, 94 aa, Setaria italica
  Transcript Sequence Number=SeqID_10334
  Subcellular localization annotation: CTP_CleavageSite=59; ConfidenceScore=5.70e-01
RDAAMAMAPPPACSLLRVAASAPISAASTSVSIPRAPSFLPSSRSASARRHLTATWPPKAATSASVEIQDEYADEIDAVNIAQDVTQLIGKTPM

SEQ ID NO: 76309 - protein, 47 aa, Setaria italica
  misc_feature (40)..(40): Xaa can be any naturally occurring amino acid
  Transcript Sequence Number=SeqID_10335
MELEAASPVLMRRDGRKLVRCPRLQLDTKTVAVIEQSTGXSIADAAV

SEQ ID NO: 76310 - protein, 106 aa, Setaria italica
  Transcript Sequence Number=SeqID_10336
GLPLLPPRRRRELGRRRRSPRRRASPRGNKGLPEGSSSPKGCSYQIGLRDLNFIPKKGFLTTNPDLLVIESSIFDETRLRKTRGPPMVVVNLDWRIRREGAAASRR

SEQ ID NO: 76311 - protein, 94 aa, Setaria italica
  Transcript Sequence Number=SeqID_10337
SLDEWELLPDHKSSFFLEEDCSNGSHGAVGGGKDQLLLGTELVVIDMDHFGPASHPPPYDCIPDEEAAAKKPLLLPSQDACVHDPDIEFMDIAA

SEQ ID NO: 76312 - protein, 228 aa, Setaria italica
  misc_feature (169)..(169): Xaa can be any naturally occurring amino acid
  Transcript Sequence Number=SeqID_10338
  Homolog annotation: Hit_ID=Q9SRW4; Match level="QueryCoverage=36%, HitCoverage=32%, E-value=2e-10, Identity=42%"; Hit description =F20H23.8 protein
AGASMDAISLDEWELLPDHKSSFFLEEDCSNGSHCAVGGDEEAAAKKPLLLPSQDACVHDPDIEFMDIAALLTDPKREELVSKVTEILIYEAEDHDDEMVKSPDGVKEADQDEVLVEAPAPDDQRAREEEEGVSRTGFSVGNLRVNGVGALCSFGVAAATFVIFLLGGXEQQKRHQDHKIQLQMYADDERIQQVVQQASRLNQTMSSVMGGASSARASISFGGYYQGF

SEQ ID NO: 76313 - protein, 90 aa, Setaria italica
  Transcript Sequence Number=SeqID_10339
RGKMRPPTERVQSQCCTYLISLGMTLHFLPWPSICTSLSCPGMQVVCPSAPFWISSSTAGSWRPALQHSARAPSFFWCKGWSSWRGLPHS

SEQ ID NO: 76314 - protein, 101 aa, Setaria italica
  Transcript Sequence Number=SeqID_10340
  Subcellular localization annotation: CTP_CleavageSite=92; ConfidenceScore=5.04e-01
MRAISLPKLCSSTSVPLQCRDTATQIPAPGPVAFAPALPPLPPIPPESSQEPESPGATSPAVDSPPFSQRPVVVPSSAWRSSHVPVAAVAIVLSIAASIFV

SEQ ID NO: 76315 - protein, 77 aa, Setaria italica
  Transcript Sequence Number=SeqID_10341
  Gene Ontology: Mol. function=structural constituent of ribosome; Cellular component=ribonucleoprotein complex; Biological process =translation
  Homolog annotation: Hit_ID=Q2R4A1; Match level="QueryCoverage=61%, HitCoverage=23%, E-value=1e-16, Identity=87%"; Hit description=40S ribosomal protein S5, putative, expressed
AFSCKAGKVKYAMEIIHLLTDANPIQIIVDAIINSGPREDATRIGSAGVVRRPCIIREFVKLFGRWSLRTSRSMTFP

SEQ ID NO: 76316 - protein, 87 aa, Setaria italica
  Transcript Sequence Number=SeqID_10342
  Gene Ontology: Mol. function=structural constituent of ribosome; Cellular component=ribonucleoprotein complex; Biological process =translation
  Homolog annotation: Hit_ID=Q6RH11; Match level="QueryCoverage=82%, HitCoverage=33%, E-value=7e-33, Identity=95%"; Hit description=40S ribosomal protein S5
  Pfam annotation: Domain name=Ribosomal_S7; Domain location=1-72; Score=-45.7; E_value=2e-05; Accession=PF00177.13; Description =Ribosomal protein S7pS5e
YSFSGPREDATRIGSAGVVRRQAVDISPLRRVNQAIYLLTTGARESAFRNIKTIAECLADELINAAKGSSNRYVLFSVLYQYSSDYK

SEQ ID NO: 76317 - protein, 91 aa, Setaria italica
  Transcript Sequence Number=SeqID_10343
  Gene Ontology: Cellular component=membrane
  Homolog annotation: Hit_ID=Q9SH65; Match level="QueryCoverage=97%, HitCoverage=22%, E-value=6e-27, Identity=80%"; Hit description =F22C12.9
  Pfam annotation: Domain name=UPF0016; Domain location=12-82; Score =99.4; E_value=1.3e-26; Accession=PF01169.11; Description =Uncharacterized protein family UPF0016
MCASYTIASTYVLVFVAEWGDKSFFSTIALAAASSPLGVIAGSLAGHAVATLIAVLGGSLLGTFLSEKIIAYIGGSLFLAFAAITIVEIVT

SEQ ID NO: 76318 - protein, 254 aa, Setaria italica
  Transcript Sequence Number=SeqID_10344
  Gene Ontology: Cellular component=membrane
  Homolog annotation: Hit_ID=B9RCK6; Match level="QueryCoverage=83%, HitCoverage=57%, E-value=9e-82, Identity=74%"; Hit description =Transmembrane protein TPARL, putative
  Pfam annotation: Domain name=UPF0016; Domain location=202-254; Score =7.2; E_value=0.00023; Accession=PF01169.11; Description =Uncharacterized protein family UPF0016
  Pfam annotation: Domain name=UPF0016; Domain location=74-140; Score =50.9; E_value=4.8e-12; Accession=PF01169.11; Description =Uncharacterized protein family UPF0016
  Pfam module annotation: Pfam domain module=UPF0016::UPF0016; Domain location=202-254::74-140
VGGGAGLSIRKAAEPAGRGGFRAARFDASCGLAFATVAGVLMLQGTQQAMAATQFGGLQPADVLGDLGDLSTGFASAFLLIFFSELGDRTFFIAALLAARSSGAVIFLGTFGALAVMTVISVVLGRAFHYVDGIIPFGFGGTDFPVDDIAAACLLVYYGVTTLLDAASGDDEKINEEQEEAELAVSKFSGNGAGVMSAAGTIASTFVLVFVAEWGDKSFFSTIALAAASSPLGVIAGSLAGHAVDKQLELDKLT

SEQ ID NO: 76319 - protein, 155 aa, Setaria italica
  Transcript Sequence Number=SeqID_10345
  Gene Ontology: Cellular component=microtubule organizing center
  Homolog annotation: Hit_ID=Q7XUI5; Match level="QueryCoverage=100%, HitCoverage=12%, E-value=1e-39, Identity=57%"; Hit description =OSJNBa0005N02.6 protein
MNSVEEFLYTDQKSSVQKVSHGNVVYPLHSESGSPRLLNSKHYEKSGKINQAWNTSIPYNLSLNPILRNAACCHTESDLQHKSKNRALASFDFESVTDPCEVYCERSPSCLVESVNGAATVVQPRTQPSGQPDCSSKLLQAEARSQAYLTSSGEV

SEQ ID NO: 76320 - protein, 145 aa, Setaria italica
  Transcript Sequence Number=SeqID_10346
  Homolog annotation: Hit_ID=Q8S811; Match level="QueryCoverage=86%, HitCoverage=61%, E-value=2e-30, Identity=53%"; Hit description=F-box domain containing protein, expressed
CYVVPGFFRNLQTGCTALERLLLSDCAIDDDEITSQTLKVLSIGDSTEFTFDEQLSISIPSLCYLGFSVEAGIPLLKDMGSLVTASVSVASGGTQVDDIRKFLRSLSGVTNLDFNYGGMLKMEKSSQWCPQIFMGHLCCCPYFEV

SEQ ID NO: 76321 - protein, 111 aa, Setaria italica
  Transcript Sequence Number=SeqID_10347
  Gene Ontology: Mol. function=translation initiation factor activity; Cellular component=transcription factor complex; Biological process =regulation of transcription, DNA-dependent
  Homolog annotation: Hit_ID=Q8W0W3; Match level="QueryCoverage=78%, HitCoverage=27%, E-value=3e-26, Identity=71%"; Hit description =Transcription initiation factor IIB
  Pfam annotation: Domain name=TFIIB; Domain location=13-84; Score =50.4; E_value=6.9e-12; Accession=PF00382.11; Description =Transcription factor TFIIB repeat
ISLARSLIVATRPNLSAMLAMVRKARMRDRANEIYKKVEDLKSIRGRNQDAILAACLYIACRQEDRPRTVKEICSVANGALISSPNRLEIFNLLVDFIGSILNSSHKAQPV

SEQ ID NO: 76322 - protein, 174 aa, Setaria italica
  misc_feature (91)..(91): Xaa can be any naturally occurring amino acid
  Transcript Sequence Number=SeqID_10348
  Gene Ontology: Mol. function=receptor activity; Cellular component =integral to membrane
  Homolog annotation: Hit_ID=Q9M9K7; Match level="QueryCoverage=92%, HitCoverage=43%, E-value=7e-48, Identity=57%"; Hit description =F10A16.24 protein
  Pfam annotation: Domain name=DUF300; Domain location=1-167; Score =155.8; E_value=1.3e-43; Accession=PF03619.8; Description=Domain of unknown function
TLVEKNLVVLNRRFIRRCKQGCLQFVILKPILVVITFILYAKGKYKDGNFSVNQSYLYITIIYTISYSMALYALALFYAACRDLLRPYNPXPKFIMIKSVVFLTYWQGVLVFLVAKSRLIKNADKAADLQNFVLCVEMLIAAIGHLFAFPYKEYAGPNARPAGGFKKKRPYLLF

SEQ ID NO: 76323 - protein, 51 aa, Setaria italica
  Transcript Sequence Number=SeqID_10349
QVMIILEFYNFYKEEIIWYICSTLFSFMSMLLIGTRKILRVDRSTSNLHRL

SEQ ID NO: 76324 - protein, 345 aa, Setaria italica
  Transcript Sequence Number=SeqID_10350
  Gene Ontology: Mol. function=receptor activity; Cellular component =integral to membrane
  Homolog annotation: Hit_ID=Q9M9K7; Match level="QueryCoverage=80%, HitCoverage=61%, E-value=8e-70, Identity=49%"; Hit description =F10A16.24 protein
  Pfam annotation: Domain name=DUF300; Domain location=1-222; Score =318.4; E_value=1.4e-92; Accession=PF03619.8; Description=Domain of unknown function
SLILPENAIYFNSIREIYDAWVIYNFLSLCLAWVGGPGAVVVSLSGRTLKPSWILMTCCYPAIPLDGRFIRRCKQGCLQFVILKPILVVITFILYAKGKYKDGNFSVNQSYLYITIIYTISYSMALYALALFYAACRDLLRPYNPVPKFIMIKSVVFLTYWQGVLVFLVAKSRLIKNADKAADLQNFVLCVEMLIAAIGHLFAFPYKEYAGPNARPAGGFRESLLHALKFNDFYHDTVHQFAPTYNEYVLYNHNEGDNAQTKYPSGSTAPSGQGVELAGITVVASNSPVTSSASSNQADQEETMTTPIKDKVDPPGGLYDLTDLLDVDLSNYPAKVPAITDVRKQ

SEQ ID NO: 76325 - protein, 216 aa, Setaria italica
  Transcript Sequence Number=SeqID_10351
  Gene Ontology: Mol. function=transferase activity, transferring glycosyl groups; Biological process=metabolic process
  Homolog annotation: Hit_ID=B6T3B8; Match level="QueryCoverage=100%, HitCoverage=45%, E-value=6e-73, Identity=64%"; Hit description =Anthocyanidin 3-O-glucosyltransferase
MATPTVVLVPVWGAGHLMSLLDSGKRLLARAGRALSLTVLVMSAPTEHLAAEVAAHIRREEASGLDVRFVHLPAVEPPTDWVGIEEFVSRIVQVNAPHVRAVISSLPSPVAGVVLDFFCTTLLDVSRDLAVPTYVYFTSNAAMLAFMLRLPALHEEVPVEFEEMEGAVDVPGLPPLPPSSVPTPVTDKKNPNYTWFVYHGRRFAETDGIIVNTAAE

SEQ ID NO: 76326 - protein, 156 aa, Setaria italica
  misc_feature (20)..(20): Xaa can be any naturally occurring amino acid
  misc_feature (130)..(130): Xaa can be any naturally occurring amino acid
  Transcript Sequence Number=SeqID_10352
  Gene Ontology: Mol. function=protein serine/threonine kinase activity; Biological process=protein amino acid phosphorylation
  Homolog annotation: Hit_ID=B6SKC4; Match level="QueryCoverage=100%, HitCoverage=21%, E-value=2e-49, Identity=58%"; Hit description=WAK80- OsWAK receptor-like protein kinase
  Pfam annotation: Domain name=EGF_CA; Domain location=4-45; Score =36.2; E_value=1.3e-07; Accession=PF07645.7; Description=Calcium binding EGF domain
GCTDIDECLENTMNPCTRSXGTCLNTQGNFTCLCPSGKQMISDMCMANQKSSFWVMPVVGASVGLVVLIVTITCAYLTQQRRKLQHIKQRYFQQHGGMLLFEEIKSQQGIAFKIFSEAELQEATDKFKRXRVLGHGGHGTVYKGLLKGNLEVASKK

SEQ ID NO: 76327 - protein, 117 aa, Setaria italica
  Transcript Sequence Number=SeqID_10353
QGLQCPELYNHQGIFLYSVRSIYKHTRPKNNLLTAEDCASQNNITGGNLRGTVYPVRLLLRMYTTWQLTAEHHSRSRYGRRALIGCSGGRLPMAASDQCTEGRARFRPLIHKQLKMH

SEQ ID NO: 76328 - protein, 479 aa, Setaria italica
  Transcript Sequence Number=SeqID_10354
  Gene Ontology: Mol. function=molecular_function; Cellular component =cytoplasm
  Homolog annotation: Hit_ID=B6SJW5; Match level="QueryCoverage=100%, HitCoverage=84%, E-value=0.0, Identity=90%"; Hit description =Nucleotide binding protein
  Pfam annotation: Domain name=WD40; Domain location=138-177; Score =13.9; E_value=0.69; Accession=PF00400.24; Description=WD domain, G -beta repeat
  Pfam annotation: Domain name=WD40; Domain location=207-245; Score =35.4; E_value=2.3e-07; Accession=PF00400.24; Description=WD domain, G-beta repeat
  Pfam annotation: Domain name=WD40; Domain location=249-287; Score =25.0; E_value=0.00031; Accession=PF00400.24; Description=WD domain, G-beta repeat
  Pfam annotation: Domain name=WD40; Domain location=291-342; Score =24.6; E_value=0.0004; Accession=PF00400.24; Description=WD domain, G- beta repeat
  Pfam annotation: Domain name=WD40; Domain location=393-429; Score =6.6; E_value=6.6; Accession=PF00400.24; Description=WD domain, G -beta repeat
  Pfam module annotation: Pfam domain module=WD40::WD40::WD40::WD40::WD4 0; Domain location=138-177::207-245::249-287::291-342::393-429
  Subcellular localization annotation: CTP_CleavageSite=36; ConfidenceScore=5.44e-01
LGTGNGSRALSFGSNGTSKAVSGSSRIGGGIGASTSASGSQGMANYDGKGTYIIFNTADTLFISDLNSHDKDPIKSIHFSSSNPLCHAFDPEAKDGHDLLVGVFSGDVYSMSLRQQLQDPGKKPVSYQHFINKDKDKDKDPSQGGAASSRCTCVAWVPEREGIFVVSHADGNFYVYDKSKDGNTDWTFPTVKDQSQLLISHAKSSKGNPIARWHICQGAINAISFSPDGAYLATVGRDGYLRVFDFAKEQLIFGGKSYYGALLCCSWSADGKYLLSGGEDDLVQVWSMDDRKIVAWGEGHNSWVSTVAFDPYWSPPNSDETEENVMYRFGSVGQDTQLLLWDLALDEIAVPLRHPSAGSPTFSSGSPSAHWDNACPPTGVLQPSPRMRDVPKLSPLVAHRVHVDPLSGLEFTSESILTICREGLIKIWARPSHSETNQQPDSSEQVVGNTTAKDKMLTSSNKAGATSSSFKQPSSVLFT

SEQ ID NO: 76329 - protein, 304 aa, Setaria italica
  misc_feature (230)..(230): Xaa can be any naturally occurring amino acid
  misc_feature (284)..(284): Xaa can be any naturally occurring amino acid
  misc_feature (292)..(292): Xaa can be any naturally occurring amino acid
  Transcript Sequence Number=SeqID_10355
  Gene Ontology: Mol. function=catalytic activity; Cellular component =intracellular; Biological process=response to DNA damage stimulus
  Homolog annotation: Hit_ID=Q10MW4; Match level="QueryCoverage=100%, HitCoverage=48%, E-value=1e-122, Identity=70%"; Hit description =Basic helix-loop-helix, putative, expressed
  Pfam annotation: Domain name=HIT; Domain location=114-211; Score =29.6; E_value=1.9e-06; Accession=PF01230.15; Description=HIT domain
SIVQSHMGKQNGRLGAEMSASGGTSPNDTKMKREDSHGSERMKKHKLLPPTMTTKKQHECTKANTPNCHDNSMTSSAAPNQSREGDNKKSGVVANKTWGSWAQALYELAMHPEKYKNNDSILETSDEFVVLKDLYPKAKRHVLVISRTDGLDSLADITKEHLPLLRRMHSAGVKWAQKFLEEDASLVFRLGYHSVPSMRQLHLHIISQDFNSTSLKNKKHWNSFTTQFFXDSVDVIEEIEQHGSPTTTSDEKVLAMELRCHRCRSAHPNIPKLKSHIESCKSSXPSIFSRKXVISSTTMHVDCT

SEQ ID NO: 76330 - protein, 66 aa, Setaria italica
  misc_feature (59)..(59): Xaa can be any naturally occurring amino acid
  Transcript Sequence Number=SeqID_10356
MEDRMPAAGTGTGRARRCGFVVWLHGLGDCGRANEFIADHFSAAAFSDTRWAFPTAPTXAPVTCNR

SEQ ID NO: 76331 - protein, 77 aa, Setaria italica
  Transcript Sequence Number=SeqID_10357
  Subcellular localization annotation: CTP_CleavageSite=40; ConfidenceScore=5.69e-01
MQWAGLRSSSPAPTAAWMGRRPRTARWPRGRLPAARRAVVASAAASDANSSSNSPGRDEEREEVARKEEGEGGGVGS

SEQ ID NO: 76332 - protein, 122 aa, Setaria italica
  Transcript Sequence Number=SeqID_10358
AVQFRIATLHLFHNYCQGNSLQLLVLLSVMGGFVQREWLQRGNTPQDAAKAYMFASPFRGVLQFWLQTTWAMAVWMIWLLAFSCGPFPHLLGWSALGFHLSASDRARCEFTAESDSSITSLQ

SEQ ID NO: 76333 - protein, 90 aa, Setaria italica
  Transcript Sequence Number=SeqID_10359
DERYFSPTEKINNAISFVVAIHHIRFRGPHLQASYQSPEEFIISFNCNSSSCWFHQFIADAWRLDVCVFVVQKFCPIKKKTEIFGHRPNV

SEQ ID NO: 76334 - protein, 125 aa, Setaria italica
  misc_feature (108)..(108): Xaa can be any naturally occurring amino acid
  Transcript Sequence Number=SeqID_10360
  Gene Ontology: Mol. function=binding
  Homolog annotation: Hit_ID=Q688Q3; Match level="QueryCoverage=75%, HitCoverage=26%, E-value=7e-29, Identity=56%"; Hit description =Unknow protein
  Pfam annotation: Domain name=TPR_1; Domain location=53-86; Score =24.8; E_value=0.00036; Accession=PF00515.20; Description =Tetratricopeptide repeat
MFHTFINLLGNMEVVFPRVAFWCKSYTTDTKFIRFKEAEDDCTEALNLDDRYIKAYSRRITARKELGKLKEAMDDAEFAISLEPNNPELRKQYTEIKALHMEKLGKKXPPVPTKHAVSGLDKPAD

SEQ ID NO: 76335 - protein, 517 aa, Setaria italica
  misc_feature (511)..(511): Xaa can be any naturally occurring amino acid
  Transcript Sequence Number=SeqID_10361
  Gene Ontology: Mol. function=zinc ion binding
  Homolog annotation: Hit_ID=Q2QVL7; Match level="QueryCoverage=98%, HitCoverage=71%, E-value=0.0, Identity=79%"; Hit description =Transposon protein, putative, unclassified, expressed
  Pfam annotation: Domain name=MULE; Domain location=82-178; Score =122.6; E_value=1.3e-33; Accession=PF10551.1; Description=MULE transposase domain
  Pfam annotation: Domain name=SWIM; Domain location=362-398; Score =36.3; E_value=1.3e-07; Accession=PF04434.9; Description=SWIM zinc finger
  Pfam module annotation: Pfam domain module=MULE::SWIM; Domain location=82-178::362-398
LEVCLVSSDKVTMVGPDEMAFLRQNVLGEGGDAQGLIDYLKKTQANDPAFSHAIQVDKNGCVVNVFWADSRAKAAYRHFGDAVTFDTSYKKNKYMMPFVTFSGVNHHLQPVIFGCALLMEETEFSFVWLFETWLAAMGGKAPCSLVTDQNRAMKAAIGKVFPNSYHRFCKWNILSRTKQKLTHVYTEHPTLRDELESCILESETIATFETAWMSIIDKYDLRKNSWLQAIYNIRQKWVPLYLMDTFFAEVSPAWKLETMNDFYKKYFNTKTTLEVFLNQFNLSMASQYDDEAKADMDTYVNKATTKTASLIEKQAASTYTKAVFSKFQEEFTESLGFVIQKIEDGSISKYSITKDEDPSETFYVTYSASNKMANCSCKYFEFSGILCRHILGVYIIVDPRTLPPDYFLKRWTRKARDDNAVLEENNNYHDEDPSQSITSRYNVLCVDAIKCAEKGAGSEAVYKAAKDILQKAYEEIIAYERNPGRGSQRDDININEDVTIDDTMNDQSMPXFWTEGD

SEQ ID NO: 76336 - protein, 376 aa, Setaria italica
  misc_feature (15)..(15): Xaa can be any naturally occurring amino acid
  misc_feature (26)..(26): Xaa can be any naturally occurring amino acid
  Transcript Sequence Number=SeqID_10362
  Gene Ontology: Mol. function=binding; Cellular component=chloroplast
  Homolog annotation: Hit_ID=Q688Q3; Match level="QueryCoverage=99%, HitCoverage=93%, E-value=1e-159, Identity=69%"; Hit description =Unknow protein
  Pfam annotation: Domain name=TPR_1; Domain location=15-48; Score =22.4; E_value=0.0018; Accession=PF00515.20; Description =Tetratricopeptide repeat
  Pfam annotation: Domain name=TPR_1; Domain location=49-81; Score =24.3; E_value=0.00051; Accession=PF00515.20; Description =Tetratricopeptide repeat
  Pfam annotation: Domain name=TPR_1; Domain location=82-115; Score =24.8; E_value=0.00036; Accession=PF00515.20; Description =Tetratricopeptide repeat
  Pfam annotation: Domain name=TPR_2; Domain location=15-48; Score =15.7; E_value=0.2; Accession=PF07719.9; Description=Tetratricopeptide repeat
  Pfam annotation: Domain name=TPR_2; Domain location=50-81; Score =16.5; E_value=0.11; Accession=PF07719.9; Description=Tetratricopeptid e repeat
  Pfam annotation: Domain name=TPR_2; Domain location=82-115; Score =7.9; E_value=3.5; Accession=PF07719.9; Description=Tetratricopeptide repeat
  Pfam module annotation: Pfam domain module=TPR_1::TPR_1::TPR_1::TPR _2::TPR_2::TPR_2; Domain location=15-48::49-81::82-115::15-48::50 -81::82-115
KYSSYLNDEPMPDAXTSEKEQGNEYXKQKKFTEAIECYSRSIGLSPTAVAFANRAMAYLKLRRFKEAEDDCTEALNLDDRYIKAYSRRITARKELGKLKEAMDDAEFAISLEPNNPELRKQYTEIKALHMEKLGKKTPVPTKHAVSGLDKPADKKDITSHTPTISQKGSFMEVDSPTRAAVEIRESPGGSSSSKGGSGVIVNENVLQQSRNANQKPGPEASIQELASRAASRYMASTVKSVKIPKTAYDFEVSWRALSDDTAQQIQLLKSIPPASLPEIFKNALSAPFLIDIVKCSASIFWDDAALAVSILENLAKVPRFDLIIMCLSSMHKSELRKIWDQVFLAGKASADQVEALRQLRSKYIQGGCQDNAFSSS

SEQ ID NO: 76337 - protein, 63 aa, Setaria italica
  Transcript Sequence Number=SeqID_10363
SFRCRKFGLSTTYVYIFTWSIVRAGRGFSFVDKTTCQNAESSAAAIATREVVHKYPWAACPGI

SEQ ID NO: 76338 - protein, 60 aa, Setaria italica
  Transcript Sequence Number=SeqID_10364
MPGQAAQGYLWTTSRVAIAAADDSAFWHVVLSTKLQHPYQHGHRAANPAAAQAHSILGNQ

SEQ ID NO: 76339 - protein, 304 aa, Setaria italica
  Transcript Sequence Number=SeqID_10365
  Gene Ontology: Mol. function=metal ion binding; Cellular component =cytoplasm; Biological process=negative regulation of nitric-oxide synthase activity
  Homolog annotation: Hit_ID=B4FLI7; Match level="QueryCoverage=99%, HitCoverage=99%, E-value=1e-142, Identity=82%"; Hit description =Nitric oxide synthase interacting protein
  Pfam annotation: Domain name=FYVE; Domain location=205-261; Score= -10.4; E_value=0.0082; Accession=PF01363.13; Description=FYVE zinc finger
  Pfam annotation: Domain name=zf-C3HC4; Domain location=214-255; Score= 19.0; E_value=0.0007; Accession=PF00097.17; Description=Zinc finger, C3HC4 type (RING finger)
  Pfam module annotation: Pfam domain module=FYVE::zf-C3HC4; Domain location=205-261::214-255
MPQRHSKNNNDLAFFTYEEKRKLGYGTQRERLGKDSIKPFDACCLCLKPLIDPHCCPKGHAFCKECILECLLAQKKDIKRKLAAHEAQKKQEKEEEEEKLILQKAKELDAFDQQNHGAVPQYHDRSGSQDKNGFHGANSVKVTSFEEEALRNMKAFWLPSATPEATVKVDAPSTDTICPEGQEKLKLKSLFPISFTEENGDQKRKKSVEKSYMCPSCMSTLTNTMTLVAISTCGHVFCKKCSDKFLLKDKVCLECNKPFKERNLVTLEKGGTGFAAHDERLEAREFKHLGSGSGLGLVKPAPKA

SEQ ID NO: 76340 - protein, 116 aa, Setaria italica
  Transcript Sequence Number=SeqID_10366
  Gene Ontology: Mol. function=lactoylglutathione lyase activity
  Homolog annotation: Hit_ID=B9RKL0; Match level="QueryCoverage=37%, HitCoverage=11%, E-value=7e-13, Identity=74%"; Hit description =Lactoylglutathione lyase, putative
  Subcellular localization annotation: CTP_CleavageSite=65; ConfidenceScore=5.67e-01
MARLLLPLPFAAAAVASASASSLHLAASRLRVPAVSVARREGLFGGRVVGGAVRAPARLARRGLCAGAEPGGSAGTVVGQEEAMEWVKKDRRRLLHVVYRVGDLDKTIKFYTECLG

SEQ ID NO: 76341 - protein, 91 aa, Setaria italica
  misc_feature (7)..(7): Xaa can be any naturally occurring amino acid
  Transcript Sequence Number=SeqID_10367
  Gene Ontology: Mol. function=receptor activity
  Homolog annotation: Hit_ID=Q9SR02; Match level="QueryCoverage=96%, HitCoverage=5%, E-value=8e-21, Identity=48%"; Hit description =F7O18.23 protein
SVLRHVXKHCSVCIKYAQLTTQMDSLGIPYAEEAELGTPSSNLWLRLPFLKEDSWKHVCLRLGKTGRISWDVRINDPYYGSLWKVHGGSTA

SEQ ID NO: 76342 - protein, 68 aa, Setaria italica
  Transcript Sequence Number=SeqID_10368
MHITSMLNLRGGPCLLEIVDITADSGLYCNSPCELDENLVYAADGELIRVMLIAYSGFKLAVSSVLQR

SEQ ID NO: 76343 - protein, 63 aa, Setaria italica
  Transcript Sequence Number=SeqID_10369
SRQRRHGQDGIHTCHGYWHNLAIANSVFHNSCIYKKRCMSINLEATYVLELELTGSFVKRSIS

SEQ ID NO: 76344 - protein, 90 aa, Setaria italica
  misc_feature (29)..(29): Xaa can be any naturally occurring amino acid
  misc_feature (44)..(44): Xaa can be any naturally occurring amino acid
  misc_feature (67)..(67): Xaa can be any naturally occurring amino acid
  Transcript Sequence Number=SeqID_10370
  Gene Ontology: Mol. function=DNA binding; Biological process =regulation of transcription
  Homolog annotation: Hit_ID=Q7XPT2; Match level="QueryCoverage=74%, HitCoverage=27%, E-value=1e-09, Identity=50%"; Hit description =OSJNBa0083N12.9 protein
MKNKTLATIFSFDMQLQNKLRMRIEVQGXICKTIVEKTQNNLSXNATEAVNLEATRSQLVDFNLALXVSKNVSQVYEQNNGELDESYKDK

SEQ ID NO: 76345 - protein, 139 aa, Setaria italica
  misc_feature (130)..(130): Xaa can be any naturally occurring amino acid
  Transcript Sequence Number=SeqID_10371
  Gene Ontology: Mol. function=structural molecule activity; Cellular component=cytoskeleton; Biological process=regulation of actin filament polymerization
  Homolog annotation: Hit_ID=B6SSZ5; Match level="QueryCoverage=100%, HitCoverage=44%, E-value=7e-66, Identity=66%"; Hit description=Actin- like protein 3
MYCYTSSDIVKIFFNPEIYNNDFTTPLQVVIDKCIQSSPIDTRRALYKNIVLSGGSTMFKDFHRRLQRDLKKIVDARVRASNTRLISGDPKAQPIEVNVVSHPIQRYAVWFGGSVLASTAEFYEACHTKXEYEEYGASI

SEQ ID NO: 76346 - protein, 141 aa, Setaria italica
  Transcript Sequence Number=SeqID_10372
VRTTRFDSTKPSNGHNISTQNYIKQFNTVKHKHYAVICMLDLFMTLTSNSQTAIAAETITRLQFALTNRKGKKAQGKGIHKIHARQHRKCGAASAQNCMQITEPIIQASPSAEQRSPSQPISTIAVSAMGQKMERKNMLGI

SEQ ID NO: 76347 - protein, 55 aa, Setaria italica
  Transcript Sequence Number=SeqID_10373
  Homolog annotation: Hit_ID=Q7XR80; Match level="QueryCoverage=65%, HitCoverage=7%, E-value=3e-10, Identity=80%"; Hit description=Actin -related protein 8
MLSTKFLWAYSLYYMSYSDFHRMQVKPSTQPVIVVLPLNHTDDTDSARASRKQYK

SEQ ID NO: 76348 - protein, 200 aa, Setaria italica
  misc_feature (90)..(90): Xaa can be any naturally occurring amino acid
  misc_feature (189)..(189): Xaa can be any naturally occurring amino acid
  Transcript Sequence Number=SeqID_10374
  Gene Ontology: Mol. function=structural molecule activity; Cellular component=cytoskeleton
  Homolog annotation: Hit_ID=Q7XR80; Match level="QueryCoverage=71%, HitCoverage=27%, E-value=3e-59, Identity=80%"; Hit description=Actin- related protein 8
MLQHCCRYMLPFLAGLRSKIVLSSITRTSYVLHPYGMCITILEETYVSNELTSICFPVDQAVLSLYASKRTSGIVVHIGFNTTSVVPRFXCTMFTTVFEGRVMYEIGVETVGQGALKLTGFLKELMHQRNISCESLYTVRTIKEKLCYVAADYEAELRKGTQASCEVDGEGWFTLSEERFKTAEILFQXHMGGMPAMGLQ

SEQ ID NO: 76349 - protein, 123 aa, Setaria italica
  misc_feature (98)..(98): Xaa can be any naturally occurring amino acid
  misc_feature (109)..(109): Xaa can be any naturally occurring amino acid
  Transcript Sequence Number=SeqID_10375
  Gene Ontology: Mol. function=structural molecule activity
  Homolog annotation: Hit_ID=Q7XR80; Match level="QueryCoverage=93%, HitCoverage=20%, E-value=1e-45, Identity=76%"; Hit description=Actin- related protein 8
IRIFSSLESLCMDHCYNSEVVGDDSWYKTVVLAGGSSCLPGLPERLEKELQQLLPHYISEGIRVLPPPFGTDSAWFGAKMISNVRTWNLEFCVARMMXSTFTEAWCVKXKQFRQKIRRNGPLF

SEQ ID NO: 76350 - protein, 73 aa, Setaria italica
  Transcript Sequence Number=SeqID_10376
  Gene Ontology: Mol. function=structural molecule activity
  Homolog annotation: Hit_ID=Q7XR80; Match level="QueryCoverage=82%, HitCoverage=12%, E-value=5e-18, Identity=76%"; Hit description=Actin- related protein 8
CTMFTTVFEGRVMYEIGVETVGQGALKLTGFLKELMHQRNISCESLYTVRTIKEVKFIYAAIVEDYFGCSRYY

SEQ ID NO: 76351 - protein, 284 aa, Setaria italica
  Transcript Sequence Number=SeqID_10377
  Gene Ontology: Mol. function=structural molecule activity; Cellular component=cytoskeleton
  Homolog annotation: Hit_ID=Q7XR80; Match level="QueryCoverage=100%, HitCoverage=68%, E-value=1e-144, Identity=75%"; Hit description =Actin-related protein 8
  Pfam annotation: Domain name=Actin; Domain location=3-269; Score= -90.5; E_value=9.2e-10; Accession=PF00022.11; Description=Actin
GWSKYAAPSGRCATFLEFGNIESPMYARLRHFFSTIYTRMQVKPSTQPVIVVLPLNHTDDTDSARASRKQYKETIYSVLFDMNVPAVCAVDQAVLSLYASKRTSGIVVHIGFNTTSVVPKKLCYVAADYEAELRKGTQASCEVDGEGWFTLSEERFKTAEILFQPHMGGMPAMGLHKAVSLCMDHCYNSEVVGDDSWYKTVVLAGGSSCLPGLPERLEKELQQLLPHYISEGIRVLPPPFGTDSAWFGAKMISNVSTFTEAWCVKKKQFRQKIRRNGPLFVNSW

SEQ ID NO: 76352 - protein, 390 aa, Setaria italica
  Transcript Sequence Number=SeqID_10378
  Gene Ontology: Mol. function=structural molecule activity; Cellular component=cytoskeleton
  Homolog annotation: Hit_ID=Q7XR80; Match level="QueryCoverage=92%, HitCoverage=74%, E-value=0.0, Identity=87%"; Hit description=Actin -related protein 8
  Pfam annotation: Domain name=Actin; Domain location=111-389; Score= -86.0; E_value=5.3e-10; Accession=PF00022.11; Description=Actin
  Pfam annotation: Domain name=F-box; Domain location=16-63; Score =29.6; E_value=1.3e-05; Accession=PF00646.25; Description=F-box domain
  Pfam module annotation: Pfam domain module=Actin::F-box; Domain location=111-389::16-63
RAQPAAERYSASLSLGALDAVPTDVLAQILRLLGPVDAARSTAVCRAWRILASDNGLWAFFLRLGPDPWDLVVFAETHLAAGPDSHPWLYYDNSPQLSFKQIYGLRAVVPGTLIVDGGSGYCKYGWSKYAAPSGRCATFLEFGNIESPMYARLRHFFSTIYTRMQVKPSTQPVIVVLPLNHTDDTDSARASRKQYKETIYSVLFDMNVPAVCAVDQAVLSLYASKRTSGIVVHIGFNTTSVVPIFEGRVMYEIGVETVGQGALKLTGFLKELMHQRNISCESLYTVRTIKEKLCYVAADYEAELRKGTQASCEVDGEGWFTLSEERFKTAEILFQPHMGGMPAMGLHKAVSLCMDHCYNSEVVGDDSWYKTVVLAGGSSCLPGLPSSRSW

SEQ ID NO: 76353 - protein, 94 aa, Setaria italica
  Transcript Sequence Number=SeqID_10379
AFFLGVAATAFSMDFFCRLAMWLLLLRSEFSSSSAIGLRLYGDCSAFLDELRLSAGVGPVAGPPPAFSFPAAILAGELDLGDAHLFPDAAAAEP

SEQ ID NO: 76354 - protein, 59 aa, Setaria italica
  Transcript Sequence Number=SeqID_10380
IEMKSYVYIHGCLKFTFIKSSQIDMGFFNIFPRDACCLCLTESKSGMPVSSTLPETEKG

SEQ ID NO: 76355 - protein, 246 aa, Setaria italica
  Transcript Sequence Number=SeqID_10381
  Homolog annotation: Hit_ID=Q0VJB4; Match level="QueryCoverage=100%, HitCoverage=100%, E-value=2e-61, Identity=53%"; Hit description =Putative zinc-binding protein
  Pfam annotation: Domain name=PLATZ; Domain location=56-180; Score =250.1; E_value=5.3e-72; Accession=PF04640.6; Description=PLATZ transcription factor
  Pfam annotation: Domain name=zf-B_box; Domain location=51-101; Score =8.1; E_value=0.019; Accession=PF00643.16; Description=B-box zinc finger
  Pfam module annotation: Pfam domain module=PLATZ::zf-B_box; Domain location=56-180::51-101
MAIDHESPFKELRLKNRRIMGGGGPEPEEEAASAAYGDQWPRWLQPLLSARFFAHCKTHSDSHRSGECNMFCLDCSAAAGTGALCSLCLAHGHRDHHTIQIRRSSYHDVIRVSDIQRFMDIAGVQTYVINSARVVFLNERPQQQKPGCGGKAASASANLCEVCARSLLDNFRFCSLGCKVVGCAPDAAKARSRLLRPASDGNASSSALRNADKKQSFSPPTPPTLPTKRRKGIPHRAPFGSLIVEY

SEQ ID NO: 76356 - protein, 75 aa, Setaria italica
  Transcript Sequence Number=SeqID_10382
  Subcellular localization annotation: CTP_CleavageSite=45; ConfidenceScore=5.07e-01
STCSCPSSSTLLPGSSCSCQYYRQHHATINKRTSISLIDTNRQVVSPIKMQINNVAKEWIMQQVFLVTTNFVLQF

SEQ ID NO: 76357 - protein, 221 aa, Setaria italica
  Transcript Sequence Number=SeqID_10383
  Gene Ontology: Mol. function=receptor activity; Cellular component =membrane; Biological process=intracellular protein transport
  Homolog annotation: Hit_ID=B9SVJ2; Match level="QueryCoverage=99%, HitCoverage=99%, E-value=2e-90, Identity=74%"; Hit description =Vesicle transport V-snare protein vti1a, putative
  Pfam annotation: Domain name=Sec20; Domain location=128-219; Score= -7.3; E_value=0.035; Accession=PF03908.5; Description=Sec20
  Pfam annotation: Domain name=V-SNARE; Domain location=41-196; Score =195.1; E_value=2e-55; Accession=PF05008.7; Description=Vesicle transport v-SNARE protein
  Pfam module annotation: Pfam domain module=Sec20::V-SNARE; Domain location=128-219::41-196
MSEVFEGYERQYCEASASLSRKCTAASALDGEKKKQKLSEIQSCVEEAESLIRKMDLEARSLQPSVKAGLLAKLREYKSDLNNVKSELKRISAPNARQATREELLEAGMADTLAVSTDQRGRLMMTTERLNQSTDRIKESRRTMLETEELGVSILQDLHQQRQSLLHAHTTLHGVDDNIGKSKKILAAMSKRMDRNKWIIGGIITALVLAILLILYFKLAH

SEQ ID NO: 76358 - protein, 69 aa, Setaria italica
  Transcript Sequence Number=SeqID_10384
  Gene Ontology: Mol. function=transferase activity, transferring glycosyl groups; Cellular component=integral to membrane
  Homolog annotation: Hit_ID=Q84S18; Match level="QueryCoverage=95%, HitCoverage=7%, E-value=8e-14, Identity=59%"; Hit description =Probable mixed-linked glucan synthase 8
RGTLLLIYPFALGIMGRWSKRPYLLFIFFVIAFVVVAAVVFAIHAARTGSVRFHFSHSGGASFPTSWGF

SEQ ID NO: 76359 - protein, 40 aa, Setaria italica
  Transcript Sequence Number=SeqID_10385
LATIDKEDQGSLIPNHRLAASMNRSNMVVLKLDVDILHES

SEQ ID NO: 76360 - protein, 90 aa, Setaria italica
  misc_feature (55)..(55): Xaa can be any naturally occurring amino acid
  Transcript Sequence Number=SeqID_10386
  Gene Ontology: Mol. function=transferase activity, transferring glycosyl groups; Cellular component=chloroplast
  Homolog annotation: Hit_ID=B6UEE3; Match level="QueryCoverage=100%, HitCoverage=11%, E-value=6e-27, Identity=65%"; Hit description =Phosphoribosylanthranilate transferase
  Pfam annotation: Domain name=C2; Domain location=15-88; Score=29.7; E_ value=1.2e-05; Accession=PF00168.22; Description=C2 domain
TRAPNVYYSPKLAYLKVVVIAAQDLVPAEKGRALAPTIAKIQLGGQIRRTRPQGXPNPVWNEEFMFVAGEPFDEPLVVTVEEKVAAGRDE

SEQ ID NO: 76361 - protein, 43 aa, Setaria italica
  Transcript Sequence Number=SeqID_10387
  Gene Ontology: Mol. function=hydrolase activity
  Homolog annotation: Hit_ID=B6T599; Match level="QueryCoverage=100%, HitCoverage=17%, E-value=7e-17, Identity=95%"; Hit description =Protein usf
AAKSLEEKLKSSGVPYEVHIYPGCSHAFMNTSPEALKRKKGMG

SEQ ID NO: 76362 - protein, 86 aa, Setaria italica
  Transcript Sequence Number=SeqID_10388
  Homolog annotation: Hit_ID=B6TXW7; Match level="QueryCoverage=90%, HitCoverage=25%, E-value=6e-10, Identity=50%"; Hit description =Adhesin FhaB
MPCCQTLLTAAAAAASSTPVWLHRLHAKEGLSFPSHLNIDDLLYGGRQPQPPPPLTPPVPLPPPSSNHQANLAVVVREPPPKVAAK

SEQ ID NO: 76363 - protein, 67 aa, Setaria italica
  Transcript Sequence Number=SeqID_10389
  Subcellular localization annotation: CTP_CleavageSite=47; ConfidenceScore=5.00e-01
AGSNGSGAGSSAGSGGGQGYGQGGGSGFGSGYGEGSGSGRGSGNGVVGVGYSEGYGHGSPAGSGGNP

SEQ ID NO: 76364 - protein, 98 aa, Setaria italica
  Transcript Sequence Number=SeqID_10390
  Subcellular localization annotation: CTP_CleavageSite=61; ConfidenceScore=5.66e-01
QYSLHAHASTRQTPHDDPACQLLPPSSLSSPSLPPSSLSSLYLRGGAALLLCTSSRSPDGVAARRSSERPHARHQVLTSLQPPAAVLLGAAPPPRPAA

SEQ ID NO: 76365 - protein, 314 aa, Setaria italica
  Transcript Sequence Number=SeqID_10391
  Gene Ontology: Mol. function=chorismate mutase activity; Cellular component=chloroplast; Biological process=aromatic amino acid family biosynthetic process
  Homolog annotation: Hit_ID=B6TF54; Match level="QueryCoverage=92%, HitCoverage=92%, E-value=1e-134, Identity=82%"; Hit description =Chorismate mutase
  Pfam annotation: Domain name=CM_2; Domain location=74-141; Score =32.2; E_value=2.1e-06; Accession=PF01817.13; Description=Chorismate mutase type II
  Subcellular localization annotation: CTP_CleavageSite=46; ConfidenceScore=5.43e-01
MEFKLAAKAAAASPAPAHAHRGEGAQGRSRVGFGLGSAATGTKALRATANNSATPVAKEGRVDRSEILTLDSIRQTLIRLEDSIIFGLLERAQYRYNADTYDSNSFHMEGFEGSLVEYIVRETEKLHAQVGRYKSPDEHAFFPDDLPEPRLPPMQYPKVLHPVADSININKKIWKLYFDELLPRLAKEGSDGNYGSSALCDTSLLQALSKRIHYGKFVAEAKFQESPEAYRPAIKAQDPVQLMQLLTYETVERAIEHRVEAKAKIFGQEVNIGAEANGAPPVCKINPSIVAGLYRRIMPLTKEVQVAYLLGRLD

SEQ ID NO: 76366 - protein, 163 aa, Setaria italica
  misc_feature (6)..(6): Xaa can be any naturally occurring amino acid
  misc_feature (12)..(12): Xaa can be any naturally occurring amino acid
  misc_feature (19)..(19): Xaa can be any naturally occurring amino acid
  Transcript Sequence Number=SeqID_10392
  Gene Ontology: Mol. function=signal transducer activity; Cellular component=plasma membrane; Biological process=signal transduction
  Homolog annotation: Hit_ID=Q40687; Match level="QueryCoverage=100%, HitCoverage=42%, E-value=6e-82, Identity=91%"; Hit description =Guanine nucleotide-binding protein subunit beta
  Pfam annotation: Domain name=WD40; Domain location=117-155; Score =24.5; E_value=0.00044; Accession=PF00400.24; Description=WD domain, G-beta repeat
  Pfam annotation: Domain name=WD40; Domain location=22-60; Score=43.9; E_value=6.3e-10; Accession=PF00400.24; Description=WD domain, G-beta repeat
  Pfam annotation: Domain name=WD40; Domain location=71-109; Score =13.7; E_value=0.76; Accession=PF00400.24; Description=WD domain, G -beta repeat
  Pfam module annotation: Pfam domain module=WD40::WD40::WD40; Domain location=117-155::22-60::71-109
MFVSGXSCDATXVRLWDIXDKVRAVRTYHGHEADVNSVKFFPDGHRFGTGSDDGTCRLFDMRTGHQLQVYSREPNRDDNELPTVTSIAFSISGRLLFAGYSNGDCYVWDTLLAEVVLNLGNLQNSHDGRISCLGMSSDGSALCTGSWDKNLKIWAFSGHRKIV

SEQ ID NO: 76367 - protein, 351 aa, Setaria italica
  Transcript Sequence Number=SeqID_10393
  Gene Ontology: Mol. function=signal transducer activity; Cellular component=nucleus; Biological process=signal transduction
  Homolog annotation: Hit_ID=Q40687; Match level="QueryCoverage=94%, HitCoverage=87%, E-value=1e-175, Identity=91%"; Hit description =Guanine nucleotide-binding protein subunit beta
  Pfam annotation: Domain name=WD40; Domain location=147-186; Score =35.3; E_value=2.5e-07; Accession=PF00400.24; Description=WD domain, G-beta repeat
  Pfam annotation: Domain name=WD40; Domain location=194-234; Score =33.5; E_value=8.6e-07; Accession=PF00400.24; Description=WD domain, G-beta repeat
  Pfam annotation: Domain name=WD40; Domain location=239-277; Score =44.9; E_value=3e-10; Accession=PF00400.24; Description=WD domain, G -beta repeat
  Pfam annotation: Domain name=WD40; Domain location=288-326; Score =13.7; E_value=0.76; Accession=PF00400.24; Description=WD domain, G -beta repeat
  Pfam annotation: Domain name=WD40; Domain location=56-94; Score=42.0; E_value=2.4e-09; Accession=PF00400.24; Description=WD domain, G-beta repeat
  Pfam annotation: Domain name=WD40; Domain location=98-136; Score =22.5; E_value=0.0018; Accession=PF00400.24; Description=WD domain, G- beta repeat
  Pfam module annotation: Pfam domain module=WD40::WD40::WD40::WD40::WD4 0::WD40; Domain location=147-186::194-234::239-277::288-326::56 -94::98-136
MASVAELKEKHAAATASVNSLRERLRQRREMLLDTDVARYSKAQGRTPVSFNPTDLVCCRTLQGHSGKVYSLDWTPEKNWIVSASQDGRLIVWNALTSQKTHAIKLHCPWVMTCAFAPNGQSVACGGLDSACSIFNLNSQADRDGNMPVSRILTGHKGYVSSCQYVPDQESRLITSSGDQTCVLWDVTTGQRMSIFGGEFPSGHTADVQSVSINSSNTNMFVSGSCDATVRLWDIRIASRAVRTYHGHEADVNSVKFFPDGHRFGTGSDDGTCRLFDMRTGHQLQVYSREPNRDDNELPTVTSIAFSISGRLLFAGYSNGDCYVWDTLLAEVWIFGYVPWNEIQLIYYKEK

SEQ ID NO: 76368 - protein, 267 aa, Setaria italica
  misc_feature (254)..(254): Xaa can be any naturally occurring amino acid
  Transcript Sequence Number=SeqID_10394
  Homolog annotation: Hit_ID=B9S1L5; Match level="QueryCoverage=88%, HitCoverage=91%, E-value=5e-49, Identity=45%"; Hit description =Ankyrin repeat-containing protein, putative
  Pfam annotation: Domain name=Ank; Domain location=126-158; Score =42.5; E_value=1.7e-09; Accession=PF00023.22; Description=Ankyrin repeat
  Pfam annotation: Domain name=Ank; Domain location=26-59; Score=1.8; E_ value=20; Accession=PF00023.22; Description=Ankyrin repeat
  Pfam annotation: Domain name=Ank; Domain location=60-92; Score=32.8; E_value=1.3e-06; Accession=PF00023.22; Description=Ankyrin repeat
  Pfam annotation: Domain name=Ank; Domain location=93-125; Score=24.1; E_value=0.00056; Accession=PF00023.22; Description=Ankyrin repeat
  Pfam module annotation: Pfam domain module=Ank::Ank::Ank::Ank; Domain location=126-158::26-59::60-92::93-125
MGRRHSGGGGGGRGGGRGRGRGRDEEGDLHLHKAARDGDAAAAESLCESNPLAVNSRDRLSRTPLHLAAWAGHVEVVKCLCKHKADVGAAAMDDTAAIHFASQKGHIEVVRELLVAGATVKAKNRKGFTALHFAAQNSHLDLVKYLVKKGVDVTAKTKGGQTALHVAENDDVRAFLKECEQSLKKGSELPLEKKGAEPELPSENKDDSAQDGGGSKSSGEGMQDGDDAGQGEKRKCEGVAASSSPQVKKAKVSXLGHLVSENDMDEE

SEQ ID NO: 76369 - protein, 336 aa, Setaria italica
  Transcript Sequence Number=SeqID_10395
  Gene Ontology: Mol. function=nucleic acid binding
  Homolog annotation: Hit_ID=Q2PEV8; Match level="QueryCoverage=98%, HitCoverage=82%, E-value=2e-83, Identity=47%"; Hit description =Putative DNA binding protein (Fragment)
  Pfam annotation: Domain name=RRM_1; Domain location=1-71; Score=29.6; E_value=1.3e-05; Accession=PF00076.14; Description=RNA recognition motif. (a.k.a. RRM, RBD, o
  Pfam annotation: Domain name=RRM_1; Domain location=114-185; Score =65.4; E_value=2.2e-16; Accession=PF00076.14; Description=RNA recognition motif. (a.k.a. RRM, RBD, o
  Pfam annotation: Domain name=RRM_1; Domain location=213-277; Score =76.0; E_value=1.4e-19; Accession=PF00076.14; Description=RNA recognition motif. (a.k.a. RRM, RBD, o
  Pfam module annotation: Pfam domain module=RRM_1::RRM_1::RRM_1; Domain location=1-71::114-185::213-277
LWIGGLLHWMNEDYLYACFTYSPELLSLVVKRSKHTGQSEGFGFLRFNDHATATRILKSYNGQKMPNADQDFNLNWAAQSYAPNKLPDQDSKLDWATQQDGHTNDTAAASEHVIFVGDLAYDVTEYMLHHLFKSRYPSVKSAKVIFDKLTGRSKGYGFVRFGDANEHVQAMTEMNGAYCSTRPMRIGPAPNKKYFDHSTQGTDSYHDPNNSRLFVGSLDQSITDDDLLRAFSPYGELVNVRVLPGKACGFVTYSNRASAEEAMRMLNGSQLGGNNLRLTWGRRSGNKQDPRNGGQHGRPKCIDPSSFGWSPQDPYAYAQTGHPGYGYYQHQLPTVQ

SEQ ID NO: 76370 - protein, 107 aa, Setaria italica
  Transcript Sequence Number=SeqID_10396
  Subcellular localization annotation: CTP_CleavageSite=82; ConfidenceScore=5.18e-01
QAKGRTHRSISSTILSWFHHNHVVPLIQHPNTYFSSGGSRKHGLDSPCRRGARCPSNTSSIVQTRACPATASWPCHALRMVPAAARRALASRHASAARHRRRSPRGR

SEQ ID NO: 76371 - protein, 102 aa, Setaria italica
  Transcript Sequence Number=SeqID_10397
VRCYATQTQNVLRKSSTATIKRADPKGMVNRPKLDDGNGGFPPFRFGKGGGGGGGGGGGSNYFGGFFVFACVLLLDYLKEAEKNLLRQGHGSGDQASIGLAQ

SEQ ID NO: 76372 - protein, 173 aa, Setaria italica
  misc_feature (18)..(18): Xaa can be any naturally occurring amino acid
  Transcript Sequence Number=SeqID_10398
  Gene Ontology: Mol. function=sequence-specific DNA binding; Cellular component=microtubule associated complex
  Subcellular localization annotation: CTP_CleavageSite=28; ConfidenceScore=5.13e-01
KTSGAVLICCLDEVSCHXAVSTLTLASRSSQVVNEQFYNLSLGTRSCSKSNASLSVRAKNLSRSLLPSIQQNSVPKNGRTQFINRAVKATRTPTANKRSEATMHSAKKHVSSVSTSINMKQIGAKSIQSGRRLFSTTTDSSKEDKIGAVPTMVAKAEEVQSSLGMAIQGSSPV

SEQ ID NO: 76373 - protein, 58 aa, Setaria italica
  Transcript Sequence Number=SeqID_10399
  Gene Ontology: Mol. function=electron carrier activity; Cellular component=extracellular region; Biological process=response to oxidative stress
  Homolog annotation: Hit_ID=B6SMR2; Match level="QueryCoverage=100%, HitCoverage=18%, E-value=3e-17, Identity=70%"; Hit description =Peroxidase 52
  Subcellular localization annotation: CTP_CleavageSite=17; ConfidenceScore=5.20e-01
HSDQELFNGGSTDALVRSYAASPAQFSSDFAAGMVRMSGIGVLTGSSGQIRRNCRRVN

SEQ ID NO: 76374 - protein, 117 aa, Setaria italica
  Transcript Sequence Number=SeqID_10400
  Gene Ontology: Mol. function=lyase activity; Cellular component =anchored to membrane
  Homolog annotation: Hit_ID=B6TJY9; Match level="QueryCoverage=100%, HitCoverage=32%, E-value=5e-59, Identity=93%"; Hit description =Pectate lyase 4
  Pfam annotation: Domain name=Pec_lyase_C; Domain location=26-117; Score=-60.3; E_value=0.00074; Accession=PF00544.11; Description =Pectate lyase
GSLREACRAAEPLWIVFEVSGTIHLQSYLRVASHKTIDGRGQRVVLTGKGLQLKSCHHVIVCNLMFEGGRGHDVDGIQIKPGSTNIWIDRCTLADYDDGLIDITRQSTDITVSRCHF

SEQ ID NO: 76375 - protein, 139 aa, Setaria italica
  Transcript Sequence Number=SeqID_10401
  Gene Ontology: Mol. function=nucleic acid binding
  Homolog annotation: Hit_ID=Q10M00; Match level="QueryCoverage=100%, HitCoverage=19%, E-value=2e-27, Identity=52%"; Hit description=Zinc finger CCCH domain-containing protein 22
  Pfam annotation: Domain name=zf-CCCH; Domain location=18-43; Score =23.4; E_value=0.00092; Accession=PF00642.16; Description=Zinc finger C-x8-C-x5-C-x3-H type (and similar)
SVSVNELCLGGGGGGDGFGWKPCLYYARGFCKNGSSCRFVHGGLPDDAAALAATKMEAAADQQQQCQDFLLRSKSQRLGPAAFPYSPTGSLPGSPSAASKCLSFLLQQQQQQQQHDRAAAAAALMLGGGDDAHKFMGRP

SEQ ID NO: 76376 - protein, 305 aa, Setaria italica
  Transcript Sequence Number=SeqID_10402
  Gene Ontology: Mol. function=double-stranded RNA binding; Cellular component=intracellular
  Homolog annotation: Hit_ID=B9T2K0; Match level="QueryCoverage=60%, HitCoverage=64%, E-value=4e-30, Identity=41%"; Hit description =Double-stranded RNA binding protein, putative
  Pfam annotation: Domain name=dsrm; Domain location=132-196; Score =45.7; E_value=1.9e-10; Accession=PF00035.17; Description=Double -stranded RNA binding motif
  Pfam annotation: Domain name=dsrm; Domain location=43-109; Score =70.6; E_value=5.8e-18; Accession=PF00035.17; Description=Double -stranded RNA binding motif
  Pfam module annotation: Pfam domain module=dsrm::dsrm; Domain location=132-196::43-109
ASEMAATATATTTAMEGIEATAAATTTEAAAGQSAAIPEKYMHKNRLQEFAVRTQKKLPIYNVEREGEYHHPKFRCTVEVGGQKFSSTGSFSRKKEAEQDAARVAYEILAPIEEGDVNKEVFGLIDQDVVFCKSILYEFAVKTKTARPSYSEDCLKEPFTMFVGSVVFDGNTYTGESASNKKDAQQNAARAVIKSILATGNSCMSGIIRSKKHLITAIKSSESTPTAFTPIKFTRAVTYAAYGGPDHVAPASQDESSSLGVQEHSIVPAVGTSANPSAKAVSGSKKRKGRVGGADVNGTMVAKEH

SEQ ID NO: 76377 - protein, 169 aa, Setaria italica
  misc_feature (167)..(167): Xaa can be any naturally occurring amino acid
  Transcript Sequence Number=SeqID_10403
  Gene Ontology: Mol. function=kinase activity; Cellular component =plasma membrane
  Homolog annotation: Hit_ID=Q9SA62; Match level="QueryCoverage=51%, HitCoverage=5%, E-value=4e-20, Identity=47%"; Hit description =F10O3.10 protein
  Pfam annotation: Domain name=KIP1; Domain location=9-82; Score=159.1; E_value=1.4e-44; Accession=PF07765.4; Description=KIP1-like protein
MVHKELPQAWWFDSHNLARPSPWLNNTLSELDDKTKQMLQLIDQDADSFAQRAEMYYKKRPVLVDMLGDLYRTHRSLAEQYDLLKHGSGTRQTVFGLSSCTQSRSQASSVNGKTTPRSSCSVSIYDSESEVDDPEQEEEHDREQVELMRAEIIKMELSSREQQRQKXQV

SEQ ID NO: 76378 - protein, 115 aa, Setaria italica
  Transcript Sequence Number=SeqID_10404
  Homolog annotation: Hit_ID=Q55439; Match level="QueryCoverage=95%, HitCoverage=86%, E-value=1e-20, Identity=45%"; Hit description =Slr0022 protein
  Pfam annotation: Domain name=UPF0153; Domain location=2-89; Score =38.9; E_value=2.1e-08; Accession=PF03692.7; Description =Uncharacterised protein family (UPF0153)
SGCGACCKLDKGPDFPTPDEIFADHPDDLQLYRSMTGDDGWCINYDKATRTCNIYQDRPSFCRVEPKIFDEFFGVPRSRFDREACSACLDNIKMVYGDDSAELSNFKRVIREKSN

SEQ ID NO: 76379 - protein, 120 aa, Setaria italica
  misc_feature (10)..(10): Xaa can be any naturally occurring amino acid
  misc_feature (20)..(20): Xaa can be any naturally occurring amino acid
  misc_feature (52)..(52): Xaa can be any naturally occurring amino acid
  Transcript Sequence Number=SeqID_10405
  Homolog annotation: Hit_ID=Q8YM12; Match level="QueryCoverage=83%, HitCoverage=88%, E-value=3e-13, Identity=37%"; Hit description =Alr5129 protein
ACCKLDKAPXLPTPDEIFAXHPDDLQLYRSMTGDDGWCINYDKATRTCNIYXRVEPRFFDEFFGVPRSRFDREACSACLDNIKMVYGDDSAELSNFKRVIREESNKLEASKNQQDKLLDT

SEQ ID NO: 76380 - protein, 77 aa, Setaria italica
  misc_feature (8)..(8): Xaa can be any naturally occurring amino acid
  misc_feature (16)..(16): Xaa can be any naturally occurring amino acid
  Transcript Sequence Number=SeqID_10406
  Pfam annotation: Domain name=Ribosomal_L35p; Domain location=22-74; Score=2.9; E_value=0.0012; Accession=PF01632.11; Description =Ribosomal protein L35
  Subcellular localization annotation: CTP_CleavageSite=27; ConfidenceScore=5.12e-01
RAPLTPTXTKVKKYKXRPPPSMKFRFRTMNDGQIRRWRAGKRHNAHLKSKQAKRRLRKPALVHLAYAKVIKKLNFCG

SEQ ID NO: 76381 - protein, 74 aa, Setaria italica
  Transcript Sequence Number=SeqID_10407
RCVKRRSWQEFRAPCDAVANTRFVYDSVMYPLSDRRGGSIDLASEAEWLANSMDTAACGERGTARPQHGHGDVV

SEQ ID NO: 76382 - protein, 1357 aa, Setaria italica
  misc_feature (466)..(466): Xaa can be any naturally occurring amino acid
  Transcript Sequence Number=SeqID_10408
  Gene Ontology: Mol. function=protein binding; Cellular component =integral to membrane; Biological process=central nervous system development
  Homolog annotation: Hit_ID=Q6ZBH9; Match level="QueryCoverage=100%, HitCoverage=99%, E-value=0.0, Identity=88%"; Hit description =Probable protein NAP1
  Pfam annotation: Domain name=Nckap1; Domain location=126-1245; Score=- 491.2; E_value=7.1e-09; Accession=PF09735.1; Description=Membrane -associated apoptosis protein
AHVSFKNKEVDGGMSRWSEYLNVEEPTPSALASWRNMSVDGPQGSSASGHKHLQMEPVVQLSKVAEGLLAKMYRLNSILDYPDPNTHTFSDAFWKAGVFPNFPKICITLSKKFPEHPNKLQLERVDKFALDALNENAEGYMHNLEQWILLLLDLLAFREQALRLILDLSSTVITLLPHQNSLILHAFMDLFCSFVRVNVFSDKVPRKMILQVYNILHVMLKGGRDCEFYHRLVQFVDSYDPPIKGLHEDLNFVSPRIGEVLEAVGPIIFLSTDTKNLRNEGFLSPFHPRYPDILTNSAHPMRAQDLANVTSYREWVLLGYLVCPDELLRVTSIDVAMVVLKENLILPLFRDEYILLHENYQLYVLPKVLESKRMAKSGRTKQKEADLEYNVAKQVEKMLTEVHEQALVSCDAMHRERRILLKQEIGRMVLFFTDQPSLLAPNIQMVFSALSLAQSEVIWYFQHVGXSSSKSTRGKTVDIDATDPTIGFLLDGMGKLCCLVRKYIAAIKGYALSYLSSCAGRIRFLLGTPGMVALDLDATLKGLFQQVLHCLENIPKPQGESVPAITSDLTDLRKHWLSILMIVTSSRSSINIRHLEKATVSTGKEGLVSEGNAAYNWSRCVDELESQLSKHGSLKKLYFYHQHLTTVFRNTMFGPEGRPQHCCAWLGAACSFPECASAIIPEEVNKIGRDSISYVESLIESIMGGLEGLINILDSEGGFGSLEMQLSPEQAALHLNNTTRAKGVSSLLTPGHESYPDNSSSIKMLEAAMQRLTSLCSVLNDMEPICVLNHVFVLREYMRDCIIGNFRRRFHSMIRTDNCIQRPSIIESLLRRHLGIIHLAEQHISMDLTEGIREVLLAESYTGPFPNLQMFETPVGTQGGGSAVEMICNWYIENVVKDASHIGVAFDAIQNCFRSSQPIGGGCLAEAFTDTRELKALVRLFGGYGIDKMDKMLREHTSALLNCIDSALRSNRDALEGLAGSVNSGDRIERDANLKQIIDIETLADLCIQAGQAITFRRLLVEAVGAVLEEKVPLIYSLLKGLALQLPDEVPDKNEIIRLRRVASSVGVGDKHDAEWVHSILAEAGAANDNSWVLLPYLCAAFMVSNIWSGAVYDVNIGGFSNNLHCLARCVNAVVGGSEYTRVEREQQINSLSNGHTDELQEAELPSRVSAEANIKSAMQIYVKLSAGIVLDSWNDTSRPHIVPKLIFLDQLCELSPYLPRSTLEVHIPYTILRSIYHQLYGASLMASEPMDQSPRQSPLISLAHASPSARQNRPETTPRSHTFEPSYYSSSGSQHDEGYDGDKRTGQLRSMRRSGPLDFSASRKVKFVEGSSSGSSHGAGSLQRFAVSRSGPLSYK

SEQ ID NO: 76383 - protein, 43 aa, Setaria italica
  Transcript Sequence Number=SeqID_10409
HTPVMQMLALLNIKIKQRHNSSIISCFVNFYPSRTCLVPLAKL

SEQ ID NO: 76384 - protein, 84 aa, Setaria italica
  Transcript Sequence Number=SeqID_10410
MGAEAEGTAPPQAAAAGEPATAARAQPISAAQFLSWKQRKDAEEAARKAEAAQKRAADIASGAVQMNGRELFQHEPWVFDNNIY

SEQ ID NO: 76385 - protein, 72 aa, Setaria italica
  Transcript Sequence Number=SeqID_10411
AIKFVSIIYLLHRSIDRDRPRANLQHLNLQRSQFITSFWDAIQRQCLSRFQILSCTVESSDTEGPLSLNFSR

SEQ ID NO: 76386 - protein, 136 aa, Setaria italica
  Transcript Sequence Number=SeqID_10412
  Gene Ontology: Mol. function=DNA binding; Cellular component =chromosome; Biological process=nucleosome assembly
  Homolog annotation: Hit_ID=O04848; Match level="QueryCoverage=99%, HitCoverage=94%, E-value=8e-46, Identity=71%"; Hit description =Probable histone H2AXa
  Pfam annotation: Domain name=CBFD_NFYB_HMF; Domain location=24-88; Score=15.4; E_value=0.0067; Accession=PF00808.15; Description =Histone-like transcription factor (CBFNF-Y) and archaeal histone
  Pfam annotation: Domain name=Histone; Domain location=18-91; Score =111.6; E_value=2.6e-30; Accession=PF00125.16; Description=Core histone H2AH2BH3H4
  Pfam module annotation: Pfam domain module=CBFD_NFYB_HMF::Histone; Domain location=24-88::18-91
  Subcellular localization annotation: CTP_CleavageSite=14; ConfidenceScore=5.27e-01
MSSSGGRGKPKGTKAVSRSSKAGLQFPVGRVARYLKTGKYAERVGGGAPVYLSAVLEYLAAEVLELAGNAARDNKKNRIVPRHIQLAVRNDEELSKLLGAVTIAAGGVLPNIHQTLLPKKAGGKGKADIGSASQEF

SEQ ID NO: 76387 - protein, 81 aa, Setaria italica
  Transcript Sequence Number=SeqID_10413
PVQKTKKVAKKLLKKVQSDMQIVTTLEDDQSNGLVDQKNNSQNIKKTRRRYLKNAFSNHEARTRDVNPETTHEVNSPYNAP

SEQ ID NO: 76388 - protein, 88 aa, Setaria italica
  Transcript Sequence Number=SeqID_10414
MNGINPNGGILSYGTLEGYAMWVATGVASAFFASLERCSCIHLHTAEDDGDEEDLEEARDRPLMLSRPQALPEYYYDRSGSSASFAKM

SEQ ID NO: 76389 - protein, 54 aa, Setaria italica
  Transcript Sequence Number=SeqID_10415
  Subcellular localization annotation: CTP_CleavageSite=43; ConfidenceScore=5.51e-01
MAATAVAASLSVARGLGKPLCGAGGISASSLRVVSPRRAAVVRASARSSQPQHP

SEQ ID NO: 76390 - protein, 226 aa, Setaria italica
  Transcript Sequence Number=SeqID_10416
  Gene Ontology: Mol. function=protein binding; Cellular component =clathrin adaptor complex; Biological process=intracellular protein transport
  Homolog annotation: Hit_ID=Q948F4; Match level="QueryCoverage=100%, HitCoverage=16%, E-value=1e-116, Identity=90%"; Hit description =Putative gamma-adaptin 1
LKLMRILGQGDADCSEYMNDILAQVATKSESNKNAGNAILYECVQTIMGIEATSGLRVLAINILGRFLSNRDNNIRYVALNMLMRAITVDALAVQRHRTTILECVKDADASIRKRALELVFLLVNDTNVKPLTKELIDYLNMADPDFKGDLTSKICSVVEKFSQEKLWYLDQMFKVLSLAGNHVKDDVCHALIVVLSNASELQGYSVRSLYKALQAYGKQGKFRRV

SEQ ID NO: 76391 - protein, 135 aa, Setaria italica
  Transcript Sequence Number=SeqID_10417
  Gene Ontology: Mol. function=protein transporter activity; Cellular component=clathrin adaptor complex; Biological process=intracellular protein transport
  Homolog annotation: Hit_ID=B6SV75; Match level="QueryCoverage=94%, HitCoverage=14%, E-value=2e-45, Identity=73%"; Hit description=AP-1 complex subunit gamma-1
WLPLYSSIVSKVFILLGLGKFYCCKDDVCHALIVVLSNASELQGYSVRSLYKALQAYGKQGSLVRVAVWCIGEYGEMLVNNVGMLDGEEPVMVTESDAVDAVEVAFNRHSADVTTGPMCLVALLKLSSRFPSTSE

SEQ ID NO: 76392 - protein, 592 aa, Setaria italica
  misc_feature (25)..(25): Xaa can be any naturally occurring amino acid
  misc_feature (138)..(138): Xaa can be any naturally occurring amino acid
  Transcript Sequence Number=SeqID_10418
  Gene Ontology: Mol. function=protein transporter activity; Cellular component=clathrin adaptor complex; Biological process=intracellular protein transport
  Homolog annotation: Hit_ID=Q948F4; Match level="QueryCoverage=97%, HitCoverage=49%, E-value=1e-177, Identity=53%"; Hit description =Putative gamma-adaptin 1
  Pfam annotation: Domain name=Adaptin_N; Domain location=1-285; Score=- 142.2; E_value=0.0021; Accession=PF01602.12; Description=Adaptin N terminal region
  Pfam annotation: Domain name=Alpha_adaptinC2; Domain location=469 -589; Score=156.3; E_value=9.3e-44; Accession=PF02883.12; Description= Adaptin C-terminal domain
  Pfam module annotation: Pfam domain module=Adaptin_N::Alpha _adaptinC2; Domain location=1-285::469-589
KTTYNNRLPEYDVSGIADPFLHILXTKLMRILGQGDADCSEYMNDILAQVATKSESNKNAGNAILYECVQTIMGIEATSGLRVLAINILGRFLSNRDNNIRYVALNMLMRAITVDALAVQRHRTTILECVKDADASIXGNHVKDDVCHALIVVLSNASELQGYSVRSLYKALQAYGKQGSLVRVAVWCIGEYGEMLVNNVGMLDGEEPVMVTESDAVDAVEVAFNRHSADVTTGPMCLVALLKLSSRFPSTSERVRQIVGQNKENVVLELQQRSIEFSSIIQKHQSIRSSLLERMPVLDEASYLVKRATATKATISADKLAPAVTPGGLKISNGVAKPPSAHLVDLLDLSSDDAPASTTASTATPNDFLQDLLGIGGVSSSTADVTSTASTDILMDLLSIGSSPSQNGTPAVGHPGQESKPIPAAPEAIDLLGSLSSSTPVSETKPTSVVPQAMDLLDGLSSSTSVSGLEKTAHPSITAFQSPTLKITFDFKRQSGNPRETMIHATFTNLTSSTFTDFIFQAAVPKFIQLRLDPASGNTVPAKGNGSVTQGLNVTNNQQGQKPLAMRIRMSYKVNGEERLEQGQVSNFPSGL

SEQ ID NO: 76393 - protein, 104 aa, Setaria italica
  misc_feature (33)..(33): Xaa can be any naturally occurring amino acid
  Transcript Sequence Number=SeqID_10419
  Gene Ontology: Mol. function=protein transporter activity; Cellular component=clathrin adaptor complex; Biological process=intracellular protein transport
  Homolog annotation: Hit_ID=Q948F4; Match level="QueryCoverage=50%, HitCoverage=3%, E-value=2e-16, Identity=73%"; Hit description =Putative gamma-adaptin 1
  Pfam annotation: Domain name=Alpha_adaptinC2; Domain location=9-98; Score=11.3; E_value=0.0035; Accession=PF02883.12; Description =Adaptin C-terminal domain
LNLLICAGLEKTAHPSITAFQSPTLKITFDFKXQSGNPRETMIHATFTNLTSSTFTDFIFQAAVPKVTSYCYILCLSCPLALQITPLTFHGFCSTRLHTLVFIN

SEQ ID NO: 76394 - protein, 217 aa, Setaria italica
  Transcript Sequence Number=SeqID_10420
  Gene Ontology: Mol. function=potassium ion transmembrane transporter activity; Cellular component=membrane; Biological process=potassium ion transport
  Homolog annotation: Hit_ID=Q69L87; Match level="QueryCoverage=83%, HitCoverage=21%, E-value=1e-64, Identity=72%"; Hit description =Potassium transporter 22
MVNDDMESGGGCERKKPASSSCSDDMAELDRALAAVELPTTVQRQDSLYRDASRAGGHGQQGQQEGWARTLRLAFQCVGVLYGDIGTSPLYVYSSTFTGGIRHTDDLLGVLSLIIYSFLLFTIIKYVYIALRANDDGDGGTFALYSLISRHAKVSLVPNHQAEDELTHADDDDAAVLKSSSLRGSLRRRTVQLASPRDQRAQWLKDLLETSKPVRIS

SEQ ID NO: 76395 - protein, 181 aa, Setaria italica
  Transcript Sequence Number=SeqID_10421
  Gene Ontology: Mol. function=protein serine/threonine kinase activity; Biological process=protein amino acid phosphorylation
  Homolog annotation: Hit_ID=B9R6R4; Match level="QueryCoverage=60%, HitCoverage=12%, E-value=8e-30, Identity=54%"; Hit description =Receptor protein kinase CLAVATA1, putative
ASAAARLVVTCILAATAVLLAALGVLIYLKKRRRAEAEAAASGAGKLFALKKGSWDLKSFRILAFDEREIIAGVRDENLIGSGGSGNVYRVKLGSGAVVAVKHVTRAARLSSSARWREFEAEVGTLSAIRHVNVVKLLCSITSEDGGASLLVYEHLPNGSLHERLHGPEGRKLGGGLGWAE

SEQ ID NO: 76396 - protein, 94 aa, Setaria italica
  Transcript Sequence Number=SeqID_10422
  Gene Ontology: Mol. function=cytochrome-c oxidase activity; Cellular component=mitochondrial envelope
  Homolog annotation: Hit_ID=B9T167; Match level="QueryCoverage=69%, HitCoverage=67%, E-value=7e-25, Identity=76%"; Hit description =Cytochrome-c oxidase, putative
  Pfam annotation: Domain name=COX6A; Domain location=26-92; Score= -7.8; E_value=0.00073; Accession=PF02046.7; Description=Cytochrome c oxidase subunit VIa
MALAAARSGLRSLAARAAPARRRMSSSVHDDAYETAKWEKITYAGIVTCTLLAAYNLSKGHPHFDEPPAYPYLHIRNKEFPWGPDGLFETKDHH

SEQ ID NO: 76397 - protein, 54 aa, Setaria italica
  Transcript Sequence Number=SeqID_10423
VPYVFQSSSYNLYIAKCMSMWMGCPSRQIMNLISSSLLIQPRFGTRSLVQLNPL

SEQ ID NO: 76398 - protein, 80 aa, Setaria italica
  Transcript Sequence Number=SeqID_10424
YSCNFLHINSWCCASTSLIMSRVIFQGEHQHVTLDCFLISLHIQHREGEGKIDLGSNSARRQPSSRRARGLGRTRGRLRR

SEQ ID NO: 76399 - protein, 160 aa, Setaria italica
  Transcript Sequence Number=SeqID_10425
  Gene Ontology: Mol. function=nucleoside-triphosphatase activity; Cellular component=signal recognition particle; Biological process =SRP-dependent cotranslational protein targeting to membrane
  Homolog annotation: Hit_ID=A2Q2E1; Match level="QueryCoverage=88%, HitCoverage=41%, E-value=1e-64, Identity=83%"; Hit description=GTP -binding signal recognition particle SRP54, G-domain
  Pfam annotation: Domain name=SRP54_N; Domain location=21-105; Score =117.3; E_value=4.9e-32; Accession=PF02881.11; Description=SRP54-type protein, helical bundle domain
HFPGWRRRRRAGGLVVRAEMFGQLTTGLESAWNKLRGVDVLTKENIAEPMRDIRRALLEADVSLPVVRRFIESVSEKAVGTDVIRGVSPDQQLVKVVNDELVQLMGGEVSDLVFAKSGPTVILLAGLQGVGKTTVCAKLALYLKKMGKSCMLVAADVYRP

SEQ ID NO: 76400 - protein, 95 aa, Setaria italica
  Transcript Sequence Number=SeqID_10426
  Homolog annotation: Hit_ID=B6T768; Match level="QueryCoverage=75%, HitCoverage=16%, E-value=2e-31, Identity=95%"; Hit description =Vacuolar protein sorting protein 36
MSAAAADWLPSASVTASGRPVLSAGEVERNLLPLVDLVPEENPRLAPLRGCLLALTSHRLIFLHEASRSARGLPLATVVHAYPPHRRHSHQPPPL

SEQ ID NO: 76401 - protein, 465 aa, Setaria italica
  misc_feature (419)..(419): Xaa can be any naturally occurring amino acid
  Transcript Sequence Number=SeqID_10427
  Gene Ontology: Mol. function=pseudouridine synthase activity; Biological process=pseudouridine synthesis
  Homolog annotation: Hit_ID=B6U2M4; Match level="QueryCoverage=89%, HitCoverage=94%, E-value=0.0, Identity=84%"; Hit description=RNA binding protein
  Pfam annotation: Domain name=PseudoU_synth_2; Domain location=184 -352; Score=114.4; E_value=3.8e-31; Accession=PF00849.14; Description= RNA pseudouridylate synthase
MAMRTAPLLFRRRAAAAPKPLKQHVAGLCAAAGHSALENGSRSGGGEGSRKRWVELPPFAPLDANAAARAISRRDGGEGACSNDTAIRWVRRCCPHMPASLVQKLFRLRKVKRNLLTADTSSTDGIADQLRLRRVSAKDELVPGDILFLPFNIQESSVSEKTKKFGSKNEIDFLRSLEIYKDRAIIVLNKPPGMPVQGGVGIEICIDILAPLFEDGSSEAPRLVHRLDRDCSGVLVLGRTQLSASIMHAIFREKTADALADGTQQVLQRKYVALVIGRPRHPKGLLSAPLAKIVLQDGKSERLTVCAGSNPASVQDALTEYRVIESCPQGYTWLELFPRTGRKHQLRVHCAEVLGTPIVGDYKYGRQAHQNWMPLPIPQAMDVEMLKKRKLPFGLALGGGSVAEDQPQLHLHCKQMILXDISAAMQRLQSSESNHNFSDLEKLSFVAPLPLHMRLSWEILKSVHK

SEQ ID NO: 76402 - protein, 136 aa, Setaria italica
  Transcript Sequence Number=SeqID_10428
PEVSNGEDMFYLEQESGHLGDHEGAALVADSRFGVIVQQPEAAAALPNGIGNEMNGDQKMVVPCSNEHRMANAVLDVFEACLREAKSNGIINGGNADGSAEESELAKRWRVQRMDELDVLSQRLRLLVEDAAAAGH

SEQ ID NO: 76403 - protein, 75 aa, Setaria italica
  Transcript Sequence Number=SeqID_10429
  Gene Ontology: Mol. function=oxidoreductase activity; Cellular component=endoplasmic reticulum; Biological process=fatty acid biosynthetic process
  Homolog annotation: Hit_ID=B9GEE4; Match level="QueryCoverage=98%, HitCoverage=11%, E-value=3e-27, Identity=72%"; Hit description =Methionine aminopeptidase
MKVGHLEERYQEWVHQPIVSKEGPRFFGNDVLEFLTRTKWWAVPTIWLPVVCYFFVKSILMGHTIQEVVLIALFG

SEQ ID NO: 76404 - protein, 165 aa, Setaria italica
  misc_feature (18)..(18): Xaa can be any naturally occurring amino acid
  Transcript Sequence Number=SeqID_10430
  Gene Ontology: Mol. function=oxidoreductase activity; Cellular component=endoplasmic reticulum; Biological process=fatty acid biosynthetic process
  Homolog annotation: Hit_ID=B9GEE4; Match level="QueryCoverage=97%, HitCoverage=24%, E-value=1e-68, Identity=72%"; Hit description =Methionine aminopeptidase
  Pfam annotation: Domain name=FA_hydroxylase; Domain location=86-164; Score=-7.8; E_value=0.00014; Accession=PF04116.5; Description=Fatty acid hydroxylase
MVVQEFTVDLNSLLFQVXHLEERYQEWVHQPIVSKEGPRFFGNDVLEFLTRTKWWAVPTIWLPVVCYFFVKSILMGHTIQEVVLIALFGIFIWTLIEYTLHRFLFHIETKTYWSNTAHYLLHGCHHKHPMDSLRLVFPPTATAILCFPFWNLVAFFATPSTLTAL

SEQ ID NO: 76405 - protein, 237 aa, Setaria italica
  Transcript Sequence Number=SeqID_10431
  Gene Ontology: Mol. function=oxidoreductase activity; Cellular component=endoplasmic reticulum; Biological process=fatty acid biosynthetic process
  Homolog annotation: Hit_ID=B9SB09; Match level="QueryCoverage=100%, HitCoverage=100%, E-value=1e-102, Identity=72%"; Hit description =Sphingolipid fatty acid alpha hydroxylase
  Pfam annotation: Domain name=FA_hydroxylase; Domain location=87-206; Score=65.1; E_value=2.6e-16; Accession=PF04116.5; Description=Fatty acid hydroxylase
MVVQEFTVDLNKPLVFQVGHLEERYQEWVHQPIVSKEGPRFFGNDVLEFLTRTKWWAVPTIWLPVVCYFFVKSILMGHTIQEVVLIALFGIFIWTLIEYTLHRFLFHIETKTYWSNTAHYLLHGCHHKHPMDSLRLVFPPTATAILCFPFWNLVAFFATPSTTPALFGGGLLGYVMYDCTHYYLHHGQPSKDPAKHLKRYHLNHHFRIQDKGFGITSTLWDTIFGTLPPSATTGKKN

SEQ ID NO: 76406 - protein, 184 aa, Setaria italica
  Transcript Sequence Number=SeqID_10432
KSKVSICAPSHFECLSTMVACVEPALVDPVCVESPGNMSILEQNYSKAKFIVRLKRRNGRVKHFYEDLYIDGNDIKFDSAPVSTEVNQSLVPKVQFNLELSEKERTDKANVVLPFEHQGKGEPIRIYDGRGSLLEGQRDPNLAPALVDEIAPKSGTAKGEIHYFRDSDDEQPDSDEDPDDDLDI

SEQ ID NO: 76407 - protein, 268 aa, Setaria italica
  Transcript Sequence Number=SeqID_10433
  Gene Ontology: Mol. function=oxidoreductase activity
  Homolog annotation: Hit_ID=B4FEG8; Match level="QueryCoverage=99%, HitCoverage=99%, E-value=1e-133, Identity=89%"; Hit description =Nucleic acid binding protein
  Pfam annotation: Domain name=RRM_1; Domain location=16-83; Score =24.3; E_value=0.0005; Accession=PF00076.14; Description=RNA recognition motif. (a.k.a. RRM, RBD, o
MATAAEVPVSAPVRTVKVTNVSLSATVQDIKEFFSFSGDIEHVEMQSGDEWSQVAYVTFKDAQGAETALLLSGATIVDLSVIIAPAPEYQPPPTASAPPMSGTRVPVGADNNVVHKAEDVVSTMLAKGFVLGKDAVGKAKAFDEKHGFTSTAGAKVASIDKKIGLSEKITTGTSMVSEKVKEMDQKFQVSDKTKSAFAAAEQKVNSAGSAIMKNRYVFTGASWVTNAFNKVAKAATDVGTMTKEKMAAEEQHKGSGASSGGHSYTPIQ

SEQ ID NO: 76408 - protein, 263 aa, Setaria italica
  misc_feature (215)..(215): Xaa can be any naturally occurring amino acid
  Transcript Sequence Number=SeqID_10434
  Gene Ontology: Mol. function=calmodulin binding; Cellular component =integral to membrane; Biological process=cell death
  Homolog annotation: Hit_ID=Q94CG8; Match level="QueryCoverage=93%, HitCoverage=49%, E-value=1e-90, Identity=69%"; Hit description=Seven transmembrane protein Mlo7
  Pfam annotation: Domain name=Mlo; Domain location=1-237; Score=-17.0; E_value=1.8e-17; Accession=PF03094.7; Description=Mlo family
VLIHCPNKPDFDFHKYMMRALEHEFKRVVGISWYLWLFVIFFLLLNINGWHTYFWLAFLPLFLLLIVGAKLEHIITRLAQEAAASLSNETEVSNIKPSKGHFWFRNPGLVLHLIHFILFQNSFEIGFFFWVLVSEGFGSCMMERKPYAISRLVLGVIIQVICSYITLPLYAIVTHMGGEIKLHGFGSDVHESVHGWLTQRKKTFWNNKAGGDPTXDSGGEVKVTRASPSERMGSSRHMLAPAPPPDLDEIVTVDGDVHGRVRM

SEQ ID NO: 76409 - protein, 130 aa, Setaria italica
  Transcript Sequence Number=SeqID_10435
AKVLELPFAADADVSVEEDAAALRFVAAAVDGFSPAGARAHAVEIHPGVTKVVVRDLSSGGAHGDDDGAAAFELDRWRFRLPPCTLPAMATATYAEGELVVTVPKGAGPDDGDGDGATVLGGTESVLVLV

SEQ ID NO: 76410 - protein, 230 aa, Setaria italica
  Transcript Sequence Number=SeqID_10436
  Gene Ontology: Mol. function=oxidoreductase activity; Cellular component=chloroplast; Biological process=cell redox homeostasis
  Homolog annotation: Hit_ID=B6T2Y1; Match level="QueryCoverage=85%, HitCoverage=84%, E-value=2e-89, Identity=87%"; Hit description =Peroxiredoxin-5
  Pfam annotation: Domain name=AhpC-TSA; Domain location=71-210; Score =88.2; E_value=3e-23; Accession=PF00578.13; Description=AhpCTSA family
  Pfam annotation: Domain name=Redoxin; Domain location=70-230; Score =192.0; E_value=1.7e-54; Accession=PF08534.2; Description=Redoxin
  Pfam module annotation: Pfam domain module=AhpC-TSA::Redoxin; Domain location=71-210::70-230
  Subcellular localization annotation: CTP_CleavageSite=54; ConfidenceScore=5.82e-01
MATSALATLSATAATAAGKRLLLSRPTTSLAFTSRRLAAAGPLRTRGFLGAPIRAAASSASAPAAAKTIAVGDRLPDATLSYFDSPDGELKTVTVRDLTAGKKVVLFAVPGAFTPTCTQKHLPGFVAKAGELRAKGVDAVACVSVNDAFVMRAWKESLGVGDEVLLLSDGNGELARAMGVELDLSDKPVGLGVRSRRYALLAEDGVVKVLNLEEGGAFTNSSAEDMLKAL

SEQ ID NO: 76411 - protein, 227 aa, Setaria italica
  Transcript Sequence Number=SeqID_10437
  Gene Ontology: Mol. function=sialyltransferase activity; Cellular component=integral to Golgi membrane; Biological process=protein amino acid glycosylation
  Homolog annotation: Hit_ID=B6U5U9; Match level="QueryCoverage=100%, HitCoverage=57%, E-value=1e-118, Identity=90%"; Hit description =Sialyltransferase-like protein
  Pfam annotation: Domain name=Glyco_transf_29; Domain location=1-226; Score=-33.4; E_value=5.1e-05; Accession=PF00777.10; Description =Glycosyltransferase family 29 (sialyltransferase)
RRYDPAVLGSLPSLLSLPGRIPSCAVVGNSGILLRANHGALIDSHDAVFRLNNARIAGYAAHVGSKTNFSFINSNILHLCARRPGCFCHPYGHGVPILLYICQAAHFLDVAACNATSSSRHGSPISVTDARLDVLCARIVKYYSLRRFVAETGRAAEEWDRAHDAAMFHYSSGMQAIMVAVGVCDRVSVFGFGKSSDAKHHYHSNQKAELDLHDYEAEYAFYHDLAE

SEQ ID NO: 76412 - protein, 117 aa, Setaria italica
  Transcript Sequence Number=SeqID_10438
ERSYKQGLRLRQECNAFKKSIARNQFTLPYHIILFEYHYDGFVSLVKRLCESILISMFFFFQNLQIISKYAVVMFAYRFEIHIVTCILLLILRACLPWVPNYISNSRDECRAKKGKR

SEQ ID NO: 76413 - protein, 88 aa, Setaria italica
  Transcript Sequence Number=SeqID_10439
GPHGAIGKLNPYSLPMTCATRLKLLQWTPIDASHTQSSDIDISISGSMVHDINHGSISKLEFLLSLQQNPLVCLLGSVSKITGVFVLP

SEQ ID NO: 76414 - protein, 96 aa, Setaria italica
  Transcript Sequence Number=SeqID_10440
VKGERWEPARKDGLREGFVNVYSRDDWILGVTFRASLLSQGLAGIQAIDVPGVENVDVTELVDGHSSYLSAARQILEHLELNTYYPVFVPLPSVSK

SEQ ID NO: 76415 - protein, 511 aa, Setaria italica
  Transcript Sequence Number=SeqID_10441
  Gene Ontology: Cellular component=integral to membrane; Biological process=regulation of translational fidelity
  Homolog annotation: Hit_ID=Q5TGY1; Match level="QueryCoverage=53%, HitCoverage=42%, E-value=2e-49, Identity=39%"; Hit description =Transmembrane and coiled-coil domain-containing protein 4
  Pfam annotation: Domain name=DUF726; Domain location=147-497; Score =361.9; E_value=1.2e-105; Accession=PF05277.4; Description=Protein of unknown function (DUF726)
  Pfam annotation: Domain name=DUF900; Domain location=196-498; Score= -83.7; E_value=0.01; Accession=PF05990.4; Description=Protein of unknown function (DUF900)
  Pfam module annotation: Pfam domain module=DUF726::DUF900; Domain location=147-497::196-498
AKAVDVMVMSLGSGAVPDEKIKEKSKDSMTSTSGTAESAENLLGIDKLSLDDVPANHHRKMALLYALLSACVADKPVSQEEEDRKSSHFRKGYDARHRVALRLLATWLDVKWIKMEAIEVMVACSAMAAAKEQEQERESASPKSKWEKWKRGGIIGAAALTGGALLAITGGLAAPAIAAGFGALAPTLGTLVPFIGASGFAAMAAAAGSVAGSVAVAASFGAAGAGLTGSKMARRIGKVKEFEFKPIGDNHNQGRLAVGILVSGFAFDEEDFCKPWEGWKDNLEKYILQWESKHIIAVSTAIQDWLTSRLAMELMKQGAMRTVLSGLLAAFAWPATLLAATDFIDSKWSVAIDRSDKAGKMLAEVLLKGLQGNRPVTLIGFSLGARVIFKCLQELALSSDNEGLVERVVLLGAPVSVKGERWEPARKMVAGRFVNVYSRDDWILGVTFRASLLSQGLAGIQAIDVPGVENVDVTELVDGHSSYLSAARQILEHLELNTYYPVFVPLPSVSK

SEQ ID NO: 76416 - protein, 58 aa, Setaria italica
  Transcript Sequence Number=SeqID_10442
  Pfam annotation: Domain name=DVL; Domain location=33-51; Score=35.7; E_value=1.8e-07; Accession=PF08137.4; Description=DVL family
PRSAVCSASSAYRRRRRQKPVGGLAGRCNAVLKQHKTRLYILGRCVSMLLCWHDHDAD

SEQ ID NO: 76417 - protein, 361 aa, Setaria italica
  misc_feature (309)..(309): Xaa can be any naturally occurring amino acid
  Transcript Sequence Number=SeqID_10443
  Homolog annotation: Hit_ID=B6U206; Match level="QueryCoverage=100%, HitCoverage=42%, E-value=1e-166, Identity=81%"; Hit description=NIN -like protein 1
  Pfam annotation: Domain name=RWP-RK; Domain location=163-214; Score =107.1; E_value=6e-29; Accession=PF02042.7; Description=RWP-RK domain
LDYPLSHHAKIFKLKGAVAIRLRCTRTGTADFVLEFFLPTDCQALEEQKEVLDSLSGTMRSVCQTLRVVTDKEMEDEAMRETNELNSFTPQGKNKAEELSFGGNSADRRGEASWTSLAETSQQESELAALRMHGMFSSGGQGPSLSGVQSAAEGSKAKRRTKAEKTVSLQVLRQYFAGSLKDAARSLGVCPTTLKRICRQHGITRWPSRKIKKVDHSLRKLQQIIDSVHGAETSFQLNTLYKDLTNTSISSENNLSGSMTIPPTNQSNLTDFDKHQHHKSNSIVPSTSPSHSSCSHNSDSSPSCSGGAXKHAPQGIIDLMKSGNPVKDSPIQTLQTENTSLYEHFSVHEGYLDLLQDVTEK

SEQ ID NO: 76418 - protein, 219 aa, Setaria italica
  Transcript Sequence Number=SeqID_10444
  Homolog annotation: Hit_ID=B6U206; Match level="QueryCoverage=99%, HitCoverage=25%, E-value=1e-88, Identity=75%"; Hit description=NIN -like protein 1
  Pfam annotation: Domain name=PB1; Domain location=121-204; Score =76.9; E_value=7.3e-20; Accession=PF00564.16; Description=PB1 domain
  Subcellular localization annotation: CTP_CleavageSite=42; ConfidenceScore=5.47e-01
LPTNQSNLTDFDKHQHHKSNSIVPSTSPSHSSCSHNSDSSPSCSGGARKHAPQGIIDLMKSGNPVKDSPIQTLQTENTSLYEHFSVHEAPTDLLQDVTEKANGGLHSSRSPSSPKQNAEANMRVKATFGSEKVRFRLNPKCDFQELKHEIAKRLSIVDTSSLILKYLDDDSEWVLMTCDADLQECFHVYKLADIQTIKISVHLAVSPATRVTTGPTGLS

SEQ ID NO: 76419 - protein, 56 aa, Setaria italica
  Transcript Sequence Number=SeqID_10445
YYGISQDGLEVHYLVGELNCICSFFMCNVTNETVYVCFSKVRLYPRNQCDWYLNCF

SEQ ID NO: 76420 - protein, 66 aa, Setaria italica
  Transcript Sequence Number=SeqID_10446
  Gene Ontology: Mol. function=shikimate kinase activity; Cellular component=plastid; Biological process=aromatic amino acid family biosynthetic process
  Homolog annotation: Hit_ID=B6UDH4; Match level="QueryCoverage=100%, HitCoverage=21%, E-value=9e-28, Identity=90%"; Hit description =Shikimate kinase
AFSKLSMLAEQRGDAYANADVRVSLEDIASKQGHDDVSKLSPTDIAIESLHKIESFVIEHTADDAA

SEQ ID NO: 76421 - protein, 59 aa, Setaria italica
  Transcript Sequence Number=SeqID_10447
  Gene Ontology: Mol. function=shikimate kinase activity; Cellular component=plastid; Biological process=aromatic amino acid family biosynthetic process
  Homolog annotation: Hit_ID=B6UDH4; Match level="QueryCoverage=84%, HitCoverage=16%, E-value=1e-17, Identity=86%"; Hit description =Shikimate kinase
SYAYAGHENLHNSVDEALLLKRKSEEVLFYLNGRCIYLVGMMGSGKVLWGRINSTKKVT

SEQ ID NO: 76422 - protein, 324 aa, Setaria italica
  Transcript Sequence Number=SeqID_10448
  Gene Ontology: Mol. function=transporter activity; Cellular component= intracellular; Biological process=transport
  Homolog annotation: Hit_ID=Q9LRX7; Match level="QueryCoverage=98%, HitCoverage=51%, E-value=1e-31, Identity=31%"; Hit description =Phosphatidylinositol/phosphatidylcholine transfer protein-like
GDNYPEILHRMFIVNAGSGFRLLWGALRGLIDPNTADKIEVLGETYQYRLLEQIDKSQLPHFLGGSCSCSGEGGCLRSNKGPWNQMMTSDDLSESTLMETGHLSNENLACQDMEPDVQMKLENSHSSGSSSIPLKMLSSPNTPVTRKEDMVSPKLTTVGSTVARFQLCHSVWNLQLLKLLVEVIKVVIVFLWSLLSVAQLFSALRRVVSHCINMSSTAEHVHMPGMKSGGPTDKDCTAPCLERLKRLENMVMELNQRSPRIPPEKEDLIEESMRRIRSIECDIKKTQRALNRTSLKQQKLEQRVENWKESMLTNSCRFSYCNAL

SEQ ID NO: 76423 - protein, 105 aa, Setaria italica
  Transcript Sequence Number=SeqID_10449
ILERKKKKKSKTIEEDETGAEAVVRKEKMKKKSKTVEEDEEQVGVVDHYDSDGEMLLILFNRSTLSRTIEEDEERDSDDEMCTPRRRKSGERSKSLKKSKKQHIA

SEQ ID NO: 76424 - protein, 63 aa, Setaria italica
  Transcript Sequence Number=SeqID_10450
  Subcellular localization annotation: CTP_CleavageSite=21; ConfidenceScore=5.55e-01
MRTRAWGRGAVARLMTPFNRRAAHASSPHLLRPCCCSSSSSYSTVLSRLRRHFASSSSSPAYH

SEQ ID NO: 76425 - protein, 155 aa, Setaria italica
  Transcript Sequence Number=SeqID_10451
MPVRMRGAAAFADDARELDRQMGCMSGIFQIFDRQRLITGSGRRGGRQAQKRLPPPSAPDNTVPKSSRNVPVQSSSTSKIVLEKTFSKCTTENSSLSIESSRASSSSSSCSSFSSLDGNKSVQQELPYINEELFVQRSLKRSPSLKETDMNTKPG

SEQ ID NO: 76426 - protein, 866 aa, Setaria italica
  Transcript Sequence Number=SeqID_10452
  Homolog annotation: Hit_ID=Q9S823; Match level="QueryCoverage=29%, HitCoverage=29%, E-value=6e-20, Identity=34%"; Hit description =F1C9.4 protein
  Subcellular localization annotation: CTP_CleavageSite=20; ConfidenceScore=5.46e-01
TGTFSKCTTENSSLSIESSRASSSSSSCSSFSSLDGNKSVQQELPYINEELFVQRSLKRSPSLKETDMNTKPGHPNVGFRDIVKDSINRESGGLTVKTSVQEARRNGQYKDSPRPLLLSKSMDGTCIIGIDRSTKVPATVTESNRRLQEQSRFSCDDRRLLRPAETQESKRPSSRPKELPRLSLDSRKESLSPSSRQNNFSYKRTDDILLDTLRPQDSPSHRRANSVIAKLMGLEEATDATGVLTADNHETSRSPRPAQATQYENPSRSPRSTCQDSCMLQLKNESWVLRTKPSPRILTEAAPWRQQERSANNIKAQQCREAEGRPRTASVYADIERRLGGLDFLECNNKDFRALRILGALNAKDSKSQNDSNAGSVAVQRTGYDQATEPRDFQPPIVVMKPARTTKKPGVSLASVAPIAGLRSLRKLPVRDSSFNGTDDKIHLRMSRAQSKSEEPVSSASSPRPTGSSSPRNVQKKAESERRSRPPVSPKSPSKKSNEAVSPKGRIRSKPSQVKSHRDEVLPSAGSRISLAKQVDVSIMDCPKPPGVSSSFVQPCKVATTSSHKGPSILGSDQNIHSLDNIPSPVSVLDTSFYHKRISDSFKDGETHSSDECWNPNSLPDTPQSKASSEVNQIKPENLEFLIQKLEQLQSMNEEAANIKEVMASVAANKDHHYIYEILLASGLLHKELSFTALPGQLRPSSNLINPELFLILEQTKPDIASEFQTVSAAKKCSKPCTGKLHRRLVFDMVNETIAQKMNICRFRSQPVKFLQSRKLSGWQLFKDLCTEVDRLTKCSEEDENENMPVHEDITKDWMSFDTILHDMVLEIEKDIFKNLINEVIDGGATEKMQFGQWKLRRQLSFSSVN

SEQ ID NO: 76427 - protein, 124 aa, Setaria italica
  misc_feature (80)..(80): Xaa can be any naturally occurring amino acid
  misc_feature (114)..(114): Xaa can be any naturally occurring amino acid
  Transcript Sequence Number=SeqID_10453
  Gene Ontology: Mol. function=nucleoside-triphosphatase activity; Cellular component=chloroplast; Biological process=protein metabolic process
  Homolog annotation: Hit_ID=Q10JB2; Match level="QueryCoverage=100%, HitCoverage=15%, E-value=3e-60, Identity=93%"; Hit description =Chaperone clpB 1, putative, expressed
  Pfam annotation: Domain name=ClpB_D2-small; Domain location=13-100; Score=130.9; E_value=4.2e-36; Accession=PF10431.1; Description=C -terminal, D2-small domain, of ClpB pr
MNRIDEYIVFKPLEREQINSIVKLQLARVQKRIADRKIKLEVSPAAIEFLGSLGYDPNYGARPVKRVIQQYVENELAKGXILRGDFKDEDSIVVDTQVTVPSNGQLPQQKLVFXKVSEESKAAA

SEQ ID NO: 76428 - protein, 647 aa, Setaria italica
  misc_feature (33)..(33): Xaa can be any naturally occurring amino acid
  Transcript Sequence Number=SeqID_10454
  Gene Ontology: Mol. function=nucleoside-triphosphatase activity; Cellular component=chloroplast; Biological process=protein metabolic process
  Homolog annotation: Hit_ID=B9SJA7; Match level="QueryCoverage=99%, HitCoverage=65%, E-value=0.0, Identity=84%"; Hit description =Chaperone clpb, putative
  Pfam annotation: Domain name=AAA; Domain location=201-395; Score =65.1; E_value=2.6e-16; Accession=PF00004.21; Description=ATPase family associated with various cellular activities (AAA)
  Pfam annotation: Domain name=AAA_5; Domain location=201-341; Score =8.2; E_value=0.0002; Accession=PF07728.6; Description=ATPase family associated with various
  Pfam annotation: Domain name=Clp_N; Domain location=9-69; Score=42.4; E_value=1.8e-09; Accession=PF02861.12; Description=Clp amino terminal domain
  Pfam annotation: Domain name=Clp_N; Domain location=94-145; Score =56.6; E_value=9.2e-14; Accession=PF02861.12; Description=Clp amino terminal domain
  Pfam module annotation: Pfam domain module=AAA::AAA_5::Clp_N::Clp_N; Domain location=201-395::201-341::9-69::94-145
MAWQSIVSSPEVAKESKHQIVETEHPSDAQSPXLVKSLLEQRNGLARRIFSKAGVDNTKLLDATEKFIQRQPKVLGEDPGSMLGRDLEALIQRARDFKKEYGDSYVSVEHLVLGFAEDKRFGKQLFKDFQITVKTLKLAIESIRGKQNVIDQDPEGKYEALEKYGKDLTAMARQGKLDPVIGRDDEIRRCIQILSRRTKNNPVLIGEPGVGKTAIAEGLAQRIVQGDVPQALTNRRLIALDMGALIAGAKYRGEFEDRLKAVLKEVTDSDGQTILFIDEIHTVVGAGATNGAMDAGNLLKPMLGRGELRCIGATTLDEYRKYIEKDPALERRFQQVYVDQPSVEDTISILRGLRERYELHHGVRISDSALVAAAVLSDRYISGRFLPDKAIDLVDESAAKLKMEITSKPTALDEIDRAVLKLEMERLSLTNDTDKASKGRRSRIEAELSLLKDKQRELTEQWEHEKSVMTKIQSIKEEIDRVNVEIQQAEREYDLNRAAELKYGSLNALQRQLQTTEKELDEYQSSGKSMLREEVTQDDIAEIVSRWTGIPVSKLKQSDREKLLYLEEELHKRVVGQDPAVKAVSEAIQRSRAGLSDPNRPIASFMFMGPTGVGKTELAKALAAFMFNTEEAVVRIDMSEYVAMRSM

SEQ ID NO: 76429 - protein, 366 aa, Setaria italica
  Transcript Sequence Number=SeqID_10455
  Gene Ontology: Mol. function=nucleoside-triphosphatase activity; Cellular component=chloroplast; Biological process=protein metabolic process
  Homolog annotation: Hit_ID=Q10JB2; Match level="QueryCoverage=95%, HitCoverage=42%, E-value=0.0, Identity=90%"; Hit description =Chaperone clpB 1, putative, expressed
  Pfam annotation: Domain name=AAA; Domain location=76-311; Score= -23.0; E_value=0.0026; Accession=PF00004.21; Description=ATPase family associated with various cellular activities (AAA)
  Pfam annotation: Domain name=AAA_2; Domain location=72-241; Score =380.0; E_value=4.2e-111; Accession=PF07724.6; Description=ATPase family associated with various
  Pfam annotation: Domain name=AAA_5; Domain location=76-232; Score =28.0; E_value=4.6e-06; Accession=PF07728.6; Description=ATPase family associated with various
  Pfam annotation: Domain name=ClpB_D2-small; Domain location=247-333; Score=144.2; E_value=4.2e-40; Accession=PF10431.1; Description=C -terminal, D2-small domain, of ClpB pr
  Pfam annotation: Domain name=Sigma54_activat; Domain location=46-290; Score=-186.2; E_value=0.082; Accession=PF00158.18; Description=Sigma -54 interaction domain
  Pfam annotation: Domain name=Torsin; Domain location=28-276; Score= -143.1; E_value=0.00023; Accession=PF06309.3; Description=Torsin
  Pfam module annotation: Pfam domain module=AAA::AAA_2::AAA_5::ClpB_D2- small::Sigma54_activat::Torsin; Domain location=76-311::72-241::76 -232::247-333::46-290::28-276
TTRLCSSSSRYSNFSLSRWTGIPVSKLKQSDREKLLYLEEELHKRVVGQDPAVKAVSEAIQRSRAGLSDPNRPIASFMFMGPTGVGKTELAKALAAFMFNTEEAVVRIDMSEYMEKHSVSRLIGAPPGYVGYEEGGQLTEAVRRRPYSVVLFDEIEKAHSDVFNVFLQILDDGRVTDSQGRKVSFTNTIIIMTSNVGSQYILNMDEEGGSSDSAYENIKKRVMDAARSVFRPEFMNRIDEYIVFKPLEREQINSIVKLQLARVQKRIADRKIKLEVSPAAIEFLGSLGYDPNYGARPVKRVIQQYVENELAKGILRGDFKDEDSIVVDTQVTVPSNGQLPQQKLVFRKVSEESKAAAEGEKFLPAV

SEQ ID NO: 76430 - protein, 73 aa, Setaria italica
  Transcript Sequence Number=SeqID_10456
DLLEGELEDDRWMQGAANREKEKEQADVGMSVSVNGDWFFPPYIIVLMFYLSVTPSTLHVGGLACAASCELLP

SEQ ID NO: 76431 - protein, 294 aa, Setaria italica
  Transcript Sequence Number=SeqID_10457
  Homolog annotation: Hit_ID=Q84NP6; Match level="QueryCoverage=59%, HitCoverage=34%, E-value=5e-90, Identity=86%"; Hit description=Leaf senescence related protein-like
  Subcellular localization annotation: CTP_CleavageSite=9; ConfidenceScore=5.33e-01
MQHRRKPASAAAPAVTKPPPSRRPTAPLSLAGLVVAIFLVAVFLYNDDAVKPTETVAVAGRARSPDLRVLHQQHDEDVEVEDQVVRDGDANHKQAQTEDKQAETTEEKHQQQQVVVRLPAGCDLYQGRWTYDAAGERSPLYRESECEFLTEQVTCMRNGRRDDSYQKWRWQPHGCDLPRFDASLLLERLRNKRLMFVGDSLNRNQWESMVCLVQSVVPTGQKTLQKFVNNGSLNVFTAHEYNATVEFYWAPFLVQSNSDDPQVHSVMDRVIAWRAIAKHANNWKGVDYLIFNTY

SEQ ID NO: 76432 - protein, 69 aa, Setaria italica
  Transcript Sequence Number=SeqID_10458
  Gene Ontology: Mol. function=protein disulfide oxidoreductase activity; Cellular component=plasma membrane; Biological process =cell redox homeostasis
  Homolog annotation: Hit_ID=Q10L92; Match level="QueryCoverage=66%, HitCoverage=22%, E-value=1e-10, Identity=71%"; Hit description =Glutaredoxin family protein, expressed
NKERPPDRDDRTDKGIIALDACSGCGGVRFVPCEECSGSCKVFLEEVGTFRRCPECNENGLVRCPLCPL

SEQ ID NO: 76433 - protein, 245 aa, Setaria italica
  misc_feature (70)..(70): Xaa can be any naturally occurring amino acid
  Transcript Sequence Number=SeqID_10459
  Gene Ontology: Mol. function=nucleotide binding; Cellular component =endomembrane system; Biological process=defense response
  Homolog annotation: Hit_ID=Q9ATQ3; Match level="QueryCoverage=93%, HitCoverage=25%, E-value=4e-59, Identity=53%"; Hit description=LRR14
  Pfam annotation: Domain name=LRR_1; Domain location=171-193; Score =9.2; E_value=5.2; Accession=PF00560.25; Description=Leucine Rich Repeat
  Pfam annotation: Domain name=LRR_1; Domain location=99-121; Score =8.6; E_value=6.8; Accession=PF00560.25; Description=Leucine Rich Repeat
  Pfam module annotation: Pfam domain module=LRR_1::LRR_1; Domain location=171-193::99-121
TKTLDKCVEASSEILREVGDLTELRTFGVCNVRSEHSGNLRDAVNKMSHLVHLQITTLGEEEVLQLEGLXLPPTVSKLDLLGQLESIPKVLSSWSRLSSLTMLDMSFCRIDEESFPSLLVLRGLCHLDLIKAFDGKKLHFTAGCFPRLQRLLIWHAPQLNQVQIEQGAMSNLAQLYFGHCPMLKFLPQDIEHLKNLVELGLKDASDELVERLWRKGGPDECKDDRMDISHIRKVIVIMGTRQWIM

SEQ ID NO: 76434 - protein, 102 aa, Setaria italica
  Transcript Sequence Number=SeqID_10460
CTFISFKMIRRLTFLTLIGRPYDCQKLHCLAAIPLPDFHTPDCLLVSCIPEFGSPKQDTFLGMPAAACQHEGNHRASRIPVCGLRDLLQHAPGRVGVIICQA

SEQ ID NO: 76435 - protein, 854 aa, Setaria italica
  misc_feature (549)..(549): Xaa can be any naturally occurring amino acid
  Transcript Sequence Number=SeqID_10461
  Gene Ontology: Mol. function=nucleotide binding; Biological process =defense response
  Homolog annotation: Hit_ID=Q9ATQ3; Match level="QueryCoverage=98%, HitCoverage=91%, E-value=0.0, Identity=59%"; Hit description=LRR14
  Pfam annotation: Domain name=LRR_1; Domain location=566-588; Score =2.3; E_value=1.1e+02; Accession=PF00560.25; Description=Leucine Rich Repeat
  Pfam annotation: Domain name=LRR_1; Domain location=589-610; Score =10.3; E_value=3.3; Accession=PF00560.25; Description=Leucine Rich Repeat
  Pfam annotation: Domain name=LRR_1; Domain location=612-633; Score =6.1; E_value=20; Accession=PF00560.25; Description=Leucine Rich Repeat
  Pfam annotation: Domain name=LRR_1; Domain location=768-790; Score =4.8; E_value=37; Accession=PF00560.25; Description=Leucine Rich Repeat
  Pfam annotation: Domain name=NB-ARC; Domain location=171-452; Score =249.4; E_value=8.9e-72; Accession=PF00931.14; Description=NB-ARC domain
  Pfam module annotation: Pfam domain module=LRR_1::LRR_1::LRR_1::LRR _1::NB-ARC; Domain location=566-588::589-610::612-633::768-790::171 -452
MAEAVVGLLIGKLGAALVKEAASSGASLLCHEASALKGLFGEIHEAKDELESMQVYLKTAERFKDTDETTGLFVDRIRGFAFEIEDVVDEFTYKLEDKHGGFVSKMKKRIKYASTWRRLAHKLNDIKGRLQGAKQQNQDYTMKQTDRNAGGIAFHANQALNFTRDEDLVGITEHKKQLVQWLAGDLEQRCKIFAVWGMPGVGKTTLVAHVYKTIKMDFDAAAWVTVSQSYDVQEVLKKIAGEFGITADVANMEMERLAQTIYEYLQGKRYILVLDDIWTADVWSEIRTVFPSNCIGRFVITSRKHEVSLLGTSNSAIHLEPLDKDNSWELFCKSAFWNDGERKCPLHLKVLALKFVEKCEGLPIAIACIGSQLSAKGQTSAEWEKAYDELELQLVKNVMPRVETILNVSLEDLPCDLKNCFLHCALFPEDYPIKRRTVMRHWISSGFIKKKGNQTLEEVAEQYLTELVNRSLLQVVERNHTGRLKCCQMHDVIRLVALRKAEKECFGKVYDGSGEFSGGPTRRISIQSRNLDRISPSNASHIRSLHVFXRYIDIDLLRPILTSSYLLSTLDLKGACIKMLPTEVFNLFNLRYLGLRYTAIESLPETIGRLQNLEVLDACNAQLLYLPNNIVKLQKLRYIYACNVYQGEGDIRPIIGVKVPSGIRHLTSLQALQCVEASPEILREVGDLTELRTFSVCNVRSEHSGNLRDAVNKMSHLVHLEITTLGEEEVLQLEGVCLPPTLSKLGLQGQLEKKSIHKVLSSWSHLSSLTRLQMEFCRIDEESFPSLLVLRGLCHLDLIKAFDGKKLHFTAGCFPRLQRLLIWHAPQLNQVQIEQGAMSNLSYKIRNKGRQIVQ

SEQ ID NO: 76436 - protein, 299 aa, Setaria italica
  Transcript Sequence Number=SeqID_10462
  Homolog annotation: Hit_ID=B6TAT2; Match level="QueryCoverage=100%, HitCoverage=85%, E-value=1e-138, Identity=85%"; Hit description =Plant IF-like protein
KLASQEQLFVRESQTRKVAETKARSMEEEVSKLQKCLQEKDEELRSSTSSTEQYLHELDDLRTQLSFTRATAEASAASAKSAQLQCLSLLKELNEKDCSLKEHELRVNKLGEQLDLLQKDLQARELSQMQLKDEVIRIETDIMDAVAKAGSKSDKDNELLKILSDVSPRNVQNLNNLLNAKDTEIARLREEIRILSAHWTNKTKELESQLEKHRRTDQELKKRVLKLEFCLQESQSQMRKLKRMGEKRDKALKELMDQVVAMKQPNGPCRDIKENFWESQGFKFIASMSMLALVILAKR

SEQ ID NO: 76437 - protein, 63 aa, Setaria italica
  Transcript Sequence Number=SeqID_10463
  Homolog annotation: Hit_ID=Q8GT82; Match level="QueryCoverage=100%, HitCoverage=96%, E-value=3e-22, Identity=85%"; Hit description=Fiber protein Fb11
MAVMGRLRIFVVQEPVVAASCLIAGFGLFLPAVVRPILDSFETAKQVPQPAPSDVVAGVTSKK

SEQ ID NO: 76438 - protein, 235 aa, Setaria italica
  Transcript Sequence Number=SeqID_10464
  Gene Ontology: Mol. function=nucleotide binding; Biological process =defense response
  Homolog annotation: Hit_ID=Q10I27; Match level="QueryCoverage=100%, HitCoverage=25%, E-value=4e-96, Identity=64%"; Hit description=NB -ARC domain containing protein, expressed
KGSKILLTTRSRMVAEMLQSSYIICLEALLVNDCWSLIKSCMFDETSHNINSQLENIGRKIAETLSGLPLAAKVVARHLKQCFAYCSIFPRGWEFEAEQLILQWIAQGCRRMEDIGKEYINDLCNKSFFAIQKKEFVSYYVMPPVIYELAKAVATEECFRIGDDEWTRIPSSVRHLSVHLDSLSALDDTIPYTNLRTLIFLTSNTVAPIKASIPQVVLDNVKSLRVLDLSPCMMD

SEQ ID NO: 76439 - protein, 150 aa, Setaria italica
  Transcript Sequence Number=SeqID_10465
  Gene Ontology: Mol. function=structural constituent of ribosome; Cellular component=ribonucleoprotein complex; Biological process =translation
  Homolog annotation: Hit_ID=Q9SIH0; Match level="QueryCoverage=92%, HitCoverage=92%, E-value=1e-61, Identity=82%"; Hit description=40S ribosomal protein S14-1
  Pfam annotation: Domain name=Ribosomal_S11; Domain location=28-146; Score=249.3; E_value=9.6e-72; Accession=PF00411.11; Description =Ribosomal protein S11
MSKRKTREPKEETVTLGPTVREGEHVFGVAHVFASFNDTFIHVTDLSGRETLVRITGGMKVKADRDESSPYAAMLASQDVAQRCKELGITALHIKLRATGGNKTKTPGPGAQSALRALARSGMKIGRIEDVTPVPTDSTRRKGGRRGRRL

SEQ ID NO: 76440 - protein, 49 aa, Setaria italica
  Transcript Sequence Number=SeqID_10466
VIQVLFTQKSSRTKVVYQSEENLDNSANNMRPSCFPRLILFRCRLSSCM

SEQ ID NO: 76441 - protein, 61 aa, Setaria italica
  Transcript Sequence Number=SeqID_10467
  Homolog annotation: Hit_ID=B6SNR4; Match level="QueryCoverage=100%, HitCoverage=100%, E-value=2e-17, Identity=73%"; Hit description =Ubiquinol-cytochrome c reductase complex 6.7 kDa protein
MALPASSSGLFRFLSPRSRPQSTDIAAAATWGVFAGAAGLYLVQPFDWIKKTFFEKPEPEA

SEQ ID NO: 76442 - protein, 225 aa, Setaria italica
  Transcript Sequence Number=SeqID_10468
  Homolog annotation: Hit_ID=Q9SRS8; Match level="QueryCoverage=44%, HitCoverage=99%, E-value=2e-21, Identity=49%"; Hit description =F21O3.9 protein
  Pfam annotation: Domain name=DUF23; Domain location=1-207; Score =32.3; E_value=4e-08; Accession=PF01697.19; Description=Domain of unknown function
MDAGGVSPEVRAVLDPWVRAGRVTVQDIRAQAEYDGYYYNQFLVVNDCLHRYRHAANWTFFFDVDEYIYLPDGRTLQEVLGQLERYTQFTIEQNPMSSKLCVEDPNKEYSREWGFEKLVFRNSITGVRRDRKYAIQARNAYSTGVHMSQNVIGRTSHKTERLIRYYHYHNSINIMGEPCREFVQKPTNGSKVMFEGIPYVYDDNMKRLTVEIKRFEEETIGAIHT

SEQ ID NO: 76443 - protein, 432 aa, Setaria italica
  misc_feature (35)..(35): Xaa can be any naturally occurring amino acid
  misc_feature (61)..(61): Xaa can be any naturally occurring amino acid
  Transcript Sequence Number=SeqID_10469
  Homolog annotation: Hit_ID=Q9SRS8; Match level="QueryCoverage=23%, HitCoverage=99%, E-value=5e-21, Identity=49%"; Hit description =F21O3.9 protein
  Pfam annotation: Domain name=DUF23; Domain location=170-430; Score =104.6; E_value=3.3e-28; Accession=PF01697.19; Description=Domain of unknown function
  Subcellular localization annotation: CTP_CleavageSite=60; ConfidenceScore=5.17e-01
PAAVSGTTTAAANAAHVRLARPARPEDPNKRVLRXPYGSAAALFVQMGAYRGGPRTFAVVXGLASKPTHVFGTPYFKCEWLPNPTASDPSPRPVRTKAYKMLPDWGYGRVYTVVVVNCTFPSNPNAGNAGGKLLVHAYYSTASRRYERFVALEEAPGSYDESRFSPPFQYDYLYCGSSLYGNLSASRMREWVAYHAHFFGPRSHFVLHDAGGISPEVKAVLDPWVRAGRVTVQDIRAQAEYDGYYYNQFLVVNDCLHRYRHAANWTFFFDVDEYLYLPNGQKLDEVIGKLSGYSQFTIEQNPMSSKLCVEDPSRNYSREWGFEKLVFRNSITKVRRDRKYAIQARNAYSTGVHMSQNVRGRTTHKTESLIRYYHYHNSINVMGEPCREFVPMPVNGSKIMFEKTPFVYDDSMKRVAGEIKRFEKETIGSVQT

SEQ ID NO: 76444 - protein, 368 aa, Setaria italica
  misc_feature (64)..(64): Xaa can be any naturally occurring amino acid
  Transcript Sequence Number=SeqID_10470
  Gene Ontology: Mol. function=protein serine/threonine kinase activity; Cellular component=plasma membrane; Biological process =protein amino acid phosphorylation
  Homolog annotation: Hit_ID=Q10R62; Match level="QueryCoverage=91%, HitCoverage=78%, E-value=1e-171, Identity=86%"; Hit description =Serine/threonine-protein kinase NAK, putative, expressed
  Pfam annotation: Domain name=Pkinase; Domain location=23-304; Score =147.9; E_value=3e-41; Accession=PF00069.17; Description=Protein kinase domain
  Pfam annotation: Domain name=Pkinase_Tyr; Domain location=23-304; Score=116.2; E_value=1.1e-31; Accession=PF07714.9; Description =Protein tyrosine kinase
  Pfam module annotation: Pfam domain module=Pkinase::Pkinase_Tyr; Domain location=23-304::23-304
EILSSPNLKAFSFGDLKSASKNFRSDSLLGEGGFGYVFKGWIDEQTLAPSKPGSGMVVAIKKLXKPEGFQGHKEWLTEVDYLGQLHHQNLVKLIGYCSDGDNRLLVYEYMPKGSLENHLFRRGADPLPWGIRLKVAIGAARGLSFLHDAENQVIYRDFKASNILLDSEFNAKLSDFGLAKAGPTGDRTHVSTQVMGTRGYAAPEYVATGRLSVKADVYSYGVVLLELLTGRRALDKSKPVSEQNLVDWAKPYLRDKRRLYRIMDSKLGGQYPKKGAHAVASIALQCIGSDAKARPAMSEVLEKLEQLQDPKYNVTAPQVDTQRTLSSGSVPRSPMKAQPSPRRLSSSASPLPVAAGSPLSACRTAQVH

SEQ ID NO: 76445 - protein, 73 aa, Setaria italica
  Transcript Sequence Number=SeqID_10471
  Gene Ontology: Mol. function=protein serine/threonine kinase activity; Cellular component=cytoplasm; Biological process=protein amino acid phosphorylation
  Homolog annotation: Hit_ID=Q53P85; Match level="QueryCoverage=95%, HitCoverage=13%, E-value=6e-38, Identity=98%"; Hit description =Calcium-dependent protein kinase, isoform AK1, putative, expressed
HHGGDKFSDVVGSPYYVAPEVLQKCYGPEADVWSAGVILYILLCGVPPFWAETEAGIFRQILRGKLDFESEPW

SEQ ID NO: 76446 - protein, 89 aa, Setaria italica
  Transcript Sequence Number=SeqID_10472
  Gene Ontology: Mol. function=hydrolase activity
  Homolog annotation: Hit_ID=B6TRW7; Match level="QueryCoverage=76%, HitCoverage=22%, E-value=1e-31, Identity=95%"; Hit description=Sigma factor sigB regulation protein rsbQ
RRPELFAKLILIGASPRFLNDNDYHGGFELPEIQQVFAAMAANYSAWATGYAPLAVGADVPAAVQEFSRLPQGPPRRPHHRRVPPDRGP

SEQ ID NO: 76447 - protein, 68 aa, Setaria italica
  misc_feature (20)..(20): Xaa can be any naturally occurring amino acid
  Transcript Sequence Number=SeqID_10473
DERKVGYFKVRSLEDEAAAXGGAARAGSRRTAVDARRQMGDVDDGLSPGPYKNLGSFSSVELTNSFRR

SEQ ID NO: 76448 - protein, 78 aa, Setaria italica
  Transcript Sequence Number=SeqID_10474
FVEAGPYRMFFYLLCSISALFYATPTAAAGIMELQRGARQDLVNKWIKLLIQLLICSELPACLYHFGGKQSIYVYLQY

SEQ ID NO: 76449 - protein, 71 aa, Setaria italica
  Transcript Sequence Number=SeqID_10475
ARKLTRRGGGSRRKEADGGFVCVCVRTVVVVEAACIGFPKLCSQITEGSNFCNIEVFYFSRMPLFWRRTLP

SEQ ID NO: 76450 - protein, 54 aa, Setaria italica
  Transcript Sequence Number=SeqID_10476
  Gene Ontology: Mol. function=structural molecule activity; Cellular component=protein complex; Biological process=microtubule-based movement
  Homolog annotation: Hit_ID=P14642; Match level="QueryCoverage=88%, HitCoverage=10%, E-value=7e-21, Identity=95%"; Hit description =Tubulin alpha chain
SSEKAYHEQLSVSEITNSAFEPANMMVKCDPRHGKYMACCLMYRGDVVCSALCA

SEQ ID NO: 76451 - protein, 133 aa, Setaria italica
  misc_feature (11)..(11): Xaa can be any naturally occurring amino acid
  misc_feature (66)..(66): Xaa can be any naturally occurring amino acid
  misc_feature (91)..(91): Xaa can be any naturally occurring amino acid
  Transcript Sequence Number=SeqID_10477
  Homolog annotation: Hit_ID=B6TKA2; Match level="QueryCoverage=96%, HitCoverage=48%, E-value=1e-50, Identity=68%"; Hit description=Non -imprinted in Prader-Willi/Angelman syndrome region protein 1
  Pfam annotation: Domain name=DUF803; Domain location=10-133; Score= -1.3; E_value=2.9e-09; Accession=PF05653.6; Description=Protein of unknown function (DUF803)
SESWAEEGWRXGVRAASGGFSYLYEPLWWLGMITMILGEVANFAAYAFAPAVLVTPLGALSIIFSXLHAPKERKIDSMKEIWHLATQPGFXIVYSCVAVACVLFLIFRVVERSGHRLMLVYIAICSLMGSLTV

SEQ ID NO: 76452 - protein, 92 aa, Setaria italica
  misc_feature (79)..(79): Xaa can be any naturally occurring amino acid
  Transcript Sequence Number=SeqID_10478
TTCPQAIKEVHASYAKAVMEAPRSPTFPSRSTEVKADPQQVLDSLFKIPEMRTYEPSSMDWKKGVKKLQSFNSSVASNXQERPKNGDGYREF

SEQ ID NO: 76453 - protein, 147 aa, Setaria italica
  Transcript Sequence Number=SeqID_10479
  Homolog annotation: Hit_ID=Q10RI3; Match level="QueryCoverage=80%, HitCoverage=17%, E-value=4e-40, Identity=73%"; Hit description=YT521- B-like family protein, expressed
PAAKTDPAKTTTNGVPNGGVPSAGYLDTTYGYDSTGAHFAWYDGSAYANGQQRSTTTNHMPTSTFNANGSSARNQTKSSTAPQMGMQNRRPTATTGSVTPTYPNRMYPSSRPYTQYGNSIKTGLPYGSNGYDSRFILVRIGVLWLIR

SEQ ID NO: 76454 - protein, 48 aa, Setaria italica
  Transcript Sequence Number=SeqID_10480
QPIIRPSMYAIEMAYLYPSLTAKLPAASKHSYFFHLFSSKLILLSSHA

SEQ ID NO: 76455 - protein, 74 aa, Setaria italica
  Transcript Sequence Number=SeqID_10481
FFILLAVHHQHIDIKLSLNILVVHAFHPASSLTLAKLVYNLTLLLRLQSFSFKPSTLMLEKDGMTCLNNTLHQL

SEQ ID NO: 76456 - protein, 49 aa, Setaria italica
  Transcript Sequence Number=SeqID_10482
RRLEPHVSHPYHLGFLRTNTRALLGSNTPTNQLRARSWAHASKHSTHLF

SEQ ID NO: 76457 - protein, 71 aa, Setaria italica
  Transcript Sequence Number=SeqID_10483
FFILLAVHHQHIDIKLSLNILVVHAFHPASSLTLAKLVYNLTLLLRLQSFSFKPSTLMLEKDGMTSDINHQ

SEQ ID NO: 76458 - protein, 58 aa, Setaria italica
  Transcript Sequence Number=SeqID_10484
  Subcellular localization annotation: CTP_CleavageSite=31; ConfidenceScore=5.14e-01
ATCPSRRTSRTLATPSRSTPPPLPSADCRCYRSIKGVFGYQRLNFNPIISDVRMLISL

SEQ ID NO: 76459 - protein, 108 aa, Setaria italica
  misc_feature (60)..(60): Xaa can be any naturally occurring amino acid
  misc_feature (70)..(70): Xaa can be any naturally occurring amino acid
  misc_feature (101)..(101): Xaa can be any naturally occurring amino acid
  Transcript Sequence Number=SeqID_10485
  Gene Ontology: Mol. function=protein serine/threonine kinase activity; Biological process=protein amino acid phosphorylation
  Homolog annotation: Hit_ID=Q2R1E0; Match level="QueryCoverage=98%, HitCoverage=12%, E-value=3e-19, Identity=45%"; Hit description =Jacalin-like lectin domain containing protein
VYKGILQSRKAIAVKKLYEVQLDDDRYHNEVTYLIGLKHENIVQLLGYCAESWWEAVQAXEKYVMAEIRXRDGLICFEYLNNKSLDAYISAESCGLEWHKXFEIIRRI

SEQ ID NO: 76460 - protein, 57 aa, Setaria italica
  Transcript Sequence Number=SeqID_10486
QAYSSLRDLQIKSCPGIQSLPSSLKKRLDNLIHKDLDAHYEGAKLLKPKTWKYAIHL

SEQ ID NO: 76461 - protein, 100 aa, Setaria italica
  misc_feature (62)..(62): Xaa can be any naturally occurring amino acid
  misc_feature (67)..(67): Xaa can be any naturally occurring amino acid
  misc_feature (89)..(89): Xaa can be any naturally occurring amino acid
  Transcript Sequence Number=SeqID_10487
  Gene Ontology: Mol. function=glutamate-tRNA ligase activity; Cellular component=cytoplasm; Biological process=tRNA aminoacylation for protein translation
  Homolog annotation: Hit_ID=Q43768; Match level="QueryCoverage=98%, HitCoverage=17%, E-value=3e-48, Identity=93%"; Hit description =Glutamyl-tRNA synthetase
  Pfam annotation: Domain name=tRNA-synt_1c; Domain location=1-100; Score=-156.3; E_value=0.00011; Accession=PF00749.13; Description =tRNA synthetases class I (E and Q), catalytic domain
TVDDATMQISHVIRAEEHLPNTLRQALIYKALGFPMPSFAHVSLILAPDKSKLSKRHGATSXGQYKXMGYLPQAMVNYLALLGWGDGTXNEFFTIDDLDG

SEQ ID NO: 76462 - protein, 153 aa, Setaria italica
  misc_feature (32)..(32): Xaa can be any naturally occurring amino acid
  misc_feature (64)..(64): Xaa can be any naturally occurring amino acid
  Transcript Sequence Number=SeqID_10488
  Homolog annotation: Hit_ID=B3V945; Match level="QueryCoverage=91%, HitCoverage=37%, E-value=3e-34, Identity=43%"; Hit description=PAE
  Pfam annotation: Domain name=PAE; Domain location=1-152; Score=-14.2; E_value=6.3e-15; Accession=PF03283.5; Description=Pectinacetylesterase
QNGTDFFFRGQRIWEAVMADLLSKGLSRAKQXGGLSTYIHCDDFRALLPKTRTVKCLADGGFFXDVEDISGRRYMRAFYNDVARLQDVRKKFPHCSSDMEPGQCFFPREVAKSISTPMFILNPAYDVWQVEHVLSPQGSDPQNFTGENLQNGY

SEQ ID NO: 76463 - protein, 53 aa, Setaria italica
  Transcript Sequence Number=SeqID_10489
YRVSAVSFIISSCLILLISIRTSDVTPPKVYVPCVPNHPLSLGTEGTNRHSHD

SEQ ID NO: 76464 - protein, 102 aa, Setaria italica
  Transcript Sequence Number=SeqID_10490
  Gene Ontology: Mol. function=nucleotide binding; Cellular component =nucleus; Biological process=defense response
  Homolog annotation: Hit_ID=Q852D5; Match level="QueryCoverage=92%, HitCoverage=7%, E-value=4e-20, Identity=57%"; Hit description =Powdery mildew resistance protein PM3b, putative, expressed
PHSARHLLLSVRKTETFLNASQEKGSPVIQTLICEKYIYGDLQHLSKYKSVRALKIMGGSTSRTMRGLEPVWLHHLRYLDLSESYKIKSLPEDIKTYLIIQY

SEQ ID NO: 76465 - protein, 74 aa, Setaria italica
  Transcript Sequence Number=SeqID_10491
ARLFGARLRGADLYALASLQLHRLSGGGDTRGQEEAGRPLGLGDVASSRSPFRCPLDPLALGGAHGGRARPRGR

SEQ ID NO: 76466 - protein, 32 aa, Setaria italica
  Transcript Sequence Number=SeqID_10492
SPLLKFNSHVGCLMLIRIIKHKNYKTNCTDGV

SEQ ID NO: 76467 - protein, 41 aa, Setaria italica
  Transcript Sequence Number=SeqID_10493
SHQCMQLRWLICILHSQLNYLLQVSTHVLFSSKFILLSSHA

SEQ ID NO: 76468 - protein, 72 aa, Setaria italica
  Transcript Sequence Number=SeqID_10494
  Gene Ontology: Mol. function=oxidoreductase activity, acting on the CH-OH group of donors, NAD or NADP as acceptor; Cellular component =cytoplasm; Biological process=isocitrate metabolic process
  Homolog annotation: Hit_ID=Q946X9; Match level="QueryCoverage=94%, HitCoverage=16%, E-value=2e-33, Identity=98%"; Hit description=NADP -dependent isocitrate dehydrogenase
MIFSLAAGFGSLGLMTSVLVCPDGKTIEAEAAHGTVTRHYRVHQKGGETSTNSIASIFAWTRGLAHRAKLDD

SEQ ID NO: 76469 - protein, 81 aa, Setaria italica
  Transcript Sequence Number=SeqID_10495
SDSGGRRARMVMCRRVSTSKFLVNPTIVYCCRRLSPTNELQATSRPPDQCALKPHTCPAPTRTPPALPLWLCPGVERQDNF

SEQ ID NO: 76470 - protein, 90 aa, Setaria italica
  Transcript Sequence Number=SeqID_10496
GIGVPARVRLHWHATGVLPPNQELYGGRRSTEGNLFLYQEAEKSDKFGDTAIKKRSKGKEIHLGKSLATNFCASPRDFCGLATKEQGKLR

SEQ ID NO: 76471 - protein, 73 aa, Setaria italica
  Transcript Sequence Number=SeqID_10497
  Gene Ontology: Mol. function=glyceraldehyde-3-phosphate dehydrogenase (phosphorylating) activity; Cellular component=chloroplast; Biological process=glucose metabolic process
  Homolog annotation: Hit_ID=Q8VXD7; Match level="QueryCoverage=83%, HitCoverage=13%, E-value=7e-25, Identity=86%"; Hit description =Glyceraldehyde-3-phosphate dehydrogenase
PSSRRPGCASRRRAVDIPTYVVGVNEGDYDHGVADIISNASCTTNCLAPFVKVLDEEFGIVKGTMTTTHSYTG

SEQ ID NO: 76472 - protein, 55 aa, Setaria italica
  Transcript Sequence Number=SeqID_10498
TRSDNLRSQLELLMSGNLQRTVQALNSGKAAIIWPHLRMSSRSSRNPPMCTSAVD

SEQ ID NO: 76473 - protein, 59 aa, Setaria italica
  Transcript Sequence Number=SeqID_10499
  Gene Ontology: Mol. function=transporter activity; Cellular component= membrane; Biological process=oligopeptide transport
  Homolog annotation: Hit_ID=B6SWT0; Match level="QueryCoverage=81%, HitCoverage=8%, E-value=1e-13, Identity=75%"; Hit description =Peptide transporter PTR2-B
LPFHVDFCSVDEEEQAVASTAGFVKEAKAVLRLFPIWATCLIYAVAFSQSSTFFTKQAA

SEQ ID NO: 76474 - protein, 63 aa, Setaria italica
  Transcript Sequence Number=SeqID_10500
  Subcellular localization annotation: CTP_CleavageSite=22; ConfidenceScore=5.22e-01
KNVPVISFIFQRKRHVAIVGLFASAYSTGLSATKQCFSLTTNQPFQLFSQLKLKRTDQVTPFG

SEQ ID NO: 76475 - protein, 69 aa, Setaria italica
  Transcript Sequence Number=SeqID_10501
  Subcellular localization annotation: CTP_CleavageSite=10; ConfidenceScore=5.20e-01
NRNQRRRWVSITNHDGGKMPFTPFGIMPPTMYHQSTTLATNQQQPHVRLLCSCTCRPRRRRRRRGALTQ

SEQ ID NO: 76476 - protein, 80 aa, Setaria italica
  misc_feature (68)..(68): Xaa can be any naturally occurring amino acid
  Transcript Sequence Number=SeqID_10502
  Homolog annotation: Hit_ID=Q9LPJ4; Match level="QueryCoverage=100%, HitCoverage=28%, E-value=6e-27, Identity=71%"; Hit description =F6N18.8
  Pfam annotation: Domain name=PLATZ; Domain location=9-80; Score=37.5; E_value=5.1e-09; Accession=PF04640.6; Description=PLATZ transcription factor
  Pfam annotation: Domain name=zf-B_box; Domain location=8-48; Score =5.8; E_value=0.034; Accession=PF00643.16; Description=B-box zinc finger
  Pfam module annotation: Pfam domain module=PLATZ::zf-B_box; Domain location=9-80::8-48
LGTSFFGQCKLHADAHKSECNMYCLDCMNGALCSQCLAYHRDHHAIQIRRSSYHDVIPGCSVVFLVRXVLDITGVQTYII

SEQ ID NO: 76477 - protein, 74 aa, Setaria italica
  Transcript Sequence Number=SeqID_10503
LLVSHHCIAACPVRSSRVLDSLQCRTREGSAHLNDKRVVQCSGASSAAGRRRASQFRPCLVGQFGRCKIPVPAL

SEQ ID NO: 76478 - protein, 77 aa, Setaria italica
  Transcript Sequence Number=SeqID_10504
  Gene Ontology: Mol. function=ATP binding; Cellular component=nucleus; Biological process=regulation of transcription, DNA-dependent
  Homolog annotation: Hit_ID=Q0ZDL7; Match level="QueryCoverage=100%, HitCoverage=67%, E-value=3e-17, Identity=55%"; Hit description =Putative stripe rust-resistance-like protein (Fragment)
NDTEIKKHFELRLWVCVSYDFDVDSLANRIVKASQSSSAQDKENGCEASKSSSALDSLQKAVSGKRYLLVLDDVWNR

SEQ ID NO: 76479 - protein, 83 aa, Setaria italica
  Transcript Sequence Number=SeqID_10505
  Gene Ontology: Mol. function=nucleotide binding; Cellular component =nucleus; Biological process=defense response
  Homolog annotation: Hit_ID=Q852D5; Match level="QueryCoverage=95%, HitCoverage=5%, E-value=2e-23, Identity=70%"; Hit description =Powdery mildew resistance protein PM3b, putative, expressed
YLLVLDDVWNRDEAHKWEKLKSYLQHGGSGCSVLTTTRDQAVAQLMMGTAKGAYELGRLDENFIKEIIESRAFNSKTRKGLAS

SEQ ID NO: 76480 - protein, 45 aa, Setaria italica
  Transcript Sequence Number=SeqID_10506
ESIKTLIKFIISTCYCSITLSNHGLIRLNRFVSRINLHLCNWFYN

SEQ ID NO: 76481 - protein, 36 aa, Setaria italica
  Transcript Sequence Number=SeqID_10507
SIISTCYCSITLLNHGLIRLNRFVLQISLHLCNLVL

SEQ ID NO: 76482 - protein, 51 aa, Setaria italica
  misc_feature (19)..(19): Xaa can be any naturally occurring amino acid
  Transcript Sequence Number=SeqID_10508
METISKMNLLSLINPSLAXVYCSTTLSNHELIRLNRFVSQISLLLCNWFCN

SEQ ID NO: 76483 - protein, 83 aa, Setaria italica
  misc_feature (16)..(16): Xaa can be any naturally occurring amino acid
  Transcript Sequence Number=SeqID_10509
  Gene Ontology: Mol. function=nucleotide binding
QQQVKAAKMSAAVVRXDADKVQASEKTQKSRAVLGRSVNGVVTDHIQGVRPAAEADRPGSSGSGSTSFWNSIFTSNEDRTHAS

SEQ ID NO: 76484 - protein, 59 aa, Setaria italica
  misc_feature (10)..(10): Xaa can be any naturally occurring amino acid
  Transcript Sequence Number=SeqID_10510
  Gene Ontology: Mol. function=transporter activity; Cellular component= integral to membrane; Biological process=transport
  Homolog annotation: Hit_ID=Q7XPE1; Match level="QueryCoverage=93%, HitCoverage=9%, E-value=3e-12, Identity=61%"; Hit description =OSJNBa0060N03.20 protein
FVPAENRGSXMAGFACFWSIGTILEALLAWAVMPILGWRWLLALTSSPYFILLIFSCLI

SEQ ID NO: 76485 - protein, 79 aa, Setaria italica
  Transcript Sequence Number=SeqID_10511
  Gene Ontology: Mol. function=nucleotide binding; Cellular component =nucleus; Biological process=defense response
  Homolog annotation: Hit_ID=C1K3M3; Match level="QueryCoverage=98%, HitCoverage=5%, E-value=3e-20, Identity=63%"; Hit description=Pm3b -like disease resistance protein
KHFELRLWVCVSDDFDVDSLANRIVKENGCKASESSSALDNLQKAVSGKRYLLLLDDVWNRDEPSKWERLKSYLQHGGS

SEQ ID NO: 76486 - protein, 66 aa, Setaria italica
  Transcript Sequence Number=SeqID_10512
LEVLNVDYLQNSLRRWRLNGETNLLSLINPSLANVYCSNTLSNHELIRFNIFVLSFSLHYIRCDGC

SEQ ID NO: 76487 - protein, 69 aa, Setaria italica
  Transcript Sequence Number=SeqID_10513
  Subcellular localization annotation: CTP_CleavageSite=55; ConfidenceScore=5.20e-01
PGQILHGTTVAPSPARDVQPKLSQACVFCLHERSSRMQVQPGVLNWELSSHSVVEVSNKSRNKMYVYST

SEQ ID NO: 76488 - protein, 59 aa, Setaria italica
  Transcript Sequence Number=SeqID_10514
  Subcellular localization annotation: CTP_CleavageSite=23; ConfidenceScore=5.09e-01
DYLDTRPVRFSLFSRFISHQTVFSSHKKSAVSAFQPAYKLKRTRPVIGIVIRFHNLRPY

SEQ ID NO: 76489 - protein, 86 aa, Setaria italica
  Transcript Sequence Number=SeqID_10515
  Gene Ontology: Mol. function=electron carrier activity; Biological process=oxidation reduction
  Homolog annotation: Hit_ID=B6TZP1; Match level="QueryCoverage=100%, HitCoverage=16%, E-value=2e-41, Identity=84%"; Hit description=Trans- cinnamate 4-monooxygenase
KFNSERSRLAQSFEYNYGDFIPILRPFLRGYLNKCRDLQTRRLAFFNNNYVEKRRKVMDTPGDKDKLRCAIDHILQAEKNGEITPD

SEQ ID NO: 76490 - protein, 37 aa, Setaria italica
  Transcript Sequence Number=SeqID_10516
ICATHELIRLNRFVSRISLICTINFIINLYLIFQISI

SEQ ID NO: 76491 - protein, 56 aa, Setaria italica
  Transcript Sequence Number=SeqID_10517
DGHFQHVRQLISRLISYRTVFFLTTNQPFQLFSRLISPAEPALYLFSLYFLSFYRC

SEQ ID NO: 76492 - protein, 46 aa, Setaria italica
  Transcript Sequence Number=SeqID_10518
LALIDSSRELDSIYTINFIISSCLVLLISIRTSDVTLLKFSTSSPN

SEQ ID NO: 76493 - protein, 62 aa, Setaria italica
  misc_feature (26)..(26): Xaa can be any naturally occurring amino acid
  Transcript Sequence Number=SeqID_10519
REGYQLDYVFDWTIMKYPQFRDKSKXFSGKASGLAGPSAERTEGTAAEALFRTGSGSGHNRE

SEQ ID NO: 76494 - protein, 57 aa, Setaria italica
  Transcript Sequence Number=SeqID_10520
KVPFSLFQKLPNQFPIPYLVIYVFHISKQLADPLHRFVWWIIYLLNRICFSSNVHLH

SEQ ID NO: 76495 - protein, 51 aa, Setaria italica
  Transcript Sequence Number=SeqID_10521
DFVLAWMLYHTTCLKMIDSTPYRTNMQIVPSQYYSQELAIAREAHSTLEKL

SEQ ID NO: 76496 - protein, 27 aa, Setaria italica
  Transcript Sequence Number=SeqID_10522
YSKLPARLFGSHAYLLHVVFSGWSDVL

SEQ ID NO: 76497 - protein, 55 aa, Setaria italica
  Transcript Sequence Number=SeqID_10523
TAATASSLSHGLLLSTRRRQRGRHGWREAPKVKKTRKWMIILLAVEAELVNCGYF

SEQ ID NO: 76498 - protein, 55 aa, Setaria italica
  Transcript Sequence Number=SeqID_10524
NGTAQLLPLLGGALADSCLGRYRTIVLASLVYILGLGMLALSTLLSSGRAPPMRQ

SEQ ID NO: 76499 - protein, 48 aa, Setaria italica
  Transcript Sequence Number=SeqID_10525
NPRLIRRTNLLSLINPSLANGYCNTTLSNHGLIRLNRFVSRISLHLCN

SEQ ID NO: 76500 - protein, 56 aa, Setaria italica
  Transcript Sequence Number=SeqID_10526
ANYKTNCRTPRLIRETNLFRLINPSLANGYCSTALSNHGLIRLNRFISRIRLHLCN

SEQ ID NO: 76501 - protein, 82 aa, Setaria italica
  misc_feature (41)..(41): Xaa can be any naturally occurring amino acid
  Transcript Sequence Number=SeqID_10527
  Subcellular localization annotation: CTP_CleavageSite=31; ConfidenceScore=5.73e-01
SCSTLARSVVPSAAASRNTKQASVSLNTVARTQYTAGNNYXKIVTVTSNEQLNSISRFAFIQLAQTSSIARYTVLQFMCLMS

SEQ ID NO: 76502 - protein, 49 aa, Setaria italica
  Transcript Sequence Number=SeqID_10528
LHSFVVLCETNLLSLISQYLDNNSQIQTKCYSCATVILVNKAVVQLIKS

SEQ ID NO: 76503 - protein, 60 aa, Setaria italica
  Transcript Sequence Number=SeqID_10529
ARHQLMCYYCTSRSGSLQPQSYTESSHIVLLGRTKNNIRRGVWFPLLIFSTCHIECLDTN

SEQ ID NO: 76504 - protein, 75 aa, Setaria italica
  Transcript Sequence Number=SeqID_10530
EAREEKRILVLFLGMLRAGPEFRGARGMLPTRAHMTQVMLFSLFASAYSASLSTTQQCFPLTTNQLFQLFSRLIS

SEQ ID NO: 76505 - protein, 55 aa, Setaria italica
  Transcript Sequence Number=SeqID_10531
  Subcellular localization annotation: CTP_CleavageSite=29; ConfidenceScore=5.08e-01
IQISTCKVLHYSYQTADFAPFSFFFKSANSMMTDQLNNPMFLLQNDPALSVKLLI

SEQ ID NO: 76506 - protein, 74 aa, Setaria italica
  Transcript Sequence Number=SeqID_10532
NIATQVFSDLVATSDHSQLSRSANKDHLNLPDRHPEKATSAGYNNNYSEKMRIIIGILNCKKVSVIPCCNMLQQ

SEQ ID NO: 76507 - protein, 58 aa, Setaria italica
  Transcript Sequence Number=SeqID_10533
FSVLLEVHRQHIGIKLSLNIFSLSILSYLAKMHRNLRIKLLLFSFFPHDLCLSMTCSL

SEQ ID NO: 76508 - protein, 58 aa, Setaria italica
  Transcript Sequence Number=SeqID_10534
LHNFVVLCETNLLNLISQCLDNNSQIQTKCYSCAFMAKCQFYHSQILPRLSNNSSKNK

SEQ ID NO: 76509 - protein, 61 aa, Setaria italica
  Transcript Sequence Number=SeqID_10535
  Gene Ontology: Mol. function=nucleotide binding; Cellular component =mitochondrion
  Homolog annotation: Hit_ID=Q8S944; Match level="QueryCoverage=95%, HitCoverage=7%, E-value=6e-09, Identity=53%"; Hit description =Dynamin-related protein 3A
EDRTHASAKDNSANRSYSVPTPNLEHSFSTIQLREPPAVLKPSEHQSEQEALEIAITKLLL

SEQ ID NO: 76510 - protein, 53 aa, Setaria italica
  misc_feature (21)..(21): Xaa can be any naturally occurring amino acid
  misc_feature (32)..(32): Xaa can be any naturally occurring amino acid
  Transcript Sequence Number=SeqID_10536
  Gene Ontology: Mol. function=isomerase activity; Cellular component =integral to membrane; Biological process=protein folding
  Homolog annotation: Hit_ID=B4FDQ2; Match level="QueryCoverage=88%, HitCoverage=12%, E-value=4e-15, Identity=89%"; Hit description =Peptidyl-prolyl isomerase
STNRFNEAIVQCSIVLSEDEXNVKALFRRGKXKSELGQTESAREDFLKAKNTP

SEQ ID NO: 76511 - protein, 59 aa, Setaria italica
  Transcript Sequence Number=SeqID_10537
VLIQYGEEGADGPSGSWLSGVSSAMRRQPSAAQNCGCQSDYCCSQFWLLRHDRALLWQG

SEQ ID NO: 76512 - protein, 56 aa, Setaria italica
  Transcript Sequence Number=SeqID_10538
YCFNKINIYVRNCTLVLGLVNPTVLHLKDSGLFASAYSAGLSATKQYFPLTTNQPF

SEQ ID NO: 76513 - protein, 70 aa, Setaria italica
  Transcript Sequence Number=SeqID_10539
NEKKIPMMLLQILRKCIVAGIQSLHVLENIHKFSISNTEQLLFPARLMSLICSKFKTYVIQEIHDLRRNT

SEQ ID NO: 76514 - protein, 46 aa, Setaria italica
  Transcript Sequence Number=SeqID_10540
LRQGNNNVYIASLHLVRLEPNEPTNIFNIPFCFLEDGTIRLDPHKK

SEQ ID NO: 76515 - protein, 51 aa, Setaria italica
  Transcript Sequence Number=SeqID_10541
TQQAKNEQCQKKLGRWGKITPRFCFKKKAEPSPGPETPPNPDFASEGFFLT

SEQ ID NO: 76516 - protein, 45 aa, Setaria italica
  Transcript Sequence Number=SeqID_10542
FFPCALGFNFSHFHLRLWLHGSFDFVITTVALCLLQSQTTHVAKG

SEQ ID NO: 76517 - protein, 144 aa, Setaria italica
  misc_feature (114)..(114): Xaa can be any naturally occurring amino acid
  Transcript Sequence Number=SeqID_10543
  Gene Ontology: Mol. function=protein disulfide oxidoreductase activity; Biological process=cell redox homeostasis
  Homolog annotation: Hit_ID=B7H3I1; Match level="QueryCoverage=79%, HitCoverage=44%, E-value=2e-26, Identity=47%"; Hit description =Glutathione S-transferase, N-terminal domain protein
  Pfam annotation: Domain name=GST_N; Domain location=25-101; Score =13.0; E_value=0.046; Accession=PF02798.12; Description=Glutathione S- transferase, N-terminal domain
  Pfam annotation: Domain name=Glutaredoxin; Domain location=27-87; Score=10.9; E_value=0.02; Accession=PF00462.16; Description =Glutaredoxin
  Pfam module annotation: Pfam domain module=GST_N::Glutaredoxin; Domain location=25-101::27-87
LARLPWGSKVASSSGESIDSATSAPTLQLYEFEACPFCRRVREAMTELDLSAEVYPCPKGSLRHREVVKKIGGKEQFPLLVDASTGVTMYESGDIVEYLFRQYGQGRSPSSGLXLESTIFTGWVPTLLRAGRGMTLWNKAGVIP

SEQ ID NO: 76518 - protein, 41 aa, Setaria italica
  Transcript Sequence Number=SeqID_10544
FCSPTSSTSPIRCTGGLVIRISFHLYNLFIINLYLILIINI

SEQ ID NO: 76519 - protein, 46 aa, Setaria italica
  Transcript Sequence Number=SeqID_10545
LRGCISSFVISLDLILLISIKYVTVLAPSSQTSLSIIYLPPAVSQP

SEQ ID NO: 76520 - protein, 64 aa, Setaria italica
  Transcript Sequence Number=SeqID_10546
LGLIDSSRELYSICAINSVISLCLILLISIQTFNVTGVKFLIGCFQTPPYPVHTNHKLYIHQQQ

SEQ ID NO: 76521 - protein, 124 aa, Setaria italica
  misc_feature (22)..(22): Xaa can be any naturally occurring amino acid
  Transcript Sequence Number=SeqID_10547
  Gene Ontology: Mol. function=methyltransferase activity; Cellular component=chloroplast; Biological process=metabolic process
  Homolog annotation: Hit_ID=B6TPM1; Match level="QueryCoverage=65%, HitCoverage=23%, E-value=1e-32, Identity=79%"; Hit description=S -adenosylmethionine-dependent methyltransferase
LLPFVSASDQSGDASSLECSTXKKVYPNKQDYWDLTVAVGSTEYTESMPAATELFRTSLVSFLYERGWRQTFRWGGFPGRTREVILLIIFGLFASAYSAGLSATKQCFPLTTNQPFQLFSRLIS

SEQ ID NO: 76522 - protein, 64 aa, Setaria italica
  Transcript Sequence Number=SeqID_10548
  Gene Ontology: Mol. function=hydrolase activity, acting on glycosyl bonds; Biological process=polysaccharide catabolic process
  Homolog annotation: Hit_ID=A9XB16; Match level="QueryCoverage=84%, HitCoverage=20%, E-value=9e-23, Identity=88%"; Hit description =Chitinase B (Fragment)
  Pfam annotation: Domain name=Glyco_hydro_19; Domain location=1-62; Score=-61.8; E_value=0.00012; Accession=PF00182.11; Description =Chitinase class I
RDDGPLQISWNYNYGPAGRDIGFDGLGNPDRVAQDPVIAFKTALWFWMNNVHQVMTDKGLRTTN

SEQ ID NO: 76523 - protein, 77 aa, Setaria italica
  Transcript Sequence Number=SeqID_10549
  Gene Ontology: Mol. function=glyceraldehyde-3-phosphate dehydrogenase (NADP+) (phosphorylating) activity; Cellular component=chloroplast; Biological process=glucose metabolic process
  Homolog annotation: Hit_ID=Q20FB3; Match level="QueryCoverage=85%, HitCoverage=20%, E-value=3e-26, Identity=86%"; Hit description =Glyceraldehyde-3-phosphate dehydrogenase subunit B (Fragment)
  Pfam annotation: Domain name=Gp_dh_C; Domain location=4-77; Score= -29.8; E_value=5.5e-05; Accession=PF02800.12; Description =Glyceraldehyde 3-phosphate dehydrogenas
RVLSLVTVYSRLRVPTPNVSVVDLVINTEKKGMTADDVNAAFRKAAAGPLKGVLQVCDEPLVSVDFRCSDVSSSIDS

SEQ ID NO: 76524 - protein, 78 aa, Setaria italica
  Transcript Sequence Number=SeqID_10550
THQGFRRSVEETCILQESESGFAKVKFSLPCTWGASILEVHVKGLYMPKHPTHYLVPVAVLFDNYYGKHNKATKKRVI

SEQ ID NO: 76525 - protein, 104 aa, Setaria italica
  Transcript Sequence Number=SeqID_10551
  Gene Ontology: Mol. function=DNA binding; Biological process =regulation of transcription
  Homolog annotation: Hit_ID=Q8LFN4; Match level="QueryCoverage=59%, HitCoverage=13%, E-value=1e-21, Identity=80%"; Hit description =Transfactor-like protein
  Pfam annotation: Domain name=Myb_DNA-binding; Domain location=49-100; Score=43.0; E_value=1.1e-09; Accession=PF00249.23; Description=Myb -like DNA-binding domain
  Subcellular localization annotation: CTP_CleavageSite=42; ConfidenceScore=5.75e-01
DIYGTPPQLSSLPVSSCSNQSIQNLGSPVKVQLSSSRSSSVSATTNKSRLRWTLELHERFVEAVNKLEGPEKATPKGVLKLMKVEGLNIYHVKSHLQKYRLAKY

SEQ ID NO: 76526 - protein, 50 aa, Setaria italica
  Transcript Sequence Number=SeqID_10552
LHRWRLIHEINLLSLINSSLAHVYYSIILSNHELIRFNRFVSQISLHLCN

SEQ ID NO: 76527 - protein, 43 aa, Setaria italica
  Transcript Sequence Number=SeqID_10553
LPNRPLVFVKSFTRTNTYCCFRMPFYRVKLTKGATCAIFYWLV

SEQ ID NO: 76528 - protein, 61 aa, Setaria italica
  Transcript Sequence Number=SeqID_10554
HDAGDTDREDLRGERNRCRGCDGDVRASTVHVPWEVSIRNLEFRESLETLLKFLSQRIFKY

SEQ ID NO: 76529 - protein, 69 aa, Setaria italica
  Transcript Sequence Number=SeqID_10555
LHSFVVLCETNLLSLISQYLDNNSQIQTKRYSVLQCYNSNFGHTNSGQLNKPSNSHGIDDLLCWNFSDR

SEQ ID NO: 76530 - protein, 67 aa, Setaria italica
  misc_feature (47)..(47): Xaa can be any naturally occurring amino acid
  Transcript Sequence Number=SeqID_10556
  Gene Ontology: Mol. function=isomerase activity; Cellular component =integral to membrane; Biological process=protein folding
  Homolog annotation: Hit_ID=B4FDQ2; Match level="QueryCoverage=98%, HitCoverage=17%, E-value=3e-28, Identity=92%"; Hit description =Peptidyl-prolyl isomerase
YLVYEVELIGFDDIKEGKARSDMTVEERIAAADRRKIEGNEYFKKKXLEEAMQQYEMAIAYMGDDFM

SEQ ID NO: 76531 - protein, 97 aa, Setaria italica
  Transcript Sequence Number=SeqID_10557
  Gene Ontology: Mol. function=DNA binding; Cellular component=nucleus; Biological process=regulation of transcription, DNA-dependent
  Homolog annotation: Hit_ID=B9RWJ4; Match level="QueryCoverage=86%, HitCoverage=10%, E-value=1e-29, Identity=67%"; Hit description=WD -repeat protein, putative
  Pfam annotation: Domain name=WD40; Domain location=48-86; Score=1.5; E_value=26; Accession=PF00400.24; Description=WD domain, G-beta repeat
  Pfam annotation: Domain name=WD40; Domain location=8-47; Score=30.8; E_value=5.4e-06; Accession=PF00400.24; Description=WD domain, G-beta repeat
  Pfam module annotation: Pfam domain module=WD40::WD40; Domain location=48-86::8-47
MLKILQPGFSLHTFTGHSFQVTSLDFHPKKTDLLCSCDGNGEIRYWNVTQLTCMRAIKGGTAQVRFQPNAGQFLAAAAENMVSIFDIETHWVKITTS

SEQ ID NO: 76532 - protein, 50 aa, Setaria italica
  Transcript Sequence Number=SeqID_10558
  Subcellular localization annotation: CTP_CleavageSite=36; ConfidenceScore=5.19e-01
TYTPTPKPTPTPSPKPTPPTYKPAPKPTPPSYNKPPASSYTPSPPPPYYN

SEQ ID NO: 76533 - protein, 137 aa, Setaria italica
  Transcript Sequence Number=SeqID_10559
  Subcellular localization annotation: CTP_CleavageSite=34; ConfidenceScore=5.55e-01
WDLGRRPGQILHGTTVAPSLHATSSLSFPKRVSSASMNEALGCKFSQEFSTGELSSHSVVEVSNKSRNKILGIQGGYSAAPPIQNFRSSSLKYYHVHFLNGLMSFISEERRCVSAQNSGIQHVHFQRCKLYLIRFNS

SEQ ID NO: 76534 - protein, 88 aa, Setaria italica
  misc_feature (29)..(29): Xaa can be any naturally occurring amino acid
  Transcript Sequence Number=SeqID_10560
  Gene Ontology: Mol. function=metal ion binding
MLYKVYADGSSAPPDWEREASIREFYGNXLAHPLRYRQAMDNCSSLSILTASRGTAGVIFPSLLQLPSGITELDERKQRRLCLKKFRS

SEQ ID NO: 76535 - protein, 82 aa, Setaria italica
  Transcript Sequence Number=SeqID_10561
RWRWRIGGARRRREGSRGLACRDPACIFKLNEAGSPKCTDSIEGAMGWHLNLAQNLCLLGKSRPISTRLRQRNSQTGILYCR

SEQ ID NO: 76536 - protein, 102 aa, Setaria italica
  misc_feature (11)..(11): Xaa can be any naturally occurring amino acid
  misc_feature (14)..(14): Xaa can be any naturally occurring amino acid
  Transcript Sequence Number=SeqID_10562
  Gene Ontology: Mol. function=methyltransferase activity; Cellular component=chloroplast; Biological process=metabolic process
  Homolog annotation: Hit_ID=B6TPM1; Match level="QueryCoverage=40%, HitCoverage=11%, E-value=9e-11, Identity=82%"; Hit description=S -adenosylmethionine-dependent methyltransferase
LALVRADISRXPFXVNGSIDAVHAGAAIHCWPSPACAVRSIPELQIYVKKFSLFYVFPNCNVEELNSNPLCVWCFFHPAFSILTNIFGCFTFFFALKVMVAC

SEQ ID NO: 76537 - protein, 80 aa, Setaria italica
  misc_feature (49)..(49): Xaa can be any naturally occurring amino acid
  Transcript Sequence Number=SeqID_10563
  Gene Ontology: Mol. function=transcription factor activity; Cellular component=nucleus; Biological process=regulation of transcription, DNA-dependent
  Homolog annotation: Hit_ID=Q3B9Y4; Match level="QueryCoverage=96%, HitCoverage=5%, E-value=3e-25, Identity=71%"; Hit description =Powdery mildew resistance protein PM3A
SKIIDPVDIAGRSRAGDKEKIIKSLLDKASNVQLTVFPIVGMGGMGKTXTLAQLVYNDPEIQKHFQLRLWVCVSDNFDVD

SEQ ID NO: 76538 - protein, 74 aa, Setaria italica
  misc_feature (14)..(14): Xaa can be any naturally occurring amino acid
  Transcript Sequence Number=SeqID_10564
  Gene Ontology: Mol. function=oxidoreductase activity, acting on the CH-CH group of donors; Cellular component=peroxisome; Biological process=fatty acid metabolic process
  Homolog annotation: Hit_ID=Q2R1G8; Match level="QueryCoverage=81%, HitCoverage=8%, E-value=7e-26, Identity=86%"; Hit description=Acyl -coenzyme A oxidase 2, peroxisomal, putative, expressed
LCHGQLVDKYSEMXKTNDEDLIADVHILSSGLKAYVTSYTAKSISICREACGGHGYAAVNRFGAMLLKSSSYTM

SEQ ID NO: 76539 - protein, 85 aa, Setaria italica
  misc_feature (28)..(28): Xaa can be any naturally occurring amino acid
  Transcript Sequence Number=SeqID_10565
  Gene Ontology: Mol. function=metal ion binding
  Homolog annotation: Hit_ID=A2Q4Q8; Match level="QueryCoverage=85%, HitCoverage=30%, E-value=7e-21, Identity=64%"; Hit description=Zinc finger, RING-type
MRWRRSPAGRTTGRSIQMRMAYSAVAHXLVQWTDCKLAGALGLLKIMLYKVYADGSSAPPDWEREASIREFYGVIFPSLLQLPSG

SEQ ID NO: 76540 - protein, 80 aa, Setaria italica
  Transcript Sequence Number=SeqID_10566
WGVLIPVRLTALTRSGLNGKDGQPAGTDGCISSPMQSSSPKVRPDQEYLIKQTSSQQPQEQLQQQQQNQQQQQQQQQSQE

SEQ ID NO: 76541 - protein, 78 aa, Setaria italica
  Transcript Sequence Number=SeqID_10567
  Gene Ontology: Cellular component=integral to membrane
  Homolog annotation: Hit_ID=B6TAB6; Match level="QueryCoverage=85%, HitCoverage=28%, E-value=7e-25, Identity=86%"; Hit description =Cytochrome b561
VYKAFPTLNHDTAKLIHLILHGIALVLGAVGIYFAFKNHNESGIANLYSLHSWIGIGTIILYGIQVIFTHACKPGFLL

SEQ ID NO: 76542 - protein, 41 aa, Setaria italica
  Transcript Sequence Number=SeqID_10568
  Gene Ontology: Mol. function=endoribonuclease activity
  Homolog annotation: Hit_ID=B6SSH9; Match level="QueryCoverage=78%, HitCoverage=12%, E-value=6e-09, Identity=81%"; Hit description =Extracellular ribonuclease LE
MHAWCSWTQWPGAYCEQSSAGCCKPTTSAKPARDFFISGFT

SEQ ID NO: 76543 - protein, 63 aa, Setaria italica
  Transcript Sequence Number=SeqID_10569
SSTENYLLESAYKGKGAKYDRAYDLCSRIIEIMVLASKPSLGNTFYFLLLWQLLAFRSLMIDV

SEQ ID NO: 76544 - protein, 85 aa, Setaria italica
  Transcript Sequence Number=SeqID_10570
LMYGRAILNIGIAGGITSATNVEATKIPPERRTLLISATYENIINIVRTFTNCHQVGEKKSWIKNIVDGWIAELKCRNVINDCSI

SEQ ID NO: 76545 - protein, 62 aa, Setaria italica
  Transcript Sequence Number=SeqID_10571
NHASVFPTADGQILDREQRLRPARSGVMPSHQPTDSSSKCQPPANAASGLLVTPGDIEVEGH

SEQ ID NO: 76546 - protein, 59 aa, Setaria italica
  Transcript Sequence Number=SeqID_10572
  Gene Ontology: Mol. function=aspartic-type endopeptidase activity; Cellular component=chromatin; Biological process=chromatin assembly or disassembly
  Homolog annotation: Hit_ID=Q8GZY7; Match level="QueryCoverage=100%, HitCoverage=2%, E-value=1e-11, Identity=55%"; Hit description =Putative gag-pol polyprotein
ELTKHIGVDAFFVRSQVQDQVVVLQYVPSELQVADFFMKAQTRAQHRYFLSKLSVVDPP

SEQ ID NO: 76547 - protein, 135 aa, Setaria italica
  misc_feature (75)..(75): Xaa can be any naturally occurring amino acid
  Transcript Sequence Number=SeqID_10573
  Gene Ontology: Mol. function=hydrolase activity, acting on glycosyl bonds; Cellular component=extracellular region; Biological process =polysaccharide catabolic process
  Homolog annotation: Hit_ID=P29023; Match level="QueryCoverage=80%, HitCoverage=39%, E-value=5e-44, Identity=79%"; Hit description =Endochitinase B (Fragment)
  Pfam annotation: Domain name=Glyco_hydro_19; Domain location=31-135; Score=24.8; E_value=2.6e-10; Accession=PF00182.11; Description =Chitinase class I
  Subcellular localization annotation: CTP_CleavageSite=46; ConfidenceScore=5.09e-01
MASSATSRILALGLALLCAAGLAAAQNVASVVTDSFFNGIKNQAPSSCEGKNFYTRSAFLNAVKSHPGFAHGGSXQTQGKREIAAFFAHVTHETSNLCYISEINKSNIYCDRDPKYKQWPCVSGKKYYGRGPLQL

SEQ ID NO: 76548 - protein, 93 aa, Setaria italica
  Transcript Sequence Number=SeqID_10574
  Gene Ontology: Mol. function=protein binding
  Homolog annotation: Hit_ID=Q072R4; Match level="QueryCoverage=95%, HitCoverage=11%, E-value=6e-10, Identity=50%"; Hit description =Powdery mildew resistance protein (Fragment)
ELSIETCPELAALPSATSQGVSFDHSDVTAWSAFPNLKRLRLCYLGSFKSLGMTEQRFPDLETLCVEKCPMLTTLPGVIEAPKLRVLEIYGSQ

SEQ ID NO: 76549 - protein, 92 aa, Setaria italica
  Transcript Sequence Number=SeqID_10575
MWVEIQADAGYGYGGGYAPTPATPTPKPEKPPKGGKPPKEHGPKPEKPTPPTPKPTPPTYTPSPKPTPPTPKPTPPTYTPTPKPTPPTYTPP

SEQ ID NO: 76550 - protein, 63 aa, Setaria italica
  Transcript Sequence Number=SeqID_10576
VSLTDTPTHAHLHTERTGDYLPCSDEAFDQPHLERGVSFLLKGVKSDMLYHYSVCEPFLYFRR

SEQ ID NO: 76551 - protein, 104 aa, Setaria italica
  Transcript Sequence Number=SeqID_10577
  Subcellular localization annotation: CTP_CleavageSite=91; ConfidenceScore=5.44e-01
MLCRRPVKASWSGRPPPTPKPTPPTYTPTPKPTPPTYTPSPKPTPPTYTPTPKPTPPTYTPSPKPPVTKPPTYTPTPKPTPPTYTPSPKPPATKPPTYIPTPKP

SEQ ID NO: 76552 - protein, 62 aa, Setaria italica
  Transcript Sequence Number=SeqID_10578
GPGDKLDWAEGLILITQPVHERNMKLWPTNPPTFRSVSYPFAFHVLFHVDRFSFILPIQSCA

SEQ ID NO: 76553 - protein, 62 aa, Setaria italica
  Transcript Sequence Number=SeqID_10579
IIVFKVKYFIKENDGNTCESSAARLSGTCSNEVNLPLTNQRSQREVNGIPWINIFIARLCRL

SEQ ID NO: 76554 - protein, 24 aa, Setaria italica
  Transcript Sequence Number=SeqID_10580
NLWPQLDDFITYYGLLEICQVESL

SEQ ID NO: 76555 - protein, 54 aa, Setaria italica
  Transcript Sequence Number=SeqID_10581
LHRWRLIQETNLLSLINSSLAHVYCSNILSNHGLIRLNRFISQISLYLCNWFYN

SEQ ID NO: 76556 - protein, 91 aa, Setaria italica
  Transcript Sequence Number=SeqID_10582
FLLGCNHIWQVTCITYAMVSFGVVWCVIVEVWFRVGYIYFLIRIDWCGYNMGYNPINRGYLHSSGQNSIQYNLCTLGLLVQWCLCALVDEY

SEQ ID NO: 76557 - protein, 57 aa, Setaria italica
  Transcript Sequence Number=SeqID_10583
  Gene Ontology: Mol. function=nucleotide binding; Cellular component =nucleus; Biological process=defense response
  Homolog annotation: Hit_ID=Q4G284; Match level="QueryCoverage=89%, HitCoverage=7%, E-value=3e-15, Identity=80%"; Hit description =Powdery mildew resistance protein PM (Fragment)
ALTAPMAELVGSMVVGPLLSLVKEKASSYLLDQYKVMEGMEEQHENLKDMLPAILER

SEQ ID NO: 76558 - protein, 79 aa, Setaria italica
  Transcript Sequence Number=SeqID_10584
  Subcellular localization annotation: CTP_CleavageSite=45; ConfidenceScore=5.60e-01
QCHEQPQLQWFFHQGTPPPSNPSTMPPTYNQPPPSQSSPPTTPPQQSSPPATPPTNHSPPPSLSPPTTPPTYSQPPPSQ

SEQ ID NO: 76559 - protein, 67 aa, Setaria italica
  Transcript Sequence Number=SeqID_10585
VFFFFSPRQLDIRYTWIQVHTISRLLLCIYSDKIMAAENNMGHKSEGYGVPFLLDLFVSAFQPAYKL

SEQ ID NO: 76560 - protein, 50 aa, Setaria italica
  Transcript Sequence Number=SeqID_10586
CCRFHATTCALAKVYADSGLYNGEEPHERVVFRYLMASSHPPTTGISRFS

SEQ ID NO: 76561 - protein, 77 aa, Setaria italica
  Transcript Sequence Number=SeqID_10587
LVNIWTIIHKYKRNATVCYSAVTVIWHLPNSPTKHGPGSIRCEVGSIETKHRPGSHAWERVLQNKKFDLLPQPTFLS

SEQ ID NO: 76562 - protein, 41 aa, Setaria italica
  Transcript Sequence Number=SeqID_10588
VLLALQRTEQEAELAYEQLLVLDTNLFLGAFASHDRHRDMR

SEQ ID NO: 76563 - protein, 39 aa, Setaria italica
  Transcript Sequence Number=SeqID_10589
SDNTTPFPQKKKQIILSQFIWCNNKVPRDDLAGVWIVEC

SEQ ID NO: 76564 - protein, 58 aa, Setaria italica
  Transcript Sequence Number=SeqID_10590
SNYKTNCRTPMLFREMNLLSLINPSLVNGYCSTTLSNHGLIGLIDSSHELDSICVIVL

SEQ ID NO: 76565 - protein, 69 aa, Setaria italica
  Transcript Sequence Number=SeqID_10591
PRGSAISFIISSYLILLISIRTSNVTGLKFSPGIKQPQIRFHAARGLPYLIYSKAVAACDWCGLDNLCY

SEQ ID NO: 76566 - protein, 101 aa, Setaria italica
  Transcript Sequence Number=SeqID_10592
  Gene Ontology: Mol. function=ketol-acid reductoisomerase activity; Cellular component=chloroplast; Biological process=branched chain family amino acid biosynthetic process
  Homolog annotation: Hit_ID=B9S999; Match level="QueryCoverage=95%, HitCoverage=16%, E-value=1e-44, Identity=88%"; Hit description=Ketol- acid reductoisomerase, chloroplast, putative
  Pfam annotation: Domain name=IlvC; Domain location=1-98; Score=-16.7; E_value=3.6e-05; Accession=PF01450.11; Description=Acetohydroxy acid isomeroreductase, catalytic domain
AIINESLIESVDSLNPFMHARGVAFMVDNCSTTARLGSRKWAPRFDYILTQQAFVTIDKKAPINQDLISNFMSDPVHGAIEVCAQLRPTVYISVTADRYEL

SEQ ID NO: 76567 - protein, 64 aa, Setaria italica
  Transcript Sequence Number=SeqID_10593
  Gene Ontology: Mol. function=isomerase activity; Cellular component =integral to membrane
  Homolog annotation: Hit_ID=Q2RAK4; Match level="QueryCoverage=56%, HitCoverage=9%, E-value=5e-14, Identity=97%"; Hit description =Peptidyl-prolyl cis-trans isomerase, FKBP-type family protein, expressed
MGIINTTSVFINDNRLWSNFLKLFTPSTEKKEMSGLGIGVGNMRSGERALLHVGWELGYGKEGS

SEQ ID NO: 76568 - protein, 51 aa, Setaria italica
  Transcript Sequence Number=SeqID_10594
MVAKQALSVDWNSTLQVQTHPSLCKEMEPEVDSSHVHHLPNPKIILTKRRI

SEQ ID NO: 76569 - protein, 76 aa, Setaria italica
  Transcript Sequence Number=SeqID_10595
AQQQSHGTWRIWFPGSHIEFSMLLPKDAFKLTGSCCGRRFVHGQCIHRGARTPCHHGKRLDGHGGTVFLHHGVLAP

SEQ ID NO: 76570 - protein, 64 aa, Setaria italica
  Transcript Sequence Number=SeqID_10596
  Subcellular localization annotation: CTP_CleavageSite=56; ConfidenceScore=5.02e-01
KKLKQSHFVCLKCHILMTGGSTAQFLFSQLDQHRCLISLTIHFTSRFSPFRSPRPSLKIGSSLI

SEQ ID NO: 76571 - protein, 133 aa, Setaria italica
  misc_feature (7)..(7): Xaa can be any naturally occurring amino acid
  Transcript Sequence Number=SeqID_10597
  Homolog annotation: Hit_ID=B6TKA2; Match level="QueryCoverage=99%, HitCoverage=40%, E-value=5e-63, Identity=90%"; Hit description=Non -imprinted in Prader-Willi/Angelman syndrome region protein 1
  Pfam annotation: Domain name=DUF6; Domain location=5-110; Score=10.8; E_value=0.019; Accession=PF00892.12; Description=Integral membrane protein DUF6
  Pfam annotation: Domain name=DUF803; Domain location=1-133; Score =82.8; E_value=1.3e-21; Accession=PF05653.6; Description=Protein of unknown function (DUF803)
  Pfam module annotation: Pfam domain module=DUF6::DUF803; Domain location=5-110::1-133
MSSSAFXGSSFVIKKVGLKKAGDNGVRAASGGFSYLYEPLWWLGMITMILGEVANFAAYAFAPAVLVTPLGALSIIFSAVLAHFILKENLHMFGVVGCILCVVGSIGIVLHAPKERKIDSMKEIWHLATQPGS

SEQ ID NO: 76572 - protein, 53 aa, Setaria italica
  Transcript Sequence Number=SeqID_10598
TKSENDKPLKKYLVRAQEKQVLLPCSTPGRDWSSAPRGFAQLGQQHYIQTYIS

SEQ ID NO: 76573 - protein, 44 aa, Setaria italica
  Transcript Sequence Number=SeqID_10599
MGPICGMPDFKMSGKKSDELEPTDAGDEDDGGDDGDEDGDFGEG

SEQ ID NO: 76574 - protein, 55 aa, Setaria italica
  Transcript Sequence Number=SeqID_10600
PKINLILKPGFYSRKYTLPSSLEASSRSEPHLKPCIRMAVSHSVLFWIVNLGLKL

SEQ ID NO: 76575 - protein, 107 aa, Setaria italica
  Transcript Sequence Number=SeqID_10601
  Homolog annotation: Hit_ID=Q10RI3; Match level="QueryCoverage=98%, HitCoverage=14%, E-value=4e-34, Identity=75%"; Hit description=YT521- B-like family protein, expressed
VEAPLLGGVPSAGYLDTTYGYDSTGAHFAWYDGSAYANGQQRSTTTNHMPTSTFNANGSSARNQTKSSTAPQMGMQNRRPTATTGSVTPTYPNRMYPSSHTGCKAGS

SEQ ID NO: 76576 - protein, 112 aa, Setaria italica
  misc_feature (30)..(30): Xaa can be any naturally occurring amino acid
  Transcript Sequence Number=SeqID_10602
  Gene Ontology: Mol. function=isomerase activity; Cellular component =integral to membrane; Biological process=protein folding
  Homolog annotation: Hit_ID=Q2RAK4; Match level="QueryCoverage=82%, HitCoverage=24%, E-value=5e-41, Identity=86%"; Hit description =Peptidyl-prolyl cis-trans isomerase, FKBP-type family protein, expressed
  Pfam annotation: Domain name=FKBP_C; Domain location=2-82; Score =15.4; E_value=0.00013; Accession=PF00254.20; Description=FKBP-type peptidyl-prolyl cis-trans isomer
MGTINSTAVFMNDNCLWSNFLKLFTPTEKXEMSGLGIGVSNMRSGERALLHVGWELGYGKEGSFSFPNVPPMADLVYEVELIGFDDIKEGKARSDMTVEERIAAADRRKIEG

SEQ ID NO: 76577 - protein, 64 aa, Setaria italica
  misc_feature (17)..(17): Xaa can be any naturally occurring amino acid
  misc_feature (26)..(26): Xaa can be any naturally occurring amino acid
  Transcript Sequence Number=SeqID_10603
DIHVQFRPSGWWHQERXWRCMKNDSXSSGREASEHQQGFYKFELAASLDLSSSATASMNSSVFR

SEQ ID NO: 76578 - protein, 114 aa, Setaria italica
  misc_feature (47)..(47): Xaa can be any naturally occurring amino acid
  misc_feature (75)..(75): Xaa can be any naturally occurring amino acid
  Transcript Sequence Number=SeqID_10604
  Gene Ontology: Mol. function=transporter activity; Cellular component= integral to membrane; Biological process=transport
  Homolog annotation: Hit_ID=B6SW90; Match level="QueryCoverage=100%, HitCoverage=30%, E-value=2e-15, Identity=41%"; Hit description =Synaptic vesicle 2-related protein
LIFSCLIPESPRYLCSRGKINEATLVLERIAGINNQALPPGVLTFQXKERSDNLDASVTTLLLMPEDGLGTDENXSSKSHSTNNAFQALWPRDLTVSTLLLWLVKFACFFAYYG

SEQ ID NO: 76579 - protein, 62 aa, Setaria italica
  Transcript Sequence Number=SeqID_10605
GPRFAGCHLLHANFEFHELQRGARQDLVNNKWIKVLIQLLICSKLPTYVFIKQSIYVYLQFN

SEQ ID NO: 76580 - protein, 34 aa, Setaria italica
  Transcript Sequence Number=SeqID_10606
LRCYHILMELDCLPYLYALHMYFNDHRILMDLIW

SEQ ID NO: 76581 - protein, 34 aa, Setaria italica
  Transcript Sequence Number=SeqID_10607
EVEKPAAKTDPAKTTTNGVPNGTAHSNSGTVPLA

SEQ ID NO: 76582 - protein, 78 aa, Setaria italica
  Transcript Sequence Number=SeqID_10608
QESNASLQSELGHGFLWGEPQISYAKAVMEAPRSPTFPSRSTEVKADPQQVLDSLQLTLKGCYGGTTLTEHSLQGQLK

SEQ ID NO: 76583 - protein, 86 aa, Setaria italica
  Transcript Sequence Number=SeqID_10609
  Gene Ontology: Mol. function=methyltransferase activity; Cellular component=chloroplast; Biological process=metabolic process
  Homolog annotation: Hit_ID=B6TPM1; Match level="QueryCoverage=93%, HitCoverage=23%, E-value=4e-29, Identity=79%"; Hit description=S -adenosylmethionine-dependent methyltransferase
MMFPQVAEISRVLRPGGVLVASTFVEDIPLAIPILRIGRPYISRITGMNIFLSEAELEDLCRACGLVDFEFVRNGFYIMLSATKAS

SEQ ID NO: 76584 - protein, 47 aa, Setaria italica
  Transcript Sequence Number=SeqID_10610
TFDVTRILGAPKEQTEPNITQQEIHTPVKSYKRFKMTAFQDRTYFHG

SEQ ID NO: 76585 - protein, 61 aa, Setaria italica
  Transcript Sequence Number=SeqID_10611
ASYKTNCRTPVLIRETNLLSLINPSLANDYCSTTFSNHGLIRFNRFVSRIRLVISFVISLI

SEQ ID NO: 76586 - protein, 155 aa, Setaria italica
  Transcript Sequence Number=SeqID_10612
  Gene Ontology: Mol. function=hydrolase activity
  Homolog annotation: Hit_ID=B6TRW7; Match level="QueryCoverage=64%, HitCoverage=32%, E-value=9e-52, Identity=98%"; Hit description=Sigma factor sigB regulation protein rsbQ
HDRHPRGDGVPDEGASPRFLNDNDYHGGFELPEIQQVFAAMAANYSAWATGYAPLAVGADVPAAVQEFSRTLFNMRPDISLHVCRTVFNTDLRGVLGMVRSPCVVVQTTRDVSAARSPGSSDTPLPHGDRYLLPPRFYPLPRIKNGATRAVAVCC

SEQ ID NO: 76587 - protein, 48 aa, Setaria italica
  Transcript Sequence Number=SeqID_10613
  Gene Ontology: Mol. function=metal ion binding
  Homolog annotation: Hit_ID=B9SQ34; Match level="QueryCoverage=89%, HitCoverage=15%, E-value=2e-10, Identity=67%"; Hit description =Protein binding protein, putative
RKTRERRKLSEVDTERELECGICLEVSRKVVLPDCAHTLCMRCFEDWC

SEQ ID NO: 76588 - protein, 87 aa, Setaria italica
  misc_feature (33)..(33): Xaa can be any naturally occurring amino acid
  misc_feature (63)..(63): Xaa can be any naturally occurring amino acid
  Transcript Sequence Number=SeqID_10614
VLTRSAAPLPDTGQWLLLSLNEKLPQSIVNLLXHVITLHHYLMLFIMLGFSVLFDCIKAPGLXPWCAAARYQIPQHPHPWAQKYYVP

SEQ ID NO: 76589 - protein, 131 aa, Setaria italica
  Transcript Sequence Number=SeqID_10615
  Gene Ontology: Mol. function=transporter activity; Cellular component= integral to membrane; Biological process=transport
  Homolog annotation: Hit_ID=B6U4R9; Match level="QueryCoverage=88%, HitCoverage=24%, E-value=9e-26, Identity=50%"; Hit description =Synaptic vesicle 2-related protein
  Subcellular localization annotation: CTP_CleavageSite=22; ConfidenceScore=5.13e-01
MMNVAFGFSVAGASSKFPGLFLAALLVDRIGRKVTMGGMILLCCAFLAPLATQLREDLSIILLFCARSCVMGCFAVLHVYSPEIYPTSCRNTGVGFASIIGRIGSIVAPLTTTALLENHHQKEVVLVMDLA

SEQ ID NO: 76590 - protein, 56 aa, Setaria italica
  Transcript Sequence Number=SeqID_10616
DFSLFLECVHLGILGGFTRRLQKEPPINNSKIKHRLIAKPIAQMEANLRDESIKPN

SEQ ID NO: 76591 - protein, 54 aa, Setaria italica
  misc_feature (10)..(10): Xaa can be any naturally occurring amino acid
  Transcript Sequence Number=SeqID_10617
  Gene Ontology: Mol. function=N-acetyltransferase activity; Cellular component=nucleus; Biological process=metabolic process
  Homolog annotation: Hit_ID=Q5KQI6; Match level="QueryCoverage=94%, HitCoverage=20%, E-value=6e-21, Identity=92%"; Hit description =Probable acetyltransferase NSI
LRLFQGQGLXKALMEKVIRTLLQRDINNITLFADNKVVDFYKNLGFEVDPQGIK

SEQ ID NO: 76592 - protein, 86 aa, Setaria italica
  Transcript Sequence Number=SeqID_10618
PPSTTGGVGLRAVEEVGAQLPHRLRLALQRRDQEQPPLDLGSGEMRSTEERWRVPVRPHVCWSLWLSKTHVPRLRCCPRLETSPFI

SEQ ID NO: 76593 - protein, 40 aa, Setaria italica
  Transcript Sequence Number=SeqID_10619
CLCRFHPAYYYQHMYRLYLHYMSIYFFFLNLVPILISYVG

SEQ ID NO: 76594 - protein, 52 aa, Setaria italica
  Transcript Sequence Number=SeqID_10620
RWRLNSETDLLSLINPSLANGYCSTILSNHGLIRLNRFVSPFSLHLCNGFCK

SEQ ID NO: 76595 - protein, 48 aa, Setaria italica
  Transcript Sequence Number=SeqID_10621
IKCPILTENVKKVSSHDMLDKIRERKVEQVGIYSLLIGILTSESYIDI

SEQ ID NO: 76596 - protein, 208 aa, Setaria italica
  misc_feature (166)..(166): Xaa can be any naturally occurring amino acid
  misc_feature (199)..(199): Xaa can be any naturally occurring amino acid
  Transcript Sequence Number=SeqID_10622
  Gene Ontology: Mol. function=transcription factor activity; Cellular component=nucleus; Biological process=regulation of transcription, DNA-dependent
  Homolog annotation: Hit_ID=Q5ZBW9; Match level="QueryCoverage=100%, HitCoverage=19%, E-value=2e-76, Identity=65%"; Hit description =Putative powdery mildew resistance protein PM3b
MVKEKASSYLLDQYKVMEGMEEQHKLLKRKLPAVLDVIADAEEQAAKHREGAKAWLEEVRTVAYKANDVLDEFKYEALRRKAKAEGHYKALGMDVIKLFPSHNRVVFRYKMAKRLCMILQEIDVLIAEMNAFRFKFKPQPQMPMLWRQTDACIPTESVDIASESRXKETEDLVGQLLAGASSKDLMVLSIVGSGGWQTXLAQLIYNDT

SEQ ID NO: 76597 - protein, 81 aa, Setaria italica
  Transcript Sequence Number=SeqID_10623
  Gene Ontology: Mol. function=glyceraldehyde-3-phosphate dehydrogenase (phosphorylating) activity; Cellular component=chloroplast; Biological process=glucose metabolic process
  Homolog annotation: Hit_ID=Q20FB5; Match level="QueryCoverage=80%, HitCoverage=14%, E-value=6e-17, Identity=70%"; Hit description =Glyceraldehyde-3-phosphate dehydrogenase subunit B
  Pfam annotation: Domain name=Gp_dh_C; Domain location=17-81; Score =23.0; E_value=1.1e-08; Accession=PF02800.12; Description =Glyceraldehyde 3-phosphate dehydrogenas
GEAVGRAGSIADNVGHAPFVKVLDEEFGIVKGTMTTTHSYTGDQRLLDASHRDLRRARAAALNIVPTSTGAAKAVALVLPQ

SEQ ID NO: 76598 - protein, 118 aa, Setaria italica
  Transcript Sequence Number=SeqID_10624
SLQLHRLSGGGVTRGQEEAGRPLGLGDVASSRRLLPVSPRSSCCRRRSWRKGTAALSVMHQEDATVAVWPASVHQHPRPHLIYDATTTAGGSHPVGNNNLSSIKGLFIWKRIHLQCLA

SEQ ID NO: 76599 - protein, 48 aa, Setaria italica
  Transcript Sequence Number=SeqID_10625
LHNFVVLCETNLLSLISQCLDNNSQIQTKCYSVLQCWHSNFSTPNFSN

SEQ ID NO: 76600 - protein, 71 aa, Setaria italica
  misc_feature (49)..(49): Xaa can be any naturally occurring amino acid
  Transcript Sequence Number=SeqID_10626
  Gene Ontology: Mol. function=protein serine/threonine kinase activity; Cellular component=plasma membrane; Biological process =protein amino acid phosphorylation
  Homolog annotation: Hit_ID=B6T2Z1; Match level="QueryCoverage=88%, HitCoverage=20%, E-value=1e-17, Identity=71%"; Hit description=Short- chain dehydrogenase/reductase SDR
FREPVGAAAPGAFRIALVTGGNKGVGLETCRQLATKGLKVVLTARNEAXRGLEALEAIRRSSGVAEVFFHQ

SEQ ID NO: 76601 - protein, 34 aa, Setaria italica
  Transcript Sequence Number=SeqID_10627
  Gene Ontology: Mol. function=catalytic activity; Biological process =metabolic process
  Homolog annotation: Hit_ID=Q5N6Y8; Match level="QueryCoverage=97%, HitCoverage=5%, E-value=3e-10, Identity=84%"; Hit description =Putative 4-coumarate:coenzyme A ligase
HMEAKIVDPTTGEALGPGQRGELWVRGPVIMKGK

SEQ ID NO: 76602 - protein, 66 aa, Setaria italica
  Transcript Sequence Number=SeqID_10628
  Gene Ontology: Mol. function=transcription factor activity; Cellular component=nucleus; Biological process=regulation of transcription, DNA-dependent
  Homolog annotation: Hit_ID=Q852D5; Match level="QueryCoverage=89%, HitCoverage=4%, E-value=2e-23, Identity=91%"; Hit description =Powdery mildew resistance protein PM3b, putative, expressed
MAEVLATMVVGPLLSMVKEKASSYLLDQYQVMEGMEEQHEVLKRKLPAILDVITDAEEQAAKHREG

SEQ ID NO: 76603 - protein, 35 aa, Setaria italica
  Transcript Sequence Number=SeqID_10629
QDQHKSNHCTQLALLHSYSMIHSIHSQTRHNRIIE

SEQ ID NO: 76604 - protein, 60 aa, Setaria italica
  Transcript Sequence Number=SeqID_10630
SAFTLCLFYTRPRVCSALRLNFSPSHIKHLILIRRIKYRLITKLIAQMEANSRDESIKPN

SEQ ID NO: 76605 - protein, 103 aa, Setaria italica
  Transcript Sequence Number=SeqID_10631
SLAPHIQTAPIYMHICYKHHIPTINTYISFTENPRPKGTEKKEINIGPAHTAEYNAPTNHFNAFDTHDRSISHAHQLMIEFSFQPEVVEEQSQSASTSRLWKL

SEQ ID NO: 76606 - protein, 45 aa, Setaria italica
  Transcript Sequence Number=SeqID_10632
  Gene Ontology: Mol. function=isomerase activity; Cellular component =integral to membrane
  Homolog annotation: Hit_ID=B4FDQ2; Match level="QueryCoverage=100%, HitCoverage=12%, E-value=1e-13, Identity=86%"; Hit description =Peptidyl-prolyl isomerase
TRPELGQTESAREDFEKAKKYSPEDKEILRELRLLAEQDKALYEK

SEQ ID NO: 76607 - protein, 85 aa, Setaria italica
  misc_feature (60)..(60): Xaa can be any naturally occurring amino acid
  Transcript Sequence Number=SeqID_10633
  Gene Ontology: Mol. function=protein serine/threonine kinase activity; Cellular component=cytoplasm; Biological process=protein amino acid phosphorylation
  Homolog annotation: Hit_ID=Q94IQ5; Match level="QueryCoverage=100%, HitCoverage=23%, E-value=5e-29, Identity=81%"; Hit description =Calcium-dependent protein kinase (Fragment)
  Pfam annotation: Domain name=efhand; Domain location=32-60; Score =34.6; E_value=4e-07; Accession=PF00036.24; Description=EF hand
SRLKHFSAMNMLKKMALRVIAERIMSEEEIGGLKELFKMFDTDNSGTITFDKLKAGLKRXGSALLSENEIQTLMDAADIDRNGTI

SEQ ID NO: 76608 - protein, 64 aa, Setaria italica
  Transcript Sequence Number=SeqID_10634
  Gene Ontology: Mol. function=oxidoreductase activity; Biological process=oxidation reduction
  Homolog annotation: Hit_ID=Q8LNJ6; Match level="QueryCoverage=92%, HitCoverage=15%, E-value=2e-25, Identity=83%"; Hit description =Putative gibberellin oxidase
FNCRSLIVNIGDLLERWTNCVFRSTLHRVVPVGKERYSVAFFIDPSPNLVIQCMESCCNEAYPT

SEQ ID NO: 76609 - protein, 64 aa, Setaria italica
  Transcript Sequence Number=SeqID_10635
  Subcellular localization annotation: CTP_CleavageSite=49; ConfidenceScore=5.39e-01
ARSRRAKGPVRFSLFSRLISHRTVFFSHNKSAVSTFQPAYKLKRTCPKTAKRRREQGGRGAFPP

SEQ ID NO: 76610 - protein, 97 aa, Setaria italica
  misc_feature (30)..(30): Xaa can be any naturally occurring amino acid
  Transcript Sequence Number=SeqID_10636
  Gene Ontology: Cellular component=mitochondrion; Biological process =protein complex assembly
  Homolog annotation: Hit_ID=B6TQ44; Match level="QueryCoverage=97%, HitCoverage=38%, E-value=7e-47, Identity=94%"; Hit description=ATP11 protein
  Pfam annotation: Domain name=ATP11; Domain location=1-96; Score= -78.9; E_value=0.018; Accession=PF06644.3; Description=ATP11 protein
HLLEQRSSTCRHFVIPLWKGSGYTTMFMQXMPYMIFTGLEDYKARGTQASPYYTVTHYTEFAETKDTVLIRGDVVFTSKLTDSEAKTLLETAHSFLP

SEQ ID NO: 76611 - protein, 129 aa, Setaria italica
  Transcript Sequence Number=SeqID_10637
  Gene Ontology: Mol. function=drug transporter activity; Cellular component=membrane; Biological process=multidrug transport
  Homolog annotation: Hit_ID=Q8H7P0; Match level="QueryCoverage=98%, HitCoverage=34%, E-value=1e-38, Identity=62%"; Hit description=MatE family protein, expressed
FWCVILYFNDHFALLFTYSEVVLGAVHKLSVLLAFTVLLNSVQPVLSGVAVGSGWQALVAYVNIGSYYLVGVPLGVILGWPLNFGVGGIWSGLIGGTAVQTLVLAYLTTRCDWDEEAKKASTRMRVWPS

SEQ ID NO: 76612 - protein, 97 aa, Setaria italica
  Transcript Sequence Number=SeqID_10638
TFMCMFVKYFSGRTDGSLTFQVLLLRQEVPSCSSHVHLCFIHFIFAPRPPPVASPRSLLYLTVVVLVLCEQIQDWVFAKIRVHKISGLKAFCLALGK

SEQ ID NO: 76613 - protein, 61 aa, Setaria italica
  Transcript Sequence Number=SeqID_10639
  Subcellular localization annotation: CTP_CleavageSite=16; ConfidenceScore=5.01e-01
IFGQQVDTSSLIPGSRSEARASTAVLKLSSSSSHPFLPCLESLYIINCDGLSEVANLPPSI

SEQ ID NO: 76614 - protein, 51 aa, Setaria italica
  Transcript Sequence Number=SeqID_10640
QIQGLFGYEVLNFSSVTSDVQMLIRRTKHELIIKLIAEPCANSRDESIKPN

SEQ ID NO: 76615 - protein, 66 aa, Setaria italica
  Transcript Sequence Number=SeqID_10641
SLAPRILTPPNLQAAWFACHVFHGGLSLSFCLNICPSKSKYSWSVQYLYSYRSASLAMHGCLFCYF

SEQ ID NO: 76616 - protein, 59 aa, Setaria italica
  Transcript Sequence Number=SeqID_10642
AAVKANSTLCDYRVEVCSAIMIVGWSRVAHFINPSHQMTSKWSIASNQLKGVWILGAKL

SEQ ID NO: 76617 - protein, 120 aa, Setaria italica
  misc_feature (80)..(80): Xaa can be any naturally occurring amino acid
  Transcript Sequence Number=SeqID_10643
  Gene Ontology: Mol. function=3-beta-hydroxy-delta5-steroid dehydrogenase activity; Cellular component=endoplasmic reticulum; Biological process=steroid biosynthetic process
  Homolog annotation: Hit_ID=Q9FX01-2; Match level="QueryCoverage=100%, HitCoverage=31%, E-value=2e-25, Identity=44%"; Hit description =Isoform 2 of 3beta-hydroxysteroid-dehydrogenase/decarboxylase isoform 1
FTYVENVAHANICAEQALCSNAASVAGKPFFVTNDEPMETWEFMNCIMEAMGCQRPRINLPAKMLLSAALFSNMIRHRLXGLFQMFSTPLLHPNTIYFLSCTRTFNTSKARRLLGYYPIV

SEQ ID NO: 76618 - protein, 83 aa, Setaria italica
  Transcript Sequence Number=SeqID_10644
  Gene Ontology: Mol. function=helicase activity
  Homolog annotation: Hit_ID=Q2R0Z1; Match level="QueryCoverage=49%, HitCoverage=1%, E-value=9e-15, Identity=82%"; Hit description=AT hook motif-containing protein, putative
MKVDEFIDDIREGRTFGPIRAVLYTIEFQKRGLPHIHCLMWSRPSPNKNVAKKLFTGKEPGDDNCGSDGSAEAADQDSPSKDA

SEQ ID NO: 76619 - protein, 72 aa, Setaria italica
  Transcript Sequence Number=SeqID_10645
CKCNMVSGQKNHFLTTRKYVIFANMYCLKFVACFQVSIVNDLCNYKAINLYNFLYNFNQIKIVGVFSCFQSH

SEQ ID NO: 76620 - protein, 62 aa, Setaria italica
  Transcript Sequence Number=SeqID_10646
YLSRISYKYHSCSWYAKCRTLFQSQGDNCHDVAGTSCFDSSLISTNEWHISMSLVSITWHLL

SEQ ID NO: 76621 - protein, 80 aa, Setaria italica
  Transcript Sequence Number=SeqID_10647
GPSQIMCALVMCQPDISNWKQVILGYYLPKVKNTIKQIGPTIFHLLTKERWAKNINRLNLNMPSGSRDVVSKDTQSLGHL

SEQ ID NO: 76622 - protein, 98 aa, Setaria italica
  Transcript Sequence Number=SeqID_10648
SMSQIHRYGTYFIYLANCLLSNCRALEAFQIPVRWILLIVLRKVNKELFLAAVMMELMMLLPKLKILASEQSGWLYCLVVSIVPQSPQVFVHFSQHDQ

SEQ ID NO: 76623 - protein, 76 aa, Setaria italica
  Transcript Sequence Number=SeqID_10649
GLFLNIRSSRLRAFALPGLRACAVKSFLGCLSHTYSIVTFFHCQGQVVPCYVFVTFFHCQGQVVPCYVFVSFSLLM

SEQ ID NO: 76624 - protein, 50 aa, Setaria italica
  Transcript Sequence Number=SeqID_10650
  Gene Ontology: Mol. function=chitinase activity; Biological process =polysaccharide catabolic process
  Homolog annotation: Hit_ID=A9XB16; Match level="QueryCoverage=78%, HitCoverage=15%, E-value=5e-12, Identity=87%"; Hit description =Chitinase B (Fragment)
RGYGDQRIQGPINGALECNGRNPDQMNARVRYYKQYCQQLGVDPGSNLTC

SEQ ID NO: 76625 - protein, 128 aa, Setaria italica
  misc_feature (47)..(47): Xaa can be any naturally occurring amino acid
  Transcript Sequence Number=SeqID_10651
  Gene Ontology: Mol. function=methyltransferase activity; Cellular component=chloroplast; Biological process=metabolic process
  Homolog annotation: Hit_ID=B6TPM1; Match level="QueryCoverage=98%, HitCoverage=39%, E-value=3e-52, Identity=74%"; Hit description=S -adenosylmethionine-dependent methyltransferase
  Pfam annotation: Domain name=Methyltransf_11; Domain location=7-63; Score=6.1; E_value=0.025; Accession=PF08241.4; Description =Methyltransferase domain
YFSENMLKQCNEYVKQENISDERLALVRADISRLPFVNGSIDAVHAXVAEISRVLRSGGVLVASTFVEDIPLAIPILRIGRPYISRITGMNIFLSEAELEDLCRACGLVDFEFVRNGFYIMFSATKAS

SEQ ID NO: 76626 - protein, 62 aa, Setaria italica
  misc_feature (33)..(33): Xaa can be any naturally occurring amino acid
  Transcript Sequence Number=SeqID_10652
  Gene Ontology: Mol. function=sequence-specific DNA binding; Cellular component=nucleus; Biological process=regulation of transcription, DNA-dependent
  Homolog annotation: Hit_ID=Q7XYR8; Match level="QueryCoverage=67%, HitCoverage=11%, E-value=2e-10, Identity=80%"; Hit description =Homeobox protein rough sheath 1
  Pfam annotation: Domain name=KNOX2; Domain location=1-46; Score=54.5; E_value=4e-13; Accession=PF03791.5; Description=KNOX2 domain
DPELDQFMEAYCNMLLEVPGRSLTRPIDEAMEXLKRVEAQLDSIAGSATGGGSSAARLSLAR

SEQ ID NO: 76627 - protein, 67 aa, Setaria italica
  Transcript Sequence Number=SeqID_10653
TTKQGRNEVAHQERSPNVKSLSDPPYPFPTFCKGRTGGRSELIRNSFWITHCNVGGYPLRVPPLSLP

SEQ ID NO: 76628 - protein, 89 aa, Setaria italica
  Transcript Sequence Number=SeqID_10654
MLSYISTSDIYVFIQIADPTYVVTPAMRSRSGRDNLKKLFAAWYERRQMRKIYSPLLEGILAFYLGFEWIQTDNILAPMITHGIYYRPL

SEQ ID NO: 76629 - protein, 75 aa, Setaria italica
  Transcript Sequence Number=SeqID_10655
MNYKTNCRIPRLIRETNLLSLINPSLANGYGSTTLSNHGLIRLNRFVSRFSLHHTISLYLIFLISIKYPDTTGLS

SEQ ID NO: 76630 - protein, 110 aa, Setaria italica
  Transcript Sequence Number=SeqID_10656
  Subcellular localization annotation: CTP_CleavageSite=19; ConfidenceScore=5.31e-01
GSAVSFIISSCLVLLISVRTSNVTLLKFSNSYPNTPSLLAKPRERHWSSAMIKITPGIAMSSAFNYVHLAAGDKFLEVVYGTCQRGPPYHKSTISESSSHNYICVPLANL

SEQ ID NO: 76631 - protein, 45 aa, Setaria italica
  Transcript Sequence Number=SeqID_10657
NLAPPGQTPPSMFEMLCLWCVILCVMLLLLIKFIGNVGVKSTMNQ

SEQ ID NO: 76632 - protein, 109 aa, Setaria italica
  Transcript Sequence Number=SeqID_10658
  Subcellular localization annotation: CTP_CleavageSite=59; ConfidenceScore=5.58e-01
LHTHQVQGASLASFASILKMFDKMPQLTSSAFIARRMIIHFLGFFTLVPPSNRAALSVCVSLTAAGHETRRKRWPLQLDDGASPRWPLPHLSQHHHVLTVEQKWGIEYC

SEQ ID NO: 76633 - protein, 101 aa, Setaria italica
  Transcript Sequence Number=SeqID_10659
  Subcellular localization annotation: CTP_CleavageSite=81; ConfidenceScore=5.49e-01
ASASVASASATVCTSEKPPKGNKPPTYTPSPKPTPPTPKPTPPTYTPSPKPTPPTPKPTPPTYTPTPKPTPPTYTPSPKPPATKPPTYIPTPKPTPPTYNP

SEQ ID NO: 76634 - protein, 85 aa, Setaria italica
  Transcript Sequence Number=SeqID_10660
  Gene Ontology: Mol. function=3,4-dihydroxy-2-butanone-4-phosphate synthase activity; Cellular component=chloroplast; Biological process=riboflavin biosynthetic process
  Homolog annotation: Hit_ID=Q6Z234; Match level="QueryCoverage=98%, HitCoverage=15%, E-value=5e-40, Identity=92%"; Hit description =Putative riboflavin biosynthesis protein ribA
  Pfam annotation: Domain name=GTP_cyclohydro2; Domain location=1-85; Score=79.6; E_value=1.1e-20; Accession=PF00925.12; Description=GTP cyclohydrolase II
RGVLVYLRGHEGRGIGLGHKLRAYNLQDDGRDTVEANEELGLPVDSREYGIGAQILRDLGVRSMKLMTNNPAKYSGLKGYGLSIA

SEQ ID NO: 76635 - protein, 67 aa, Setaria italica
  misc_feature (62)..(62): Xaa can be any naturally occurring amino acid
  Transcript Sequence Number=SeqID_10661
LEALCCGEYAVILLKADGEYCSNIMIAHLPCPLPFPHFRFMVMPSFSSIRVEGLKLNDCKRXRSVRL

SEQ ID NO: 76636 - protein, 33 aa, Setaria italica
  Transcript Sequence Number=SeqID_10662
  Gene Ontology: Mol. function=oxidoreductase activity, acting on the CH-CH group of donors; Cellular component=peroxisome; Biological process=fatty acid metabolic process
  Homolog annotation: Hit_ID=B9T4G4; Match level="QueryCoverage=96%, HitCoverage=12%, E-value=2e-13, Identity=96%"; Hit description=Acyl -CoA oxidase, putative
CSLWGGSIINLGTKKHRDKYFDGIDNLDYPGCF

SEQ ID NO: 76637 - protein, 68 aa, Setaria italica
  Transcript Sequence Number=SeqID_10663
SSSYVCCRPSILAREENNADLCCALCFLLSRLIRVRRSFSVLAAVLCVGNGIATIGARRLTVKPQYSC

SEQ ID NO: 76638 - protein, 115 aa, Setaria italica
  Transcript Sequence Number=SeqID_10664
LEAPYLSSSDPNTAYRAPLWLCPGVERQDNFLQTSPGSKVESDWFLVLSHCYQDCTSAPVHLFGLCLRWIQQPMESNISPSKSGCKFSQEFSTWSSLVTPLWRPATRAETRCMCT

SEQ ID NO: 76639 - protein, 91 aa, Setaria italica
  Transcript Sequence Number=SeqID_10665
SFKVQPFLKQEMELSLVGLQSAEKTSLVNAIDVESSEIDDLPLLPPSLLSHSFTERCLLLLSGASSYCRGHCWSMLQQGITLTFYNSRFQL

SEQ ID NO: 76640 - protein, 110 aa, Setaria italica
  Transcript Sequence Number=SeqID_10666
  Gene Ontology: Mol. function=kinase activity
  Homolog annotation: Hit_ID=B6TS05; Match level="QueryCoverage=79%, HitCoverage=22%, E-value=2e-27, Identity=78%"; Hit description =Guanylate kinase
LLQEKKPSQIEKRLRNARAELDQSNSPGLFDHLLVNDDLETCYENLKKLLSLDDDQEDTDLFIEDGKQTTSYSIVSKNDSEVMLQSEINDSENGATSLLALDLLLSRAVH

SEQ ID NO: 76641 - protein, 87 aa, Setaria italica
  Transcript Sequence Number=SeqID_10667
  Subcellular localization annotation: CTP_CleavageSite=44; ConfidenceScore=5.06e-01
RACPIYKTPIQFVKDNSSFLPCFCSYVSPKSKLLFIKCHFSLISSSDFSGNAIFYMNMHTYELRGNQWMKKLLPGKLEPYNFSLVKD

SEQ ID NO: 76642 - protein, 56 aa, Setaria italica
  Transcript Sequence Number=SeqID_10668
SNYKINCRTPVLIREMNLLSLINPSLANGYCSTILSNYGLIRLNRFVSRIRLHLCN

SEQ ID NO: 76643 - protein, 89 aa, Setaria italica
  Transcript Sequence Number=SeqID_10669
  Gene Ontology: Mol. function=alcohol dehydrogenase activity; Cellular component=cytoplasm; Biological process=oxidation reduction
  Homolog annotation: Hit_ID=Q0ITW7; Match level="QueryCoverage=100%, HitCoverage=23%, E-value=5e-45, Identity=100%"; Hit description =Alcohol dehydrogenase 2
  Pfam annotation: Domain name=ADH_N; Domain location=34-87; Score =24.0; E_value=9.7e-06; Accession=PF08240.4; Description=Alcohol dehydrogenase GroES-like doma
MATAGKVIKCKAAVAWEAGKPLSIEEVEVAPPQAMEVRVKILYTALCHTDVYFWEAKGQTPVFPRILGHEAGGIVESVGEGVTELAPGD

SEQ ID NO: 76644 - protein, 118 aa, Setaria italica
  Transcript Sequence Number=SeqID_10670
ELKPSLTSNICLNQINNTMTIKISSLTTSATMLNMSSLIDLFIPYWHQQSPINLSVIFHSSSSPSPAYRLKAFSKYFGCPRFPVSKNARELKISTPVFHIVELQWPPLPPCPMACHLL

SEQ ID NO: 76645 - protein, 331 aa, Setaria italica
  misc_feature (77)..(77): Xaa can be any naturally occurring amino acid
  Transcript Sequence Number=SeqID_10671
  Gene Ontology: Mol. function=aldehyde dehydrogenase [NAD(P)+] activity; Cellular component=chloroplast; Biological process =cellular aldehyde metabolic process
  Homolog annotation: Hit_ID=B6TXC0; Match level="QueryCoverage=98%, HitCoverage=66%, E-value=1e-168, Identity=88%"; Hit description =Aldehyde dehydrogenase 3B1
  Pfam annotation: Domain name=Aldedh; Domain location=6-330; Score= -55.2; E_value=8.7e-16; Accession=PF00171.14; Description=Aldehyde dehydrogenase family
DKLGKWTAPERVWVPLVAWPATAQLVPEPLGVVLIFSCWNVPLGLSLEPLIGAIAAGNAVALKPSELSPCNRPKFLXDNIGRYVDPSAVKVVQGGPRGREQLMEHRWDKVLFTGSPRIARSVMAAASRHLTPVALELGGKCPCIFDAMPGGRDLQVSVNRIIGGKWSSCAGQACIAIDYVLVEERFAPVLIKMLKSTLKRFFQEADHMARIVNERNFERLSSLLKDRAVAPSILHGGSMDAKNLYIEPTILLNPPLDSAIMTEEIFGPLLPIITVKKIEDSIAFVKARPKPLAIYAFTRDAALRRRIVDETSSGTVTFNDAVVQYAIGRVA

SEQ ID NO: 76646 - protein, 98 aa, Setaria italica
  Transcript Sequence Number=SeqID_10672
  Subcellular localization annotation: CTP_CleavageSite=29; ConfidenceScore=5.27e-01
ELKPSLTSNICLNQSNNTMTIKTSSLTTSATMLNMSSLIDLFMSHWHQQSPINLSVILHSSSSPSFILLVVHHQHIGIKLSLNILAVDAFLCKSPWRT

SEQ ID NO: 76647 - protein, 101 aa, Setaria italica
  Transcript Sequence Number=SeqID_10673
RNERLLRMQVQPGVLNWELSSHSVVEVSNKSRNKILGIQGGYSAAPPIQNFRSSSLKYYHVHFLNGLMSFISEERRCVSAQNSDCNPCQESGVGNAQLLKI

SEQ ID NO: 76648 - protein, 53 aa, Setaria italica
  Transcript Sequence Number=SeqID_10674
VWEVKLWKQEPSSSSPGKKGPQISESRVTLLCNLPVPENLKNAGDALKKYAAA

SEQ ID NO: 76649 - protein, 109 aa, Setaria italica
  Transcript Sequence Number=SeqID_10675
CANRQSELKVLHTERKCFLLNELEVFGSLVRTKIHIISNIRRLIRRTKHELIIKLITRWRLIRETNLLSLINPSLAHVYCSITLSNHGLIRLNRFISQISLHLCNWFCN

SEQ ID NO: 76650 - protein, 68 aa, Setaria italica
  Transcript Sequence Number=SeqID_10676
PTTTVSSSVPVPPYIQLMSERKLQAAVGLWPSILKHKAFHPRLGSLAPSNYRYYLSRVSSTVSHQASR

SEQ ID NO: 76651 - protein, 114 aa, Setaria italica
  Transcript Sequence Number=SeqID_10677
  Gene Ontology: Mol. function=hydrolase activity, acting on carbon -nitrogen (but not peptide) bonds, in cyclic amides; Cellular component=mitochondrion; Biological process=pyrimidine base biosynthetic process
  Homolog annotation: Hit_ID=B6U6Z4; Match level="QueryCoverage=97%, HitCoverage=27%, E-value=1e-47, Identity=81%"; Hit description =Dihydroorotase
MFHDYFQLWKFLYKWCQYSINENLPQLKIVMEHITTMDAVNFIESCEEGHVAATVTPQHLLLNRNALFQGGLQPHNYCLPVLKRETHRQAILSAVTSGSKRYFLGTDSAPHDKR

SEQ ID NO: 76652 - protein, 91 aa, Setaria italica
  Transcript Sequence Number=SeqID_10678
IPCLFLFVLTKVFLKLSFMRIDPKIMSALLQSWKNAFGHLKKDHLNLPDRHPEKATSAGYNNNYSEKMRIIIGILNCKKVSVIPCCNMLQQ

SEQ ID NO: 76653 - protein, 83 aa, Setaria italica
  Transcript Sequence Number=SeqID_10679
ATRSTKHTCEGPSRWSLIAKYLTVTEQSSHTCGPRQQSARGPPHSCPRHPMTTAIAAASLPCRRLPPAAAAGAEAAALALPAA

SEQ ID NO: 76654 - protein, 220 aa, Setaria italica
  Transcript Sequence Number=SeqID_10680
  Gene Ontology: Mol. function=hydrolase activity, acting on glycosyl bonds; Biological process=polysaccharide catabolic process
  Homolog annotation: Hit_ID=B8QUV5; Match level="QueryCoverage=88%, HitCoverage=77%, E-value=2e-71, Identity=66%"; Hit description =Chitinase
  Pfam annotation: Domain name=Chitin_bind_1; Domain location=26-59; Score=41.3; E_value=3.8e-09; Accession=PF00187.11; Description =Chitin recognition protein
  Pfam annotation: Domain name=Glyco_hydro_19; Domain location=74-220; Score=206.7; E_value=6.1e-59; Accession=PF00182.11; Description =Chitinase class I
  Pfam module annotation: Pfam domain module=Chitin_bind_1::Glyco_hydro_ 19; Domain location=26-59::74-220
MANAPTMPTVLALGLALLCAAGPTAAQNCGCQTGYCCSMHGYCGTTSDYCGTGCKSGPCTGGGSGGGGANVGNVVTDAFFNGIKSQAGSGCEGSNFYSRNAFMDAANKYSDFAHGGSEADGKREIAAFFAHVTHETGHLCHISEINKNEPYCNPSYMQWPCAPGKKYYGRGPLQLSWNYNYGAAGRDIKFDGLGNPDVVAQDPAIAFKAALWFWMNNVHQ

SEQ ID NO: 76655 - protein, 33 aa, Setaria italica
  Transcript Sequence Number=SeqID_10681
  Gene Ontology: Mol. function=methyltransferase activity; Biological process=porphyrin biosynthetic process
  Homolog annotation: Hit_ID=P93628; Match level="QueryCoverage=96%, HitCoverage=7%, E-value=8e-09, Identity=93%"; Hit description =Uroporphyrinogen III methyltransferase
QGIRVEIIPGITSASGIAAELGIPLTHRGVATR

SEQ ID NO: 76656 - protein, 76 aa, Setaria italica
  Transcript Sequence Number=SeqID_10682
VRSSPWYSLGKRLHGKRLHGHRVYAPRWILSLSHKRHHGKRLDGHGGTVFLHHGGCTVHEQIYGHNMVSHHLLGEI

SEQ ID NO: 76657 - protein, 51 aa, Setaria italica
  Transcript Sequence Number=SeqID_10683
VEDVLWNLQFAAQVQDDWRGGGDSRSQSSEESPLSPAQIPRESHTTPADAA

SEQ ID NO: 76658 - protein, 119 aa, Setaria italica
  Transcript Sequence Number=SeqID_10684
  Gene Ontology: Mol. function=histone-lysine N-methyltransferase activity; Cellular component=nucleus; Biological process=chromatin modification
  Homolog annotation: Hit_ID=B9HE57; Match level="QueryCoverage=98%, HitCoverage=4%, E-value=4e-43, Identity=76%"; Hit description=SET domain protein
KNRVTAVDGKYMIGVYTLRPIAEGEEITFDYNSVTESKEEHEASICLCGSQVCRGSYLNFSGEGAFEKVLMEYHGVLDRHSLLLQACEANSVSQQDLIDLGRAGLGTCLLAGLPGWLVA

SEQ ID NO: 76659 - protein, 162 aa, Setaria italica
  Transcript Sequence Number=SeqID_10685
  Gene Ontology: Mol. function=transcription factor activity; Cellular component=nucleus; Biological process=regulation of transcription, DNA-dependent
  Homolog annotation: Hit_ID=Q852D5; Match level="QueryCoverage=89%, HitCoverage=11%, E-value=4e-38, Identity=56%"; Hit description =Powdery mildew resistance protein PM3b, putative, expressed
TLRWSDCDKEAHNSDKEVLEGLEPHDGLKVLKIYSCSIDTCPTWMNKLQGIVELKLSGCKRLEKLPAFWQLPALQILCLYGLENIRYLCSSDTAFTFQKLKNLEIFELPNFEIWWGTSEVRGERPIFPLLEKLLIKECKSLAALPKASVVKETFEGVKTEYR

SEQ ID NO: 76660 - protein, 83 aa, Setaria italica
  Transcript Sequence Number=SeqID_10686
FSRPFQSGPPSLAISVLLLLRKMRRDERQKAIASGEIGRVLAARWIFLCFYGVWCAEVAVESRGQAAADPQRAGGGQRRPRGG

SEQ ID NO: 76661 - protein, 76 aa, Setaria italica
  Transcript Sequence Number=SeqID_10687
SFKVQPFLKQEMELSLVGLQSAEKTSLVNAIDLTRMLETAHYCELVVLITFITHHHVLMFTLSTGFCVLNLTCIHG

SEQ ID NO: 76662 - protein, 148 aa, Setaria italica
  misc_feature (63)..(63): Xaa can be any naturally occurring amino acid
  misc_feature (106)..(106): Xaa can be any naturally occurring amino acid
  Transcript Sequence Number=SeqID_10688
  Gene Ontology: Mol. function=phosphatidylinositol binding; Cellular component=clathrin coat; Biological process=clathrin coat assembly
  Homolog annotation: Hit_ID=Q651U7; Match level="QueryCoverage=93%, HitCoverage=19%, E-value=5e-24, Identity=49%"; Hit description =Phosphoprotein-like
CNEKEMSSVALVLHVDDQNKGSASQNLFDVNSSGWELALVTAPSTHTSQPVKTNLVCAILTPXPAFQISTYKAASDEQAGGFDKLLLDSLYEDEARRKQIASVTYXGSLGAANPFEANASDPFAMSSSFAPPSNVQLALMTQLVLVSL

SEQ ID NO: 76663 - protein, 136 aa, Setaria italica
  Transcript Sequence Number=SeqID_10689
KPVGPPVKSHQLIIDRYSADRYRHVGPQRGRGTSHDFSCVVPSWLLKLTCLPPIGRNDVAGCRRCADSAGRTALIALTYGPTSQRDWGETGTNGLRSVDVSRSLSIKRSPSRLLPPVSAATCFAVAGSKERGAGRS

SEQ ID NO: 76664 - protein, 133 aa, Setaria italica
  Transcript Sequence Number=SeqID_10690
  Gene Ontology: Mol. function=oxidoreductase activity; Biological process=oxidation reduction
  Homolog annotation: Hit_ID=B6T2Z1; Match level="QueryCoverage=100%, HitCoverage=42%, E-value=1e-59, Identity=84%"; Hit description=Short- chain dehydrogenase/reductase SDR
FGLLRQNFNSEELRKEFDDIDNLTEKRLEELLDLFLEDFKANLLEAHGWPTGGSSAYKVAKAALNAYTRILAKKYPTLRINCLTPGYVKTDMSMHMGVLTLEEGARNPVKVALLPDDGPTGAYFDLNGEASFV

SEQ ID NO: 76665 - protein, 70 aa, Setaria italica
  Transcript Sequence Number=SeqID_10691
FQIDVPVGTPERPTREQILQDSPGMVTRSRLALLLGEGTSSLTTSTPQMMATAAPAKKITPKKKPTAAPA

SEQ ID NO: 76666 - protein, 64 aa, Setaria italica
  Transcript Sequence Number=SeqID_10692
  Gene Ontology: Biological process=auxin mediated signaling pathway
  Homolog annotation: Hit_ID=B6ST80; Match level="QueryCoverage=79%, HitCoverage=43%, E-value=3e-21, Identity=94%"; Hit description=Auxin- repressed 12.5 kDa protein
  Pfam annotation: Domain name=Auxin_repressed; Domain location=2-64; Score=49.4; E_value=1.4e-11; Accession=PF05564.4; Description =Dormancyauxin associated protein
  Subcellular localization annotation: CTP_CleavageSite=32; ConfidenceScore=5.03e-01
PGWNTLRHTLLPPRGGNNVWRSVFHPGSNLATKSMGANLFDRPQPNSPTVYDWLYSDETRSNHR

SEQ ID NO: 76667 - protein, 87 aa, Setaria italica
  Transcript Sequence Number=SeqID_10693
QSTRICSEEAQMVWMRNVGLQSSGSCMGGLSFDKAFVIWPVRFSLFSWLISHQTVFSSHNKSAVSAFQPAYKLKRTGQLSFDVHSYK

SEQ ID NO: 76668 - protein, 72 aa, Setaria italica
  Transcript Sequence Number=SeqID_10694
MRGVGGGGGGRDGRGGKECLTRGPHQVLEIGFFAVCCSDNYKNGAARRPVRGPSIGRTSSYPIGSDTALGSR

SEQ ID NO: 76669 - protein, 119 aa, Setaria italica
  misc_feature (87)..(87): Xaa can be any naturally occurring amino acid
  misc_feature (95)..(95): Xaa can be any naturally occurring amino acid
  Transcript Sequence Number=SeqID_10695
  Gene Ontology: Mol. function=binding; Cellular component =mitochondrial inner membrane; Biological process=mitochondrial transport
  Homolog annotation: Hit_ID=B2LWG5; Match level="QueryCoverage=82%, HitCoverage=24%, E-value=4e-35, Identity=76%"; Hit description =Nucleotide sugar translocator BT2A
  Pfam annotation: Domain name=Mito_carr; Domain location=51-119; Score= 44.0; E_value=5.8e-10; Accession=PF00153.19; Description =Mitochondrial carrier protein
ITHIQISLQFGHHVTPQAVPPVAPSKAIELFAFDTVKKFLTPKADEPPKTFLPPSLVAGALAGVSSTLCMYPLELIKTRLTIEKDVXNNFLHAFXRFYVEEGPSELYRGLTPSLIGVVP

SEQ ID NO: 76670 - protein, 149 aa, Setaria italica
  Transcript Sequence Number=SeqID_10696
VNHAHLKQEFSESCHNVSLETLEFQVAAGQYPLIIHSAPLVSPKLTRLWNSRRKKQTSLLPEYFRCCRFGLRVLNRTNCHCKVLIILLNVVEFLVYSGSQVFSQRSDVQPKRQNASSLNESQEASGVCISIAPARPSPGTGRGTAGRGR

SEQ ID NO: 76671 - protein, 87 aa, Setaria italica
  Transcript Sequence Number=SeqID_10697
  Gene Ontology: Biological process=auxin mediated signaling pathway
  Homolog annotation: Hit_ID=B6ST80; Match level="QueryCoverage=48%, HitCoverage=35%, E-value=2e-17, Identity=97%"; Hit description=Auxin- repressed 12.5 kDa protein
  Pfam annotation: Domain name=Auxin_repressed; Domain location=7-87; Score=56.9; E_value=7.9e-14; Accession=PF05564.4; Description =Dormancyauxin associated protein
  Subcellular localization annotation: CTP_CleavageSite=37; ConfidenceScore=5.50e-01
MYQQTCGLTGTRHRSSVDLISPDPRSNGGCSWSRRCRASRRRWRSVFHPGSNLATKSMGANLFDRPQPNSPTVYDWLYSDETRSNHR

SEQ ID NO: 76672 - protein, 57 aa, Setaria italica
  Transcript Sequence Number=SeqID_10698
SNHITRNKQVIDGLKVQIEKETTESTNSAKGYTDMGKVHPLPAIEQKSMRHTEPPTI

SEQ ID NO: 76673 - protein, 46 aa, Setaria italica
  Transcript Sequence Number=SeqID_10699
REGAKYDRAYDLCSRIIEIMVLASKPSRGELRFIFFCYGNSWHSDH

SEQ ID NO: 76674 - protein, 135 aa, Setaria italica
  Transcript Sequence Number=SeqID_10700
AHFSNNMIDSYSRMACLVHLLVPLLLSLLSSSTFLNYAQEKWDNEVDKLSQGKKLHFTADANLRGIVPRIWSSWMYLTAVISPLKIPKFSFFSLVHFCSKKITITKLKNQKEKKTYHDCHVSIIYRNKNQKPGNG

SEQ ID NO: 76675 - protein, 50 aa, Setaria italica
  Transcript Sequence Number=SeqID_10701
YIPAPHRHQQSPINLSVILHSSSCPSSAYRHKAFFKYFGCPCFPTIHKNT

SEQ ID NO: 76676 - protein, 73 aa, Setaria italica
  Transcript Sequence Number=SeqID_10702
FVHNITGPDFARTRYRLSDQEFRNEPMKHTCLNNKPSALRRITAYSPQQRASNHPWKKKCVVLQHSQSAMMSQ

SEQ ID NO: 76677 - protein, 261 aa, Setaria italica
  misc_feature (239)..(239): Xaa can be any naturally occurring amino acid
  Transcript Sequence Number=SeqID_10703
  Gene Ontology: Mol. function=hydrolase activity, acting on glycosyl bonds; Cellular component=extracellular region; Biological process =polysaccharide catabolic process
  Homolog annotation: Hit_ID=P29022; Match level="QueryCoverage=93%, HitCoverage=88%, E-value=1e-99, Identity=73%"; Hit description =Endochitinase A
  Pfam annotation: Domain name=Chitin_bind_1; Domain location=11-44; Score=49.0; E_value=1.8e-11; Accession=PF00187.11; Description =Chitin recognition protein
  Pfam annotation: Domain name=Glyco_hydro_19; Domain location=62-261; Score=397.2; E_value=2.7e-116; Accession=PF00182.11; Description =Chitinase class I
  Pfam module annotation: Pfam domain module=Chitin_bind_1::Glyco_hydro_ 19; Domain location=11-44::62-261
ALLCAAGPAAAQSCGCQPNFCCSKFGYCGTTIDYCGDGCRSGPCIGSGTGTGSGSGVDVGSVVTDAFFNGIKSQAGGGCEGSNFYSRDAFLNAAGAYSGFAHGGSADDGKREIAAFFAHVTHETGHFCYISEINKDNSYCDSSKTQWPCAAGKKYYGRGPLQISWNYNYGPAGQSIGFDGLGNPDAVAQDPVIAFKTAFWFWMNNVHGVMPQGFGATIRAINGALECNGNNPAQMNARXVGLTNQQYCQQLGVDPGSNLTC

SEQ ID NO: 76678 - protein, 249 aa, Setaria italica
  misc_feature (219)..(219): Xaa can be any naturally occurring amino acid
  Transcript Sequence Number=SeqID_10704
  Gene Ontology: Mol. function=transcription factor activity; Cellular component=nucleus; Biological process=regulation of transcription, DNA-dependent
  Homolog annotation: Hit_ID=Q852D5; Match level="QueryCoverage=98%, HitCoverage=18%, E-value=6e-61, Identity=54%"; Hit description =Powdery mildew resistance protein PM3b, putative, expressed
  Pfam annotation: Domain name=LRR_1; Domain location=12-33; Score=0.3; E_value=2.6e+02; Accession=PF00560.25; Description=Leucine Rich Repeat
  Pfam annotation: Domain name=LRR_1; Domain location=182-203; Score =10.1; E_value=3.5; Accession=PF00560.25; Description=Leucine Rich Repeat
  Pfam annotation: Domain name=LRR_1; Domain location=35-56; Score =10.4; E_value=3.1; Accession=PF00560.25; Description=Leucine Rich Repeat
  Pfam module annotation: Pfam domain module=LRR_1::LRR_1::LRR_1; Domain location=12-33::182-203::35-56
REVLEGLKPHDGLKVLKIYSCNIDSCPTWMNKLQGIVELELSDCKRLEKLPAFWQLPALQILCLCGLENIHYLCSSDTAFTFQKLKNLAIFKLPNFEIWWGTSEVRGERPIFPLLEKLLIKECKSLAALPKASVIKETFEGVKIEYRSAFPALKKMKLKDLEMFQRWEDGEGNPGEELAFHRLEKLSIRSCPELTTLPEAPKLSVLEVEGASQQISSLXAASRYITSLSSLELYGDDTETESVAETKFE

SEQ ID NO: 76679 - protein, 129 aa, Setaria italica
  Transcript Sequence Number=SeqID_10705
  Gene Ontology: Mol. function=electron carrier activity; Cellular component=integral to membrane; Biological process=oxidation reduction
  Homolog annotation: Hit_ID=Q94IP1; Match level="QueryCoverage=87%, HitCoverage=22%, E-value=2e-56, Identity=92%"; Hit description =Cinnamic acid 4-hydroxylase
MLVLLCTFAAIETTLWSIEWGIAELVNHPEIQSKLREELTSVLGAGVAVTEPDLERLPYLQAVVKETLRLRMAIPLLVPHMNLNDGKLHGYDIPAESKILVNAWFLANDPKRWVKPEEFRPVTVSLVGR

SEQ ID NO: 76680 - protein, 149 aa, Setaria italica
  Transcript Sequence Number=SeqID_10706
  Gene Ontology: Mol. function=selenium binding
  Homolog annotation: Hit_ID=B9RI64; Match level="QueryCoverage=99%, HitCoverage=22%, E-value=3e-71, Identity=85%"; Hit description =Selenoprotein O, putative
VLGLTIDYGPFGFLDAFDPSYTPNTTDLPGKRYCFANQPDVGLWNIAQFTGPLSSAELISQDEANYVMERYGTKFMDEYQSIMNKKLGLTKYNKQLISKLLNNLAVDKVDYTNFFRLLSNVKADPGIPESELLVPLKAALLDIGEKKER

SEQ ID NO: 76681 - protein, 162 aa, Setaria italica
  Transcript Sequence Number=SeqID_10707
  Gene Ontology: Mol. function=transferase activity, transferring groups other than amino-acyl groups
  Homolog annotation: Hit_ID=B4F922; Match level="QueryCoverage=37%, HitCoverage=13%, E-value=4e-27, Identity=95%"; Hit description =Acyltransferase
GVKGEVSNLGQQRSRGTCVLDNHKDQQTCGLTGTRHRSSVDLISPDPRSNGGCSWSRRCRASRRRWGSWAAGGRRGWRPCSWWPGCSRGGTRCATRCCRRARFKVYDVDFGFGRPERVRSGGNNKFDGMVYLYPGRGGEGGIDVELALQPEPMQRLEKDADF

SEQ ID NO: 76682 - protein, 74 aa, Setaria italica
  Transcript Sequence Number=SeqID_10708
MVACALVIICIGSKVWDVSACAALYICQLNLVLENVACCEHIKYCCLFSGNKVAANRKMEGFGRWETLCRESLL

SEQ ID NO: 76683 - protein, 152 aa, Setaria italica
  Transcript Sequence Number=SeqID_10709
  Subcellular localization annotation: CTP_CleavageSite=74; ConfidenceScore=5.04e-01
CNKSLFMANHVGGNRWKMLSLNQSPINFFVILHSSSCPSPAYRHKAFSKYFGYPRFPDTSAPFAIVQLQAFNPNARKGWHDHEFAVREGKRTRQMSIISISCFHYYAGIIIFESISLLSFAGESLMVFCSCFLPVLSDTNDMNAKSCHNRRK

SEQ ID NO: 76684 - protein, 208 aa, Setaria italica
  Transcript Sequence Number=SeqID_10710
  Gene Ontology: Mol. function=hydrolase activity, acting on glycosyl bonds; Biological process=polysaccharide catabolic process
  Homolog annotation: Hit_ID=P29022; Match level="QueryCoverage=98%, HitCoverage=72%, E-value=1e-100, Identity=87%"; Hit description =Endochitinase A
  Pfam annotation: Domain name=Glyco_hydro_19; Domain location=10-208; Score=423.9; E_value=2.6e-124; Accession=PF00182.11; Description =Chitinase class I
WLVGANVASVVTDAFFNGIKNQAGGGGCEGRNFYTRSAFLEAANKYSGFAHGGSEVEGKREIAAFFAHVTHETGHFCYISEINKNNNYCDANNRQWPCAAGKKYYGRGPLQISWNYNYGPAGRDIGFDGLGNPDIVAQNAGIAFKTALWFWMNNVHRVMPQGFGATTRAINGALECNGNNPAQMNARVGYYRQYCQQLGVDPGNNLTC

SEQ ID NO: 76685 - protein, 106 aa, Setaria italica
  Transcript Sequence Number=SeqID_10711
  Gene Ontology: Mol. function=nucleotide binding; Cellular component =nucleus; Biological process=defense response
  Homolog annotation: Hit_ID=Q852D5; Match level="QueryCoverage=72%, HitCoverage=5%, E-value=3e-15, Identity=57%"; Hit description =Powdery mildew resistance protein PM3b, putative, expressed
WECGKLQLLSGQLDGLQRLLISVCPELRSLESCLGEFSTLERLSLCECKSLASLPDGPQAYSSLHDLQITSCPAIQPLPSSLKKRLDNLGHVRFSSRGVWIRGTKV

SEQ ID NO: 76686 - protein, 69 aa, Setaria italica
  Transcript Sequence Number=SeqID_10712
NIRAFVLSVNASMNPVCYFTNIPWCLDLLVSCFNHCFELFKWRLTLYFCQPYLQYSTSNSVLNMIIGVS

SEQ ID NO: 76687 - protein, 112 aa, Setaria italica
  Transcript Sequence Number=SeqID_10713
  Gene Ontology: Mol. function=nucleotide binding; Cellular component =nucleus; Biological process=defense response
  Homolog annotation: Hit_ID=Q852D5; Match level="QueryCoverage=87%, HitCoverage=7%, E-value=7e-31, Identity=71%"; Hit description =Powdery mildew resistance protein PM3b, putative, expressed
  Pfam annotation: Domain name=LRR_1; Domain location=14-36; Score=5.2; E_value=31; Accession=PF00560.25; Description=Leucine Rich Repeat
  Pfam annotation: Domain name=LRR_1; Domain location=38-60; Score=8.4; E_value=7.5; Accession=PF00560.25; Description=Leucine Rich Repeat
  Pfam annotation: Domain name=LRR_1; Domain location=62-81; Score=3.5; E_value=64; Accession=PF00560.25; Description=Leucine Rich Repeat
  Pfam module annotation: Pfam domain module=LRR_1::LRR_1::LRR_1; Domain location=14-36::38-60::62-81
GCDNLRSLSGQLDALQTLRIADCSKLKSLESCLGRLPSLEDLRLSDCRSLQSLPNGPQAYSDLRALRIESCPSIKLLPTSLQQRLDYLEEKTLDVRYEGWEYSIRRRLACLK

SEQ ID NO: 76688 - protein, 79 aa, Setaria italica
  Transcript Sequence Number=SeqID_10714
SCFRKEVIILPESQLKLIYVSGCCSTTRTLGSFRPHLKLSYRVYKQTRSKVPFDANIKMLSISDYLHRHLHVYCQSLFP

SEQ ID NO: 76689 - protein, 77 aa, Setaria italica
  Transcript Sequence Number=SeqID_10715
SIHVPLAPAITNKASVILHSSSSPSFILLVVHHQHIGIKLSLNIFGCRRFPLIFKTSRNICLYVVLLTKLCKSPWRT

SEQ ID NO: 76690 - protein, 360 aa, Setaria italica
  Transcript Sequence Number=SeqID_10716
  Gene Ontology: Mol. function=ATP-dependent helicase activity; Cellular component=nucleus
  Homolog annotation: Hit_ID=B6TU64; Match level="QueryCoverage=97%, HitCoverage=66%, E-value=1e-168, Identity=84%"; Hit description=ATP -dependent RNA helicase
  Pfam annotation: Domain name=DEAD; Domain location=79-228; Score= -13.5; E_value=0.0004; Accession=PF00270.21; Description=DEADDEAH box helicase
AKSKAVRERATETEEGRVDFDRPSKFLVVCLNAIRDAVAPEDGGGSSIHGAGDWGVELWRSCSSPAPSDVLDTSGACATMEQTAWLVSTACDIVARKERLGMVVSCPFLLYLVPSQEKAAQVRSICKPLKPLGIHSVSLHPGASVEHQISGLKTCEPEFLIATPERLLELVSLKAIDISNVSMLVIDGLKYFLDLNVSDKIFSIRDAISSSPPITIFTDSSDKNVATMAKTLLRERITKLSINDSVYSRSAFVTQHVHFCPSEKLKTSKVKEILEQILQSHAKKSSKVLLVAASDKKAQHLSSSLKLENCTVTDGSHGTSFTICSSVGLMNVHVKDRENLVMTDVEGFETVIWLVCIFPS

SEQ ID NO: 76691 - protein, 340 aa, Setaria italica
  misc_feature (168)..(168): Xaa can be any naturally occurring amino acid
  Transcript Sequence Number=SeqID_10717
  Gene Ontology: Mol. function=protein serine/threonine kinase activity; Cellular component=condensed nuclear chromosome kinetochore; Biological process=protein amino acid phosphorylation
  Homolog annotation: Hit_ID=B6U2B3; Match level="QueryCoverage=95%, HitCoverage=81%, E-value=1e-137, Identity=75%"; Hit description =Mitotic spindle checkpoint component mad3
  Pfam annotation: Domain name=Mad3_BUB1_I; Domain location=81-206; Score=201.2; E_value=2.9e-57; Accession=PF08311.4; Description =Mad3BUB1 homology region 1
MAAAAAAAATAKAAEEMVAVLDDETLALMGVSNSAAAAPVVVGAEWETFKENVRPLKRGRDVSKLNRALKALVDPAQRAALLEARRRMIEAIYEYQGEDPLQPWLDCIKWVQESFPTGGECSGLVVLYEQCVRTFWHDERYKDDLRFLKVWLEYAGNCADAEVIYKIXLRQNQIGQGHAIYYMSYASLLEAKNKLRKANEIFDIGIARKAKPLEKLEAVYRTFLRRSTKRSEHSEQNDTANDDLPIRSFGTSLKRDENRNQQAENSQLGRPRALQRIDVNRPLSVFKDENSLPNQGIDKIRRKENTSWRTLGTQADRNKENNMMPTKWTCHKVPQKLGAR

SEQ ID NO: 76692 - protein, 121 aa, Setaria italica
  Transcript Sequence Number=SeqID_10718
  Gene Ontology: Mol. function=hydrolase activity
  Homolog annotation: Hit_ID=B9R7H1; Match level="QueryCoverage=68%, HitCoverage=8%, E-value=2e-34, Identity=79%"; Hit description =Hydrolase, putative
REEIVNKCLHLPVAKGFADLEPLPDAPPPQEEENRRMLLLDMVPWYSGTSADLFKTAFDLMVSVTLFVGRFDMRMMQAAMKGPTDDTQNADLLYDSFNEREDLWFDFVADTGDGGNSSYTV

SEQ ID NO: 76693 - protein, 157 aa, Setaria italica
  Transcript Sequence Number=SeqID_10719
  Gene Ontology: Mol. function=nucleoside-triphosphatase activity; Cellular component=intrinsic to membrane
  Homolog annotation: Hit_ID=B6TDW7; Match level="QueryCoverage=99%, HitCoverage=67%, E-value=1e-64, Identity=78%"; Hit description =Secretory protein
  Pfam annotation: Domain name=BSP; Domain location=1-151; Score=241.4; E_value=2.2e-69; Accession=PF04450.4; Description=Plant Basic Secretory Protein
EDRKPVDSVALNVVDNISAPAQTSGGAISLNAQYVAGFQGDVKTEVTGVLYHETTHVWQWDGQGQANGGLIEGIADFVRLRAGLAPDHWRKAGQGDKWDQGYDVTARFLDYCDSLKQGFVAELNGKMKDGYSDGFFQDILGKDVQQLWQDYKAQYGG

SEQ ID NO: 76694 - protein, 416 aa, Setaria italica
  misc_feature (178)..(178): Xaa can be any naturally occurring amino acid
  misc_feature (193)..(193): Xaa can be any naturally occurring amino acid
  misc_feature (198)..(198): Xaa can be any naturally occurring amino acid
  Transcript Sequence Number=SeqID_10720
  Gene Ontology: Mol. function=transcription factor activity; Cellular component=nucleus; Biological process=regulation of transcription, DNA-dependent
  Homolog annotation: Hit_ID=C3V015; Match level="QueryCoverage=95%, HitCoverage=53%, E-value=1e-115, Identity=57%"; Hit description =Putative resistance protein
QDDQILPILKLSYDDLPSHMKQCFAFCAVFPKDYEIDVEMLIQLWMANDFIPEQKDVHHETIGKQIFSELVSRSFFQDVKQVKGDTRIDSVYWYFSTSKCKIHDLMHDVALSVMGKEVATITEKPKQSDEFLQNTCRHILLSCGKPEAVLNDSLNIRSPAMQTLLCPRRIESSLQHLXKISSLRALELWQDKXTILLXKPKQLHLLRYLDISWSDIVALPEDISILYNLQTLNVAYCQKLGRLPKGIKYMTALRHLYTHGCDELKRMPPAVGHLTSLQTLTNFVVGAGPHCSSIAELQHLNNLGGPLLLSQLENVTKAADAKQATLGNKKELRELSLRWTWTSSEEEKQHCHKVLEGLEAPPGLEALRIDHYQGTSFPTWMGTLTKMVELHLSDCNKSNKLPPLGSVPALQVLRLE

SEQ ID NO: 76695 - protein, 147 aa, Setaria italica
  Transcript Sequence Number=SeqID_10721
PAGTMHPNKPRDGGSAQRLQSCSTHSARSIHEELLGQHGVRPVPMPTIAAEARHIGSSREEEAAAACAAVVWELGVARPLESSVVWWSAPGLRPWELLLRCTALLSIPCINCCIWTQISSLINPKSLFFPVFSIYHCSVVLQFLMLY

SEQ ID NO: 76696 - protein, 108 aa, Setaria italica
  Transcript Sequence Number=SeqID_10722
  Gene Ontology: Mol. function=nucleic acid binding; Biological process= DNA integration
  Homolog annotation: Hit_ID=Q6ATH4; Match level="QueryCoverage=98%, HitCoverage=7%, E-value=5e-49, Identity=84%"; Hit description =Putative polyprotein
VVAECCWLRQLLQELHIRLPSATVVFCDNVSAVYMTANPVHHKRTKHIEIDIHFVREKVALGEIRVLHVPSSHQFADIMTKGLPTALFREFRSSLCVREPPAATAGGC

SEQ ID NO: 76697 - protein, 311 aa, Setaria italica
  misc_feature (111)..(111): Xaa can be any naturally occurring amino acid
  Transcript Sequence Number=SeqID_10723
  Gene Ontology: Mol. function=nucleotide binding; Cellular component =nucleus; Biological process=regulation of transcription, DNA -dependent
  Homolog annotation: Hit_ID=Q852D5; Match level="QueryCoverage=97%, HitCoverage=23%, E-value=2e-65, Identity=50%"; Hit description =Powdery mildew resistance protein PM3b, putative, expressed
  Pfam annotation: Domain name=LRR_1; Domain location=111-136; Score =3.7; E_value=60; Accession=PF00560.25; Description=Leucine Rich Repeat
  Pfam annotation: Domain name=LRR_1; Domain location=200-219; Score =4.9; E_value=35; Accession=PF00560.25; Description=Leucine Rich Repeat
  Pfam annotation: Domain name=LRR_1; Domain location=221-243; Score =5.3; E_value=29; Accession=PF00560.25; Description=Leucine Rich Repeat
  Pfam annotation: Domain name=LRR_1; Domain location=245-267; Score =5.5; E_value=27; Accession=PF00560.25; Description=Leucine Rich Repeat
  Pfam annotation: Domain name=LRR_1; Domain location=269-291; Score =8.4; E_value=7.6; Accession=PF00560.25; Description=Leucine Rich Repeat
  Pfam module annotation: Pfam domain module=LRR_1::LRR_1::LRR_1::LRR _1::LRR_1; Domain location=111-136::200-219::221-243::245-267::269-291
LITVGTETTLPTVHSAFELVDASNKYPLTGLELRGCNFLFPSSPLALWTCFVQLQDLTIINHALVYWPEKEFQSLVSLRRLTIDCCSGLIGYAKAAPGQPISERSRQVLPXLESLDIRACESLVEVFNVPASLKRMDLRDCPNLKSIFGEQQDEPTLNQGPSAAPKLSSSARDHLLLPCLESLTMHRCKSLSEVLNLPPSLREIDIRYCGKLQLLSGQLDGLRRLEIVDCPELRSLESCLGEFSTLERLSLEDCERLASLPDGPQAYSSLRHLQITSCPGIQSLPSSLKKRLDNLIDKDLDARYEDNDQEG

SEQ ID NO: 76698 - protein, 100 aa, Setaria italica
  Transcript Sequence Number=SeqID_10724
  Subcellular localization annotation: CTP_CleavageSite=49; ConfidenceScore=5.12e-01
RGERGQRRTDPGSASVTGGAYLLQGVRLHRGPVHRRCRQLANPHCRRARGNHRACRSRNGVIPRRRAAIAPTTSPPLLPACGSETRNGMGEASEIRIGKG

SEQ ID NO: 76699 - protein, 236 aa, Setaria italica
  Transcript Sequence Number=SeqID_10725
  Gene Ontology: Mol. function=nucleotide binding; Cellular component =nucleus; Biological process=defense response
  Homolog annotation: Hit_ID=Q852D5; Match level="QueryCoverage=87%, HitCoverage=15%, E-value=1e-78, Identity=72%"; Hit description =Powdery mildew resistance protein PM3b, putative, expressed
  Pfam annotation: Domain name=NB-ARC; Domain location=1-228; Score =89.8; E_value=9.6e-24; Accession=PF00931.14; Description=NB-ARC domain
TLAKRIVEEAKKKFETKEAKKNGCHANGSSALDKLQNAVSGKRYLLVLDDVWNRDEAHKWEKLKSYLHGGSGSSVLTTTRDQEVAKLMMGTAEGAYELGRLGENFIEEIIKSRAFSSKQEKDWPRELVNMVGDVAKRCVGSPLAATALGSVLSTKTTAREWKDVLRRKKICDDRNGILPVLKLSYNCLPSHMRQCFAFCAMFPKDYEINVEMLIQLWIANDFIPVLQGEEHPEISR

SEQ ID NO: 76700 - protein, 226 aa, Setaria italica
  Transcript Sequence Number=SeqID_10726
  Gene Ontology: Mol. function=transcription repressor activity; Cellular component=cytoplasm; Biological process=regulation of nitrogen utilization
  Homolog annotation: Hit_ID=P52580; Match level="QueryCoverage=100%, HitCoverage=72%, E-value=2e-83, Identity=67%"; Hit description =Isoflavone reductase homolog IRL
  Pfam annotation: Domain name=NmrA; Domain location=2-217; Score =187.0; E_value=5.3e-53; Accession=PF05368.5; Description=NmrA-like family
GVRQIADQTRLIDAIKETGNVKRFFPSEFGLDADRSGAVEPIRSLIINPKAAVRRAVEAAGVPYTYAWTGYFFGYGLPGIGQVLSQSPPVDKPAVVLGDGGSKVSYVDEGDIGTYTVMAADDPRAEKRTLYIRPPANTLSHNELLAVWERKTGRAFERVHLDEDAVLKQIQEDPIPLNSILLSIGHAVHIKGEHEFEIDPSSGVDASELYPDVKYTTVDEYLNRLL

SEQ ID NO: 76701 - protein, 78 aa, Setaria italica
  Transcript Sequence Number=SeqID_10727
  Subcellular localization annotation: CTP_CleavageSite=36; ConfidenceScore=5.09e-01
FARYLDGLSKHTMVKVVFQKLRLHKNQSRDTGRAFNVSMISQKNIFNNCYTKTLPHIKSYKATRTSTLGAVVNLPSRI

SEQ ID NO: 76702 - protein, 161 aa, Setaria italica
  Transcript Sequence Number=SeqID_10728
HIFEVNNTMTIKISSLTTSATMLNMSSLIDLFIPYWHQQSPINLSVIFHSSSSPSPAYRLKAFSKYFGCPRFPVSKNARELKISTPVFHIVELQWPPLPPCPMACHCQGDADGEGGTVGGRHQGKKTRKWMIILLVVEAELVNCGILSNIFRMEAREAPCT

SEQ ID NO: 76703 - protein, 224 aa, Setaria italica
  misc_feature (127)..(127): Xaa can be any naturally occurring amino acid
  Transcript Sequence Number=SeqID_10729
  Gene Ontology: Mol. function=structural molecule activity; Cellular component=protein complex; Biological process=microtubule-based movement
  Homolog annotation: Hit_ID=Q53M52; Match level="QueryCoverage=94%, HitCoverage=46%, E-value=1e-114, Identity=92%"; Hit description =Tubulin alpha-2 chain
  Pfam annotation: Domain name=Tubulin; Domain location=1-87; Score= -60.0; E_value=0.0085; Accession=PF00091.17; Description=TubulinFtsZ family, GTPase domain
  Pfam annotation: Domain name=Tubulin_C; Domain location=90-224; Score= 197.9; E_value=2.8e-56; Accession=PF03953.9; Description=TubulinFtsZ family, C-terminal domai
  Pfam module annotation: Pfam domain module=Tubulin::Tubulin_C; Domain location=1-87::90-224
LWTTARIQLGFTVYPSPQVSTSVVEPYNSVLSTHSLLEHTDVSILLDNEAIYDICRRSLDIERPNYSNLNRLVSQVISSLTASLRFDGALNVDVNEFQTNLVPYPRIHFMLSSYAPVISSEKAYHEXSCSVSEITNSAFEPANMMVKCDPRHGKYMACCLMYRGDVVPKDVNAAVATIKTKRTIQFVDWCPTGFKCGINYQAPTVVPGGDLAKVQRAVCNDLLT

SEQ ID NO: 76704 - protein, 58 aa, Setaria italica
  Transcript Sequence Number=SeqID_10730
FIQYLISLFSILSPSLVRSLGTQGGYSAAPPIQNFRSSSLKYYHVHFLNRLMSFICEE

SEQ ID NO: 76705 - protein, 247 aa, Setaria italica
  misc_feature (146)..(146): Xaa can be any naturally occurring amino acid
  Transcript Sequence Number=SeqID_10731
  Gene Ontology: Mol. function=hydrolase activity, acting on glycosyl bonds; Biological process=polysaccharide catabolic process
  Homolog annotation: Hit_ID=P29022; Match level="QueryCoverage=88%, HitCoverage=71%, E-value=2e-86, Identity=71%"; Hit description =Endochitinase A
  Pfam annotation: Domain name=Glyco_hydro_19; Domain location=31-245; Score=355.2; E_value=1.2e-103; Accession=PF00182.11; Description =Chitinase class I
  Subcellular localization annotation: CTP_CleavageSite=60; ConfidenceScore=5.08e-01
MASSATSRILALGLALLFAAGLAAAQNVASVVTDAFFNSIKSQDSGCEGKNFYTRSAFLNAANAYPGFAHGGSETQGKREIAAFFANVAHGGSETQGKREIAAFFANVAHETGRLCYISEINKSNSYCDPNNRQWPCVSGKKYYGXRGPLQISWNYNYGPAGKSIGFDGLGNPDKVAQDPTISFKTALWFWMNNVHGVMPQGFGATIRAINGALECNGKNPGAVSSRVNYYKQYCRQLGVEPGEDKP

SEQ ID NO: 76706 - protein, 77 aa, Setaria italica
  Transcript Sequence Number=SeqID_10732
FSVEELEMNGEEKQLSEIIHRLGLSTRLSMEMKENSEIIALQQVLVVTKCPKTGANYSLHQHRYLKHGKHPFTNTGI

SEQ ID NO: 76707 - protein, 141 aa, Setaria italica
  Transcript Sequence Number=SeqID_10733
  Gene Ontology: Mol. function=methyltransferase activity; Biological process=porphyrin biosynthetic process
  Homolog annotation: Hit_ID=P93628; Match level="QueryCoverage=80%, HitCoverage=26%, E-value=2e-56, Identity=94%"; Hit description =Uroporphyrinogen III methyltransferase
FLSDVVLYSLQKISKCLAGYSLTYNPFCSVRFLTGHSRNGGTDPLYVAGNAADPDTTLVVYMGLSTLPSLAPKLMKHGLPPDTPAVAVERGTTPQQRMVFALLKDLVDEVKLADLVSPTLIIIGKVVALSPFWVEPSEHDA

SEQ ID NO: 76708 - protein, 198 aa, Setaria italica
  misc_feature (169)..(169): Xaa can be any naturally occurring amino acid
  misc_feature (188)..(188): Xaa can be any naturally occurring amino acid
  Transcript Sequence Number=SeqID_10734
  Gene Ontology: Mol. function=calcium ion binding; Cellular component =membrane
  Homolog annotation: Hit_ID=Q3HRN8; Match level="QueryCoverage=90%, HitCoverage=57%, E-value=2e-45, Identity=61%"; Hit description =Calcineurin B-like protein 9
  Subcellular localization annotation: CTP_CleavageSite=29; ConfidenceScore=5.46e-01
MLSSSSDPRRANHGRLFAMDPRFGFRFSSSDMQSASSLSLGERLCAVFFPFVAIAEAVFFALTDCLADLRPGSDSSCARRYGTGPSSSGATFVAAEKKRSHYHRHRHHRPFLRRDGWTPPDLHQLAHLADESRCFSVNEVEALFELYKKISCSIIDDGLIHKEELQLAXLFKTPSGQNSFFLIRVFDXLFDEKKNGVI

SEQ ID NO: 76709 - protein, 104 aa, Setaria italica
  Transcript Sequence Number=SeqID_10735
EMDHPLQKSWYIPMQQTGSRKGSDLIGVELTGPGQYRYPRSIRDTWYYRACCASAVQVTVGKAPTTNHTSRAPSSSKEPVEVLIDGAVPRRQVHHLLRYSSTVV

SEQ ID NO: 76710 - protein, 97 aa, Setaria italica
  Transcript Sequence Number=SeqID_10736
ICSEGREEDKADEHHSAKECRKLEIIGIGDGKTPRNSLGLQQYSISCFHYYAGIIIFESISLLSFAGESLMVFCSCFLPVLSDTNDMNAKSCHNRRK

SEQ ID NO: 76711 - protein, 144 aa, Setaria italica
  misc_feature (30)..(30): Xaa can be any naturally occurring amino acid
  misc_feature (47)..(47): Xaa can be any naturally occurring amino acid
  misc_feature (86)..(86): Xaa can be any naturally occurring amino acid
  misc_feature (108)..(108): Xaa can be any naturally occurring amino acid
  misc_feature (122)..(122): Xaa can be any naturally occurring amino acid
  Transcript Sequence Number=SeqID_10737
  Gene Ontology: Mol. function=kinase activity
  Homolog annotation: Hit_ID=B6TS05; Match level="QueryCoverage=85%, HitCoverage=33%, E-value=8e-35, Identity=72%"; Hit description =Guanylate kinase
LYDIDDLFSAQLVIHQIQKRLRNARAKFDXGLFDHLLVNDDLETCYXENLKKLLSLDYDQEDSDDLFIKDDKQTASYSIVSKNDSXEILLQSETNDAKNGATSLRAFXLSSLSGGAPINSFXTTAYMGVLDDPKHSSKIAEVLT

SEQ ID NO: 76712 - protein, 179 aa, Setaria italica
  Transcript Sequence Number=SeqID_10738
  Gene Ontology: Mol. function=nucleotide binding; Cellular component =nucleus; Biological process=defense response
  Homolog annotation: Hit_ID=Q5ZAJ3; Match level="QueryCoverage=94%, HitCoverage=17%, E-value=2e-47, Identity=59%"; Hit description =Putative powdery mildew resistance protein PM3b
GQHGGRGHFPGPLVKEKASSYLLDQYKVMEGMEEQHEKLKVMLPAILEKITDAEKQATSREAIRPWLEKLKVAAYEAIQVFDEFNYEALRRQAKKEGRYIELGMGNRIMFRYKMGNKLRKIVRDTEALVEHMRNFGFDKQPQAQVQINYLRENDSTMVDPEIVSRSRDEEKQKIVRMLV

SEQ ID NO: 76713 - protein, 150 aa, Setaria italica
  Transcript Sequence Number=SeqID_10739
  Gene Ontology: Mol. function=transcription regulator activity; Cellular component=nucleus
  Homolog annotation: Hit_ID=B6T7Q8; Match level="QueryCoverage=90%, HitCoverage=55%, E-value=7e-29, Identity=54%"; Hit description=DNA binding like
ALESSSDTAATVKTEDHAAAGDADSYPRRTKRTRTAAADGGSVTLSVDDASPPVQILEVVVSEAGEKMAVVSVRCSRGRDAVAKVCRALEPLRLRVVTASIAAAGDAFVHTMFVEIEEMSGAQLKETIEAALAHLDVTRHSLKTKRYWED

SEQ ID NO: 76714 - protein, 99 aa, Setaria italica
  Transcript Sequence Number=SeqID_10740
  Gene Ontology: Mol. function=ubiquitin-protein ligase activity; Cellular component=ubiquitin ligase complex; Biological process =ubiquitin-dependent protein catabolic process
  Homolog annotation: Hit_ID=Q6DBN5; Match level="QueryCoverage=90%, HitCoverage=24%, E-value=2e-26, Identity=67%"; Hit description=U-box domain-containing protein 62
EDKCGNDDPNPTELSRGKGVQFPFSVFDRVIIKGNKRTPERFVGRQAVVTAQCLNGWYVVKTLDNAESVKLQYRSLEKAADGNGASAMVSSNAQSASWL

SEQ ID NO: 76715 - protein, 59 aa, Setaria italica
  Transcript Sequence Number=SeqID_10741
  Gene Ontology: Mol. function=metal ion binding
  Homolog annotation: Hit_ID=A2Q4Q8; Match level="QueryCoverage=76%, HitCoverage=17%, E-value=1e-10, Identity=64%"; Hit description=Zinc finger, RING-type
WWGHNVSVHSRCRNAKSKSCPFCRACLEEVKPGSLWVFTDDSDVVDMDTLTRENIRRLF

SEQ ID NO: 76716 - protein, 159 aa, Setaria italica
  Transcript Sequence Number=SeqID_10742
  Gene Ontology: Mol. function=oxidoreductase activity, acting on the CH-OH group of donors, NAD or NADP as acceptor; Cellular component =cytoplasm; Biological process=isocitrate metabolic process
  Homolog annotation: Hit_ID=Q7F280; Match level="QueryCoverage=73%, HitCoverage=28%, E-value=1e-60, Identity=97%"; Hit description=NADP -specific isocitrate dehydrogenase
VCPDGKTIEAEAAHGTVTRHFRVHQKGGETSTNSIASIFAWTRGLAHRAKLDDNARLLDFALKLEAACVGTVESGKMTKDLALLVHGSANVTRSHYLNTEEFIEAVAAELRSRLAANFWWSFLAVDILGKSEDWVPLIELLRLFVVVGYTNEVLRFCHQ

SEQ ID NO: 76717 - protein, 108 aa, Setaria italica
  Transcript Sequence Number=SeqID_10743
LHSFVVLCETNLLSLISQYLDNNSQIQTKRYSVLQCCNSNLAPQIRQTKHGLKVLCNCTGIILSSLPPHRLSRPVKPRLKAAGTVNSMLLRSIASRYCCSCSVTKSVL

SEQ ID NO: 76718 - protein, 256 aa, Setaria italica
  misc_feature (9)..(9): Xaa can be any naturally occurring amino acid
  Transcript Sequence Number=SeqID_10744
  Gene Ontology: Mol. function=hydrolase activity
  Homolog annotation: Hit_ID=B9R7H1; Match level="QueryCoverage=87%, HitCoverage=22%, E-value=1e-106, Identity=79%"; Hit description =Hydrolase, putative
FDLMVSVTXFVGRFDMRMMQAAMKGPTDDAQNADLLYDYFNEREDLWFDFVADTGDGGNSSYTVARLLAQPSIRTVIGGSMHTLPRGNLLLIGGDLAYPNPSSFTYERRFFRPFEYALQPPPWYRAEHIALDKPELPPGVSKMSEYDGPQCFIIPGNHDWFDGLHTFMRYICHKSWLGGWFLPQKKSYFALQLPKGWWIFGLDLSLHGDVDVYQFKFFADLCQKKHMVRGCGIFYCLTGTTYECKAAYPSYDESSG

SEQ ID NO: 76719 - protein, 271 aa, Setaria italica
  Transcript Sequence Number=SeqID_10745
  Gene Ontology: Mol. function=phosphatidylinositol binding; Cellular component=clathrin coat; Biological process=clathrin coat assembly
  Homolog annotation: Hit_ID=Q651U7; Match level="QueryCoverage=77%, HitCoverage=35%, E-value=6e-46, Identity=53%"; Hit description =Phosphoprotein-like
STSEKHPPSIKSVESEEPKLLTYDQQAPEEPEKPAEEEKEEPEQEPEPQPEPEPEPQPQQTTGDLLNLDAEVNPLVTELEESNALALAIVAPDDQNKGSASQNLFDVNSSGWELALVTAPSTHTSQPVKTNLAGGFDKLLLDSLYEDEARRKQIASVTYTGSLGAANPFEANASDPFAMSSSFAPPSNVQLALMTQQQQHYYQAQQQYFQPQQHQHFQQQQQIMAMPTPTMYHHQYQYAAPPSGAPNPFGDPFSDLVAVAAPGKHSNSSLL

SEQ ID NO: 76720 - protein, 69 aa, Setaria italica
  Transcript Sequence Number=SeqID_10746
FFILLAVHHQHIDIKLSLNILVVHAFHPASSLTLAKLVYNLTLLLRLQSFSFKPSTLMLEKDGMTMNLK

SEQ ID NO: 76721 - protein, 338 aa, Setaria italica
  misc_feature (108)..(108): Xaa can be any naturally occurring amino acid
  Transcript Sequence Number=SeqID_10747
  Gene Ontology: Mol. function=nucleotide binding; Cellular component =nucleus; Biological process=defense response
  Homolog annotation: Hit_ID=C3V015; Match level="QueryCoverage=99%, HitCoverage=46%, E-value=1e-99, Identity=56%"; Hit description =Putative resistance protein
  Pfam annotation: Domain name=NB-ARC; Domain location=3-135; Score= -97.7; E_value=0.0026; Accession=PF00931.14; Description=NB-ARC domain
GTVEEHGIARLDNKFIKEIIEAKAFISQERKPADLAGLVDDVVERCAGSPLAAKALGSVLRGKTTKEWEAVLSKSIAHNKDDQILPILKLSYDDLPSHMKQCFAFCAXFPKDHEINVERLIQVWMANDFIPEQKDVRHETIGKQIFSELVSRSFFEDVKQDKWQANDDVYWYCTTSTCKIHDLMHDVALSVMGKEVATITEKPKQSDEFLQNTCRHILLLCGMPEAVLNDSLNIGSPAMQTLLCYQHIEGSLQHLATYSSLRALRLWQNNSTIPLKPKQLHLLRYLDISFSDIVALPEDISILYNLQTLNVAYCPKLGWLPKGIKCMTALRHLYTHGW

SEQ ID NO: 76722 - protein, 86 aa, Setaria italica
  Transcript Sequence Number=SeqID_10748
FIQYLISLFSILSPSLVHSLGIQGGYSAAPPIQNFRSSSLKYYHVHFLNGLMSFISEERRCVSAQNSGIQHVHFQRCKLYLIRFNS

SEQ ID NO: 76723 - protein, 215 aa, Setaria italica
  Transcript Sequence Number=SeqID_10749
  Gene Ontology: Mol. function=nucleotide binding; Cellular component =nucleus; Biological process=defense response
  Homolog annotation: Hit_ID=Q852D5; Match level="QueryCoverage=93%, HitCoverage=15%, E-value=4e-48, Identity=57%"; Hit description =Powdery mildew resistance protein PM3b, putative, expressed
  Pfam annotation: Domain name=LRR_1; Domain location=141-163; Score =6.3; E_value=19; Accession=PF00560.25; Description=Leucine Rich Repeat
  Pfam annotation: Domain name=LRR_1; Domain location=165-184; Score =3.2; E_value=75; Accession=PF00560.25; Description=Leucine Rich Repeat
  Pfam annotation: Domain name=LRR_1; Domain location=19-38; Score=1.2; E_value=1.8e+02; Accession=PF00560.25; Description=Leucine Rich Repeat
  Pfam annotation: Domain name=LRR_1; Domain location=96-118; Score =7.5; E_value=11; Accession=PF00560.25; Description=Leucine Rich Repeat
  Pfam module annotation: Pfam domain module=LRR_1::LRR_1::LRR_1::LRR _1; Domain location=141-163::165-184::19-38::96-118
FLSLKECPSLVQVPKLPASLKVLEIYNSHMLGSIIFSQQEDTSSLIPGSIGEARASTAVLKLSSSTSHPFLPCLELLGVDIMCCSGLSDVANLPPSIKILSIRDCDNLRSLSGQLDALQTLQIVECSKLKSLESCLGGLPSLEVLGLWNCRSLQSLPNGPQAYSYLRSLLIKSCPGIKLLPPSLQQRLDHLEEKILDARYEGWEYSIRRRLACLK

SEQ ID NO: 76724 - protein, 91 aa, Setaria italica
  Transcript Sequence Number=SeqID_10750
  Gene Ontology: Cellular component=integral to membrane; Biological process=protein transport
  Homolog annotation: Hit_ID=Q60EA5; Match level="QueryCoverage=74%, HitCoverage=24%, E-value=2e-28, Identity=92%"; Hit description =Secretory carrier-associated membrane protein 3
  Pfam annotation: Domain name=SCAMP; Domain location=1-73; Score= -53.5; E_value=0.00088; Accession=PF04144.5; Description=SCAMP family
MFYLFTVHTTIQGFCGTNYLCCFISGILPAIDVISKSAIVGIFYFVGFGLFCLESLLSIAVIQQVYMYFRGSGKAAEMKREAARGALSSAF

SEQ ID NO: 76725 - protein, 119 aa, Setaria italica
  Transcript Sequence Number=SeqID_10751
  Subcellular localization annotation: CTP_CleavageSite=58; ConfidenceScore=5.08e-01
CPHQHQQSPINLSVILHSSSCPSPAYRHKAFSKYFGYPRFPDTSAQFAIVQLQAFNPNARKGWHDSISCFHYYAGIIIFESISLLSFAGESLMVFCSCFLPVLSDTNDMNAKSCHNRRK

SEQ ID NO: 76726 - protein, 213 aa, Setaria italica
  Transcript Sequence Number=SeqID_10752
  Gene Ontology: Mol. function=serine-type endopeptidase inhibitor activity
  Homolog annotation: Hit_ID=P29421; Match level="QueryCoverage=84%, HitCoverage=85%, E-value=1e-44, Identity=57%"; Hit description=Alpha- amylase/subtilisin inhibitor
  Pfam annotation: Domain name=Kunitz_legume; Domain location=31-207; Score=170.5; E_value=4.9e-48; Accession=PF00197.10; Description =Trypsin and protease inhibitor
MGGPAGAVRLLLLLLSVLAASLSRVAAAPSPVYDMDGHELSADADYYVLPAPRGSGGGGGGGLTMAPHTFRCPLFVAQEDDPLRRGFPVRFTPLHGHGGDRTVRVSFDVAIHFAAVTTCVQTTEWHVAGRGDEPFASGPRHVVTGPVLAPTAGGRERVFRVERHSHGYILVWCGVPTECEELGVFRDERDRAWLAVSDEPHVVVFKKAPPTPA

SEQ ID NO: 76727 - protein, 221 aa, Setaria italica
  Transcript Sequence Number=SeqID_10753
  Gene Ontology: Mol. function=protein binding; Cellular component =mitochondrion; Biological process=ubiquinone biosynthetic process
  Homolog annotation: Hit_ID=B6TJ85; Match level="QueryCoverage=99%, HitCoverage=69%, E-value=1e-125, Identity=97%"; Hit description =Ubiquinone biosynthesis protein COQ9
  Pfam annotation: Domain name=COQ9; Domain location=113-191; Score =168.7; E_value=1.8e-47; Accession=PF08511.3; Description=COQ9
AGYEEEQEKVLRASLLHVPRMGWSESAMVAGARDVGISPAIVGAFPRKEAALVEFFMDDCLQQLMDRIDAGEGEQLKNLILSERLSKLVRMRLEMQAPYISKWPQALSIQSQPANVSTSLKQRAVLVDEIWHAAGDVGSDIDWYVKRTVLGGIYSTSEVYMLTDNSPEFRDTWTFVNRRIKDALDLQKTFQEAAYLAEAIGAGMGGTVQGVLNRVFQNRGS

SEQ ID NO: 76728 - protein, 161 aa, Setaria italica
  misc_feature (38)..(38): Xaa can be any naturally occurring amino acid
  misc_feature (92)..(92): Xaa can be any naturally occurring amino acid
  Transcript Sequence Number=SeqID_10754
  Gene Ontology: Mol. function=structural molecule activity; Cellular component=protein complex; Biological process=microtubule-based movement
  Homolog annotation: Hit_ID=P29510; Match level="QueryCoverage=99%, HitCoverage=35%, E-value=6e-69, Identity=83%"; Hit description =Tubulin alpha-2/alpha-4 chain
  Pfam annotation: Domain name=Tubulin; Domain location=5-161; Score =56.4; E_value=1.1e-13; Accession=PF00091.17; Description=TubulinFtsZ family, GTPase domain
CCLFCSVQADGQMPGDKTVGGGDDAFNTFFSETGAGKXHVPRAVFVDLEPTVIDEVRTGTYRQLFHPEQLISGKEDAANNFARGHYTIGKEXLFDLCLDRIRKLADNCTGLQGFLVFNAVGGGTGSGLGSLLLERLSVDYGKKSKLGFTVYPSPQVSTSVV

SEQ ID NO: 76729 - protein, 104 aa, Setaria italica
  misc_feature (2)..(2): Xaa can be any naturally occurring amino acid
  misc_feature (9)..(9): Xaa can be any naturally occurring amino acid
  misc_feature (14)..(14): Xaa can be any naturally occurring amino acid
  misc_feature (29)..(29): Xaa can be any naturally occurring amino acid
  Transcript Sequence Number=SeqID_10755
  Gene Ontology: Biological process=auxin mediated signaling pathway
  Homolog annotation: Hit_ID=B6ST80; Match level="QueryCoverage=100%, HitCoverage=88%, E-value=6e-27, Identity=64%"; Hit description=Auxin- repressed 12.5 kDa protein
  Pfam annotation: Domain name=Auxin_repressed; Domain location=2-104; Score=137.6; E_value=3.8e-38; Accession=PF05564.4; Description =Dormancyauxin associated protein
KXWDDVVAXGPHPXTGLEKLRKAATSRPXVIDKDAVAAAGSYKRTQSMPSTPTTPGTPSSSTTPRGGNNVWRSVFHPGSNLATKSMGANLFDRPQPNSPTVYDW

SEQ ID NO: 76730 - protein, 101 aa, Setaria italica
  Transcript Sequence Number=SeqID_10756
QAIWSIRTALPKTEALIHMSRAGWSRPSIPISHMFSAEKFRDLISIRILLLVYCCSSRVPQDPKGERAVGSSPPPWPIQSVPVCTHALVVEGGNSGLAFSV

SEQ ID NO: 76731 - protein, 601 aa, Setaria italica
  misc_feature (209)..(209): Xaa can be any naturally occurring amino acid
  misc_feature (523)..(523): Xaa can be any naturally occurring amino acid
  Transcript Sequence Number=SeqID_10757
  Gene Ontology: Mol. function=transcription factor activity; Cellular component=nucleus; Biological process=regulation of transcription, DNA-dependent
  Homolog annotation: Hit_ID=Q852D5; Match level="QueryCoverage=100%, HitCoverage=46%, E-value=1e-169, Identity=58%"; Hit description =Powdery mildew resistance protein PM3b, putative, expressed
  Pfam annotation: Domain name=LRR_1; Domain location=110-132; Score =14.9; E_value=0.34; Accession=PF00560.25; Description=Leucine Rich Repeat
  Pfam annotation: Domain name=LRR_1; Domain location=265-286; Score =10.4; E_value=3.1; Accession=PF00560.25; Description=Leucine Rich Repeat
  Pfam annotation: Domain name=LRR_1; Domain location=412-433; Score =8.4; E_value=7.7; Accession=PF00560.25; Description=Leucine Rich Repeat
  Pfam annotation: Domain name=LRR_1; Domain location=578-599; Score =6.4; E_value=18; Accession=PF00560.25; Description=Leucine Rich Repeat
  Pfam annotation: Domain name=LRR_1; Domain location=86-108; Score =10.4; E_value=3.1; Accession=PF00560.25; Description=Leucine Rich Repeat
  Pfam module annotation: Pfam domain module=LRR_1::LRR_1::LRR_1::LRR _1::LRR_1; Domain location=110-132::265-286::412-433::578-599::86-108
CAALSKSGDFPHSPRHLLLLETFLNDSQEKGTKDKVKDKDKDNDVIQTVICEADVYVDLQLLSKYMSPRALKIKINRASLLGPLHHLRYLDLSGSYDIKSLPEDISILYHLQTLNLSGCHNLERLPKGMKYMTALRHLYTHGCWELKSMPADLRYLTSLQTLTCFVAGAGSDCSRVGELRRLDDLGGQLELKQLENVKEADAKEAKLGXEKLARLTLRWSDCDKEAHNSDKEVLEGLEPHDGLKVLKIYSCGIDTCPTWMNKLQGIVELELSDCKRLENLPAFWQLPALQILCLCGLENIRYLCSSDTAFTFQKLKNLAIFKLPNFEIWWGTSEVRGEMPMFPLLEKLLINECKSLAALPKASVIKETSEGVKTEYKSAFPALKEMELENLEMFQRWEDGEGTPGEELTFHRLEKLIIRSCPALTTLPEAPKLSVLEVQGASQQILSLHAASRYITSSSSLRLFGDNTETESVAEQNSSELVHGREKWEHRSPLTRMFLRRYNLLFSHSSALPLWTCFAQLVXLKICECDALVYWPENVFQALLSLRTLYIWQCSKLTGRTQETSEQSAPERSGLLPCLESLQLSFCPSLVEVPNLPASLK

SEQ ID NO: 76732 - protein, 216 aa, Setaria italica
  misc_feature (57)..(57): Xaa can be any naturally occurring amino acid
  misc_feature (86)..(86): Xaa can be any naturally occurring amino acid
  misc_feature (116)..(116): Xaa can be any naturally occurring amino acid
  Transcript Sequence Number=SeqID_10758
  Gene Ontology: Mol. function=hydrolase activity, acting on carbon -nitrogen (but not peptide) bonds, in cyclic amides; Cellular component=mitochondrion; Biological process=pyrimidine base biosynthetic process
  Homolog annotation: Hit_ID=B6U6Z4; Match level="QueryCoverage=91%, HitCoverage=54%, E-value=1e-99, Identity=82%"; Hit description =Dihydroorotase
FIFCCTSLCSGFYGYLVIFLQVHGEVTDPHVDTFDREKVFIDRILAPLVQNLPQLKXVMEHITTMDAVNFIESCEEGHVAATVTPXHLLLNRNALFQGGLQPHNYCLPVLKRETHXAPHDKRNKERYCGCAGIYSAPVALSLYAKVFEEAGALDKLEAFTSFNGPDFYGLPRNTSKIVLKKSAWKVPATYTYSSGEIVPMFTGCTLKWLPSDQTEE

SEQ ID NO: 76733 - protein, 106 aa, Setaria italica
  misc_feature (80)..(80): Xaa can be any naturally occurring amino acid
  misc_feature (91)..(91): Xaa can be any naturally occurring amino acid
  Transcript Sequence Number=SeqID_10759
  Subcellular localization annotation: CTP_CleavageSite=84; ConfidenceScore=5.30e-01
FQTRRENGKQKGTGTPWGKRTRGKKTSPVRSPPPDTRIFFIPWPAMRAHPTWQRPLSKSHLFSFFCPQRTPTRRRNLTCXTLPRLFKAARXHLLDLLIIIEIHPII

SEQ ID NO: 76734 - protein, 160 aa, Setaria italica
  Transcript Sequence Number=SeqID_10760
  Gene Ontology: Mol. function=transferase activity, transferring groups other than amino-acyl groups
  Homolog annotation: Hit_ID=B4F922; Match level="QueryCoverage=58%, HitCoverage=19%, E-value=7e-34, Identity=78%"; Hit description =Acyltransferase
VVLNEFCIAGFVPFHALVHTVLLCAAAFSTTIVPFHLLQFFTSVCRCCKTKKKHKKTLQFTKLKDGLAVGCAFNHAVLDGTSTWHFMSYWAELSRTGGGKEASSQQLPPQPIHERSLARSVRVRLDLPESAEAHEKTDPNGPKKALVARVFSFPEPSRWS

SEQ ID NO: 76735 - protein, 148 aa, Setaria italica
  Transcript Sequence Number=SeqID_10761
  Gene Ontology: Mol. function=ketol-acid reductoisomerase activity; Cellular component=chloroplast; Biological process=branched chain family amino acid biosynthetic process
  Homolog annotation: Hit_ID=Q05758; Match level="QueryCoverage=85%, HitCoverage=21%, E-value=1e-65, Identity=91%"; Hit description=Ketol- acid reductoisomerase, chloroplastic
  Pfam annotation: Domain name=IlvC; Domain location=1-144; Score=55.9; E_value=1.5e-13; Accession=PF01450.11; Description=Acetohydroxy acid isomeroreductase, catalytic domain
FRYLGYERFYEKEGLPAFPMGNIDQTRMWKVGEKVRSTRPEGDLGPLHPFTAGVYIALMMAQIEILRKKGHSYSEIINESVIESVDSLNPFMHARGVAFMVDNCSTTARLGSRKWAPRFDYILTQQAFVMRSWLIGASLSTVTKACCV

SEQ ID NO: 76736 - protein, 153 aa, Setaria italica
  Transcript Sequence Number=SeqID_10762
  Gene Ontology: Mol. function=aspartic-type endopeptidase activity; Biological process=proteolysis
  Homolog annotation: Hit_ID=B9ST28; Match level="QueryCoverage=99%, HitCoverage=31%, E-value=7e-55, Identity=69%"; Hit description =Aspartic proteinase nepenthesin-1, putative
  Subcellular localization annotation: CTP_CleavageSite=62; ConfidenceScore=5.47e-01
AMTGISVGGQALSIPTSAFAMDATSGSGGVIVDSGTAVTRLQSAAYAALRDAFVRGTPSLPRSSGVSLFDTCYDLSGRTSVEVPAVSLRFEGGGSLRLPAKNYLIPVDGAGTYCLAFAPTNAAVSIIGNVQQQGTRVSFDTAKGAVGFTPNKC

SEQ ID NO: 76737 - protein, 78 aa, Setaria italica
  Transcript Sequence Number=SeqID_10763
NMSSLIDLFMSHWHQQSPINLSVILHSSSSPSFILLVVHHQHIGIKLSLNILAVDAFLQFMNTQNSEAHICLCFSTDQ

SEQ ID NO: 76738 - protein, 191 aa, Setaria italica
  Transcript Sequence Number=SeqID_10764
  Gene Ontology: Mol. function=protein kinase activity; Cellular component=condensed nuclear chromosome kinetochore; Biological process=protein amino acid phosphorylation
  Homolog annotation: Hit_ID=B6U2B3; Match level="QueryCoverage=72%, HitCoverage=35%, E-value=1e-57, Identity=77%"; Hit description =Mitotic spindle checkpoint component mad3
  Pfam annotation: Domain name=Mad3_BUB1_I; Domain location=59-178; Score=185.4; E_value=1.7e-52; Accession=PF08311.4; Description =Mad3BUB1 homology region 1
  Subcellular localization annotation: CTP_CleavageSite=49; ConfidenceScore=5.50e-01
LSPPLHVPPLAGPPPAAPPRAAPRWSSTHHPSTRGPAFGGGAAHADPAREMRDPARLLLSPRLRSYEYQGEDPLQPWLDCIKWVQESFPTDGECSELVVLYEQCVQTFWHDERYKDDLRFLEVWLEYAGNCTDAEVIYKFLEANQIGQGHAIYYMSYVSLLEAKNKLRKANEIFDLGIARWDFHETVTCCS

SEQ ID NO: 76739 - protein, 140 aa, Setaria italica
  Transcript Sequence Number=SeqID_10765
  Gene Ontology: Mol. function=isomerase activity; Cellular component =integral to membrane; Biological process=protein folding
  Homolog annotation: Hit_ID=B4FDQ2; Match level="QueryCoverage=77%, HitCoverage=28%, E-value=1e-47, Identity=87%"; Hit description =Peptidyl-prolyl isomerase
  Pfam annotation: Domain name=TPR_1; Domain location=41-74; Score =25.0; E_value=0.0003; Accession=PF00515.20; Description =Tetratricopeptide repeat
  Pfam annotation: Domain name=TPR_2; Domain location=41-74; Score =25.6; E_value=0.0002; Accession=PF07719.9; Description =Tetratricopeptide repeat
  Pfam module annotation: Pfam domain module=TPR_1::TPR_2; Domain location=41-74::41-74
SIEQSHVPTAKLPFVCKITVFDGQSFRYLILQVLSEDESNVKALFRRGKAKSELGQTESAREDFLKAKKYSPEDKEILRELRLLAEQDKVLYQKQKELYKGLFGPRPEVKPKKANYLAIFWQWLVSLIHYLIRMFKRKNE

SEQ ID NO: 76740 - protein, 55 aa, Setaria italica
  Transcript Sequence Number=SeqID_10766
  Gene Ontology: Mol. function=helicase activity
  Homolog annotation: Hit_ID=Q2R0Z1; Match level="QueryCoverage=76%, HitCoverage=1%, E-value=5e-17, Identity=88%"; Hit description=AT hook motif-containing protein, putative
TPASQGFVMNYQDAMAICRVYGPPDLFVTFTCNSKWREIADALRYEPVQARMHEQ

SEQ ID NO: 76741 - protein, 134 aa, Setaria italica
  Transcript Sequence Number=SeqID_10767
ILLESTGKLQLRCDVSRLVKMFVQTRAYCMPTLLQTHIDGAAKFRGNRATSRLPPSSTRAICNNMRSASSPSRLLRMLLLLIALCDDGNRRLVRFCSSPCRSNFHLLGRRGGHVSERRRGRRRHRLARAPPNIG

SEQ ID NO: 76742 - protein, 124 aa, Setaria italica
  Transcript Sequence Number=SeqID_10768
MGNCTASQRAVESWADDGEWEEEASSSEEGDHHHHHHDHRHHERPEEHASEVTIRITKRQLHELMEKRASGGHGLQLPVLGLGSRRSTEQLLADIMNSGEVHHHREEHWHWKPALQSIPEAVES

SEQ ID NO: 76743 - protein, 139 aa, Setaria italica
  Transcript Sequence Number=SeqID_10769
  Subcellular localization annotation: CTP_CleavageSite=30; ConfidenceScore=5.58e-01
TRVNIPSTSLRSVANSVNSPGSLDPQKQVSISKTSTNQTCDDASTIFQRSYVLFIWLTPCFYSTVFMILAYFWSVINSSFSYDVISLLPYLYALHMYFNDHRILMDLRCLPYIDGIRLFTISMDLGHTLFTWQIVIEQL

SEQ ID NO: 76744 - protein, 505 aa, Setaria italica
  misc_feature (271)..(271): Xaa can be any naturally occurring amino acid
  Transcript Sequence Number=SeqID_10770
  Gene Ontology: Mol. function=electron carrier activity; Biological process=oxidation reduction
  Homolog annotation: Hit_ID=C5IAW0; Match level="QueryCoverage=100%, HitCoverage=100%, E-value=0.0, Identity=78%"; Hit description =Cinnamate-4-hydroxylase
  Pfam annotation: Domain name=p450; Domain location=34-499; Score =502.4; E_value=5.9e-148; Accession=PF00067.14; Description =Cytochrome P450
MDLRFAEKLLIGLFASVVVAIAVSKLRGRKLRLPPGPVPVPIFGNWLQVGDDLNHRNLAALARRFGDIFLLRMGQRNLVVVSSPPLAREVLHTQGVEFGSRTRNVVFDIFTGKGQDMVFTVYGDHWRKMRRIMTVPFFTNKVVQQYRAGWEAEAAAVVDDVRADPSAATEGVVLRRRLQLMMYNNMYRIMFDRRFESMDDPLFLRLRALNGERSRLAQSFEYNYGDFIPILRPFLRGYLRICKEVKETRLKLFKDFFLEERKKLASTKAMXNNGLKCAIDHILEAQQKGEINEDNVLYIVENINVAAIETTLWSIEWAIAELVNHPEIQRKLRQELDAALGPGHQITEPDTHRLPYLQAVIKETLRLRMAIPLLVPHMNLHDAKLGGYDVPAESKILVNAWYLANNPDSWRRPEEFRPERFLEEERHVEANGNDFRYLPFGVGRRSCPGIILALPILGITIGRLVQNFELLPPPGQDKIDTTEKGGQFSLHILKHSTIVCKPRAF

SEQ ID NO: 76745 - protein, 285 aa, Setaria italica
  Transcript Sequence Number=SeqID_10771
  Subcellular localization annotation: CTP_CleavageSite=57; ConfidenceScore=5.81e-01
QFGPPPQSSPPALPPTNYSPSPTLSPPATPPTYSQSPPSVSSPPATPPQQSSSPPPSSNTPTTPPTYQPNNPPPQPPSTPPTLSPPQFGPPPQSSPPALPPTNYSPSPTLSPPATPPTYSQPPPSPTSPSASPPTNQANNQPSPSPPMSSITPATSPGYNQPPPSPSPSSPGAPPTGQTQGQAPPSYSVPDWTKGWQQIYNFHDALYWQIGKSVVQQLTKNNQYLNLVDVLWASMMPAGIGNNYFLVLKMADEYKKVGKYHTFVWGVPQQQEFQWKVLSFQYIGN

SEQ ID NO: 76746 - protein, 256 aa, Setaria italica
  misc_feature (93)..(93): Xaa can be any naturally occurring amino acid
  Transcript Sequence Number=SeqID_10772
  Homolog annotation: Hit_ID=B6TKA2; Match level="QueryCoverage=100%, HitCoverage=78%, E-value=1e-136, Identity=96%"; Hit description=Non -imprinted in Prader-Willi/Angelman syndrome region protein 1
  Pfam annotation: Domain name=DUF803; Domain location=1-234; Score =384.5; E_value=1.8e-112; Accession=PF05653.6; Description=Protein of unknown function (DUF803)
FAAYAFAPAVLVTPLGALSIIFSAVLAHFILKENLHMFGVVGCILCVVGSIGIVLHAPKERKIDSMKEIWHLATQPGFIVYSCVAVACVLFLXIFRVVERSGHRLMLVYIAICSLMGSLTVISVKAVAIALKLSFSGSNQFIYVQTWFFIVVVTICCLVQLNYLNKALDSFNTAVVSPVYYVMFTILTIFANMIMYKDWASQTATQIATQLCGFVTIVAGTFLLHKTRDMGNPPPPDQVCLEEARECAPRSMNSSS

SEQ ID NO: 76747 - protein, 259 aa, Setaria italica
  Transcript Sequence Number=SeqID_10773
  Gene Ontology: Mol. function=metal ion binding
  Homolog annotation: Hit_ID=B9RNL9; Match level="QueryCoverage=61%, HitCoverage=29%, E-value=4e-40, Identity=51%"; Hit description=Ring finger protein, putative
  Pfam annotation: Domain name=zf-C3HC4; Domain location=210-250; Score= 32.0; E_value=2.4e-06; Accession=PF00097.17; Description=Zinc finger, C3HC4 type (RING finger)
SVRTRRPSHATTLRAPDERADGMLSLHESSTRNGLSAQEHLSLEEVSAESSIRPFFVELPHDIYSSSRHHSSNTRAERGRPSSLFEESPPQMFHGLMGERNDHRRITMGGIAEVLLALQRTEQEAELAYEQLLVLDTNLFLGAFASHDRHRDMRMDIDNMSYEELLALEERIGSVSTALSDEQFAKCLRRSIYCPVATGVHKSVIDDMKCSICQEEYKEGEEVGRLPCEHRYHVCCIGQWLRQKNWCPVCKASAVPSMG

SEQ ID NO: 76748 - protein, 145 aa, Setaria italica
  Transcript Sequence Number=SeqID_10774
AQQQSHGTWRIWFPGSHIEFSMLLPKDAFKLTGSCCGRRFVHGQCIHRGARTPCHHGRRASFHGASCERGRGSTVVHKHGGRGASFHVASCRESTMAASSCERGRREGLLLYRSSRRERVVGRPRERVGRGKDLPTPVTLSMRGW

SEQ ID NO: 76749 - protein, 172 aa, Setaria italica
  Transcript Sequence Number=SeqID_10775
  Homolog annotation: Hit_ID=Q67QT7; Match level="QueryCoverage=64%, HitCoverage=82%, E-value=4e-16, Identity=42%"; Hit description=SrfB or ComAB
  Pfam annotation: Domain name=4HBT; Domain location=51-128; Score =72.8; E_value=1.2e-18; Accession=PF03061.14; Description =Thioesterase superfamily
MDQQRQQISSKDDKTAELDPVLHSLGFEIEEVSPSQLTGRLPVTARCCQPFKVLHGGVSALIAEGLASMGAHMASGYRRVAGVSLSINHFRSAAVGDVVLARAAPVHVGRSTQVWEVKLWKQEPSSSSPGKKGPQISESRVTLLCNLPVPENLKNAGDALKKYAAAATISRL

SEQ ID NO: 76750 - protein, 184 aa, Setaria italica
  Transcript Sequence Number=SeqID_10776
  Subcellular localization annotation: CTP_CleavageSite=27; ConfidenceScore=5.71e-01
MPTRKAPPPPAGGRISATPHRGRTSARGSSPASTCPRRRSATLLHSRWRISSWLVTYDRIMDAKEKPETTSSMPQRRPDCIKCFDALWFCYSPFHQMQNYYRYGEFDNCFGKWGDLVDCLALKTKRAAEAEEILIAREKAKPHIWTFRTVDEASENWWRMYKHLVLMSPPLPGAAQPPPKSDKS

SEQ ID NO: 76751 - protein, 268 aa, Setaria italica
  Transcript Sequence Number=SeqID_10777
  Gene Ontology: Mol. function=ATP binding
  Homolog annotation: Hit_ID=Q8LD16; Match level="QueryCoverage=96%, HitCoverage=48%, E-value=1e-130, Identity=85%"; Hit description=Mrp protein, putative
  Pfam annotation: Domain name=DUF971; Domain location=162-250; Score= -21.3; E_value=0.019; Accession=PF06155.4; Description=Protein of unknown function (DUF971)
  Pfam annotation: Domain name=ParA; Domain location=18-96; Score =164.2; E_value=3.8e-46; Accession=PF10609.1; Description=ParA family ATPase
  Pfam module annotation: Pfam domain module=DUF971::ParA; Domain location=162-250::18-96
MVSGVINQLLTTTDWGELDYLVIDMPPGTGDIHLTLCQVAPLTAAVIVTTPQKLAFIDVAKGVRMFSKLKVPCVAVVENMCYFDADGKRYYPFGQGSGTQVVQQFGIPNLFDLPIRPTLSASGDTGIPEVVADPQGDVAKTFQNLGVCVVQQCAKIRQQVSTAVSYDRSIRAIRVKVPDSDEEFLLHPATVRRNDRSAQSVDEWTGEQKIQYDDVPDDIEPEEIRPMGNYAVSITWPDGFSQIAPYDQLEMLERLVDAPRAATPAVAS

SEQ ID NO: 76752 - protein, 229 aa, Setaria italica
  Transcript Sequence Number=SeqID_10778
  Gene Ontology: Cellular component=integral to membrane
  Homolog annotation: Hit_ID=B6U8Q7; Match level="QueryCoverage=94%, HitCoverage=65%, E-value=4e-71, Identity=62%"; Hit description =Membrane protein
  Pfam annotation: Domain name=FUSC; Domain location=82-197; Score= -39.5; E_value=0.09; Accession=PF04632.4; Description=Fusaric acid resistance protein conserved region
  Pfam annotation: Domain name=Rhomboid; Domain location=47-191; Score =203.6; E_value=5.3e-58; Accession=PF01694.14; Description=Rhomboid family
  Pfam module annotation: Pfam domain module=FUSC::Rhomboid; Domain location=82-197::47-191
APTRRGGACVARGFLHRFAFQPLSENPLLGPSSATLQKLGALVWDKVVHEHQGWRLLTCIWLHAGVVHLLANMLSLVLVGLRLEQQFGYVRIAIIYIVSGVGGSVLSSLFIRNNISVGASGALFGLLGAMLSELFTNWTIYSNKAAALLTLLVVIAINLAIGILPHVDNFAHIGGFLTGFLLGFIFLMRPHYGWMQRYVRPSDVKYTSKKYLPYQWVLLAVASVLAVLG

SEQ ID NO: 76753 - protein, 149 aa, Setaria italica
  misc_feature (68)..(68): Xaa can be any naturally occurring amino acid
  Transcript Sequence Number=SeqID_10779
  Gene Ontology: Mol. function=methyltransferase activity; Cellular component=chloroplast; Biological process=metabolic process
  Homolog annotation: Hit_ID=B6TPM1; Match level="QueryCoverage=87%, HitCoverage=35%, E-value=2e-58, Identity=85%"; Hit description=S -adenosylmethionine-dependent methyltransferase
  Pfam annotation: Domain name=Methyltransf_11; Domain location=15-124; Score=90.5; E_value=6.1e-24; Accession=PF08241.4; Description =Methyltransferase domain
  Pfam annotation: Domain name=Methyltransf_12; Domain location=15-122; Score=37.6; E_value=4.9e-08; Accession=PF08242.4; Description =Methyltransferase domain
  Pfam module annotation: Pfam domain module=Methyltransf _11::Methyltransf_12; Domain location=15-124::15-122
MAKTYLNPTIGGTIVDASCGSGLFSRLFVKSGLYSLVVALDFSENMLKQCNEYVKQENISDEYGFDHXGFFLLALVRADISRLPFVNGSIDAVHAGAAIHCWPSPACAVAEISRVLRSGGIFVASTFVADVIPPAIPILRIARPVMAFS

SEQ ID NO: 76754 - protein, 69 aa, Setaria italica
  Transcript Sequence Number=SeqID_10780
  Gene Ontology: Mol. function=metal ion binding; Cellular component =chloroplast; Biological process=response to cadmium ion
  Homolog annotation: Hit_ID=B6SPL7; Match level="QueryCoverage=97%, HitCoverage=79%, E-value=3e-28, Identity=94%"; Hit description =Copper chaperone
  Pfam annotation: Domain name=HMA; Domain location=6-66; Score=68.9; E_ value=1.8e-17; Accession=PF00403.18; Description=Heavy-metal -associated domain
MAQTVVLRVGMSCEGCVGAVKRVLGKMEGVESYEVDIKEQKVTVKGNVTPDAVLQTVSKTGKKTSFLGD

SEQ ID NO: 76755 - protein, 126 aa, Setaria italica
  Transcript Sequence Number=SeqID_10781
HLCNVDYNIHHRCLSGNCNFMDITAHLITRLLYSSGLSDIWSIKYYSTFEQHGYPSNQRYLSVINITTVAHPRTIRGIYVINITTIAHPRTRLSIRRLSSIWSINIIAYPSTLNLYATSIHSYQTT

SEQ ID NO: 76756 - protein, 289 aa, Setaria italica
  Transcript Sequence Number=SeqID_10782
  Gene Ontology: Mol. function=transcription repressor activity; Cellular component=cytoplasm; Biological process=regulation of nitrogen utilization
  Homolog annotation: Hit_ID=P52580; Match level="QueryCoverage=87%, HitCoverage=81%, E-value=1e-89, Identity=64%"; Hit description =Isoflavone reductase homolog IRL
  Pfam annotation: Domain name=NmrA; Domain location=1-244; Score =253.9; E_value=3.9e-73; Accession=PF05368.5; Description=NmrA-like family
GVTLVKGDLYDHTSLVRPMKAADVVISALGTRQIADQTRLIAAIKDAGGVKRFLPSEFWTDVDHTAAVEPARSTVYASKASVRRAVEAAGVPHTYVLCGYLAGAALPSVGQVLSPAPPADEAVVLGGGDTKVSYVAEEDVGAYTVRAAADPRAAGRMLYVKPPANTLSHNELLSMWEKKTGRTFLRVYVAEDAVLKMIREASHALGIALSIGHAAYILGETNFKIEPSLGAAAGELYPDVEYTTVSEYLDRLLPTGSSGRYLQGHKGVLTSLTALCCVLLCIFVWMSHV

SEQ ID NO: 76757 - protein, 290 aa, Setaria italica
  misc_feature (195)..(195): Xaa can be any naturally occurring amino acid
  Transcript Sequence Number=SeqID_10783
  Gene Ontology: Mol. function=sequence-specific DNA binding; Cellular component=nucleus; Biological process=regulation of transcription, DNA-dependent
  Homolog annotation: Hit_ID=O80416; Match level="QueryCoverage=88%, HitCoverage=72%, E-value=1e-112, Identity=78%"; Hit description =Homeobox protein knotted-1-like 12
  Pfam annotation: Domain name=ELK; Domain location=171-192; Score =38.1; E_value=3.5e-08; Accession=PF03789.5; Description=ELK domain
  Pfam annotation: Domain name=Homeobox; Domain location=196-253; Score= -1.9; E_value=0.018; Accession=PF00046.21; Description=Homeobox domain
  Pfam annotation: Domain name=KNOX1; Domain location=24-68; Score =89.6; E_value=1.1e-23; Accession=PF03790.5; Description=KNOX1 domain
  Pfam annotation: Domain name=KNOX2; Domain location=71-122; Score =103.1; E_value=9.4e-28; Accession=PF03791.5; Description=KNOX2 domain
  Pfam module annotation: Pfam domain module=ELK::Homeobox::KNOX1::KNOX2 ; Domain location=171-192::196-253::24-68::71-122
AGPSSSSQSPYGRHAAEISPAEAEAIKAKIVAHPQYSALLAAYLDCQKVGAPPDVMERLTAMAAKLDARPPGRHEPRDPELDQFMEAYCNMLLKYREELTRPIDEAMEFLKRVEAQLDSIAGSATGGGSSAARLSLADGKSEGVGSSEDDMDPSGRENEPPEIDPRAEDKELKYQLLKKYSGYLSSLRQEFSKKXKKGKLPKEARQKLLHWWELHYKWPYPSETEKIALAESTGLDQKQINNWFINQRKRHWKPSEDMPFVMMEGFHPQNAAALYMDGTFMADGMYRLGS

SEQ ID NO: 76758 - protein, 236 aa, Setaria italica
  Transcript Sequence Number=SeqID_10784
  Gene Ontology: Mol. function=hydrolase activity, acting on glycosyl bonds; Cellular component=extracellular region; Biological process =polysaccharide catabolic process
  Homolog annotation: Hit_ID=P29022; Match level="QueryCoverage=82%, HitCoverage=69%, E-value=6e-85, Identity=73%"; Hit description =Endochitinase A
  Pfam annotation: Domain name=Glyco_hydro_19; Domain location=39-236; Score=370.7; E_value=2.6e-108; Accession=PF00182.11; Description =Chitinase class I
  Subcellular localization annotation: CTP_CleavageSite=22; ConfidenceScore=5.14e-01
MGNSSRQTTMTLTALALGLALLCAAGPCLGSGVASVSSVVSEAFFNGIKNQAGNGCEGKNFYTRGAFLTAADSFPGFAHGGSEADGKREVAAFFAHVTFETGYFCYISEINRANSFCDSNNKQWPCVPGKNYYGRGPLQISWNFNYGPAGKSIGVDLLADPDRVAKDPVISFKTALWIWMNSVHQAMPKGFGATIRAINGNLVCNGKNPDQMKMLVVYYKQYCQQLGVDPGKNVTC

SEQ ID NO: 76759 - protein, 112 aa, Setaria italica
  Transcript Sequence Number=SeqID_10785
SFIIHSLTTNQECHLLNGREATHVIRIQKSPKYIYTVCSTYSSVQTVHTVAVTDHETRVAAARASLITAVLFACFFTWAMFSYSQLPTLTLCKKKIPHHIKLAVHAWSTKCR

SEQ ID NO: 76760 - protein, 175 aa, Setaria italica
  misc_feature (74)..(74): Xaa can be any naturally occurring amino acid
  Transcript Sequence Number=SeqID_10786
  Gene Ontology: Mol. function=transcription repressor activity; Cellular component=cytoplasm; Biological process=regulation of nitrogen utilization
  Homolog annotation: Hit_ID=P52580; Match level="QueryCoverage=98%, HitCoverage=55%, E-value=5e-63, Identity=68%"; Hit description =Isoflavone reductase homolog IRL
  Pfam annotation: Domain name=NmrA; Domain location=9-175; Score =120.3; E_value=6.4e-33; Accession=PF05368.5; Description=NmrA-like family
MSPNEETRILVIGGTGRLGRHIVAASARLGHPTTALVRDTAPSDPAKAALLRSFRDAGVTLVKGDLYDHTSLVXPMKAADVVISALGTRQIADQTRLIAAIKDAGGVKRFLPSEFWTDVDHTAAVEPARSTVYASKASVRRAVEAAGVPHTYVLCGYLAGAALPSVGQVLSPAAP

SEQ ID NO: 76761 - protein, 488 aa, Setaria italica
  misc_feature (66)..(66): Xaa can be any naturally occurring amino acid
  Transcript Sequence Number=SeqID_10787
  Gene Ontology: Mol. function=transporter activity; Cellular component= membrane; Biological process=oligopeptide transport
  Homolog annotation: Hit_ID=Q5N746; Match level="QueryCoverage=95%, HitCoverage=84%, E-value=0.0, Identity=72%"; Hit description =Putative oligopeptide transporter
  Pfam annotation: Domain name=MFS_1; Domain location=6-420; Score= -2.5; E_value=0.035; Accession=PF07690.8; Description=Major Facilitator Superfamily
  Pfam annotation: Domain name=PTR2; Domain location=40-412; Score =267.6; E_value=2.9e-77; Accession=PF00854.13; Description=POT family
  Pfam module annotation: Pfam domain module=MFS_1::PTR2; Domain location=6-420::40-412
LSLPLFGSSSSAASIDAWKGVSQMLPLPLACVADAWIGRYRAIVLASLIFVVVSPSLRLAHASDRXPRSLVFNCSSQSMGALSVSSAFPAFRGGHVAIFYVALYLVALGEGAHKPCAQAFAADQFDEKDPEESVARSSFFNWWYFGMCAGTAATTMISSYVQDNVGWGLGFGIPCIVIAASLAVFLLGSRSYRYYTTSEARPFSRVGKAFLALVESWTPNRRVRSKGEGNAAAVEEVKSVLRLLPIWASCIIYAIIFSQTSTFFTKQAATLDRRIGARFKVPPAALQTFISLSIVVFIPAYDRLFVPLARRYTGRPTGITMLQRIGAGLALSLAAVALSALIEMRRLGVARDAGLVSTPKAQLPMSLWWMVPQYVLIGVADVFAMIGLQEFFYDQVPDAARSLGLALFLSIFGVGHLLSSLLISVIDKATAKSGTSWFSNNLNRAHLDYFYWLLTGLCAVDLVAFVFFARVYVYKRKGGDGDGDGDAV

SEQ ID NO: 76762 - protein, 88 aa, Setaria italica
  misc_feature (7)..(7): Xaa can be any naturally occurring amino acid
  Transcript Sequence Number=SeqID_10788
  Gene Ontology: Mol. function=hydrolase activity, hydrolyzing O -glycosyl compounds; Cellular component=anchored to membrane; Biological process=carbohydrate metabolic process
  Homolog annotation: Hit_ID=Q45X99; Match level="QueryCoverage=78%, HitCoverage=14%, E-value=1e-22, Identity=63%"; Hit description=Beta -1,3-glucanase 2
  Pfam annotation: Domain name=X8; Domain location=1-84; Score=143.3; E_ value=7.5e-40; Accession=PF07983.5; Description=X8 domain
CVANAAXGRQRLLAALNYACGEGGANCKDIQPGAACFEPNTMVAHASYAFNDYFQRKGRTIGTCDFAGAAYVVNQAPKMGKCDLPSTV

SEQ ID NO: 76763 - protein, 101 aa, Setaria italica
  Transcript Sequence Number=SeqID_10789
TANKDTKFRTLLTQESLQHTLNGSNEEQFLDLYALDFQKEQHSMFFFPKSAISERKQFTEGVFGYEALNFSRVTSDVRMLIRRIKHEVITKLIAWMESNSR

SEQ ID NO: 76764 - protein, 415 aa, Setaria italica
  misc_feature (117)..(117): Xaa can be any naturally occurring amino acid
  misc_feature (338)..(338): Xaa can be any naturally occurring amino acid
  misc_feature (366)..(366): Xaa can be any naturally occurring amino acid
  Transcript Sequence Number=SeqID_10790
WAALALALAAAARAPFYRHLSAELRAALPFLGSIAFMLAAFLCEAISVRFVSAVMALQWHRGYKLASSINAGSSIKNSCKLKSAGFNRSAAPLPDTGQWLLLSLNEKLPQSIVNLLXAHVITLHHYLMLFIMLGFSVLFDCIKAPGLGIATRYMFTMAIGRFLRTITFIATILPSARPWCAAARYQIPQHPHPWAQKYYVPYASDSNAIHRVITHDMAYAAVQAYPDEYRPDWGRMSFLVDILRPIPGEGPSWYHLLKKASGGCNDLMYSGHMLVAVLTAMAWTEAYGGWISVAIWLLVLHSAQREIRERHHYSVDCIVAIYVGVLLWRMTGFIWSVXDASRARWLAKLDEVQSRLVNAAKDSDKXRGLLKDVELAGQEKQGLSFQPAYKSRFAAGTIIFTLSCVLIAFTMTSDG

SEQ ID NO: 76765 - protein, 413 aa, Setaria italica
  misc_feature (18)..(18): Xaa can be any naturally occurring amino acid
  misc_feature (289)..(289): Xaa can be any naturally occurring amino acid
  Transcript Sequence Number=SeqID_10791
  Gene Ontology: Cellular component=plasma membrane
  Pfam annotation: Domain name=DUF827; Domain location=1-337; Score= -7.8; E_value=7.4e-10; Accession=PF05701.3; Description=Plant protein of unknown function (DUF827)
AAVSQWRHPQAPPPVQLXPEEEELMKVEEQTVKLEMELFVKEKETFKVLKELQETKQVIDGLKVQIEKETTYSTNSAEGHTDMGKVHPLPAIEQKSMRHTEPPIQSTKGTQSPLSTLIKLNQAKAFLNTDTVNMLKSQMEKEKGSLEKTREKLQLNLGKASSLEADLTKTVAQLQAVKAPQPVLEPSEIWLQMKHLNSEKAKHRKVSDDLKNEICELTAAIEHTNSKTKTLQFRIIMAEKLKEASQRGEAIALAEMKNLSNRQDLNATTSDVTLSAEEHSMFVLKAQEXADSTSRKKIDAAMQELDQANQCKLELLERVEEAMAAVETSRKALEEAQKREESANKAKLAAEETLRKLRSDQIMQNWRPINNNSMKFKNTAVTPRRAGSGIYDVNGLSLVTTGPKNMKTVSIGQ

SEQ ID NO: 76766 - protein, 308 aa, Setaria italica
  Transcript Sequence Number=SeqID_10792
  Gene Ontology: Mol. function=oxidoreductase activity; Biological process=oxidation reduction
  Homolog annotation: Hit_ID=B6T2Z1; Match level="QueryCoverage=98%, HitCoverage=97%, E-value=1e-143, Identity=84%"; Hit description =Short-chain dehydrogenase/reductase SDR
  Pfam annotation: Domain name=Epimerase; Domain location=14-235; Score= -55.3; E_value=0.0053; Accession=PF01370.13; Description=NAD dependent epimerasedehydratase family
  Pfam annotation: Domain name=KR; Domain location=15-136; Score=-72.2; E_value=0.0073; Accession=PF08659.2; Description=KR domain
  Pfam annotation: Domain name=adh_short; Domain location=12-188; Score= 61.7; E_value=2.7e-15; Accession=PF00106.17; Description=short chain dehydrogenase
  Pfam module annotation: Pfam domain module=Epimerase::KR::adh_short; Domain location=14-235::15-136::12-188
MDAAVSNPSIKRIALVTGGNKGVGLETCRQLATKGLKVVLTARNEARGLEAVEAIRRSSGAAEVFFHQLDVTDPSSAARLADFVRGQFGRLDILINNAGISGVDRDPVLVAKVKDQVESMDVNQRVEWMRENSKETYEEAKQCMRTNYYGAKIVTEALLPLLQLSSSGRIVNVSSGFGLLRNFNSEELRKEFDDIDNLTEKRLEELLDLFLEDFKANLLEAHGWPTGGSSAYKVAKAALNAYTRILAKKYPTLRINCLTPGYVKTDMSMHMGVLTLEEGARNPVKVALLPDDGPTGAYFDLNGEASFV

SEQ ID NO: 76767 - protein, 406 aa, Setaria italica
  Transcript Sequence Number=SeqID_10793
  Subcellular localization annotation: CTP_CleavageSite=62; ConfidenceScore=5.71e-01
PSESTTPHVPQPQQSSSPPPSSSVPTTSPTYPANNQPPPSPSSPTTTPPPQFVPPPQSSPPSAPTDHSPPPTLSPPATPPTYSQPPSSPPSPVAAPPHQSPPPQQSGPPPSPSSTPATPPTYQQNNQSPPPSSNTPTTPPQQSPMQPQSPSTPPTPSNPSAMPPTYSQPPSSQSSPPATPPMQSPPPQSSPPSIPPNHSPPPTLSPPTTPPTYSQPPSSPPSPVAAPPQQSPPPQQSSPRPSPTSTPAAAPPSSTPATPTQQSPPLAQSPSMPPPPSNPSTMPPTYNQPPPSQSSPPTTPPQQSSPPATPPTNHSPPPSLSPPTTPPTYSQPPPSQSSPPATPPQQSISPAPYSITPITPPTNYSPPPSLSPPATPPTSSQSPPSVSSPPATPPQQSSSPPPSSNT

SEQ ID NO: 76768 - protein, 411 aa, Setaria italica
  misc_feature (31)..(31): Xaa can be any naturally occurring amino acid
  Transcript Sequence Number=SeqID_10794
  Gene Ontology: Mol. function=transporter activity; Cellular component= membrane; Biological process=oligopeptide transport
  Homolog annotation: Hit_ID=B6SWT0; Match level="QueryCoverage=98%, HitCoverage=72%, E-value=1e-126, Identity=54%"; Hit description =Peptide transporter PTR2-B
  Pfam annotation: Domain name=PTR2; Domain location=1-340; Score =192.7; E_value=1e-54; Accession=PF00854.13; Description=POT family
PPSSLQTVFFYISLYLVAIAQSGHKPCVQAXFGADQFDATDPDESSSRASFFNWWYFGICVSGTMTVAIMSYVQDNVSWALGFGVPSMVMLLALAIFLLGTRTYRFYGGSRGGSNVGAGTFSLVGKAFVAWRKRSKEALPAELEHGDGELAVTENAALAEEVSGLTRLFPIWATCLLYGVVFAQPPTLFTKQAGTLDRRVGSSFQIPPAALQCFLGVSIVSCIVLYDRVLVPVARRVSGVASGITMLQRIGTGIALSLVTLAVAALVEMRRLRAARDAGLVDGGGSGGTAVPMSLWWIVPQYVLLGAADVFTMVGMQEFFYDQVPGALKSLGLALYLSVLGVGSFISSFLITVIDGLTKRNGGTSWFADDLNRGHLDYFYLLLAALTALELVAFTYFSASYVYRRKAGNSH

SEQ ID NO: 76769 - protein, 318 aa, Setaria italica
  misc_feature (120)..(120): Xaa can be any naturally occurring amino acid
  Transcript Sequence Number=SeqID_10795
  Gene Ontology: Mol. function=transporter activity; Cellular component= integral to membrane; Biological process=transport
  Homolog annotation: Hit_ID=Q25AI7; Match level="QueryCoverage=85%, HitCoverage=58%, E-value=5e-59, Identity=42%"; Hit description =H0702G05.6 protein
NCCNRRIVVIVNPFWFRGYSARRESLVIHSCYSLQDKHSFIYFSSVIPESPRYLCSRGKINEAMLVLERIARMNNKALPPGTVTSEPKRIDDNYDPSVTTVLLMTEDRLDDDTSTKSNRXSIFKAFWSRDLIRSTLLLWLVHFASHFAYYGLVYLISELSSGRSQPKDSSLYINVLVTSFAEFPGLLLAALLVDRIGRKVMLGGMILLCCAFLAPLATQLREDLSIILLFCARSCVMGCFAVLHVYSSEIYPTSCRNTGVGFASIIGRIGSMVAPLTTTALLENHHQKEVVLVMDLALFLAGVACTLFPLETKGREIH

SEQ ID NO: 76770 - protein, 64 aa, Setaria italica
  Transcript Sequence Number=SeqID_10796
TKGRRGRQRDAGALRPWTALTSRRRWGSWAAGGRRGWRPCSWWPGCSRGGTRCATRCCRRAASS

SEQ ID NO: 76771 - protein, 197 aa, Setaria italica
  Transcript Sequence Number=SeqID_10797
  Gene Ontology: Mol. function=protein binding; Cellular component =mitochondrion; Biological process=protein complex assembly
  Homolog annotation: Hit_ID=B6TQ44; Match level="QueryCoverage=100%, HitCoverage=79%, E-value=1e-107, Identity=92%"; Hit description =ATP11 protein
  Pfam annotation: Domain name=ATP11; Domain location=3-196; Score =223.9; E_value=4e-64; Accession=PF06644.3; Description=ATP11 protein
ADLSRWPQRRGYSQFASGFTPLKPKPLESIIDVERAKGLSPEHLVAAWDDYHLGRGHIGASMKTKLYHLLEQRSSTCRHFVIPLWKGSGYTTMFMQVQMPYMIFTGLEDYKARGTQASPYYTVTHYTEFAETKDTVLIRGDVVFTSKLTDSEAKTLLETAHSFYLNDVRYRLVERFNKETHEFEFKDVLQVLDMPTM

SEQ ID NO: 76772 - protein, 340 aa, Setaria italica
  misc_feature (169)..(169): Xaa can be any naturally occurring amino acid
  Transcript Sequence Number=SeqID_10798
  Gene Ontology: Mol. function=3-beta-hydroxy-delta5-steroid dehydrogenase activity; Cellular component=endoplasmic reticulum; Biological process=steroid biosynthetic process
  Homolog annotation: Hit_ID=B9SU06; Match level="QueryCoverage=96%, HitCoverage=56%, E-value=5e-65, Identity=41%"; Hit description =Hydroxysteroid dehydrogenase, putative
  Pfam annotation: Domain name=Reticulon; Domain location=158-322; Score=138.3; E_value=2.4e-38; Accession=PF02453.9; Description =Reticulon
FPLFVLIILLLEQALCSNAASVAGKPFFVTNDEPMETWEFMNCIMEAMGCQRPRINLPAKMLLSAALFSNMIRHRLGFQMFSTPLLHPDTIYFLSCTRTFNTSKARRLLGYYPIVSLEDGIMRTVRSFSELSDNLGFSRKQRSCGSSKADKLLGSGTAADILLWRDEKXTFSFVTVLFLLFYWFLLSDRTFVSSAAKFLLVTSLALFIHGVLPSQVFGFTVEKVTSDHFEVSHSALRNSLMCLASAWNGGIHKLRVLAEGEDWSTLLKVFAFLYSIKLLLNFQFRFLMGLVLASLFIVFIVYEQCEEEIDSLVSNASFKIKWLMDRVVERMPASLKAYIS

SEQ ID NO: 76773 - protein, 95 aa, Setaria italica
  Transcript Sequence Number=SeqID_10799
IRSLVTTSTSRIAWPHDPEVKHCLLQGARELESLHASQLSFIKVSLHLFKEDVDDLNHFCNKTKTAPVTTCNDMVNCYKNPCHARLLEVLCCYEN

SEQ ID NO: 76774 - protein, 130 aa, Setaria italica
  Transcript Sequence Number=SeqID_10800
LLHTAVYNLVQIVRQFYMHLLRRKPLIRFMNQHHRKATLQSLMKKRGKVQVGSYSSNTSPIVVSAPAMPHPDQSQEPLGQSQEHEQQQHDGWGESVSLRNSCVGQLHGHTRRIYFKHQIQQPQERTHDST

SEQ ID NO: 76775 - protein, 187 aa, Setaria italica
  misc_feature (175)..(175): Xaa can be any naturally occurring amino acid
  Transcript Sequence Number=SeqID_10801
  Gene Ontology: Mol. function=oxidoreductase activity, acting on the CH-OH group of donors, NAD or NADP as acceptor; Cellular component =cytoplasm; Biological process=isocitrate metabolic process
  Homolog annotation: Hit_ID=Q7F280; Match level="QueryCoverage=97%, HitCoverage=44%, E-value=6e-97, Identity=90%"; Hit description=NADP -specific isocitrate dehydrogenase
  Pfam annotation: Domain name=Iso_dh; Domain location=7-186; Score= -125.0; E_value=2.8e-07; Accession=PF00180.12; Description =Isocitrateisopropylmalate dehydrogenase
MAFNKIKVANPVVEMDGDEMTRIFWKSIKDKLIFPFLDLDIKYFDLGLPHRDATDDKVTVEAAEATLKYNVAIKCATITPDEARVKEFSLKAMWKSPNGTIRNILNGTVFREPIICKNIPRLVPGWTKPICIGRHAFGDQYRATDAVIKGPGKLKLVYEGKEEQVELEVYNFTGXGGVALAMLQLCT

SEQ ID NO: 76776 - protein, 458 aa, Setaria italica
  misc_feature (433)..(433): Xaa can be any naturally occurring amino acid
  misc_feature (440)..(440): Xaa can be any naturally occurring amino acid
  Transcript Sequence Number=SeqID_10802
  Gene Ontology: Mol. function=ATP-dependent helicase activity; Cellular component=vacuole; Biological process=nuclear-transcribed mRNA catabolic process, nonsense-mediated decay
  Homolog annotation: Hit_ID=B6TU64; Match level="QueryCoverage=100%, HitCoverage=86%, E-value=1e-174, Identity=69%"; Hit description=ATP -dependent RNA helicase
  Pfam annotation: Domain name=DEAD; Domain location=192-348; Score= -11.7; E_value=0.00029; Accession=PF00270.21; Description=DEADDEAH box helicase
MAKGDDALARKRNRVRRKRLRSSENAVSARVAAIIASKRRRKSGKRRGCEGMCFSLPTPDDPFNERHGKKRKGEEPTDDTEDAAAAAATVAKDDKPKKKDATKKQPPAKAGAKAKSKDVRERATETEEGRVDFDRPSKFLVVCLNAIRDAVAPEDGGGSSVHGAGDWGVELWRSCSAPAPSDVLDTSGACATMEQTAWLVSTACDIVARKERLGMVVSCPFLLYLVPSQEKAAQVRSICKPLKPLGIHSVSLHPGALVEHQISGLKTCEPEFLIATPERLLELVSLKAIDISNVSMLVIDGLKYFLDLNVSDKIFSIRDAISSNPQITIFTDSSDKNVATMAKNLLRGRITKLSINDSVSSRSAFVTQHVHFCPSEKLKTSKVKEILEQIMRSHAKQSSKVLLVAASDKKAQHLSSSLKLENCTVTDGSHGNXFTICSSXGLMNLHIKDRENLVMTDI

SEQ ID NO: 76777 - protein, 89 aa, Setaria italica
  Transcript Sequence Number=SeqID_10803
SSPRLHLSQLCPTYEVFSPFGFKVKIPYIASPIFRSLPFSYLQPPCSLRGCQLWIPANMLHLAVTVVVALQLAKVALIPSSRISDVVMY

SEQ ID NO: 76778 - protein, 167 aa, Setaria italica
  misc_feature (14)..(14): Xaa can be any naturally occurring amino acid
  Transcript Sequence Number=SeqID_10804
  Gene Ontology: Mol. function=electron carrier activity; Cellular component=anchored to membrane
  Homolog annotation: Hit_ID=B6SJ66; Match level="QueryCoverage=61%, HitCoverage=60%, E-value=5e-52, Identity=93%"; Hit description=Blue copper protein
  Pfam annotation: Domain name=Cu_bind_like; Domain location=36-118; Score=49.8; E_value=1.1e-11; Accession=PF02298.9; Description =Plastocyanin-like domain
GWDGVRVAAAAALXLVVAACAALPSRTAANKISINWKPNTNYSDWVTQHSPFYKDDWLVFYYTAGQADVVQVDETGYNKCDSSNAIYNYSKGRNFAFQLNETKTYYFICSYGYCFGGMRLAIKAEKLPPPSPPPSASHRSAAAAFARSHAVVLYAAVAVLAALLRMV

SEQ ID NO: 76779 - protein, 93 aa, Setaria italica
  Transcript Sequence Number=SeqID_10805
LHVFAAAIVDASSRLDGRTGSKRHRDTMGEENPGPKKQAPCDLLPRTQEYFFITVACHASAPNMAKASLEVTSFSHFSALNARRLDAEILHAF

SEQ ID NO: 76780 - protein, 126 aa, Setaria italica
  Transcript Sequence Number=SeqID_10806
HEYPAGPLTAFAVSDQTDVIKRDEWNAWRHGPMSGNFTCSSLVLVHTPCDSVNVLLRRRTFGSILVLCVHFLYGEGIMILEHNIIGHCMFVSSALSWLVGVLDPSRARVFVRRLVIAYLGGLFFCF

SEQ ID NO: 76781 - protein, 325 aa, Setaria italica
  misc_feature (239)..(239): Xaa can be any naturally occurring amino acid
  Transcript Sequence Number=SeqID_10807
  Gene Ontology: Mol. function=methyltransferase activity; Cellular component=chloroplast; Biological process=metabolic process
  Homolog annotation: Hit_ID=B6TPM1; Match level="QueryCoverage=84%, HitCoverage=79%, E-value=1e-137, Identity=86%"; Hit description=S -adenosylmethionine-dependent methyltransferase
  Pfam annotation: Domain name=Methyltransf_11; Domain location=158 -259; Score=89.5; E_value=1.2e-23; Accession=PF08241.4; Description =Methyltransferase domain
  Pfam annotation: Domain name=Methyltransf_12; Domain location=158 -257; Score=49.7; E_value=1.1e-11; Accession=PF08242.4; Description =Methyltransferase domain
  Pfam annotation: Domain name=Ubie_methyltran; Domain location=99-323; Score=-105.4; E_value=0.00013; Accession=PF01209.10; Description =ubiECOQ5 methyltransferase family
  Pfam module annotation: Pfam domain module=Methyltransf _11::Methyltransf_12::Ubie_methyltran; Domain location=158-259::158 -257::99-323
RVAAPARRSRGGAPARRLELHASVSPAVTADAPDEAAAEPLVEPAPETKLSKLACPICYYPFVSASDPSGDASSLECSTCKKVYPNKQDYWDLTVAVGSTEYSESKPAATEIFRTPLVSFLYERGWRQNFIWGGFPGLEREFEMAKTYLNPTIGGTIVDASCGSGLFSRLFVKSGLYSLVVALDFSENMLKQCNEYVKQENISDERLALVRADISRLPFVNGSIDAVHAGAAIHCWPSXPACAVAEISRVLRSGGIFVASTFVADVIPPAIPILRIARPYISQIGGNNTFLSEVELEDLCKACGLVDFKFVRSGFYIMFSATKAS

SEQ ID NO: 76782 - protein, 219 aa, Setaria italica
  misc_feature (57)..(57): Xaa can be any naturally occurring amino acid
  misc_feature (193)..(193): Xaa can be any naturally occurring amino acid
  Transcript Sequence Number=SeqID_10808
  Gene Ontology: Mol. function=calcium ion binding; Cellular component =membrane
  Homolog annotation: Hit_ID=Q3HRN7; Match level="QueryCoverage=94%, HitCoverage=84%, E-value=2e-80, Identity=68%"; Hit description =Calcineurin B-like protein 10
  Pfam annotation: Domain name=efhand; Domain location=117-145; Score =18.1; E_value=0.037; Accession=PF00036.24; Description=EF hand
  Pfam annotation: Domain name=efhand; Domain location=161-189; Score =32.5; E_value=1.7e-06; Accession=PF00036.24; Description=EF hand
  Pfam annotation: Domain name=efhand; Domain location=80-108; Score =21.5; E_value=0.0035; Accession=PF00036.24; Description=EF hand
  Pfam module annotation: Pfam domain module=efhand::efhand::efhand; Domain location=117-145::161-189::80-108
  Subcellular localization annotation: CTP_CleavageSite=15; ConfidenceScore=5.04e-01
PVLAVVDAVLLGASRCFQKSPPRLLSAVDARAGRIRAGRRLTFRELAELADESHCFXVNEVEALYELYKKISCSIIDDGLIHKVFDIFDEKKNSVIEFEEFIHAISVFHPYAPIEDKIDFSFRLYDLRQTGFIECEEVKQMVIATLMESEVELSDDLVEGIIDKTFKDADTDKDGRISREEWKAFVVRHPSVXKKMTLPHLKDTTAAFPSFVFNTQVED

SEQ ID NO: 76783 - protein, 297 aa, Setaria italica
  Transcript Sequence Number=SeqID_10809
  Gene Ontology: Mol. function=drug transporter activity; Cellular component=membrane; Biological process=multidrug transport
  Homolog annotation: Hit_ID=B9T6V3; Match level="QueryCoverage=98%, HitCoverage=60%, E-value=2e-94, Identity=58%"; Hit description =Multidrug resistance pump, putative
  Pfam annotation: Domain name=MatE; Domain location=79-242; Score =119.8; E_value=9.1e-33; Accession=PF01554.10; Description=MatE
ITAVTAGAALAVHVVVTYLLVQYFQLGIVGAVAAADMSWWLVVLGQLVYVVGGWCPLSWKGFSMEAFNDFWDFIKLSSASGVMLCLENWYYRVLVLLTGYLKNAEIAVDALSICQTINGWEMMIPFGFLAATGVRVSNELGAGSGKGARFAIIVSITTSVVIGLVFWFLILYFDDRIALLFTSSEVVLAAVHKLSVLLAFTILLNSVQPVLSGVAIGSGWQALVAYVNVGTYYLIGVPLGIILGWPLHLGVGGIWSGMIGGTAVQTVILAYLTVKCDWDEEAKIASTRMQKWAADLK

SEQ ID NO: 76784 - protein, 309 aa, Setaria italica
  Transcript Sequence Number=SeqID_10810
  Gene Ontology: Mol. function=transcription repressor activity; Cellular component=cytoplasm; Biological process=regulation of nitrogen utilization
  Homolog annotation: Hit_ID=P52580; Match level="QueryCoverage=100%, HitCoverage=100%, E-value=1e-153, Identity=85%"; Hit description =Isoflavone reductase homolog IRL
  Pfam annotation: Domain name=3Beta_HSD; Domain location=9-249; Score=- 133.5; E_value=0.056; Accession=PF01073.11; Description=3-beta hydroxysteroid dehydrogenaseisomerase family
  Pfam annotation: Domain name=Epimerase; Domain location=8-216; Score=- 35.3; E_value=0.00017; Accession=PF01370.13; Description=NAD dependent epimerasedehydratase family
  Pfam annotation: Domain name=NmrA; Domain location=8-300; Score =552.1; E_value=6.7e-163; Accession=PF05368.5; Description=NmrA-like family
  Pfam module annotation: Pfam domain module=3Beta_HSD::Epimerase::NmrA; Domain location=9-249::8-216::8-300
MASEKSKILVVGATGYLGRHVVAASARLGHPTFALVRDTAPSNPAKAALLKSFQDAGVTLLKGDLYDHASLVSAVKSADVVISTVGSQQIADQTRLIDAIKEAGNVKRFFPSEFGLDVDRTGVVEPAKTILSGKAAIRRATEAAGIPYTYAVAGYFAGYALPTIGQLLSPAAPTDKAIVLGDGNAKAVFVEEGDIGTYTVLAAGDPRAENRTLYVRPPANTLSHNELLSLWEKKTGKAFERVYIPEEAVLKQIQESAMPLNIILAIGHASYVMGEQAGFEIDPAKGVDASELYPDVKYTTVDEYLDRFL

SEQ ID NO: 76785 - protein, 109 aa, Setaria italica
  Transcript Sequence Number=SeqID_10811
INTVLYNPSETRFKSRTTAESKRLQMGAPALTKPQRLWSKDGHLQQKEAAAVYSVKRHFLSVGLEILTGTNNKLPLADTTDMTDTGDLKQKEYLSKCISLSKPDNFRHE

SEQ ID NO: 76786 - protein, 135 aa, Setaria italica
  misc_feature (81)..(81): Xaa can be any naturally occurring amino acid
  misc_feature (105)..(105): Xaa can be any naturally occurring amino acid
  Transcript Sequence Number=SeqID_10812
FQTRRENGKQKAQGHHGGREPGAKKQAPCDLLPRTQEYFLLPWPAMRAHPTWQRPLSKSHSFSLFFCPQRTPTRRRNLTCXQPYLASSRRHGSHLLDLLIIIEIXSNNYQHREIIPRGGDRGRDPAGGHDPSAPP

SEQ ID NO: 76787 - protein, 395 aa, Setaria italica
  Transcript Sequence Number=SeqID_10813
WHDRLQPALWAALALAAAARAPFYRHWSAELRAALPFLGSIAFMLAAFLCEAISVRFVSAVMGLQWHRSAAPLPDTGQWLLLSLNEKLPQSIVNLLRAHVITLHHYLMLFIMLGFSVLFDCIKAPGLGIATRYMFTMAIGRLLRTITFIATILPSARPWCAAARYRIPQHPHPWTQKYYVPYASDSNAIRRVITHDMAYASVQAYPDEYRLDWGRMSFLVDILRPTPGEGPSWYHLLKKASGGCNDLMYSGHMLVAVLTAMAWTEAYGGWISVVIWLLVLHSAQREIRERHHYSVDCIVAIYVGVLLWRMTGFIWSVRDANRARQLAKLDEVQSRLVHAAKDSDIDKIRGLLKEVELAGQEKQGFSQRAILAFAAGTIIFTLSCVLIAFTMTSDG

SEQ ID NO: 76788 - protein, 145 aa, Setaria italica
  Transcript Sequence Number=SeqID_10814
KSPLAVLSLVQEQEDKRGQRVWRCIAAGHGSAPRDSGTSLLGRQPPPWPPVPAAPSTPAEGGRPAPRCAARRPPREATPSHAARPRPHPSPTIRGHVLPTGMPVCPPASNQYTGTRHQTSHIDIQELVVHSKNMKHSPSSLHSSS

SEQ ID NO: 76789 - protein, 129 aa, Setaria italica
  Transcript Sequence Number=SeqID_10815
SAGVVLSAQISLGMKRFGRKKGTRGDVQTGLHLQVPREPPPLSIAADAYPQPTSCRRRTDARQCASKPHTCPAPTRTPPTERPCGYVQVLSARTTSCKLLQALSNLWNPIFLLRNQDASSARSSQLGAL

SEQ ID NO: 76790 - protein, 265 aa, Setaria italica
  Transcript Sequence Number=SeqID_10816
  Homolog annotation: Hit_ID=B6TB90; Match level="QueryCoverage=90%, HitCoverage=78%, E-value=1e-102, Identity=75%"; Hit description =Cupin, RmlC-type
  Pfam annotation: Domain name=DUF1637; Domain location=53-262; Score =358.3; E_value=1.4e-104; Accession=PF07847.4; Description=Protein of unknown function (DUF1637)
AGVRRPGVARRGRRRRVQADAAAVQRLFQACRDVFRGPGTVPRPDEVRLLRDMLDRMKPEDVGLSPDLKFFRARDAAQGTPTITHTTIYKCPNFSMVILFLPQNAVIPLHNHPGMTVFSKLLLGSMHIKSYDWVDADSDPSASSCSSSADDQLRLAKLVVDGVFTAPCDTSVLYPTTGGNMHRFTAIAPCAILDILGPPYSIEEDRDCTYYTDIPYTHHSTADGTTDLASVEQDQGHLAWLKEIDMPRELKMCSVHYGGPPISDK

SEQ ID NO: 76791 - protein, 328 aa, Setaria italica
  misc_feature (132)..(132): Xaa can be any naturally occurring amino acid
  Transcript Sequence Number=SeqID_10817
  Gene Ontology: Mol. function=hydrolase activity; Cellular component =peroxisome
  Homolog annotation: Hit_ID=B6SUW2; Match level="QueryCoverage=99%, HitCoverage=98%, E-value=1e-156, Identity=81%"; Hit description =Epoxide hydrolase 2
  Pfam annotation: Domain name=Abhydrolase_1; Domain location=59-316; Score=73.1; E_value=1e-18; Accession=PF00561.12; Description =alphabeta hydrolase fold
MATEAAGEVRQWTADINGISLHVAESGPSTGPAVLLVHGFPEMWLSWRHQMAALAARGFRALAPDLRGYGDSSVPADPAAYSIFHIVGDLVALLDHLRLQKVFVVGHDWGAQVAWHLCLFRPDRVRAAVILXGIPYFPRGPRPMTESFAKLGDSFYINQFQEPGRAERAFGRYDVATVLKKFYALEIDELIAPPGVEIIDFLQAPSSPLPWMTDEELGQYAEKFQKKNGFTGPLNYYRMLETNWRLTAPWSGAKIIVPAKFILGENDVGLQSFGTEKYVKSGGLKSNVPNLEVSIIEGHHFLQQEKAERVNSEILAFLDKFANEEASA

SEQ ID NO: 76792 - protein, 428 aa, Setaria italica
  Transcript Sequence Number=SeqID_10818
  Gene Ontology: Mol. function=transferase activity, transferring groups other than amino-acyl groups; Biological process=paclitaxel biosynthetic process
  Homolog annotation: Hit_ID=B4G1P9; Match level="QueryCoverage=99%, HitCoverage=99%, E-value=1e-152, Identity=62%"; Hit description=3-N -debenzoyl-2-deoxytaxol N-benzoyltransferase
  Pfam annotation: Domain name=Transferase; Domain location=7-427; Score=189.6; E_value=8.4e-54; Accession=PF02458.7; Description =Transferase family
  Subcellular localization annotation: CTP_CleavageSite=64; ConfidenceScore=5.27e-01
MTASAAPTVARSAPELVPPAGPTPGGTLPLSSIDKTAAVRVSVDFVQVFPPAAGAAVGDQGAAVAAMRDGFARALVPYYPVAGRIADASPGEPVVECTGQGVWFVEAAASCALADVNNLERPLLIPKDELLPRPPPEEKLEDLIVMAQVTKFTCGGFAVGICFSHLVFDGQGAAQFLKAAGEMARGLPAPSVAPVWDRDAIPDPPKLPRGPPPSFTAFSFVTQVVDIPPESIARIKDEFGAATGQTCSTFDAVTAVVFKCRALAAGLPDDAEVRLGFAASTRHLLQGVLPSVEGYYGNCVYPVGITRTSKAIREAPLPEVIGVMRGAKEALTARFTDWMHGGAKEDHYNVPLDYGTVTVSDWSRVGFNEVDYGFGEPGYVFTVNDHVNIVASVIYLKPPTPKRGIRLMLRCVEEPHAAAFADELAKYE

SEQ ID NO: 76793 - protein, 222 aa, Setaria italica
  Transcript Sequence Number=SeqID_10819
  Subcellular localization annotation: CTP_CleavageSite=81; ConfidenceScore=5.00e-01
RDNANNTKKRGREKGKKKIKERSLVCVKKSPPFLCSTLPLQPWSLPSCALASSRPSDLRLLVPVLRHKAVQMDTVTPAPLQAAAGAGDAAVLEKLLAAAVAEGPICGMPDFKMSGKKSDELEPTDAGDEDDGGDDGDEDGDFGEGEEDISEGEGYDNPKANENKKKQRGDAEENGEEAEEEPEDQEGGGGDDDDDDDDDDDDDGGEDDDDDDGGEDDDDAVD

SEQ ID NO: 76794 - protein, 265 aa, Setaria italica
  misc_feature (168)..(168): Xaa can be any naturally occurring amino acid
  Transcript Sequence Number=SeqID_10820
  Gene Ontology: Mol. function=catalytic activity; Cellular component =peroxisome; Biological process=metabolic process
  Homolog annotation: Hit_ID=Q5N6Y8; Match level="QueryCoverage=100%, HitCoverage=46%, E-value=1e-136, Identity=88%"; Hit description =Putative 4-coumarate:coenzyme A ligase
  Pfam annotation: Domain name=AMP-binding; Domain location=1-188; Score=-82.2; E_value=0.00065; Accession=PF00501.20; Description=AMP -binding enzyme
LPAAPPVLVAMIKSEEARRRDLSSLLVIGIGGAPLGREVAERFAAIFPDIELVQGYGLTESSGSVAATVGPEESKAYGSVGKLSSHMEAKIVDPTTGEALGPGQRGELWVRGPVIMKGYVGDDEATAATMDSEGWLKTGDLCYFNEDGFLYIVDRLKELIKYKGYQVXPPAELEHILNSHSDIMDAAVIPYPDEDVGQLPMAFIVRKPGSNLTEQQVMDYVAKQVAPYKKVRRVAFVSAIPKSPAGKILRRELVQQAVSMGASKL

SEQ ID NO: 76795 - protein, 485 aa, Setaria italica
  misc_feature (425)..(425): Xaa can be any naturally occurring amino acid
  misc_feature (466)..(466): Xaa can be any naturally occurring amino acid
  Transcript Sequence Number=SeqID_10821
  Gene Ontology: Mol. function=aldehyde dehydrogenase [NAD(P)+] activity; Cellular component=chloroplast; Biological process =cellular aldehyde metabolic process
  Homolog annotation: Hit_ID=B6TXC0; Match level="QueryCoverage=88%, HitCoverage=87%, E-value=0.0, Identity=88%"; Hit description =Aldehyde dehydrogenase 3B1
  Pfam annotation: Domain name=Aldedh; Domain location=28-485; Score =117.2; E_value=5.4e-32; Accession=PF00171.14; Description=Aldehyde dehydrogenase family
  Subcellular localization annotation: CTP_CleavageSite=42; ConfidenceScore=5.32e-01
MPSTSFSLSSRRRPRSWDCRHARLRVRHHRSSSIFGVSSSSRAAAGGEGMGTEAGARLGETVRELREAYEGGRTRSLAWRQSQLRGLLRLLKEKEVEAFQALHKDLGKHHAEAYRDEVGLLNKSANGALQQLGKWTAPERVWVPLVAWPATAQLVPEPLGVVLIFSCWNVPLGLSLEPLIGAIAAGNAVALKPSELSPCTAKFLADNIGRYVDPSAVKVVQGGPEVGEQLMEHRWDKVLFTGSPRIARSVMAAASRHLTPVALELGGKCPCIFDAMPGGRDLQVSVNRIIGGKWSSCAGQACIAIDYVLVEERFAPVLIKMLKSTLKRFFQEADHMARIVNERNFERLSSLLKDRAVAPSILHGGSMDAKNLYIEPTILLNPPLDSAIMTEEIFGPLLPIITVKKIEDSIAFVKARPKPLAIYAXFTRDAALRRRIVDETSSGTVTFNDAVVQYAIDGLPFGGVGXSGFGQYHGKYSFEMFSHKK

SEQ ID NO: 76796 - protein, 203 aa, Setaria italica
  Transcript Sequence Number=SeqID_10822
  Pfam annotation: Domain name=DUF1675; Domain location=25-174; Score= -39.0; E_value=9.7e-05; Accession=PF07897.3; Description=Protein of unknown function (DUF1675)
  Subcellular localization annotation: CTP_CleavageSite=46; ConfidenceScore=5.45e-01
LRASRSAATTFPPRIHRPLPPRPPLSPGLSLGGRFGTEAKRQCLSRSSSIASIYSVSSLDGEADADPSPAALLPLLRTSSLLTGRDDAPEQARDGGSAQRLQSCSAQRLQSCSTHSARSIHEELLRQHGVRPVPMPTIAAEARHIGSSREEEAAAACAAVVWELGVARPLESSVVWWSAPGQVPPTTLSCIKSIFSILSLISL

SEQ ID NO: 76797 - protein, 173 aa, Setaria italica
  Transcript Sequence Number=SeqID_10823
  Homolog annotation: Hit_ID=B6TTJ7; Match level="QueryCoverage=78%, HitCoverage=41%, E-value=1e-61, Identity=86%"; Hit description =Thaumatin-like protein 1
  Pfam annotation: Domain name=Thaumatin; Domain location=1-113; Score=- 5.6; E_value=9.8e-08; Accession=PF00314.9; Description=Thaumatin family
GGSTNGSADGGKCMATGCLVDLNGACPADLRVMATAAATGAGGPVACRSACEAFGTPQYCCSGAYGNPNTCKPSTYSQFFKTACPRAYSYAYDDSTSTFTCAAGTSYAITFCPSTTSGKYSGENPQAAGVQPTNGSMVYLGGEQLATGDAHVGAARSSLLIFAAATLAAVALL

SEQ ID NO: 76798 - protein, 509 aa, Setaria italica
  Transcript Sequence Number=SeqID_10824
  Gene Ontology: Mol. function=electron carrier activity; Biological process=oxidation reduction
  Homolog annotation: Hit_ID=B6SKY3; Match level="QueryCoverage=88%, HitCoverage=79%, E-value=0.0, Identity=73%"; Hit description =Cytochrome P450 CYP727A4
  Pfam annotation: Domain name=p450; Domain location=1-449; Score=7.9; E_value=4.9e-12; Accession=PF00067.14; Description=Cytochrome P450
WAGPSQLLVSVRDPTLVKEVLTKAEDKLPLTGRTYNLACGRLGLFVSSSEKVKSTRESLKIFLNEKLTIGVGRSSFKVIDAVMDRIDSIMSKDFLDCRSFSQHMSFNIIGGTLFGDAFFNWSDAVTYEELLMMVAKDGCFWASYAVCPFWKPSYRRYRTLCAKLKTLTEGIIRKSRDQNSSLHHFDQRSYLKSEGMIKGLNRGVLGEMMAGHCLHGAAEGSLSSEEEICGNIIGLMLHGISASANLIGNILTRFILFPKLQDQIHAEIVAVCDESSELEVDDVLRMQLLLATVYESARLLPAGPLLQRCSLKHDLTLGLGITVPAGAILVVPLHLVHMDASVWGNDAGQFNPHRFLKKDVDLGDILAAPRGSNGMNLFTECAKAESFLPFGSGSRACVGQKFAIIAISMLIASLLRNYEVQTHPSLCKEMEPEVDSSHVHHLPNPKIILNKKKDLTGGFGKFKFDAFSFTIFFFTGVTPGYASFIPSLNHAEVWKGDTLRCGSYLFFSF

SEQ ID NO: 76799 - protein, 75 aa, Setaria italica
  misc_feature (26)..(26): Xaa can be any naturally occurring amino acid
  misc_feature (53)..(53): Xaa can be any naturally occurring amino acid
  misc_feature (61)..(61): Xaa can be any naturally occurring amino acid
  Transcript Sequence Number=SeqID_10825
  Subcellular localization annotation: CTP_CleavageSite=49; ConfidenceScore=5.04e-01
LSGGNRFIGSILPASVLNVFRRGSLXSSLHQTSPIIIKKNLAKGLRWLSSAGXSAYRFISXRDKHVIWSVELEYY

SEQ ID NO: 76800 - protein, 455 aa, Setaria italica
  misc_feature (313)..(313): Xaa can be any naturally occurring amino acid
  Transcript Sequence Number=SeqID_10826
  Gene Ontology: Mol. function=protein serine/threonine kinase activity; Cellular component=cytoplasm; Biological process=protein amino acid phosphorylation
  Homolog annotation: Hit_ID=B9S7L3; Match level="QueryCoverage=100%, HitCoverage=99%, E-value=1e-171, Identity=63%"; Hit description =Casein kinase, putative
  Pfam annotation: Domain name=Pkinase; Domain location=9-278; Score =126.0; E_value=1.2e-34; Accession=PF00069.17; Description=Protein kinase domain
  Pfam annotation: Domain name=Pkinase_Tyr; Domain location=9-273; Score=-145.4; E_value=0.00046; Accession=PF07714.9; Description =Protein tyrosine kinase
  Pfam module annotation: Pfam domain module=Pkinase::Pkinase_Tyr; Domain location=9-278::9-273
MEQVVGGKFKLGKKIGSGSFGELYLAVNVQNGEEVAVKLESVKSRHPQLHYESKLYMLLQGGTGIPHLKWFGVEGEYNVMVIDLLGPSLEDLFNYCSRKFSLKTVLMLADQMISRVEYMHTKGFLHRDIKPDNFLMGLGRKANQVFVIDYGLAKKYRDLQSHKHIPYRENKNLTGTARYASVNTHLGVEQSRRDDLESLGYVLMYFLRGSLPWQGLKAGTKKQKYDRISEKKMLTPVEVLCKSYPTEFTAYFHYCRSLRFEDKPDYSYLRRVFRDLFIREGYQLDYVFDWTIMKYPQFRDKSKLQSSGKASGXAGPSAERTEGTAAEALFRTGSGSGHNREHTKHKSLLESLMPSKAAVDSDKTRPASSSRNGSTSRRAILSSSKPSSSGDPSDPNRTGRIVSSSSSRPSATAQRAHHLGGAEIRSSSLSKIGRSSHDDAVRNFELLSIGVDRRK

SEQ ID NO: 76801 - protein, 498 aa, Setaria italica
  misc_feature (13)..(13): Xaa can be any naturally occurring amino acid
  misc_feature (129)..(129): Xaa can be any naturally occurring amino acid
  Transcript Sequence Number=SeqID_10827
  Gene Ontology: Mol. function=protein serine/threonine kinase activity; Cellular component=cytoplasm; Biological process=protein amino acid phosphorylation
  Homolog annotation: Hit_ID=Q53P85; Match level="QueryCoverage=100%, HitCoverage=97%, E-value=0.0, Identity=90%"; Hit description=Calcium- dependent protein kinase, isoform AK1, putative, expressed
  Pfam annotation: Domain name=APH; Domain location=34-227; Score= -19.9; E_value=0.066; Accession=PF01636.15; Description =Phosphotransferase enzyme family
  Pfam annotation: Domain name=Pkinase; Domain location=32-290; Score =347.8; E_value=2.1e-101; Accession=PF00069.17; Description=Protein kinase domain
  Pfam annotation: Domain name=Pkinase_Tyr; Domain location=32-288; Score=-53.4; E_value=3.5e-10; Accession=PF07714.9; Description =Protein tyrosine kinase
  Pfam annotation: Domain name=efhand; Domain location=337-365; Score =39.2; E_value=1.7e-08; Accession=PF00036.24; Description=EF hand
  Pfam annotation: Domain name=efhand; Domain location=373-401; Score =27.9; E_value=4.1e-05; Accession=PF00036.24; Description=EF hand
  Pfam annotation: Domain name=efhand; Domain location=409-437; Score =30.8; E_value=5.5e-06; Accession=PF00036.24; Description=EF hand
  Pfam annotation: Domain name=efhand; Domain location=443-471; Score =38.1; E_value=3.4e-08; Accession=PF00036.24; Description=EF hand
  Pfam module annotation: Pfam domain module=APH::Pkinase::Pkinase _Tyr::efhand::efhand::efhand::efhand; Domain location=34-227::32 -290::32-288::337-365::373-401::409-437::443-471
NAHARLPPPVTTXGGRPASVLPHKTDNVRDHYRIGKKLGQGQFGTTYQCVGKADGAEYACKSIPKRKLLCREDYEDVWREIQIMHHLSEHPNVVRIRGAYEDALFVHLVMELCAGGELFDRIVAKGHYXERAAAQLIRTIVGVVEGCHSLGVMHRDLKPENFLFASTAEDAPLKATDFGLSVFYKPGDKFADVVGSPYYVAPEVLQKCYGPEADVWSAGVILYILLCGVPPFWAESEAGIFRQILRGKLDLESEPWPSISDSAKDLVRKMLIRDPTKRLTAHEVLCHPWIVDDAVAPDKPIDSAVLSRLKNFSAMNKLKKMALRVIAESLSEEEIGGLKELFKMIDTDNSGTITYDELKNGLKRVGSDLMEPEIQALMDAADIDNSGTIDYGEFLAATLHMNKLEREESLVSAFAFFDKDGSGFITIDELSQACQQFGLSDVHLEDMIKDVDQNNDGQIDYSEFAAMMRKGNAGGAGRRTMRNSLHVDLGELLKPAES

SEQ ID NO: 76802 - protein, 1083 aa, Setaria italica
  misc_feature (612)..(612): Xaa can be any naturally occurring amino acid
  Transcript Sequence Number=SeqID_10828
  Gene Ontology: Mol. function=transcription factor activity; Cellular component=nucleus; Biological process=regulation of transcription, DNA-dependent
  Homolog annotation: Hit_ID=A9XBJ0; Match level="QueryCoverage=99%, HitCoverage=74%, E-value=0.0, Identity=49%"; Hit description=Pm3b -like disease resistance protein 2Q2
  Pfam annotation: Domain name=LRR_1; Domain location=1040-1065; Score =5.3; E_value=30; Accession=PF00560.25; Description=Leucine Rich Repeat
  Pfam annotation: Domain name=LRR_1; Domain location=487-508; Score =6.4; E_value=18; Accession=PF00560.25; Description=Leucine Rich Repeat
  Pfam annotation: Domain name=LRR_1; Domain location=510-532; Score =12.3; E_value=1.3; Accession=PF00560.25; Description=Leucine Rich Repeat
  Pfam annotation: Domain name=LRR_1; Domain location=691-713; Score =0.4; E_value=2.6e+02; Accession=PF00560.25; Description=Leucine Rich Repeat
  Pfam annotation: Domain name=LRR_1; Domain location=741-762; Score =6.3; E_value=19; Accession=PF00560.25; Description=Leucine Rich Repeat
  Pfam annotation: Domain name=LRR_1; Domain location=815-836; Score =1.7; E_value=1.5e+02; Accession=PF00560.25; Description=Leucine Rich Repeat
  Pfam annotation: Domain name=LRR_1; Domain location=878-900; Score =3.3; E_value=71; Accession=PF00560.25; Description=Leucine Rich Repeat
  Pfam annotation: Domain name=LRR_1; Domain location=955-978; Score =1.7; E_value=1.4e+02; Accession=PF00560.25; Description=Leucine Rich Repeat
  Pfam annotation: Domain name=NB-ARC; Domain location=64-340; Score =240.7; E_value=3.7e-69; Accession=PF00931.14; Description=NB-ARC domain
  Pfam module annotation: Pfam domain module=LRR_1::LRR_1::LRR_1::LRR _1::LRR_1::LRR_1::LRR_1::LRR_1::NB-ARC; Domain location=1040 -1065::487-508::510-532::691-713::741-762::815-836::878-900::955 -978::64-340
MGNRIMFRYRMGNKLCKIVRDIEALVKHMRDFRFDKQPQAQVQINYLRENDSTMVDPEIVSRSRDEEKQKIVRMLVKEQANNKHPMVVPIVGMGGLGKTTLAQLIYNDPEVKKHFHQLLKWVCVSDDFDVCNLANKICNASESNLENALQNLQRELAGKRYLLVLDDVWNRDVNKWNKLNACLKHGDVGSAILTTTRDKEIAQLMGTVKGHDIAHLDNKFIKEIIEAKAFISQERKPTDLAGLVDDVVERCAGSPLAAKALGSVLRGKITEEWKAVLSKSIAHNKDDQILPILKLSYDDLPSHMKQCFAFCAVFPKDHEINVEMLIQLWMANDFIPEQKDVRHETIGKQIFSELVSRSFFQDVKQVNGKAWEDVYWYLSTSTCKIHDLMHDVALSVMGKEVATITEKPKQSDEFLQNTCRHILLSCGKPEAVLNDSLNIRSPAMQTLLCGQRIESSLQHLAKYSSLRALQLCQNNSTILLKPKQLHLLRYLDISWSHIVALPEDISILYNLQTLNVAHCHKLGRLPKGIKYMTALRHLYTHECWELKRMPPEVGHLTSLQTLTNFVVGAGPDCSSIAELQHLNNLGGPLLLSQLENVTNAADAKQANLGNKXELRELSLNWTWTGSQEEKLHCHKVLEGLEAPPGLEALRIEHYQGTSFPTWMGTLTKMVELHLSNCNKSHKLPPLGSVPALQVLRLERLKKLESLCSGGTFFHFPNLKKLTLDKLPEFDWVQGEQIMFPQLERLFISNCGKVTALPGPALLGGSCCGDYKEQDERKLWSAFPVLKVLELECLAKFQRWGGAAEATQGQQIIFPYLEELSIEKCPELAALPSATSQGESFDHSDVTAWSAFPNLKKLLLEDLDSFKSLGMMEEQRFPDLETLSVKKCPKLTTLPGVIEAPKLGVLQIHGSQLAAIIVPTFINSLSELVLSVEFTETTLPTGHSAFELLDASNKYPLTSLKLSGCNFLFPSSPLALWTCFVQLQRLKIKKINHALVYWPEKEFHSLVSLRHLSIKKCRGLIGYAKAAPGQPISERSQVLPRLESLHIEDCESLVEVFNVPASLKTMDLSLGQSSKSIVLRDAGR

SEQ ID NO: 76803 - protein, 247 aa, Setaria italica
  Transcript Sequence Number=SeqID_10829
  Homolog annotation: Hit_ID=Q0VJB4; Match level="QueryCoverage=100%, HitCoverage=100%, E-value=1e-75, Identity=58%"; Hit description =Putative zinc-binding protein
  Pfam annotation: Domain name=PLATZ; Domain location=47-158; Score =270.9; E_value=2.9e-78; Accession=PF04640.6; Description=PLATZ transcription factor
  Pfam annotation: Domain name=zf-B_box; Domain location=46-86; Score =6.3; E_value=0.03; Accession=PF00643.16; Description=B-box zinc finger
  Pfam module annotation: Pfam domain module=PLATZ::zf-B_box; Domain location=47-158::46-86
MAIDHATPLGLKSRYAMGGDECDDDAENQRWPPWLKPLLSTSFFVQCRVHADAHKSECNMYCLDCMNGALCSLCLGHHRDHHAIQIRRSSYHDVIRVSEIQKVLDITGVQTYIINSARVVFLNERPQPRPGKGVTNTCDVCERSLLDCFRFCSLGCKIVGTARGYRPKKKHGGGDSKKKKRAALKDVRCDSEDSCTGSSGGSSDKSSVVQCFSPSTPPPTSASCRPWNKRRKGVPHRSPFGSLIVEF

SEQ ID NO: 76804 - protein, 326 aa, Setaria italica
  Transcript Sequence Number=SeqID_10830
  Gene Ontology: Mol. function=protein binding; Cellular component =nucleus
  Homolog annotation: Hit_ID=UPI0001A7B2F6; Match level="QueryCoverage =37%, HitCoverage=27%, E-value=4e-38, Identity=63%"; Hit description =BIN4 (brassinosteroid-insensitive4); double-stranded DNA binding
NKEIGEKQASSDHAGDREDPAQTKRKTLTFARRKTLSSKKEGPTTDEKRDVTTRRSTPKKDVFTLSSGSDASPGNSPSRAGDANHEEDSHSTPRRKGVQETKHKKPKVVGAKSDPDQIGDALEHQEGVAEDEMQDKLTGNSVSQRLPLMFPDKVQRSKALIECDGDSIDLSGDIGAVGRIVVSNGPTGSQDLLLDLKGTIYKTTIVPSRTFCVVGVGQSEAKIEAIMNDFIQLEPPSNLFESETMMEGTLDGFTFDSDEEGDKLPESQAYQNDPNNEDDGQPKAKTKRKAEKQVGKAPKKAKVAGKAPKKGARKTQPAKRTRKAKK

SEQ ID NO: 76805 - protein, 358 aa, Setaria italica
  Transcript Sequence Number=SeqID_10831
  Gene Ontology: Mol. function=kinase activity; Biological process =nucleobase, nucleoside, nucleotide and nucleic acid metabolic process
  Homolog annotation: Hit_ID=B6TS05; Match level="QueryCoverage=98%, HitCoverage=88%, E-value=1e-167, Identity=87%"; Hit description =Guanylate kinase
  Pfam annotation: Domain name=Guanylate_kin; Domain location=162-266; Score=169.6; E_value=9.2e-48; Accession=PF00625.13; Description =Guanylate kinase
  Pfam annotation: Domain name=Thymidylate_kin; Domain location=131 -307; Score=-48.7; E_value=0.062; Accession=PF02223.9; Description =Thymidylate kinase
  Pfam module annotation: Pfam domain module=Guanylate_kin::Thymidylate_ kin; Domain location=162-266::131-307
MGEEAVEFSVEKVAVDAKQSAVDVGGKTYVIGRSDDDSKPSIIVKILDKLTQTWVVPTVLGTQPTLTKSQSAIPVNDEKILIIEKGVPLNESIWFLEIDTPFVKQQRKIKGTEVVSWNKGVIGVGQKPVVISGPSGVGKGTLIAKLMKDYPSKFGFSVSHTTRSPREKEIDGIHYHFTERSKIDKDISEGKFLEFAHVHGNVYGTSIEAVESVTDEGKRCILDIDVQGARSVRASSLEAIFIFVCPPSFEELEKRLRARGTETEEQIQKRLRNARAELDQSNSPGLFDHLLVNDDLETCYENLKKLLSLDDDQEDTDLFIEDGKQTTSYSIVSKNDSEVMLQSEIMILKNGSYKLAGA

SEQ ID NO: 76806 - protein, 207 aa, Setaria italica
  Transcript Sequence Number=SeqID_10832
  Gene Ontology: Mol. function=oxidoreductase activity; Biological process=oxidation reduction
  Homolog annotation: Hit_ID=Q109D4; Match level="QueryCoverage=97%, HitCoverage=37%, E-value=2e-83, Identity=70%"; Hit description =Transposon protein, putative, unclassified, expressed
  Pfam annotation: Domain name=2OG-FeII_Oxy; Domain location=59-164; Score=99.0; E_value=1.7e-26; Accession=PF03171.12; Description=2OG -Fe(II) oxygenase superfamily
SHNNVNQWPSEECFPSWRKTMMSYHANALVTGKRILSLIALSLDLDAEFFQKNGAFEIPTAVLRLLHYAGNVNASDDRNIGAAAHSDYGMLTLLATDGTPGLQICREKDRHPQLWEDVHHINGSLIVNIGDLLERWTNCVFRSTLHRVVPVGKERYSVAFFIDPSPNLVIQCMESCCNEAYPPRFPPIKSGDYLEERLSSTYKLATA

SEQ ID NO: 76807 - protein, 249 aa, Setaria italica
  Transcript Sequence Number=SeqID_10833
  Gene Ontology: Mol. function=N-acetyltransferase activity; Cellular component=nucleus; Biological process=metabolic process
  Homolog annotation: Hit_ID=Q5KQI6; Match level="QueryCoverage=93%, HitCoverage=92%, E-value=1e-91, Identity=72%"; Hit description =Probable acetyltransferase NSI
  Pfam annotation: Domain name=Acetyltransf_1; Domain location=160-234; Score=65.7; E_value=1.7e-16; Accession=PF00583.16; Description =Acetyltransferase (GNAT) family
  Subcellular localization annotation: CTP_CleavageSite=78; ConfidenceScore=5.56e-01
MAPAFAAAPSSSICGVRIPKACHFEAQSTVPKPRFLRNRVAAKTRSGATWSLKAGLWDSLRSGFLKNNNSTETVEPPPAPLEVEEPLPEELVLLERTLPDGSTEQILFSSAGDVDVYDLQALCDKVGWPRRPLSKIAASLRNSYLVATLHSIIKSSNTEGGEKKQLIGMARATSDHAFNATIWDVLVDPSYQGQGLGKALMEKVIRTLLQRDINNITLFADNKVVDFYKNLGFEVDPQGIKGMFWYPRF

SEQ ID NO: 76808 - protein, 378 aa, Setaria italica
  misc_feature (15)..(15): Xaa can be any naturally occurring amino acid
  misc_feature (348)..(348): Xaa can be any naturally occurring amino acid
  Transcript Sequence Number=SeqID_10834
  Gene Ontology: Mol. function=protein kinase activity; Biological process=protein amino acid phosphorylation
  Homolog annotation: Hit_ID=B9SI80; Match level="QueryCoverage=88%, HitCoverage=43%, E-value=1e-116, Identity=58%"; Hit description =Leucine-rich repeat protein, putative
  Pfam annotation: Domain name=Pkinase; Domain location=65-336; Score= -31.8; E_value=1.4e-06; Accession=PF00069.17; Description=Protein kinase domain
  Pfam annotation: Domain name=Pkinase_Tyr; Domain location=65-334; Score=-45.1; E_value=9.9e-11; Accession=PF07714.9; Description =Protein tyrosine kinase
  Pfam module annotation: Pfam domain module=Pkinase::Pkinase_Tyr; Domain location=65-336::65-334
VVPIVGRAKARPPRXRLVEHASSAYPSQFFADARYISQTVKLGALGIPAYRSFSLVELEAATNNFEVSCLLGQDAHGQMYRGTLSNGTAVTIRSLRVKRSQTSQSLNRHIEMISKLRHRHLVSALGHCFEYNLDDATVTQLYLVFEYVHNGNLRSRISQGTEGRKLPWAQRISTAIGVAKGIQFLHGGIMPGLFANNLKITNILLDQNLVAKIGSYNIPILAETAKSEGGGGGKYPSDRVPNGDKMDIYDFGVILLEVVSGRPITSIHEVEIMREQLQSALTSESPARRRVLVDPSVGRACSDESARTVMEICLRCLAKEAVQRPSVEDVLWNLQFAAQVQDDWRRSXGDSRSQSSEESPLSPAQIPRESHTTPADAA

SEQ ID NO: 76809 - protein, 576 aa, Setaria italica
  misc_feature (60)..(60): Xaa can be any naturally occurring amino acid
  Transcript Sequence Number=SeqID_10835
  Gene Ontology: Mol. function=nucleotide binding; Cellular component =nucleus; Biological process=regulation of transcription, DNA -dependent
  Homolog annotation: Hit_ID=Q852D5; Match level="QueryCoverage=94%, HitCoverage=42%, E-value=1e-107, Identity=45%"; Hit description =Powdery mildew resistance protein PM3b, putative, expressed
  Pfam annotation: Domain name=LRR_1; Domain location=204-226; Score =4.5; E_value=43; Accession=PF00560.25; Description=Leucine Rich Repeat
  Pfam annotation: Domain name=LRR_1; Domain location=227-250; Score =0.5; E_value=2.4e+02; Accession=PF00560.25; Description=Leucine Rich Repeat
  Pfam annotation: Domain name=LRR_1; Domain location=366-391; Score =5.4; E_value=28; Accession=PF00560.25; Description=Leucine Rich Repeat
  Pfam annotation: Domain name=LRR_1; Domain location=434-459; Score =4.5; E_value=43; Accession=PF00560.25; Description=Leucine Rich Repeat
  Pfam annotation: Domain name=LRR_1; Domain location=476-498; Score =7.4; E_value=12; Accession=PF00560.25; Description=Leucine Rich Repeat
  Pfam annotation: Domain name=LRR_1; Domain location=500-522; Score =6.0; E_value=21; Accession=PF00560.25; Description=Leucine Rich Repeat
  Pfam annotation: Domain name=LRR_1; Domain location=524-546; Score =4.8; E_value=37; Accession=PF00560.25; Description=Leucine Rich Repeat
  Pfam annotation: Domain name=LRR_1; Domain location=84-106; Score =0.4; E_value=2.6e+02; Accession=PF00560.25; Description=Leucine Rich Repeat
  Pfam module annotation: Pfam domain module=LRR_1::LRR_1::LRR_1::LRR _1::LRR_1::LRR_1::LRR_1::LRR_1; Domain location=204-226::227-250::366- 391::434-459::476-498::500-522::524-546::84-106
ANLGNKEELRELSLTWTRSEEEKQHCHKVLEGLEAPTGLEALRIEHYQGTSFPTWVGTLXKMVELHLSDCNKSNKLPPLGSVPALQVLRLERLKKLESLCSGGTFFHFPNLKELTLGELPEFDRWCEVNWVQGEQIMFPQLEKLFITNCGKGYSITRASTSRRIMLWTWSAFPNLKKLLLEDLDSFKSLGMTEATHGEQQIFPDLETLHVEKCPKLTTLPGVIEAPKLGVLEINGSQLTAIMVPRIINSLSELVLSVEDTETTLPTVHSAFELVDASNKSPLTRLELRGCIFLFPSSPLALWTCFVQLQHLAIARINHALVYWPEKEFHSLVSLRRLSIKKCSGLIGYAKAAPGQPISERSQVLPRLKSLYIEDCESLVEVFNVPASLKTMDLLDCPKLKSIFGEQQDEPTLNQGPSAAPKLSSSARDHLLLPCLESLNIWRCESLSEVLNLPPSLRGIHIWECGKLQLLSGQLDGLRTLDIWGCPELRSLESCLGEFSTLERLSLEDCKSLASLPDGPQAYSSLRDLQIKSCPGIQSLPSSLKKRLDNLIHKDLDAHYEGAKLLKPKTWKYAIHL

SEQ ID NO: 76810 - protein, 488 aa, Setaria italica
  Transcript Sequence Number=SeqID_10836
  Gene Ontology: Mol. function=transporter activity; Cellular component= membrane; Biological process=oligopeptide transport
  Homolog annotation: Hit_ID=B6SWT0; Match level="QueryCoverage=99%, HitCoverage=85%, E-value=0.0, Identity=70%"; Hit description=Peptide transporter PTR2-B
  Pfam annotation: Domain name=PTR2; Domain location=27-414; Score =321.8; E_value=1.4e-93; Accession=PF00854.13; Description=POT family
AINAWNGVAQLLPLLGGALADKWLGRYRTIVIASLLYVLGLGMLALSTLLSSGGHHQCASATAGGQACAPSTLQVSFFYVSLYIVALAQGGHKPCVQAFGADQFDQSDPKESVSRSSFFNWWYFGMCAGTAVTLVFLSYVQDNIGWGLGFGIPCAVMAAALAVFLLGTRTYRYYVTSGKGSLFARAAEAFAEWRSRRIKAGLLHQAAQEHNPASAEAPGFRVDEEEQAVASTAGFVKEAKAVLRLFPIWATCLIYAVAFSQSSTFFTKQAATLDRRIGDRFKVPPAALQSFISITIVVFIPIYDRVVVPVSRQYSGKPSGITMLQRIGAGMFLSLLSMVIAALVETRRLRVARDAGVVDEPKIPVPMSLWWMVPQYVLFGAADVFTMVGLQEFFYDQVPDKLRSLGLALYLSIFGVGSFISSALVSVIDKVTAARGRSWFSNNLNRGHVDYFYWLLAALSALELLAYVFFAVVYKYKNKGAVHAAVAG

SEQ ID NO: 76811 - protein, 117 aa, Setaria italica
  misc_feature (52)..(52): Xaa can be any naturally occurring amino acid
  Transcript Sequence Number=SeqID_10837
  Gene Ontology: Biological process=auxin mediated signaling pathway
  Homolog annotation: Hit_ID=B6ST80; Match level="QueryCoverage=100%, HitCoverage=100%, E-value=2e-38, Identity=70%"; Hit description =Auxin-repressed 12.5 kDa protein
  Pfam annotation: Domain name=Auxin_repressed; Domain location=5-117; Score=209.2; E_value=1.1e-59; Accession=PF05564.4; Description =Dormancyauxin associated protein
MLEKLWDDVVAGPHPETGLEKLRKAATSRPIVIDKDAVAAAGSYKRTQSMPXTPTTPGTPSSSTTPRGGNNVWRSVFHPGSNLATKSMGANLFDRPQPNSPTVYDWLYSDETRSNHR

SEQ ID NO: 76812 - protein, 157 aa, Setaria italica
  Transcript Sequence Number=SeqID_10838
TDRPDGLFEQIRGTSSFRATWVKPPCHPRQEAPRPPCLCTTVDHLPLSQEAPWKEPPRPRCVATVLLQHGGCRVHEQIYGHNTIWRHWRLSGIAFLDHEYIHRVIQPGRIPCDRGPVEKCRSPDLPDLPWTVGRMPVCRLRHTLVMGRFNIQPPEGL

SEQ ID NO: 76813 - protein, 189 aa, Setaria italica
  Transcript Sequence Number=SeqID_10839
  Gene Ontology: Mol. function=hydrolase activity; Cellular component =endosome membrane; Biological process=protein transport
  Homolog annotation: Hit_ID=B6SS64; Match level="QueryCoverage=97%, HitCoverage=98%, E-value=2e-99, Identity=95%"; Hit description =Vacuolar protein sorting 29
  Pfam annotation: Domain name=Metallophos; Domain location=2-120; Score=38.6; E_value=2.5e-08; Accession=PF00149.20; Description =Calcineurin-like phosphoesterase
MVLVLALGDLHIPHRAPDLPAKFKSMLVPGKIQHIICTGNLCIKEVHDYLKSLCPDLHITRGEYDEDARYPETKTLTIGQFKLGLCHGHQVVPWGDLDSLAMLQRQLDVDILVTGHTHQFKAYKHEGGVVINPGSATGAYSSITYDVNPSFVLMDIDGLRVVVYVYELIDGEVKVDKIDFKKTATTMHA

SEQ ID NO: 76814 - protein, 325 aa, Setaria italica
  misc_feature (196)..(196): Xaa can be any naturally occurring amino acid
  misc_feature (308)..(308): Xaa can be any naturally occurring amino acid
  Transcript Sequence Number=SeqID_10840
  Gene Ontology: Mol. function=protein serine/threonine kinase activity; Cellular component=cytoplasm; Biological process=protein amino acid phosphorylation
  Homolog annotation: Hit_ID=Q53P85; Match level="QueryCoverage=96%, HitCoverage=60%, E-value=1e-167, Identity=91%"; Hit description =Calcium-dependent protein kinase, isoform AK1, putative, expressed
  Pfam annotation: Domain name=Pkinase; Domain location=1-114; Score= -42.7; E_value=6e-06; Accession=PF00069.17; Description=Protein kinase domain
  Pfam annotation: Domain name=efhand; Domain location=161-189; Score =40.0; E_value=9.3e-09; Accession=PF00036.24; Description=EF hand
  Pfam annotation: Domain name=efhand; Domain location=196-224; Score =25.2; E_value=0.00027; Accession=PF00036.24; Description=EF hand
  Pfam annotation: Domain name=efhand; Domain location=232-260; Score =31.7; E_value=3e-06; Accession=PF00036.24; Description=EF hand
  Pfam annotation: Domain name=efhand; Domain location=266-294; Score =37.7; E_value=4.6e-08; Accession=PF00036.24; Description=EF hand
  Pfam module annotation: Pfam domain module=Pkinase::efhand::efhand::ef hand::efhand; Domain location=1-114::161-189::196-224::232-260::266 -294
LCKLFFSISSGDKFSDVVGSPYYVAPEVLQKCYGPEADVWSAGVILYILLCGVPPFWAETEAGIFRQILRGKLDFESEPWPSISDSAKDLVRNMLTRDPKKRFSAHEVLCHPWIVDDAVAPDTPIDSAVLSRLKHFSAMNKLKKMALRVIAESLSEEEIGGLKELFKMIDTDNSGTITFDELKDGLKRVGSELTEXIQALMEAADIDNSGTIDYGEFIAATLHMNKLEREENLVSAFSFFDKDGSGFITIDELSQACREFGLDDVHLEDMIKDVDQNNDGQIDYSEFTAMMRKGNAGEQDKERKETNXRNSLHLNLGELLNPSKT

SEQ ID NO: 76815 - protein, 421 aa, Setaria italica
  misc_feature (227)..(227): Xaa can be any naturally occurring amino acid
  Transcript Sequence Number=SeqID_10841
  Gene Ontology: Mol. function=binding; Cellular component =mitochondrial inner membrane; Biological process=mitochondrial transport
  Homolog annotation: Hit_ID=B2LWG5; Match level="QueryCoverage=67%, HitCoverage=70%, E-value=1e-124, Identity=75%"; Hit description =Nucleotide sugar translocator BT2A
  Pfam annotation: Domain name=Mito_carr; Domain location=137-224; Score=103.0; E_value=1e-27; Accession=PF00153.19; Description =Mitochondrial carrier protein
  Pfam annotation: Domain name=Mito_carr; Domain location=231-319; Score=119.1; E_value=1.4e-32; Accession=PF00153.19; Description =Mitochondrial carrier protein
  Pfam annotation: Domain name=Mito_carr; Domain location=325-417; Score=126.7; E_value=7.4e-35; Accession=PF00153.19; Description =Mitochondrial carrier protein
  Pfam module annotation: Pfam domain module=Mito_carr::Mito_carr::Mito_ carr; Domain location=137-224::231-319::325-417
MAATMVAMTAKSKNSVLAVEKKQGWSIQLPELRFPWDSHEDKGFSLSLQGSGPAHGGLFASVGLKVSAGAPAVAPSPGEKDIKIPFADHCIKYVSEAVGYQVISTEAEPVEEEVVDGKAKKKAKKHGLKLKIKIGNPHLRRLVSGAVAGAVSRTCVAPLETIRTHLMVGSNGDSMTEVFQSIMNTEGWTGLFRGNLVNVIRVAPSKAIELFAFDTVKKFLTPKADEXPKTFLPPSLVAGALAGVSSTLCMYPLELIKTRLTIEKDVYNNFLHAFVKILREEGPSELYRGLTPSLIGVVPYAATNYYAYDTLKKLYRKTFKQEEISNIATLLIGSAAGAISSTATFPLEVARKQMQVGAVGGRQIYKNVFHALYCIMEKEGIGGLYKGLGPSCIKLMPAAGISFMCYEACKKILVEDDAESE

SEQ ID NO: 76816 - protein, 417 aa, Setaria italica
  Transcript Sequence Number=SeqID_10842
  Gene Ontology: Mol. function=hydrolase activity, hydrolyzing O -glycosyl compounds; Cellular component=anchored to membrane; Biological process=carbohydrate metabolic process
  Homolog annotation: Hit_ID=B6SUM3; Match level="QueryCoverage=83%, HitCoverage=86%, E-value=1e-178, Identity=88%"; Hit description =Glucan endo-1,3-beta-glucosidase 7
  Pfam annotation: Domain name=Glyco_hydro_17; Domain location=67-383; Score=388.3; E_value=1.4e-113; Accession=PF00332.10; Description =Glycosyl hydrolases family 17
RARPHRRPRPEGRRRGRRGSPRRAAMAPAELRILAVLSSPLPLRVLLLLSLLSAVDVVSAAAPPLKFGINYGQIANNLPHPTQVSGLLQSLNVNRVKLYDADPAVLTAFAGTGVEFIVGNEDLQNLTDARKARAWVAQHVQPFLPNTRITCITVGNEVLSGKDTVAMQNLLPAMQAVYQAVVALGLASQVNVSTAHSVNILASSYPPSSGVFREELGQYIQPILNFHAEVGSPFLINAYPFFAYKASPGSVSLPYVLFEPNPGVVDPNTNLTYDNMLYAQIDAMYAAMKAMGHTDLTVRISETGWPSKGDEDEVGATVANAAAYNGNLMKRIAMGQGTPLRPDVPIDVFVFALFNEDMKPGPASERNYGLFYPNGTPVYNLGFNGASFSPSPTLSSSSKPTITFLMAVVVLLSGFFL

SEQ ID NO: 76817 - protein, 235 aa, Setaria italica
  Transcript Sequence Number=SeqID_10843
  Gene Ontology: Mol. function=metal ion binding
  Homolog annotation: Hit_ID=B6STH0; Match level="QueryCoverage=100%, HitCoverage=100%, E-value=1e-82, Identity=58%"; Hit description=RNA -binding protein
  Pfam annotation: Domain name=zf-C3HC4; Domain location=138-175; Score= 6.5; E_value=0.018; Accession=PF00097.17; Description=Zinc finger, C3HC4 type (RING finger)
MRKFQDSVKALEADIEHANALASEFLRDYDGSVIQMRMAYSAVAHFLVQWTDCKLAGALGLLKIMLYKVYADGSSAPPDWEREASIREFYGVIFPSLLQLPSGITELDERKQRRLCLKKFRSRDEELSEVDTERELECGICLEVSRKVVLPDCAHTLCMRCFEDWNAKSKSCPFCRACLEEVKPGSLWVFTDDSDVVDMDTLTRENIRRLFMYINKLPLVVLHVADLDIYEYRIK

SEQ ID NO: 76818 - protein, 138 aa, Setaria italica
  Transcript Sequence Number=SeqID_10844
  Gene Ontology: Mol. function=protein binding; Cellular component =chromosome; Biological process=nucleosome assembly
  Homolog annotation: Hit_ID=B9IKT5; Match level="QueryCoverage=78%, HitCoverage=81%, E-value=2e-53, Identity=95%"; Hit description =Histone H2A
  Pfam annotation: Domain name=Histone; Domain location=33-107; Score =96.6; E_value=8.6e-26; Accession=PF00125.16; Description=Core histone H2AH2BH3H4
  Subcellular localization annotation: CTP_CleavageSite=53; ConfidenceScore=5.35e-01
MAGKGGKGLLAAKTTAAKSTDKDKDKKKAPVSRSSRAGLQFPVGRIHRQLKSRASAHGRVGATAAVYSAAILEYLTAEVLELAGNASKDLKVKRITPRHLQLAIRGDEELDTLIKGTIAGGGVIPHIHKSLINKTAKE

SEQ ID NO: 76819 - protein, 387 aa, Setaria italica
  misc_feature (342)..(342): Xaa can be any naturally occurring amino acid
  Transcript Sequence Number=SeqID_10845
  Gene Ontology: Mol. function=oxidoreductase activity; Biological process=oxidation reduction
  Homolog annotation: Hit_ID=B6TBV5; Match level="QueryCoverage=92%, HitCoverage=99%, E-value=1e-153, Identity=75%"; Hit description =Leucoanthocyanidin dioxygenase
  Pfam annotation: Domain name=2OG-FeII_Oxy; Domain location=237-337; Score=117.8; E_value=3.7e-32; Accession=PF03171.12; Description=2OG -Fe(II) oxygenase superfamily
TYTRSLGVNNSHKLAPFCAGLGGAHAGRAMEARNYDKVVNRDEITDATASAFADGGQIPEKYIRTEEVLDGVVVGDDESYELPVVDMARLLDPESSALEIAKLGDACRNWGFFQLTNHGADEGVVQRMKDSTVQFFSTPLESKKKVAVREKGFEGFGHHYSRASSGHKLDWAESVILITQPPQDRKMEMWPTNPPTFREALEVYSVEMIGLAERLLGFMAADLGVERAALLDAFTGRRQSMAIHYYPPCRHREKVMGITPHTDGLGLTLLLHVDDTPGLQIRKGGRWFPVRPLPGAFVVNVADILEVLSNGAYRSVEHRVIPDAERARTTVVIFQEAAVGGXVAPLSGLVAEGGGEARYKSIEVEEYIKGNFNALMEGTRFIDSLRI

SEQ ID NO: 76820 - protein, 450 aa, Setaria italica
  Transcript Sequence Number=SeqID_10846
MLHHSNSRNQRNRGSRIKTLLQATLLVGVIFWLLYQVKHSYYKKNEYLDDAEDQLAHNDRSMFQGRKEKAGSYSDSNVEVVGKPEEGSVDHNSDTSDHNGEKSGETVFDKDSSDLHEDDKRNTESSEAEEGQVNSADGNAEAHSNNSEDETTGHAEENKHDTESNSDTEGKSEVHSTGDDMSQNNQAQEESTGETSGTSHDEVVQGDESTGASGNGSDGEEGEKKEALGTQTGSESLPDDAKTETSNDHGMGSLPDETGNIPSVHTDNSQNDANENQGDAAFTTSGSSEHGTGAAEHIETGLEDESASSSSGAGSGDDKNNLSDSTSAEEKTGTASDGDEKGAETGTSNEMSNSENNSAVTDQATNTEAENSKGDSDSSGEGVNGSSDETANKSNGATETSNNGGQVDPKIETSTSTNDEHNESQGGDGGSGSSDSNGSGPEQTGKTESQ

SEQ ID NO: 76821 - protein, 163 aa, Setaria italica
  Transcript Sequence Number=SeqID_10847
MDTVTPAPLQAAAGAEGPICGMPDFKMSGKKSDELEPTDAGDEDDGGDDGDEDGDFGEGEEDISEGEGYDNPKANENKKKQRGDAEENGEEAEEEPEDQEGGGGDDDDDDDDDDDDDGGEDDDDDDGGEDDDDAVDGEDEDQDEDEEEDDDEDSLQPPKKRKK

SEQ ID NO: 76822 - protein, 55 aa, Setaria italica; identical to SEQ ID NO: 76740
  Transcript Sequence Number=SeqID_10848
  Gene Ontology: Mol. function=helicase activity
  Homolog annotation: Hit_ID=Q2R0Z1; Match level="QueryCoverage=76%, HitCoverage=1%, E-value=5e-17, Identity=88%"; Hit description=AT hook motif-containing protein, putative

SEQ ID NO: 76823 - protein, 134 aa, Setaria italica
  Transcript Sequence Number=SeqID_10849
ELKPSLTSNICLNQINNTMTIKISSLTTSATMLNMSSLIDLFIPYWHQQSPINLSVIFHSSSSPSPAYRLKAFSKYFGCPRFPVSKNARELKISTPVFHIVELQWPPLPPCPMDLPLSRRRRRRGWHGWREAPR

SEQ ID NO: 76824 - protein, 710 aa, Setaria italica
  misc_feature (637)..(637): Xaa can be any naturally occurring amino acid
  Transcript Sequence Number=SeqID_10850
  Gene Ontology: Mol. function=protein serine/threonine kinase activity; Cellular component=intrinsic to membrane; Biological process=regulation of transcription, DNA-dependent
  Homolog annotation: Hit_ID=B9RCK4; Match level="QueryCoverage=74%, HitCoverage=79%, E-value=1e-157, Identity=58%"; Hit description =Transcription factor, putative
MDKTTRDLEFGSDINSLKSYCYWSTAEDTALHKDSTPDSTAYSSFSISNSKASKRKQGAMAGVKGTGNPLLTLGLGCSPSSSDNSKLSSGTACVMSSSLLKDIDDESSVDLGLNLGFYVSNDIAPCQQKSHGVKNAPLTNSSKLDLQLSLSTGSPESVVIDANMMSPNCLEMPMTNSSPAIVGEGSVPHNWIFDHSVVSSSYASEATCSFPFPKKTDEGNPSAPSPVISSAMFTSVKSPGASTSETTNPQLRSSNTKSCQFPGCMKGARGASGRCIAHGGGRRCQKPGCQKGAEGRTIYCKAHGGGRRCQFLGCTKSAEGRTDHCIAHGGGHRCSHEGCSRAARGKSGLCIKHGGGKRCQKENCTKSAEGHSGLCIAHGGGRRCQFPDCTKGAQGSTKFCKAHGGGKRCTFLGCTRGAEGSTAFCKGHGGGKRCAFQGGGVCPKSVHGGTQYCVAHGGGKRCASSGCTKSARGRTDYCVRHGGGKRCKSEGCTKSAQGSTDFCKAHGGGKRCSWGQADATFGIGVQQCDRFVRSKTGLCSAHSALVQDHCVHGGGTLGPAIHQFAMNAKPTEMKVAAVKGDPHEKTILGGPLRNGAVHPSAPAQPMTNDPLPEGRVHGGGLLALLSRGGSNTSAGGXRELCFRQDCVDVMVSGSPRNWLPAVLISSQSLCCGGLSQPFRFLQLCCSCSGLIGSTQDVYYENKRVALRPWG

SEQ ID NO: 76825 - protein, 464 aa, Setaria italica
  misc_feature (107)..(107): Xaa can be any naturally occurring amino acid
  Transcript Sequence Number=SeqID_10851
  Gene Ontology: Mol. function=hydrolase activity
  Homolog annotation: Hit_ID=B9R7H1; Match level="QueryCoverage=97%, HitCoverage=45%, E-value=0.0, Identity=66%"; Hit description =Hydrolase, putative
LIRYNTKVLQVGENDSVIVVTHEPNWLLDWYWKETTGKNVSHLIQEYLNGRCRLRMAGDLHHFMRHSATRSEKPNFVQHLLVNGCGGAFLHPTHVFRNFERFSGTEXTYECKAAYPSYDESSGIALGNILKFRKKNWQFDTIGGFIYFILVFSMFPQCNLVHIFNEETWSGRVKSFSSTIWSALLYIFEHSYVSSVASLTLLMASYSFVPSKLSRRKRAIIGGLHVLAHLTAALLLMLLLELGIEICIRNHLLATSGYHTLYEWYRSMESEHFPDPTGLRSRLEQWTLGLYPACIKYLMSAFDVPEVMAVTRINICKNGMMSLSRSVLIMYYTSVFIYFWIFSTPVVSLIFGSYLYICINWFHIHFDEAFSSLRIANYKSFTRFHIKKDGDLEIFTLAVDKVPKDWKLDPRWESDVRGPHQLSHERKHPSKWRSASSPDPVRSVRVVDHFTIERTRTPDMEPSC

SEQ ID NO: 76826 - protein, 474 aa, Setaria italica
  misc_feature (128)..(128): Xaa can be any naturally occurring amino acid
  Transcript Sequence Number=SeqID_10852
  Gene Ontology: Mol. function=glutamate-tRNA ligase activity; Cellular component=cytoplasm; Biological process=tRNA aminoacylation for protein translation
  Homolog annotation: Hit_ID=Q43768; Match level="QueryCoverage=97%, HitCoverage=82%, E-value=0.0, Identity=84%"; Hit description =Glutamyl-tRNA synthetase
  Pfam annotation: Domain name=tRNA-synt_1c; Domain location=1-275; Score=293.3; E_value=5.2e-85; Accession=PF00749.13; Description=tRNA synthetases class I (E and Q), catalytic domain
RSTRKSEEAVLADLAWLGLQWDEGPDVGGEFGPYRQSERNSLYKQYAEKLLDSGAVYRCFCSNEELEQMKEVAKQRQLPPVYMGKWATASDVEVEQELEKGTPYTYRFRVPKEGSLKINDLIRGEFHXVSWNLDTLGDFVIMRSNGQPVYNFCVTVDDATMQISHVIRAEEHLPNTLRQALIYKALGFPMPSFAHVSLILAPDKSKLSKRHGATSVGQYKEMGYLPQAMVNYLALLGWGDGTENEFFTIDDLVEKFTINRVNKSGAVFDATKLKWMNGQHLRSFPPDELIKALEDRWKKTCILQESESGFAKEAAELLKDGIDLITEADAALTNLLSYPLHATLSSDEAKPVVQDKISEVASGLISAYDSGELTQALAEGRDGWQKWVKGFGKSLKRKGKGLFMPLRVLLTGKLHGPDMGGSIALIHKAGICGAVTQSNFVTLDERFRILKEVDWESLVKEHESPAESAVPAAS

SEQ ID NO: 76827 - protein, 252 aa, Setaria italica
  misc_feature (129)..(129): Xaa can be any naturally occurring amino acid
  Transcript Sequence Number=SeqID_10853
  Homolog annotation: Hit_ID=Q0VJB4; Match level="QueryCoverage=100%, HitCoverage=100%, E-value=2e-80, Identity=58%"; Hit description =Putative zinc-binding protein
  Pfam annotation: Domain name=PLATZ; Domain location=49-161; Score =266.6; E_value=5.6e-77; Accession=PF04640.6; Description=PLATZ transcription factor
  Pfam annotation: Domain name=zf-B_box; Domain location=48-88; Score =5.8; E_value=0.034; Accession=PF00643.16; Description=B-box zinc finger
  Pfam module annotation: Pfam domain module=PLATZ::zf-B_box; Domain location=49-161::48-88
MAIEDESPQLRVNTTRGGAMGGGECDGAENQRWPPWLKPLLGTSFFGQCKLHADAHKSECNMYCLDCMNGALCSQCLAYHRDHHAIQIRRSSYHDVIRVSEIQKVLDITGVQTYIINSARVVFLNERPXQPRPGKGVTNTCEVCERSLLDTFRFCSLGCKIVGTSGEFRIRKKHAAIKKKKKLPHKGGAAAAAASDSEDDSSTSTSGGSDKSSVVQSFTPSTPPATANSFRTGKRRKGVPHRSPFGSLMVEF

SEQ ID NO: 76828 - protein, 501 aa, Setaria italica
  misc_feature (33)..(33): Xaa can be any naturally occurring amino acid
  Transcript Sequence Number=SeqID_10854
  Gene Ontology: Mol. function=transporter activity; Cellular component= membrane; Biological process=oligopeptide transport
  Homolog annotation: Hit_ID=Q5N746; Match level="QueryCoverage=99%, HitCoverage=92%, E-value=1e-176, Identity=61%"; Hit description =Putative oligopeptide transporter
  Pfam annotation: Domain name=MFS_1; Domain location=3-435; Score=6.9; E_value=0.017; Accession=PF07690.8; Description=Major Facilitator Superfamily
  Pfam annotation: Domain name=PTR2; Domain location=66-427; Score =277.6; E_value=2.7e-80; Accession=PF00854.13; Description=POT family
  Pfam module annotation: Pfam domain module=MFS_1::PTR2; Domain location=3-435::66-427
MFVLGVEIAERFAYHGVSANLISYLTGPLGESXTAGAAAAINAWSGVATMLPLLMACVADAWLGRYRTIVLASLLFVVSMGMLTVSALPVFHQDGCSYSSSSLACSPSPVQVAIFYVSLYLVALAEAGHKPCAQAFGADQFDQHDPKESVSRSSFFNWWYFGMCSGTAATTMVSSYIQDNVGWGLGFGIPCLVMVFALLAFLLGTRNYRYYTSTESSPFARLARAFVAMIRGSKSSQCDSLATDDAAHREEVKGVLRLFPIWATCIIYAVIFSQSSTFFTKQAATLDRRIGSTLRVPPAALQTFISLTIMAFIPVYDRAFVPLARPFTRLSSGITMLQRIGTGLVLAMVAMAVAALVEMRRLGVARDAGLVDQPKAALPMTLWWMLPQYVLFGLSDVFAMIGLQEFFYDQVPDALRSLGLAFFLSIFGVGHFLSSFLISAIDGATKKSGASWFSNNLNRAHLDYFYWLLAGLCAVELAAFVIVSRVYVYKKRVSHDNGAVM

SEQ ID NO: 76829 - protein, 302 aa, Setaria italica
  misc_feature (124)..(124): Xaa can be any naturally occurring amino acid
  misc_feature (227)..(227): Xaa can be any naturally occurring amino acid
  Transcript Sequence Number=SeqID_10855
  Gene Ontology: Biological process=cell redox homeostasis
  Homolog annotation: Hit_ID=B6T4Q6; Match level="QueryCoverage=91%, HitCoverage=90%, E-value=1e-124, Identity=81%"; Hit description =Electron transporter/ thiol-disulfide exchange intermediate
  Pfam annotation: Domain name=Thioredoxin; Domain location=184-295; Score=1.7; E_value=0.00016; Accession=PF00085.12; Description =Thioredoxin
  Subcellular localization annotation: CTP_CleavageSite=33; ConfidenceScore=5.77e-01
MASTAAAATFLSTLARATASLSSSAKVVRFLPAAQAGQGRRRAVLSAPRAAVSGTEKAPPPPSDKGQSKDERVVKVNNAEEFDGALKAAKNRLVVVEFAASDNESSSQIYPTMVQLSRTCGDVXFLLVMEDESEATKELCRREGITQVPHFSFYKGAEKVHEEEAIGPERLAGDVLYYGDSHSAVVQLHSREDVEALIDEHRGDKGKLVVLDVGLKHCGPCVKVYPXTVVKLSRSMAETTVFARMNGDENDSCMQFLSDMDIVEVPTFVFIRDGKIVGRYVGSGKGELVGEILRYNGVRVTY

SEQ ID NO: 76830 - protein, 654 aa, Setaria italica
  Transcript Sequence Number=SeqID_10856
  Gene Ontology: Mol. function=protein serine/threonine kinase activity; Cellular component=intrinsic to membrane; Biological process=regulation of transcription, DNA-dependent
  Homolog annotation: Hit_ID=B9RCK4; Match level="QueryCoverage=87%, HitCoverage=85%, E-value=1e-159, Identity=54%"; Hit description =Transcription factor, putative
LEWTGPPQTLGSGGNINSLNNLCHWSTVQLAAEYKDTATGTLVYSNFSKDNPRALKRKWIDMAGVEGPENPLPTLGLGRSPSSSENSKGSSPTACIMSPSSVKETDEESSMDLGLNFDLCLGHDVVHHHKKPHAGAENIPSASAPKLDLQLSLSTCSPESAVTNASTASLDVHDGLETVVPNSVTDTIGRKSEPSSWVFGHYMASSSYASEATYSFSLAKIPQKVDDAVPSPDVSSAITVSVKSPAACTSGATNPLKRNTNTKCCQFPGCEKGARGASGYCIAHGGGRRCQKPGCQKGAEGRTIYCKAHGGGRRCQYLGCTKSAEGRTDHCIAHGGGRRCSQEGCSRAARGKSGLCIKHGGGKRCQRENCKRSAEGYTGLCISHGGGRRCQFPDCTKGAQGSTKFCKAHGGGKRCTFPGCAKGAEGSTSFCKGHGGGKRCSYQGGGVCPKSVHGGTQYCVAHGGGKRCSVSGCTKSARGRTEYCVRHGGGKRCKFEGCAKSAQGSTDFCKAHGGGKRCSWGQEGSSFGVGGPPCDKFARSKIGLCAAHSALIEDHCVHGGGSLDPAIKQFTTDAKSDEMNVTATKGDVDMANSDNEAVMVWSDHGIPTDPGTTPFPEGRVHGSGLLALLSGRSHACASSSENDASTSASMRSWM

SEQ ID NO: 76831 - protein, 287 aa, Setaria italica
  Transcript Sequence Number=SeqID_10857
  Gene Ontology: Cellular component=integral to membrane; Biological process=protein transport
  Homolog annotation: Hit_ID=Q7F613; Match level="QueryCoverage=100%, HitCoverage=100%, E-value=1e-137, Identity=83%"; Hit description =Secretory carrier-associated membrane protein 2
  Pfam annotation: Domain name=SCAMP; Domain location=95-269; Score =378.9; E_value=8.9e-111; Accession=PF04144.5; Description=SCAMP family
MAGRYDRNPFDEDDVNPFAGGSVPPASNSRMPPLPHEPAGFYNDRGATVDIPLDSTKDMNKKEKELQAKEAELNKRERELKRKEEAAARAGIVIEDKNWPPFMPIIHHDISNEIPVHLQRMQYLAFSSLLGLTACLFWNIIATTAAWIKGEGVMIWLLAIIYFISGVPGAYVLWYRPLYNAMRTESALKFGWFFLFYLLHILFCVWSAVAPPFPFKGKSLAGILPAIDVIGRSAIVGIFYFIGFGLFCLESLLSIAVIQQVYMYFRGSGKEAEMKREAARGALRNAF

SEQ ID NO: 76832 - protein, 640 aa, Setaria italica
  Transcript Sequence Number=SeqID_10858
  Gene Ontology: Mol. function=phospholipase D activity; Cellular component=membrane; Biological process=phosphatidylcholine metabolic process
  Homolog annotation: Hit_ID=P93844; Match level="QueryCoverage=100%, HitCoverage=78%, E-value=0.0, Identity=86%"; Hit description =Phospholipase D alpha 2
  Pfam annotation: Domain name=PLDc; Domain location=156-194; Score =43.6; E_value=8e-10; Accession=PF00614.14; Description=Phospholipase D. Active site motif
  Pfam annotation: Domain name=PLDc; Domain location=485-512; Score =40.7; E_value=6e-09; Accession=PF00614.14; Description=Phospholipase D. Active site motif
  Pfam module annotation: Pfam domain module=PLDc::PLDc; Domain location=156-194::485-512
FSQRPGCRVTLYQDAHVPDAFAPRIPLAGGRLYQQGRCWEDVFDAISNARHLIYITGWSVYTEITLLRDGARPHRPGGDATLGELLKRKASEGVRVLMLVWDDRTSVESLGMTWGFMSTHDAETAEYFRGTDVRCVLCPRNPDVGSSAVKGAQIAYMITHHQKTVVVDHEMPVRRSDRRRIVSFVGGLDLCDGRYDTQFHSLFRTLDTAHHKDFHQPNLAGASIDNGGPREPWHDIHSKIEGPAAWDVLYNFEQRWRKQGGGNDLLVDLNAMADLIIPPSPVMYPDDQETWNVQLFRSIDGGACFGFPSTPEAAAQSGLVSGKNNVLDRSIQDAYIHAIRRAKHFIYIENQYFLGSSFGWKADGIRPEEIEALHLIPKELSLKIVSKIEAGEHFAVYVVLPMWPEGPPAGGSVQAILDWQRRTTEMMYYDISIALEAKRIDANPRDYLTFFCLGNREVKMSGEYEPAGRPLDGSDYARAQNARRFMIYVHSKMMIVDDEYIIVGSANINQRSMDGGRDSEIAMGAFQPCHLNTKGQVARGQVHGFRMSLWYEHLGMLHDDFLNPGNLECVQRVNKMADKYWDLYASDYLDADLPGHLLRYPINVTKEGTVTELPGAKYFPDTQATVLGMKSNKLPPILTT

SEQ ID NO: 76833 - protein, 281 aa, Setaria italica
  misc_feature (226)..(226): Xaa can be any naturally occurring amino acid
  Transcript Sequence Number=SeqID_10859
  Gene Ontology: Cellular component=integral to membrane; Biological process=protein transport
  Homolog annotation: Hit_ID=Q60EA5; Match level="QueryCoverage=100%, HitCoverage=100%, E-value=1e-127, Identity=85%"; Hit description =Secretory carrier-associated membrane protein 3
  Pfam annotation: Domain name=SCAMP; Domain location=88-263; Score =362.0; E_value=1.1e-105; Accession=PF04144.5; Description=SCAMP family
MAGKRNGYDDDNVNPFAGGSVPPATNSRLSPLSHEPADFYNVDIPLDSTKDLKKKEKELQAMEAELNKRERELKRKEEAASRAGIVIEEKNWPPLFPLIHHNISNEIPIHLQRTQYLAFSSFLGLIGCLFFNVIATTTAWIKGEGVIIWLLAIIYFISGAPGAYVLWYRPLYNAMRTESALKFGWFFLFYMIHIIFCVWAAVAPPFPFKGKSLAGILPAIDVIKSXSAIVGIFYFVGFGLFCLESLLSIAVIQQVYMYFRGSGKAAEMKREAARGALSSAF

SEQ ID NO: 76834 - protein, 369 aa, Setaria italica
  misc_feature (120)..(120): Xaa can be any naturally occurring amino acid
  misc_feature (204)..(204): Xaa can be any naturally occurring amino acid
  misc_feature (311)..(311): Xaa can be any naturally occurring amino acid
  Transcript Sequence Number=SeqID_10860
  Gene Ontology: Mol. function=protein serine/threonine kinase activity; Cellular component=cytoplasm; Biological process=protein amino acid phosphorylation
  Homolog annotation: Hit_ID=Q53P85; Match level="QueryCoverage=99%, HitCoverage=61%, E-value=1e-162, Identity=79%"; Hit description =Calcium-dependent protein kinase, isoform AK1, putative, expressed
  Pfam annotation: Domain name=Pkinase; Domain location=1-105; Score= -80.6; E_value=0.0011; Accession=PF00069.17; Description=Protein kinase domain
  Pfam annotation: Domain name=efhand; Domain location=172-200; Score =40.0; E_value=9.3e-09; Accession=PF00036.24; Description=EF hand
  Pfam annotation: Domain name=efhand; Domain location=207-235; Score =27.8; E_value=4.5e-05; Accession=PF00036.24; Description=EF hand
  Pfam annotation: Domain name=efhand; Domain location=243-271; Score =31.7; E_value=3e-06; Accession=PF00036.24; Description=EF hand
  Pfam annotation: Domain name=efhand; Domain location=314-342; Score =1.9; E_value=13; Accession=PF00036.24; Description=EF hand
  Pfam module annotation: Pfam domain module=Pkinase::efhand::efhand::ef hand::efhand; Domain location=1-105::172-200::207-235::243-271::314 -342
MRTPSDKFSDVVGSPYYVAPEVLQKCYGPEADVWSAGVILYILLCGVPPFWAETEAGIFRQILRGKLDFESEPWPSISDSAKDLVRNMLTRDPKKRFSAHEVLCKHTPSSLSWSCGVAVXGHPWIVDDAVAPDTPIDSAVLSRLKHFSAMNKLKKMALRVIAESLSEEEIGGLKELFKMIDTDNSGTITFDELKDGLKRVLRIXQNEIQALMEAADIDNSGTIDYGEFIAATLHMNKLEREENLVSAFSFFDKDGSGFITIDELSQACREFGLDDVHLEDMIKDVDQNNVSRFYILIYSPSPCSSCIHKSXILVVHQLISIWFSLQDGQIDYSEFTAMMRKGNAGAAGRRTMRNSLHLNLGELLNPSKT

SEQ ID NO: 76835 - protein, 359 aa, Setaria italica
  misc_feature (222)..(222): Xaa can be any naturally occurring amino acid
  Transcript Sequence Number=SeqID_10861
  Gene Ontology: Mol. function=oxidoreductase activity; Biological process=oxidation reduction
  Homolog annotation: Hit_ID=B6TBV5; Match level="QueryCoverage=98%, HitCoverage=97%, E-value=1e-116, Identity=58%"; Hit description =Leucoanthocyanidin dioxygenase
  Pfam annotation: Domain name=2OG-FeII_Oxy; Domain location=210-310; Score=106.4; E_value=9.9e-29; Accession=PF03171.12; Description=2OG -Fe(II) oxygenase superfamily
MEVASEKIVNRDEITDTALSLFAGDDSIHIPESYIRTDEVLADEVVGKDEAYELPVVDMAKLLDPDSSAMETEKLGSACRHWGFFQLTNHGVDEAVAQLIKDSTAEFFSLPLDIKNRVAVLGKGAGLEGYGHHYSRGPGDKLDWAEGLILITQPVHERNMKLWPTNPPTFRDALATYSVEMTKLARRLLGFMAADIGDDKGELVEAFTGKRQSMAMHYYPPXCRHPDKVMGITPHTDGLGLTLLLHVDDTPGLQIKKDGRWYPVRPLPGAILINIGDLLDVLTNGAYTSVEHRVIPDAERGRTTVVFVEEGTVGEMVTPLPGLLKEQEPRYKSLDIDDYIKGILKAIPEGTRFADTLKI

SEQ ID NO: 76836 - protein, 117 aa, Setaria italica
  misc_feature (28)..(28): Xaa can be any naturally occurring amino acid
  Transcript Sequence Number=SeqID_10862
  Gene Ontology: Biological process=auxin mediated signaling pathway
  Homolog annotation: Hit_ID=B6ST80; Match level="QueryCoverage=100%, HitCoverage=100%, E-value=2e-38, Identity=70%"; Hit description =Auxin-repressed 12.5 kDa protein
  Pfam annotation: Domain name=Auxin_repressed; Domain location=5-117; Score=209.7; E_value=7.6e-60; Accession=PF05564.4; Description =Dormancyauxin associated protein
MLEKLWDDVVAGPHPETGLEKLRKAATXRPIVIDKDAVAAAGSYKRTQSMPSTPTTPGTPSSSTTPRGGNNVWRSVFHPGSNLATKSMGANLFDRPQPNSPTVYDWLYSDETRSNHR

SEQ ID NO: 76837 - protein, 758 aa, Setaria italica
  misc_feature (502)..(502): Xaa can be any naturally occurring amino acid
  Transcript Sequence Number=SeqID_10863
  Gene Ontology: Mol. function=nucleotide binding; Cellular component =mitochondrion; Biological process=cell division
  Homolog annotation: Hit_ID=B9T3E4; Match level="QueryCoverage=99%, HitCoverage=91%, E-value=0.0, Identity=67%"; Hit description=Dynamin, putative
  Pfam annotation: Domain name=Dynamin_M; Domain location=182-475; Score=454.8; E_value=1.3e-133; Accession=PF01031.12; Description =Dynamin central region
  Pfam annotation: Domain name=Dynamin_N; Domain location=1-173; Score =266.0; E_value=8.8e-77; Accession=PF00350.15; Description=Dynamin family
  Pfam annotation: Domain name=GED; Domain location=597-688; Score =133.5; E_value=6.8e-37; Accession=PF02212.10; Description=Dynamin GTPase effector domain
  Pfam module annotation: Pfam domain module=Dynamin_M::Dynamin_N::GED; Domain location=182-475::1-173::597-688
GKSSVLEALVGRDFLPRGSDICTRRPLVLQLVHQPRRPTDAEADEWGEFLHLSGRRFYDFREIRREIQAETDREAGGNKGVSDRQIRLKIFSPNVLNITLVDLPGITKVPVGDQPTDIEARIRTMIMSYIRHKTCIILAVSPANADLANSDALQMARVADPDGSRTIGVITKLDIMDRGTDARNFLLGNVIPLKLGYVGVVNRSQQDINSDLSIKDALAREEKFFRTQPAYHGLTQYCGIPQLAKKLNQILVQHIKTVLPGLKSRISSQLTAVAKELAVYGDPVDSKAGQGAKLLNILAKYCEAFSSMVEGKNEDISTIELSGGARIHYIFQSIFVKSLEEVDPCEDVTDEDIRMAIQNATGPRSALFVPEVPFEVLVRRQISRLLDPSLQCAQFIYDELVKMSHRCLATELQQFPILRRSMDEVIGKFLRDGLKPAESMIAHIIEMEEDYINTSHPNFIGGSKAVEQAQQQVKAAKMSAAVVRKDGVDADKVQASEKTTKXRAVLGRSVNGVVTDHIQGVRPAAEADRPGSSGSGSTSFWNSIFTSNEDRTHASAKDNSANRSYSVPTPNLEHSFSTIQLREPPAVLKPSEHQSEQEALEIAITKLLLKSYYNIVRKNVEDFIPKAIMHFLVNHTKRALHNYLITKLYREDLLEDLLKEPDEITIKRKQIRENLKVLQQAYKTLDEIPLDAEAVERGGFSLESDVIGLPRAHGLSSSLHGFNDGSSPYSTPKQSRSRRSNHSGEQPPFNPNMSGNGF

SEQ ID NO: 76838 - protein, 485 aa, Setaria italica
  Transcript Sequence Number=SeqID_10864
  Gene Ontology: Mol. function=aldehyde dehydrogenase [NAD(P)+] activity; Cellular component=chloroplast; Biological process =cellular aldehyde metabolic process
  Homolog annotation: Hit_ID=B6SKK8; Match level="QueryCoverage=100%, HitCoverage=100%, E-value=0.0, Identity=89%"; Hit description =Aldehyde dehydrogenase 3B1
  Pfam annotation: Domain name=Aldedh; Domain location=4-441; Score =129.7; E_value=9.7e-36; Accession=PF00171.14; Description=Aldehyde dehydrogenase family
MGSVPAEEMAVDFGGLVGDLREVYESDRTRDLEWRESQLRGLVRLLEEEEEAIFDVLREDLGKHRGEAFRDEVGVLKKSVVDKLQNLKNWAAPEKAHTPLVAFPATAMVVPEPLGVVLIFSCWNLPIGLALEPLSGALAAGNAVVVKPSELAPSTSAFLAANIPKYLDAKAVKVVEGGADVGEKLMEHRWDKVLFTGSSRVGRLIMTKAAKHLTPVALELGSKCPCIIDWLDSNRDSQVAVNRIIGAKWSTCSGQACIAIDYVLVEEEFAPILIEMLKSTLKRFFTKTEYMARILNEKHFKRLSGLLADRRVAASVVHGGHFNPKTLSIEPTLLLNPPLDSDIMTEEIFGPLLPIITVKKIEDSITFLKSKPKPLAIYAFTRNEELKRRIIDETSSGSVTFNDAIVQYGLDSIPFGGVGHSGFGQYHGKYSFEMFSHKKAVLKRSFLIEFMFRYPPWDESKIGFLRRVYRFDYISLFFALIGLRR

SEQ ID NO: 76839 - protein, 146 aa, Setaria italica
  Transcript Sequence Number=SeqID_10865
RTSMVARCAPGPRAHHRGRSPTHRVEQGGGGGSSLCRHSLGARHRLAARVEHGVVVSSRSSTSYYSFTHQISLLLPFSDFPLIELIPDLGFRPWELLLRCTAWLSIPCINFCIWTQISSLINPQSLFFPVFSIYHCSVVLQFLMLY

SEQ ID NO: 76840 - protein, 1207 aa, Setaria italica
  misc_feature (1150)..(1150): Xaa can be any naturally occurring amino acid
  Transcript Sequence Number=SeqID_10866
  Gene Ontology: Mol. function=nucleotide binding; Cellular component =nucleus; Biological process=regulation of transcription, DNA -dependent
  Homolog annotation: Hit_ID=Q852D5; Match level="QueryCoverage=99%, HitCoverage=90%, E-value=0.0, Identity=62%"; Hit description=Powdery mildew resistance protein PM3b, putative, expressed
  Pfam annotation: Domain name=LRR_1; Domain location=1058-1081; Score =0.4; E_value=2.5e+02; Accession=PF00560.25; Description=Leucine Rich Repeat
  Pfam annotation: Domain name=LRR_1; Domain location=1083-1105; Score =1.2; E_value=1.8e+02; Accession=PF00560.25; Description=Leucine Rich Repeat
  Pfam annotation: Domain name=LRR_1; Domain location=1116-1137; Score =7.0; E_value=14; Accession=PF00560.25; Description=Leucine Rich Repeat
  Pfam annotation: Domain name=LRR_1; Domain location=621-643; Score =10.4; E_value=3.2; Accession=PF00560.25; Description=Leucine Rich Repeat
  Pfam annotation: Domain name=LRR_1; Domain location=645-667; Score =9.4; E_value=4.9; Accession=PF00560.25; Description=Leucine Rich Repeat
  Pfam annotation: Domain name=LRR_1; Domain location=801-822; Score =7.5; E_value=11; Accession=PF00560.25; Description=Leucine Rich Repeat
  Pfam annotation: Domain name=LRR_1; Domain location=948-969; Score =12.2; E_value=1.4; Accession=PF00560.25; Description=Leucine Rich Repeat
  Pfam annotation: Domain name=NB-ARC; Domain location=180-465; Score =257.1; E_value=4.1e-74; Accession=PF00931.14; Description=NB-ARC domain
  Pfam module annotation: Pfam domain module=LRR_1::LRR_1::LRR_1::LRR _1::LRR_1::LRR_1::LRR_1::NB-ARC; Domain location=1058-1081::1083 -1105::1116-1137::621-643::645-667::801-822::948-969::180-465
MAEVLATMVVGPLVSMVKEKASSYLLEQYQVMEGLEKQHKLLKRKLPAILDVITDAEEQAAAKREGAKAWLEEIRQVTYQANDVLDEFKYEALRRKAREEGHYKELGMDVIKLFPSHNRFVFRKRMGNKLCMILEELDVLIAEMNTFGFKFRQEPPVPVNHLRESSSKIIDPVDIAGRSRAGDKEKIIKSLLDKASNVNFTVFPIVGMGGMGKTTLAQLVYNDPEIQKHFQLRLWVCVSDNFDVDTLAKRIVEEAKKNGCQANGSSALDKLQNAVSGKRYLLVLDDVWNRDEAHKWEKLKSYLQHGGSGSSVLTTTRDQEVAKLMMGTAKGAYELGRLGENFIEEIIKSRAFSSKQEKDWPRELVNMVGDVAKRCAGSPLAATALGSVLSTKTTAREWKDVLRTKKICDDRNGILPVLKLSYNCLPAHMRQCFAFCAMFPKDYVIDVEMLIQLWMANGFIPVLQGEEHPEILGKNIFIELASRSFFQDVKGIPFEFTDIEVSRVTCKIHDLMHDVALDSMGKECASIGTEQSKSGDFPHSARHLLLSVYRPETLLNASQEKGSPVIQTLICEGYVDKDLQHLSKYMSARALKIKGDSTSWTMLGLELWRQTSFLKPVWLHHLRYLDLSGSYVLESLPEDISILYHLQTLKLSYCYSLGRLPKGMKYMTALRHLYTHGCSKLKSMPADLRDLTSLQTLTCFVAGAGSDCSRVGELRRLDDLGGQLELKRLENVKESDAKEAKLGNKKNLARLTLRWSDCDKEAHNSDKEVLEGLEPHDGLKVLKIYSCSINICPTWMNKLQGIVKLKLSDCKRLEKLPAFWQFPALQILCLCGLENIRYLCSSDTTFTFQKLKDLAIFKMPNFATWWGTSAVRGEKPIFPLLEKLLIKECKGLAALPKASVIKEPFGGVETEYRSAFPALKEMELEKLEMFQQWEAGQGNPEEELAFHRLEKLSISNCPALTTLPEAPKLSGLLLRGASQQILSLQLQAASRYITSLSRLELLADDPETESVAEQNSSELVHGKEKWEHKSPLTRMTLQRYNLLFSHSSALPLWTCFAQLVDLKISYCDALFYWPENVFQALVSLRTLDIVRCSKLTGRTQETSEQSAPERSGLLPCLESLSLDYCPSLVEVPNLPASLKILRICNCRMLXSIIFGQQEDTSSLIPGSSSQARVSTPVLKLSSSTNHPFIPCLESLGIFSCHGLLEVA

SEQ ID NO: 76841 - protein, 346 aa, Setaria italica
  Transcript Sequence Number=SeqID_10867
  Gene Ontology: Mol. function=protein serine/threonine phosphatase activity; Cellular component=protein serine/threonine phosphatase complex; Biological process=protein amino acid dephosphorylation
  Homolog annotation: Hit_ID=B4FBQ5; Match level="QueryCoverage=91%, HitCoverage=89%, E-value=1e-148, Identity=85%"; Hit description =Protein phosphatase 2C isoform epsilon
  Pfam annotation: Domain name=PP2C; Domain location=75-315; Score =256.3; E_value=7.3e-74; Accession=PF00481.13; Description=Protein phosphatase 2C
MRKGPWGPPPSARLSLLLLLLLLLLLLAGRPASCSCCCRGERAEEVAAPRMGLDGDGPPDAAAGGHISNSANGRFTYGVASSPGKRASMEDFSEARIDDVDGEKVGMFGVYDGHGGVRAAEYVKQHLFSNLIKHPKFITDTKAAIAETYNHTDSEFLKADSSQTRDAGSTASTAIIVGDRLLVANVGDSRAVICKGGQAIAVSRDHKPDQSDERQRIEDAGGFVMWAGTWRVGGVLAVSRAFGDKLLKQYVVADPEIKDEVVDSSLEFLILASDGLWDVVTNEEAVAMVKPIQDPQEAADKLLQEASKRGSSDNITVVIVRFLEGTTPGDKSEEKEKETANDQNSS

SEQ ID NO: 76842 - protein, 385 aa, Setaria italica
  misc_feature (79)..(79): Xaa can be any naturally occurring amino acid
  misc_feature (96)..(96): Xaa can be any naturally occurring amino acid
  Transcript Sequence Number=SeqID_10868
  Gene Ontology: Mol. function=aldehyde dehydrogenase [NAD(P)+] activity; Cellular component=chloroplast; Biological process =cellular aldehyde metabolic process
  Homolog annotation: Hit_ID=B6TXC0; Match level="QueryCoverage=94%, HitCoverage=73%, E-value=0.0, Identity=90%"; Hit description =Aldehyde dehydrogenase 3B1
  Pfam annotation: Domain name=Aldedh; Domain location=7-341; Score= -13.8; E_value=7.1e-18; Accession=PF00171.14; Description=Aldehyde dehydrogenase family
DRGTVGFASTVASYSQSLVVPRAGLSLEPLIGAIAAGNAVALKPSELSPCTAKFLADNIGRYVDPSAVKVVQGGPEVGXQLMEHRWDKVLFTDDGXGSPRIARSVMAAASRHLTPVALELGGKCPCIFDAMPGGRDLQVSVNRIIGGKWSSCAGQACIAIDYVLVEERFAPVLIKMLKSTLKRFFQEADHMARIVNERNFERLSSLLKDRAVAPSILHGGSMDAKNLYIEPTILLNPPLDSAIMTEEIFGPLLPIITVKKIEDSIAFVKARPKPLAIYAFTRDAALRRRIVDETSSGTVTFNDAVVQYAIDGLPFGGVGQSGFGQYHGKYSFEMFSHKKAIMKRGYLIELALRYPPWDERKVTLMRHLYRFNYFAFVLSFLGLRR

SEQ ID NO: 76843 - protein, 299 aa, Setaria italica
  Transcript Sequence Number=SeqID_10869
  Gene Ontology: Mol. function=methyltransferase activity; Biological process=porphyrin biosynthetic process
  Homolog annotation: Hit_ID=P93628; Match level="QueryCoverage=86%, HitCoverage=60%, E-value=1e-138, Identity=95%"; Hit description =Uroporphyrinogen III methyltransferase
  Pfam annotation: Domain name=TP_methylase; Domain location=40-253; Score=256.3; E_value=7.5e-74; Accession=PF00590.12; Description =Tetrapyrrole (CorrinPorphyrin) Methylases
GRRDDEIALQLPELRRLLDALRASRGRSAEGEGGGGGPGRVALVGTGPGDPELLTLKAVRAIEVADLVLYDRLVSNDVLDLVGEGARLLYVGKTAGYHSRTQEEIHELLLSFAEAGANVVRLKGGDPLVFGRGGEEMDFLQQQGIRVEIIPGITSASGIAAELGIPLTHRGVATSVRFLTGHSRNGGTDPLYVAGNAADPDTTLVVYMGLSTLPSLAPKLMKHGLPPDTPAVAVERGTTPQQRMVFALLKDLVDEVKLADLVSPTLIIIGKVVALSPFWVEPSEHDALKTENSYASEAR

SEQ ID NO: 76844 - protein, 410 aa, Setaria italica
  misc_feature (133)..(133): Xaa can be any naturally occurring amino acid
  misc_feature (141)..(141): Xaa can be any naturally occurring amino acid
  misc_feature (150)..(150): Xaa can be any naturally occurring amino acid
  misc_feature (253)..(253): Xaa can be any naturally occurring amino acid
  misc_feature (260)..(260): Xaa can be any naturally occurring amino acid
  Transcript Sequence Number=SeqID_10870
  Gene Ontology: Mol. function=hydrolase activity, hydrolyzing O -glycosyl compounds; Cellular component=anchored to membrane; Biological process=carbohydrate metabolic process
  Homolog annotation: Hit_ID=B6T478; Match level="QueryCoverage=89%, HitCoverage=89%, E-value=1e-169, Identity=83%"; Hit description =Glucan endo-1,3-beta-glucosidase 7
  Pfam annotation: Domain name=Glyco_hydro_17; Domain location=31-352; Score=348.6; E_value=1.2e-101; Accession=PF00332.10; Description =Glycosyl hydrolases family 17
MGLRVRASSLLLALALELAVALVSVSAQQKFGINYGQIANDLPDPTRVAGLLQSMNVNKVKLYDADPRVLTAFANTGVEFIIAVGNENLQTMAANPAAARQWVATHVQPYIPATRITCVTVGNEVFSSNDTVXLSSLLPAXMKAVSDALXDLGLGGQVTVSSAHSVNVLATSFPPSSGAFREDLAEYIQPILDFHGQTRSPFLINAYPFFAYKASPGSVSLPYVLFEPNPGVRDPNTNLGYDNMLYAQIDAVXSAMKAMXGHTDVAVRISETGWPSKGDEDETGATVQNAAAYTGNLMQRIAMNQGTPLKPNVPIDVYVFALFNEDMKPGPTSERNYGLFYPNGSPVYAINAGSGSGSGGGGGFGPGGSLNPYYTSMFSSSSKLAVSTAFLTERVILLLLLQAIVILLQS

SEQ ID NO: 76845 - protein, 489 aa, Setaria italica
  Transcript Sequence Number=SeqID_10871
  Gene Ontology: Mol. function=hydrolase activity, hydrolyzing O -glycosyl compounds; Cellular component=anchored to membrane; Biological process=carbohydrate metabolic process
  Homolog annotation: Hit_ID=Q9ZNY6; Match level="QueryCoverage=67%, HitCoverage=87%, E-value=1e-157, Identity=85%"; Hit description=Beta- 1,3-glucanase
  Pfam annotation: Domain name=Glyco_hydro_17; Domain location=31-352; Score=455.8; E_value=6.6e-134; Accession=PF00332.10; Description =Glycosyl hydrolases family 17
  Pfam annotation: Domain name=X8; Domain location=400-485; Score =162.3; E_value=1.4e-45; Accession=PF07983.5; Description=X8 domain
  Pfam module annotation: Pfam domain module=Glyco_hydro_17::X8; Domain location=31-352::400-485
MALPRRALLVAGLLAAALPLLLVCPAEAGTVGVNYGRVANNLPNPSAVVQLLKQQGITQVKLYDTDPTVLRALANTGVKVVVALPNEQVAAAASRASYALLWVRRNVAAYYPATQIQGIAVGNEVFATAKNVTAQLVPAMVNVHAALARLGLDKAVKVSSPVALTALANSYPSSAGVFREDLAQPVMKPMLDFLAQTGSYLMVNAYPFFAYSANAGDISLDYALFRPNAGVQDAGNGLKYYSLLDAQLDAVFAAVNRLGNYNGVRVVVSETGWPSKGDASEVGASPANAAAYNGNLARRVLSGNAGTPLRPNADMDVYLFALFNENQKPGPTSERNYGVFYPNQQKVYDVEFVLGAGGAAGGGSQGNGGLGWQENGGPSSGSGSTSGNPPSGVKVTTGEAWCVANAAVGEQRLLAALNYACGEGGANCKDIQPGAACFEPNTMVAHASYAFNDYFQRKGRTIGTCDFAGAAYVVNQAPKMGKCDLPSTV

SEQ ID NO: 76846 - protein, 457 aa, Setaria italica
  Transcript Sequence Number=SeqID_10872
  Gene Ontology: Mol. function=protein dimerization activity; Cellular component=cytoplasm; Biological process=amino acid metabolic process
  Homolog annotation: Hit_ID=B6T4W6; Match level="QueryCoverage=100%, HitCoverage=100%, E-value=0.0, Identity=84%"; Hit description =Aminoacylase-1
  Pfam annotation: Domain name=M20_dimer; Domain location=219-338; Score=8.7; E_value=0.035; Accession=PF07687.6; Description=Peptidase dimerisation domain
  Pfam annotation: Domain name=Peptidase_M20; Domain location=106-440; Score=152.3; E_value=1.5e-42; Accession=PF01546.20; Description =Peptidase family M20M25M40
  Pfam annotation: Domain name=Peptidase_M28; Domain location=103-428; Score=-44.5; E_value=0.0032; Accession=PF04389.9; Description =Peptidase family M28
  Pfam module annotation: Pfam domain module=M20_dimer::Peptidase _M20::Peptidase_M28; Domain location=219-338::106-440::103-428
  Subcellular localization annotation: CTP_CleavageSite=28; ConfidenceScore=5.08e-01
MGTKNLSRKHPASMATASATLLLSLALLASAAASSPSSDADAISRFQEYLRIDTAQPAPDYAAAVAFLRGQASEAGLEARTLELVAGKPLLLLRWPGRRSSLPSILLNSHTDVVPSEPHKWDHPPFSAALDEASGRIYARGSQDMKCVGMQYLEAIRRLRSAGFVPDRNIYIIFVPDEEIGGHEGVELFVSSKEFKEMNVGLVLDEGLASPGEEYRVFYAERSPWWLTIKAKGAPGHGAKLYDGSAMENLMKSVEVIRRFRTSQFDLVKSGEKAEGDVVSVNFAYLKAGTPTPTGFVMNLQPSEAEVGLDIRIPPSAHVEALERRLVEEWAPSSRNLTFEFKQKMSVLDNYGKPAITPADSTNPWWLLLEEAVKSAGGKLGKPEIFPASTDARYFRQIGLPAFGFSPMANTPILLHDHNEFLRKDEYLKGIGIYESIIRALATHKDGSKDDESRAEL

SEQ ID NO: 76847 - protein, 366 aa, Setaria italica
  misc_feature (145)..(145): Xaa can be any naturally occurring amino acid
  misc_feature (334)..(334): Xaa can be any naturally occurring amino acid
  Transcript Sequence Number=SeqID_10873
  Gene Ontology: Mol. function=transferase activity, transferring groups other than amino-acyl groups
  Homolog annotation: Hit_ID=B4F922; Match level="QueryCoverage=99%, HitCoverage=79%, E-value=1e-160, Identity=80%"; Hit description =Acyltransferase
  Pfam annotation: Domain name=Transferase; Domain location=1-362; Score=54.8; E_value=1.5e-13; Accession=PF02458.7; Description =Transferase family
ADGALAVEGDEGAEVLEAEAQGVAVDDLARGDCDEEAQRVMQRLVPYTGVMNLEGLRRPLLAVQFTKLKDGLAVGCAFNHAVLDGTSTWHFMSYWAELSRTGGGKEASSQQLPPQPIHERSLARSVRVRLDLPESAEAHEKTDPXNGPKKALVARVFSFPEPSVARIKAAANAALPPGAKPFSTFQSLGAHIWRAVSRARGLGPADITAFAVFADCRARLDPPLPPAYFGNLIQAVFTGVPAGMLLGGPPELAAGLLQKAIDDHDAAAVTRRLEEYEAAPKLFHYSDAGPNCVAVGSSPRFKVYDVDFGFGRPERVRSGGNNKFDGMVYLYPGXAGGEGGIDVELALQPEPMQRLEKDADFLLLSA

SEQ ID NO: 76848 - protein, 805 aa, Setaria italica
  misc_feature (48)..(48): Xaa can be any naturally occurring amino acid
  Transcript Sequence Number=SeqID_10874
  Gene Ontology: Mol. function=protein binding; Cellular component =nucleus; Biological process=regulation of transcription, DNA -dependent
  Homolog annotation: Hit_ID=B9RWJ4; Match level="QueryCoverage=100%, HitCoverage=100%, E-value=0.0, Identity=59%"; Hit description=WD -repeat protein, putative
  Pfam annotation: Domain name=LisH; Domain location=10-36; Score=36.3; E_value=1.2e-07; Accession=PF08513.3; Description=LisH
  Pfam annotation: Domain name=SSDP; Domain location=73-281; Score= -80.0; E_value=0.0027; Accession=PF04503.5; Description=Single -stranded DNA binding protein, SSDP
  Pfam annotation: Domain name=WD40; Domain location=518-556; Score =18.5; E_value=0.027; Accession=PF00400.24; Description=WD domain, G -beta repeat
  Pfam annotation: Domain name=WD40; Domain location=560-598; Score =40.4; E_value=7.1e-09; Accession=PF00400.24; Description=WD domain, G-beta repeat
  Pfam annotation: Domain name=WD40; Domain location=603-642; Score =30.8; E_value=5.4e-06; Accession=PF00400.24; Description=WD domain, G-beta repeat
  Pfam annotation: Domain name=WD40; Domain location=643-681; Score =1.5; E_value=26; Accession=PF00400.24; Description=WD domain, G-beta repeat
  Pfam annotation: Domain name=WD40; Domain location=685-722; Score =30.3; E_value=7.6e-06; Accession=PF00400.24; Description=WD domain, G-beta repeat
  Pfam annotation: Domain name=WD40; Domain location=726-764; Score =15.7; E_value=0.2; Accession=PF00400.24; Description=WD domain, G -beta repeat
  Pfam annotation: Domain name=WD40; Domain location=767-805; Score =30.9; E_value=5.1e-06; Accession=PF00400.24; Description=WD domain, G-beta repeat
  Pfam module annotation: Pfam domain module=LisH::SSDP::WD40::WD40::WD4 0::WD40::WD40::WD40::WD40; Domain location=10-36::73-281::518 -556::560-598::603-642::643-681::685-722::726-764::767-805
MAQSNWEADKMLDVYIYDYLLKRNLQTTAKAFMAEGKVAADPVAIDAXPGGFLFEWWSVFWDIFIARTNEKHSEVAAAYLEAQQIKAREHQQQMQMQQLQLMQQRHAQLQRTNASHPSLNGPINALNSDGILGPSTASVLAAKMYEERLKHPHSMDSEGSQLLDASRMALLKSAATNHAGQLVPGTPGNVSTTLQQIQARNQQTIDIKGEGNMGVPQRSLPMDPSSLYGQGIIHPKPGLSGAGLNQGVSGLPLKGWPLTGIDQLRPNLGAQMQKPFLSTQSQFQLMSPQQQQQYLAQAQAQGNLGNSTNYGDIDPRRLTALTRSGLNGKDGQPAGTDGCISSPMQSSSPKVRPDQEYLIKQTSSQQPQEQLQQQQQNQQQQQQQQQSQQQQMQQNNRKRKQPTSSGPANSTGTGNTVGPSANSPPSTPSTHTPGDGLGMAGNMCHVPKNLMMYGADGTGLASSSNQMDDLEQFGDVGSLDDNVESFLSNDDGDARDIFAALKRSPAEPNPTTSKGFTFSEVNCWRTSNSKVVCCHFSTDGKILASAGHEKKAVLWNMENFQTQYTSEEHGGIITDVRFRPNSNHLATSSFDRTIKLWNAADPGFSLHTFTGHSFQVTSLDFHPKKTDLLCSCDGNGEIRYWNVTQLTCMRAIKGGTAQVRFQPNAGQFLAAAAENMVSIFDIETHGKKYTLQGHNTDVQSVCWDNSGEYLASVSQDLVKVWSISSGECIHELSSNGNKFHSCVFHPSYTSLLVIGGYQSLEVWNMVKNQSLTVQAHEGLIAALAQSPVTGMVASASHDNSVKVWK

SEQ ID NO: 76849 - protein, 421 aa, Setaria italica
  Transcript Sequence Number=SeqID_10875
  Gene Ontology: Mol. function=hydrolase activity, acting on carbon -nitrogen (but not peptide) bonds, in cyclic amides; Cellular component=mitochondrion; Biological process=pyrimidine base biosynthetic process
  Homolog annotation: Hit_ID=B6U6Z4; Match level="QueryCoverage=91%, HitCoverage=96%, E-value=0.0, Identity=88%"; Hit description =Dihydroorotase
  Pfam annotation: Domain name=Amidohydro_1; Domain location=83-417; Score=55.2; E_value=2.5e-13; Accession=PF01979.12; Description =Amidohydrolase family
  Subcellular localization annotation: CTP_CleavageSite=63; ConfidenceScore=5.69e-01
MLQKFDPSVICEHSFGKPMQAASTTTTVRTHTHTNPPSASFLRLPPPRRVSFRASPRLSLRATAMAATSQQQEEQLIITRPDDWHLHVREGSVLEAVLPHSARHFGRAIIMPNLKPPVTTTARALEYREEIMKALPPGSSFEPLMTLYLTDNTSPEEIKLGRKSGVVFAVKLYPAGATTNSQDGVTDIGKCMPVFEEMVRQEMPLLVHGEVTDPHVDTFDREKVFIDRILAPLVQKLPQLKIVMEHITTMDAVNFIESCEEGHVAATVTPQHLLLNRNALFQGGLQPHNYCLPVLKRETHRQAILSAVTSGSKRYFLGTDSAPHDKRNKERYCGCAGIYSAPVALSLYAKVFEEAGALDKLEAFTSFNGPDFYGLPRNTSKIVLKKSAWKVPATYTYSSGEIVPMFTGCTLEWLPSDQTEE

SEQ ID NO: 76850 - protein, 461 aa, Setaria italica
  Transcript Sequence Number=SeqID_10876
  Homolog annotation: Hit_ID=Q10RI3; Match level="QueryCoverage=87%, HitCoverage=58%, E-value=1e-158, Identity=72%"; Hit description =YT521-B-like family protein, expressed
  Subcellular localization annotation: CTP_CleavageSite=23; ConfidenceScore=5.26e-01
APWPPSRRPPAPSAPPAPAPAASAAAATAPAAVPVADQTTDLLQKLSLDSQPKAADATEPAGAKKGAAASQPLSVSIPPERSITPVLQDFMDPNLFYLPAYYYGGYDGSMNEWDDYPRYLNQDGVEIAPAVYGDIYGYGYAPYGAYSPASSPVPTVDGQMFGAQHYQYPTAYFQPPTPVPSTTQGDLQSSVNPEKPAAKTDPAKTTTNGVPNGTAHSNSGTVPLASSHQNSSLTPDGTYRAPLLGGVPSAGYLDTTYGYDSTGAHFAWYDGSAYANGQQRSTTTNHMPTSTFNANGSSARNQTKSSTAPQMQGMQNRRPTATTGSVTPTYPNRMYPSSRPYTQYGNSIKTGLPYGSNGYDSRLYGRWGLGMDNRYRPRGRANGYYGYGNESQDGTIELNRGPRSGRFKNQKLYGHTVSIAVKGQSLPSGESKNDSALPDRAPVISATPTNWPLVFTEKNRI

SEQ ID NO: 76851 - protein, 135 aa, Setaria italica
  misc_feature (77)..(77): Xaa can be any naturally occurring amino acid
  Transcript Sequence Number=SeqID_10877
  Gene Ontology: Mol. function=peptidase activity; Biological process =lipid transport
  Homolog annotation: Hit_ID=C3SAB6; Match level="QueryCoverage=67%, HitCoverage=64%, E-value=1e-26, Identity=68%"; Hit description =Proline-rich protein
  Pfam annotation: Domain name=Tryp_alpha_amyl; Domain location=52-133; Score=73.5; E_value=7.6e-19; Accession=PF00234.14; Description =Protease inhibitorseed storageLTP f
QWRPSKLALFLALSVLAFAAAVHGCTPYCPYPAGGSPPPPGRADAVRPVGSCPINALKLQVCANVLNLLKLNIPRPXNDQCCPLLQGLVDLDAAVCLCTAIKANILGINLNVPIDLRLLLNHCGKVCPADFTCPL

SEQ ID NO: 76852 - protein, 145 aa, Setaria italica
  misc_feature (12)..(12): Xaa can be any naturally occurring amino acid
  misc_feature (64)..(64): Xaa can be any naturally occurring amino acid
  Transcript Sequence Number=SeqID_10878
  Gene Ontology: Mol. function=structural molecule activity; Cellular component=protein complex; Biological process=microtubule-based movement
  Homolog annotation: Hit_ID=P29510; Match level="QueryCoverage=99%, HitCoverage=31%, E-value=2e-73, Identity=94%"; Hit description =Tubulin alpha-2/alpha-4 chain
  Pfam annotation: Domain name=Tubulin; Domain location=3-145; Score =11.2; E_value=2.6e-07; Accession=PF00091.17; Description=TubulinFtsZ family, GTPase domain
MRECISIHIGQXAGIQVGNACWELYCLEHGIQADGQMPGDKTVGGGDDAFNTFFSETGAGKHVXPRAVFVDLEPTVIDEVRTGTYRQLFHPEQLISGKEDAANNFARGHYTIGKETLFRLCLDRIRKLADNCTGLQGFLVFNAVG

SEQ ID NO: 76853 - protein, 121 aa, Setaria italica
  misc_feature (71)..(71): Xaa can be any naturally occurring amino acid
  misc_feature (105)..(105): Xaa can be any naturally occurring amino acid
  Transcript Sequence Number=SeqID_10879
LHVFAAAIVDASSRLDGRTGSKRHRDTMGEENPGPKKQAPCDLLPRTQEYFFITVACHASAPNMAKASLEXHIFFSFFCPQRTPTRRRNLTCFNLTSPLQGGTAXSLRSTNNYRNSSNNYQ

SEQ ID NO: 76854 - protein, 256 aa, Setaria italica
  misc_feature (91)..(91): Xaa can be any naturally occurring amino acid
  Transcript Sequence Number=SeqID_10880
  Pfam annotation: Domain name=GRP; Domain location=1-111; Score=-19.8; E_value=0.0089; Accession=PF07172.3; Description=Glycine rich protein family
MATSTRLVALGFAVLLAIGFSDAARVVKFGSYASAGGGGGGGGGGVGSTGGGWGGGSGGGGGYGAGQSSGSWWDRFASSVAGGGGGGQGGXGGGTNGGAGSGGGSGYGSGSSSTAAAGPSSGNYANANGNGGGGGMGGGANGGYGSGNGGGVGKGQGESGVALAPTGVYNGGVADATGGGSGSGGGNGGGAAGAPSYGTGGGIGGGRGQAGSDGSWGSGFAQGIGAGTGGGGGGGSEGGSGGGGGVGSGSGSGGIH

SEQ ID NO: 76855 - protein, 352 aa, Setaria italica
  misc_feature (199)..(199): Xaa can be any naturally occurring amino acid
  misc_feature (270)..(270): Xaa can be any naturally occurring amino acid
  Transcript Sequence Number=SeqID_10881
MGGKAALLLALVAVSLAVEIQADAGYGYGGGYAPTPATPTPKPEKPPKGGKPPKEHGPKPEKPPKGHKPPKEHGPKPEKPPKGNKPPTYTPSPKPTPPTPKPTPPTYTPSPKPTPPTPKPTPPTYTPTPKPTPPTYTPSPKPTPPTYTPTPKPTPPTYTPSPKPPVTKPPTYTPTPKPTPPTYTPSPKPEAADQATNLXPTPKPTPPTYTPSPKPPATKPPTYIPTPKPTPPTYTPSPKPKPPTKPPTYTPTPKPAPPTYTPSPSPLPRXPKPKPTPPTYTPAPKPKPTPPTPTPTPKPTPPTYTPTPKPTPTPSPKPTPPTYKPAPKPTPPSYNKPPASSYTPSPPPPYYN

SEQ ID NO: 76856 - protein, 487 aa, Setaria italica
  misc_feature (76)..(76): Xaa can be any naturally occurring amino acid
  misc_feature (374)..(374): Xaa can be any naturally occurring amino acid
  misc_feature (447)..(447): Xaa can be any naturally occurring amino acid
  Transcript Sequence Number=SeqID_10882
  Gene Ontology: Mol. function=electron carrier activity; Biological process=oxidation reduction
  Homolog annotation: Hit_ID=Q94IP1; Match level="QueryCoverage=86%, HitCoverage=84%, E-value=0.0, Identity=88%"; Hit description =Cinnamic acid 4-hydroxylase
  Pfam annotation: Domain name=p450; Domain location=74-487; Score =325.7; E_value=9.2e-95; Accession=PF00067.14; Description=Cytochrome P450
MGLNGLHLLSTGKASEATKQNKHRPHTPPTPRRGDESQPAMDLALLEKALLGLFAAAVLAITVAKLTGKRLRLPPXPPGAPVVGNWLQVGDDLNHRNLMTLAKRFGDIFLLRMGVRNLVVVSTPELAKEVLHTQGVEFGSRTRNVVFDIFTGKGQDMVFTVYGDHWRKMRRIMTVPFFTNKVVAQNRAGWEEEARLVVEDVKKNPKAATEGVVIRRRLQLMMYNDMFRIMFDRRFDSEDDELFNKLKALNAERSRLSQSFEYNYGDFIPVLRPFLRGYLNRCHDLKTRRMKVFEDNFVQERKNVMAQTGEIRCAMDHILEAERKGEINHDNVLYIVENINVAAIETTLWSIEWGIAELVNHPEIQSKLREEPDXSVLGAGVAVTEPDLERLPYLQAVVKETLRLRMAIPLLVPHMNLNDGKLHGYDIPAESKILVNAWFLANDPSGXVKPEEFRPERFLEEEKAVEAHGNDFRFVPFGVGRRSCPGI

SEQ ID NO: 76857 - protein, 338 aa, Setaria italica
  misc_feature (218)..(218): Xaa can be any naturally occurring amino acid
  Transcript Sequence Number=SeqID_10883
  Gene Ontology: Mol. function=oxidoreductase activity, acting on the CH-OH group of donors, NAD or NADP as acceptor; Cellular component =cytoplasm; Biological process=isocitrate metabolic process
  Homolog annotation: Hit_ID=Q7F280; Match level="QueryCoverage=98%, HitCoverage=80%, E-value=0.0, Identity=93%"; Hit description=NADP -specific isocitrate dehydrogenase
  Pfam annotation: Domain name=Iso_dh; Domain location=1-324; Score =207.4; E_value=3.8e-59; Accession=PF00180.12; Description =Isocitrateisopropylmalate dehydrogenase
MADEARVKEFSLKAMWKSPNGTIRNILNGTVFREPIICKNIPRLVPGWTKPICIGRHAFGDQYRATDAVIKGPGKLKLVYEGKEEQVELEVYNFTGSGGVALAMYNTDESIHAFAEASMATAYEKKWPLYLSTKNTILKKYDGRFKDIFQEVYEAGWKSKFEAAGIWYEHRLIDDMVAYALKSEGGYVWACKNYDGDVQSDFLAQGFGSLGLMTSVLXVCPDGKTIEAEAAHGTVTRHYRVHQKGGETSTNSIASIFAWTRGLAHRAKLDDNARLLDFTQKLEAACIGAVESGKMTKDLALLVHGSSNVTRSHYLNTEEFIDAVADELRSRLAANSNL

SEQ ID NO: 76858 - protein, 139 aa, Setaria italica
  misc_feature (71)..(71): Xaa can be any naturally occurring amino acid
  misc_feature (105)..(105): Xaa can be any naturally occurring amino acid
  Transcript Sequence Number=SeqID_10884
LHVFAAAIVDASSRLDGRTGSKRHRDTMGEENPGPKKQAPCDLLPRTQEYFFITVACHASAPNMAKASLEXHIFFSFFCPQRTPTRRRNLTCFNLTSPLQGGTAXSLRSTNNYRNSSNNYQHREIIPRGGDRGRDYPTR

SEQ ID NO: 76859 - protein, 295 aa, Setaria italica
  misc_feature (15)..(15): Xaa can be any naturally occurring amino acid
  misc_feature (137)..(137): Xaa can be any naturally occurring amino acid
  misc_feature (194)..(194): Xaa can be any naturally occurring amino acid
  Transcript Sequence Number=SeqID_10885
  Gene Ontology: Mol. function=hydrolase activity
  Homolog annotation: Hit_ID=B6TRW7; Match level="QueryCoverage=85%, HitCoverage=81%, E-value=1e-123, Identity=88%"; Hit description =Sigma factor sigB regulation protein rsbQ
  Pfam annotation: Domain name=Abhydrolase_1; Domain location=71-290; Score=7.3; E_value=0.0015; Accession=PF00561.12; Description =alphabeta hydrolase fold
  Subcellular localization annotation: CTP_CleavageSite=48; ConfidenceScore=5.39e-01
MLRSTHPPSPTSGSXGGGGAAGSGAPSGAKLLQILNVRVVGSGDRVVVLSHGFGTDQSAWSRVLPYLTRDHRVVLYDLVCAGSVNPEHFDFRRYDTLDSYVDDLLAILDALRIPRCAFVGHSVSAMIGILASIRRPXELFAKLILIGASPRFLNDNDYHGGFELPEIQQVFAAMAANYSAWATGYAPLAVGADXVPAAVQEFSRTLFNMRPDISLHVCRTVFNTDLRGVLGMVRSPCVVVQTTRDVSVPASVAAYLKAHLGGRTTVEFLQTEGHLPHLSAPGLLAQVLRRALARF

SEQ ID NO: 76860 - protein, 227 aa, Setaria italica
  Transcript Sequence Number=SeqID_10886
  Gene Ontology: Mol. function=hydrolase activity, acting on glycosyl bonds; Biological process=polysaccharide catabolic process
  Homolog annotation: Hit_ID=P29022; Match level="QueryCoverage=88%, HitCoverage=72%, E-value=1e-93, Identity=79%"; Hit description =Endochitinase A
  Pfam annotation: Domain name=Glyco_hydro_19; Domain location=31-227; Score=410.7; E_value=2.5e-120; Accession=PF00182.11; Description =Chitinase class I
  Subcellular localization annotation: CTP_CleavageSite=60; ConfidenceScore=5.14e-01
MASSATSRILALGLALLFATGLAAAQNVASVVTDAFFNSIKSQDSGCEGKNFYTRSAFLNAANAYPGFAHGGSETQGKREIAAFFANVAHETGRLCYISEINKSNSYCDPNNRQWPCVSGKKYYGRGPLQISWNYNYGPAGKSIGFDGLGNPDKVAQDPTISFKTALWFWMNNVHGVMPQGFGATIRAINGALECNGKNPGAVSSRVNYYKQYCRQLGVDPGSNLTC

SEQ ID NO: 76861 - protein, 293 aa, Setaria italica
  misc_feature (246)..(246): Xaa can be any naturally occurring amino acid
  Transcript Sequence Number=SeqID_10887
  Gene Ontology: Mol. function=hydrolase activity, acting on glycosyl bonds; Cellular component=extracellular region; Biological process =polysaccharide catabolic process
  Homolog annotation: Hit_ID=P29022; Match level="QueryCoverage=83%, HitCoverage=90%, E-value=1e-113, Identity=80%"; Hit description =Endochitinase A
  Pfam annotation: Domain name=Chitin_bind_1; Domain location=27-60; Score=48.0; E_value=3.8e-11; Accession=PF00187.11; Description =Chitin recognition protein
  Pfam annotation: Domain name=Glyco_hydro_19; Domain location=75-272; Score=404.9; E_value=1.4e-118; Accession=PF00182.11; Description =Chitinase class I
  Pfam module annotation: Pfam domain module=Chitin_bind_1::Glyco_hydro_ 19; Domain location=27-60::75-272
MAKKAPTALAVLALGLSLLCAASPSAAQNCGCQSDYCCSQFGYCGTTEPYCGKGCRSGPCWGSSTGGSGANVANVVTDAFFNGIKNQAGAGCEGKNFYTRSAFLNAVNSYSGFARGGSEVEGKREIAAFFAHVTHETGHFCYISEINKNDAYCDANNRQWPCVPGKKYYGRGPLQISWNYNYGPAGRDIGFDGLGNPDRVAQDPVIAFKTALWFWMNNVHQVMPQGFGATIRAINGALECNGRNPXQMNARVRYYKQYCQQLGVDPREQPHLLGAGGFVQWLVKNKALCVAHS

SEQ ID NO: 76862 - protein, 235 aa, Setaria italica
  Transcript Sequence Number=SeqID_10888
IHPPCHSTGSNSLRPWACGEMPKPGSAGSTVDRGSNAGLPAQAHPCHGPLQHPAPEGLEAGLHRSNPCLPCPRVTIRRRIYLPSRTPRPLARRRPSPPLLRLFSREPPSSAGLAASPHEMESEVVFAFEIRANVDEEYKVPASKPDVAVNHALAGVFGRLGESINVVLTYQREERDAGVDIAGAVAEMVQVIYILLEEMQGYLDEAELGGVEAFELPGALKEAMLDLGIVWPRDA

SEQ ID NO: 76863 - protein, 118 aa, Setaria italica
  misc_feature (16)..(16): Xaa can be any naturally occurring amino acid
  Transcript Sequence Number=SeqID_10889
  Gene Ontology: Biological process=auxin mediated signaling pathway
  Homolog annotation: Hit_ID=B6ST80; Match level="QueryCoverage=100%, HitCoverage=100%, E-value=1e-35, Identity=67%"; Hit description =Auxin-repressed 12.5 kDa protein
  Pfam annotation: Domain name=Auxin_repressed; Domain location=5-118; Score=190.8; E_value=3.7e-54; Accession=PF05564.4; Description =Dormancyauxin associated protein
MLEKLWDDVVAGASPXERGLEKLRKAATSRPIVIDKDAVAAAGSYKRTQSMPSTPTTPGTPSSSTTPRGGNNVWRSVFHPGSNLATKSMGANLFDRPQPNSPTVYDWLYSDETRSNHR

SEQ ID NO: 76864 - protein, 506 aa, Setaria italica
  misc_feature (41)..(41): Xaa can be any naturally occurring amino acid
  misc_feature (184)..(184): Xaa can be any naturally occurring amino acid
  misc_feature (193)..(193): Xaa can be any naturally occurring amino acid
  Transcript Sequence Number=SeqID_10890
  Gene Ontology: Mol. function=electron carrier activity; Biological process=oxidation reduction
  Homolog annotation: Hit_ID=Q94IP1; Match level="QueryCoverage=95%, HitCoverage=95%, E-value=0.0, Identity=83%"; Hit description =Cinnamic acid 4-hydroxylase
  Pfam annotation: Domain name=p450; Domain location=34-500; Score =435.9; E_value=6.4e-128; Accession=PF00067.14; Description =Cytochrome P450
MDLALLEKALLGLFAAAVLAITVAKLTGKRLRLPPGPPGAXPVVGNWLQVGDDLNHRNLMTLAKRFGDIFLLRMGVRNLVVVSTPELAKEVLHTQGVEFGSRTRNVVFDIFTGKGQDMVFTVYGDHWRKMRRIMTVPFFTNKVVAQNRAGWEEEARLVVEDVKKNPKAATEGVVIRRRLQLIDXLLTYYCFRXIMFDRRFDSEDDELFNKLKALNAERSRLSQSFEYNYGDFIPVLRPFLRGYLNRCHDLKTRRMKVFEDNFVQERKNVMAQTGEIRCAMDHILEAERKGEINHDNVLYIVENINVAAIETTLWSIEWGIAELVNHPEIQSKLREELTSVLGAGVAVTEPDLERLPYLQAVVKETLRLRMAIPLLVPHMNLNDGKLHGYDIPAESKILVNAWFLANDPKRWVKPEEFRPERFLEEEKAVEAHGNDFRFVPFGVGRRSCPGIILALPIIGITLGRLVQNFQLLPPPGQAKVDTTEKPGQFSNQIAKHATIVCKPLEA

SEQ ID NO: 76865 - protein, 274 aa, Setaria italica
  Transcript Sequence Number=SeqID_10891
  Gene Ontology: Mol. function=ribulose-phosphate 3-epimerase activity; Cellular component=chloroplast; Biological process=reductive pentose -phosphate cycle
  Homolog annotation: Hit_ID=Q9ZTP5; Match level="QueryCoverage=94%, HitCoverage=93%, E-value=1e-131, Identity=91%"; Hit description =Ribulose-phosphate 3-epimerase, chloroplastic
  Pfam annotation: Domain name=OMPdecase; Domain location=107-263; Score=-55.0; E_value=0.05; Accession=PF00215.16; Description =Orotidine 5'-phosphate decarboxylase  HUMPS family
  Pfam annotation: Domain name=Ribul_P_3_epim; Domain location=52-254; Score=469.2; E_value=5.8e-138; Accession=PF00834.11; Description =Ribulose-phosphate 3 epimerase family
  Pfam module annotation: Pfam domain module=OMPdecase::Ribul_P_3_epim; Domain location=107-263::52-254
  Subcellular localization annotation: CTP_CleavageSite=38; ConfidenceScore=5.73e-01
MASPSSSLCSSFASLRTASLGHRRGLAFSSPRKAFQVRATSRVDKFSKNDIIVSPSILSANFSKLGEQVKAVELAGCDWIHVDVMDGRFVPNITIGPLVVDALRPVTDLPLDVHLMIVEPEQRVPDFIKAGADIVSVHCEQSSTIHLHRTVNQIKSLGAKAGVVLNPATPLSAIDYVLDVVDLVLIMSVNPGFGGQSFIESQVKKIADLRRLCAEKGVNPWIEVDGGVGPNNAYKVIEAGANAIVAGSAVFGAPDYAAAIKGIKTSQRPVAVPA

SEQ ID NO: 76866 - protein, 704 aa, Setaria italica
  misc_feature (294)..(294): Xaa can be any naturally occurring amino acid
  misc_feature (410)..(410): Xaa can be any naturally occurring amino acid
  misc_feature (451)..(451): Xaa can be any naturally occurring amino acid
  misc_feature (644)..(644): Xaa can be any naturally occurring amino acid
  misc_feature (650)..(650): Xaa can be any naturally occurring amino acid
  Transcript Sequence Number=SeqID_10892
  Gene Ontology: Mol. function=binding
  Homolog annotation: Hit_ID=Q10RI3; Match level="QueryCoverage=95%, HitCoverage=94%, E-value=0.0, Identity=73%"; Hit description=YT521-B- like family protein, expressed
  Pfam annotation: Domain name=YTH; Domain location=507-597; Score =190.9; E_value=3.5e-54; Accession=PF04146.7; Description=YT521-B -like family
SRSPSRPVRRPVVRSVFLAAAATAPAAVPVADQTTDLLQKLSLDSQPKAADATEPAGAKKQGAAASQPLSVSIPPERSITPVLQDFMDPNLFYLPAYYYGGYDGSMNEWDDYPRYLNQDGVEIAPAVYGDIYGYGYAPYGAYSPASSPVPTVDGQMFGAQHYQYPTAYFQPPTPVPSTTQGDLQSSVNPEKPAAKTDPAKTTTNGVPNGTAHSNSGTVPLASSHQNSSLTPDGTYRAPLLGGVPSAGYLDTTYGYDSTGAHFAWYDGSAYANGQQRSTTTNHMPTSTFNANGSXLARNQTKSSTAPQMGMQNRRPTATTGSVTPTYPNRMYPSSRPYTQYGNSIKTGLPYGSNGYDSRLYGRWGLGMDNRYRPRGRANGYYGYGNESQDGTIELNRGPRSGRFKNQKLLXGSITCFLIAVKGQSLPSGESKNDSALPDRAQFNKKNRTYPXVQYDAAKFFVIKSYSEDDIHKSIKYNVWASTTNGNKKLDAAYQEAQSKGSACPIFLFFSVNTSGQFVGVAEMTGAVDFEKTLEYWQQDKWNGSFSLKWHIVKDVPNNMLKHIILENNENKPVTNSRDTQEIHLEQGLQMLKIFKEHVSKTSILDDFAFYESRQKLMQDKRAKQQQIQKQVWDSRAPVSVTNRXVVLSRXVANGKPKPSVPNGVNGEVKAPTENVTAPAVSYAAKVAQTATEKPALANGVAKTG

SEQ ID NO: 76867 - protein, 229 aa, Setaria italica
  misc_feature (165)..(165): Xaa can be any naturally occurring amino acid
  misc_feature (195)..(195): Xaa can be any naturally occurring amino acid
  Transcript Sequence Number=SeqID_10893
  Gene Ontology: Mol. function=transcription repressor activity; Cellular component=cytoplasm; Biological process=regulation of nitrogen utilization
  Homolog annotation: Hit_ID=P52580; Match level="QueryCoverage=89%, HitCoverage=66%, E-value=2e-98, Identity=83%"; Hit description =Isoflavone reductase homolog IRL
  Pfam annotation: Domain name=NmrA; Domain location=5-220; Score =231.8; E_value=1.7e-66; Accession=PF05368.5; Description=NmrA-like family
MNAAINVFLPACSLSLDKKLNEMDMQRFFPSEFGLDVDRTGIVEPGKTILSGKVAIRRATEASGIPYTFAVAGYFAGYALPSVGQLLAQGPPADKVLILGDGNAKAVFVEESDIGTYTVLAADDPRAENKTLYIKPPANTLSHNELVDLWEKKTGKTFERVYIPXEAVLKQIQESPMPLNIILAIGHAAYVRGEXQAGFEIDPAKGVDASELYPDVKYTTVDEYLNRFL

SEQ ID NO: 76868 - protein, 589 aa, Setaria italica
  misc_feature (159)..(159): Xaa can be any naturally occurring amino acid
  misc_feature (291)..(291): Xaa can be any naturally occurring amino acid
  misc_feature (452)..(452): Xaa can be any naturally occurring amino acid
  misc_feature (481)..(481): Xaa can be any naturally occurring amino acid
  misc_feature (520)..(520): Xaa can be any naturally occurring amino acid
  Transcript Sequence Number=SeqID_10894
  Gene Ontology: Mol. function=ketol-acid reductoisomerase activity; Cellular component=chloroplast; Biological process=branched chain family amino acid biosynthetic process
  Homolog annotation: Hit_ID=B9S999; Match level="QueryCoverage=89%, HitCoverage=87%, E-value=0.0, Identity=83%"; Hit description=Ketol -acid reductoisomerase, chloroplast, putative
  Pfam annotation: Domain name=IlvC; Domain location=299-586; Score =362.8; E_value=6.3e-106; Accession=PF01450.11; Description =Acetohydroxy acid isomeroreductase, catalytic domain
  Pfam annotation: Domain name=IlvN; Domain location=109-294; Score =87.4; E_value=4.9e-23; Accession=PF07991.4; Description=Acetohydroxy acid isomeroreductase, cata
  Pfam module annotation: Pfam domain module=IlvC::IlvN; Domain location=299-586::109-294
  Subcellular localization annotation: CTP_CleavageSite=58; ConfidenceScore=5.78e-01
MAAHTSAASTLAFGHPKTLAAAAAAGPKTLPAAASVSFPATQPACLLSASATRRRDVAAMVAAPSAVGTAMPSLDFETSVFKKEKVSLAGHEEYIVRGGRNLFPLLPEAFKGVKQIGVIGWGSQGPAQAQNLRDSLAEAKSDIVVKIGLRKGSKSFEEXARAAGFTEENGTLGDIWETVSGSDLVLLLISRIAAQADNYEKIFSHMKPNSILGLSHGFLLGHLQSLGLDFPKNISVIAVCPKGMGPSVRRLYVQGKEVNGAGINSSFAVHQDVDGRATDVALAWSVALGSXPFTFATTLEQEYKSDIFGERGILLGAVHGIVEALFRRYTEQGMDEESAYKNTVESITGIVSKTISKKGMLEVYNSLSEEGKKEFNKAYSASFYPCMDILYECYEDVASGSEIRSVVLAGRRFYEKEGLPAFPMGNIDQTRMWKVGEKVRSTRPEGDLGPLXHPFTAGVYIALMMAQIEILRKKGHSYSEXINESVIESVDSLNPFMHARGVAFMVDNCSTTARLGSQEXWLPRFDYILTQQAFVTVDKDAPINQDLISNFMSDPVHGAIEVCAELRPTVDISVPANADFVRPELRQSS

SEQ ID NO: 76869 - protein, 449 aa, Setaria italica
  misc_feature (106)..(106): Xaa can be any naturally occurring amino acid
  misc_feature (182)..(182): Xaa can be any naturally occurring amino acid
  misc_feature (301)..(301): Xaa can be any naturally occurring amino acid
  misc_feature (317)..(317): Xaa can be any naturally occurring amino acid
  Transcript Sequence Number=SeqID_10895
  Gene Ontology: Mol. function=glyceraldehyde-3-phosphate dehydrogenase (phosphorylating) activity; Cellular component=chloroplast; Biological process=glucose metabolic process
  Homolog annotation: Hit_ID=P12860; Match level="QueryCoverage=99%, HitCoverage=100%, E-value=0.0, Identity=73%"; Hit description =Glyceraldehyde-3-phosphate dehydrogenase B, chloroplastic
  Pfam annotation: Domain name=CP12; Domain location=374-449; Score =1.2; E_value=0.022; Accession=PF02672.7; Description=CP12 domain
  Pfam annotation: Domain name=Gp_dh_C; Domain location=238-397; Score =326.8; E_value=4.4e-95; Accession=PF02800.12; Description =Glyceraldehyde 3-phosphate dehydrogenas
  Pfam annotation: Domain name=Gp_dh_N; Domain location=78-233; Score =249.8; E_value=6.4e-72; Accession=PF00044.16; Description =Glyceraldehyde 3-phosphate dehydrogenas
  Pfam module annotation: Pfam domain module=CP12::Gp_dh_C::Gp_dh_N; Domain location=374-449::238-397::78-233
  Subcellular localization annotation: CTP_CleavageSite=21; ConfidenceScore=5.53e-01
MATHAALAASRIPTSARLNSRAASRQRVDFADFSGLRPGSCSVSTAAREASFYDVLGAQLVAKATGENAVRTPAEAKLKVAINGFGRIGRNFLRCWHGREDSPLDXFVVVNDSGGVRNASHLLKYDSMLGTFKADVKIVDDTTISVDGKPIKVVSSRDPLKLPWAEMGIDIVIEGTGVFVDXGPGAGKHIQAGAKKVIITAPAKGADIPTYVVGVNEGDYDHGVADIISNASCTTNCLAPFVKVLDEEFGIVKGTMTTTHSYTGDQRLLDASHRDLRRARAAALNIVPTSTGAAKAVALVXLPQLKGKLNGIALRVXPTPNVSVVDLVINTEKKGMTADDVNAAFRKAAAGPLKGVLQVCDEPLVSVDFRCSDVSSSIDSSLTMVMGDDMVKVVAWYDNEWGYSQRVVDLAHLVAAKWPGAAAAGGSGDPLEDFCKDNPETDECKVYEA

SEQ ID NO: 76870 - protein, 72 aa, Setaria italica
  Transcript Sequence Number=SeqID_10896
TLDCSCTENLWKFCQKFVIEQMDHCLNVMLAPELICPSVGYLILLTALFSLICLPCSCAMYPLQYGCDVFVP

SEQ ID NO: 76871 - protein, 88 aa, Setaria italica
  Transcript Sequence Number=SeqID_10897
  Gene Ontology: Mol. function=structural constituent of ribosome; Cellular component=intracellular; Biological process=translation
  Homolog annotation: Hit_ID=B6SQE0; Match level="QueryCoverage=84%, HitCoverage=66%, E-value=5e-33, Identity=91%"; Hit description=60S ribosomal protein L33-B
  Pfam annotation: Domain name=Ribosomal_L35Ae; Domain location=12-85; Score=43.3; E_value=9.5e-10; Accession=PF01247.10; Description =Ribosomal protein L35Ae
MVKGRTGQRVRLYVRGTILGYKRSKSNQYETTSLVQIEGVNTKEDVAWYAGKRMAYIYKAKTKSSETRYRCIWGARSGSSCTPAASKR

SEQ ID NO: 76872 - protein, 56 aa, Setaria italica
  Transcript Sequence Number=SeqID_10898
NYLHWKIHGLAAYNNNNIALQSQASWISSIQKKQILQHNLHTKHLMMAKADSHGSR

SEQ ID NO: 76873 - protein, 112 aa, Setaria italica
  Transcript Sequence Number=SeqID_10899
  Gene Ontology: Mol. function=structural constituent of ribosome; Cellular component=intracellular; Biological process=translation
  Homolog annotation: Hit_ID=B6SQE0; Match level="QueryCoverage=100%, HitCoverage=100%, E-value=9e-55, Identity=91%"; Hit description=60S ribosomal protein L33-B
  Pfam annotation: Domain name=Ribosomal_L35Ae; Domain location=12-106; Score=169.4; E_value=1e-47; Accession=PF01247.10; Description =Ribosomal protein L35Ae
MVKGRTGQRVRLYVRGTILGYKRSKSNQYETTSLVQIEGVNTKEDVAWYAGKRMAYIYKAKTKSSETRYRCIWGKVTRPHGNSGVVRAKFKSNLPPESMGRKVRVFMYPSSI

SEQ ID NO: 76874 - protein, 102 aa, Setaria italica
  Transcript Sequence Number=SeqID_10900
  Gene Ontology: Mol. function=2 iron, 2 sulfur cluster binding; Cellular component=chloroplast; Biological process=cellular aromatic compound metabolic process
  Homolog annotation: Hit_ID=Q0GH73; Match level="QueryCoverage=88%, HitCoverage=22%, E-value=4e-36, Identity=80%"; Hit description=CMO protein
MNESTEDDAGDVVGDEWLGSASELLSTNGIDTSLPHICRREYIINCNWKVFCDNYLDGGYHVPYAHGALASGLQLQSYETLVLSANLLSFCRHFLDKILFRD

SEQ ID NO: 76875 - protein, 58 aa, Setaria italica
  misc_feature (22)..(22): Xaa can be any naturally occurring amino acid
  Transcript Sequence Number=SeqID_10901
  Gene Ontology: Mol. function=2 iron, 2 sulfur cluster binding; Biological process=cellular aromatic compound metabolic process
  Homolog annotation: Hit_ID=Q7XB43; Match level="QueryCoverage=82%, HitCoverage=11%, E-value=9e-20, Identity=93%"; Hit description =Choline monooxygenase
MLLLDSCISYLQMEDIALCEGXVQRGLESPAYGVGRYAPSVEMAMHHFHCLLHANLSG

SEQ ID NO: 76876 - protein, 333 aa, Setaria italica
  Transcript Sequence Number=SeqID_10902
  Gene Ontology: Mol. function=2 iron, 2 sulfur cluster binding; Cellular component=chloroplast; Biological process=cellular aromatic compound metabolic process
  Homolog annotation: Hit_ID=Q0GH73; Match level="QueryCoverage=96%, HitCoverage=78%, E-value=1e-177, Identity=91%"; Hit description=CMO protein
  Pfam annotation: Domain name=Rieske; Domain location=10-107; Score =80.3; E_value=7.1e-21; Accession=PF00355.18; Description=Rieske [2Fe- 2S] domain
FLSECLYLLNFTAGHIWQVKNPNDFFTGRLGNVEFVVCRDANGNLHAFHNVCRHHASLLACGSGQKTCFQCPYHGWTYGLDGTLLKATRISGIKNFNKNDFGLVPIKVATWGPFVLARFDDESTEDDAGDVVGDEWLGSASELLSTNGIDTSLPHICRREYIINCNWKVFCDNYLDGGYHVPYAHGALASGLQLQSYETLAYERVSVQRCESAPSEPDDFERLGTKALYAFVYPNFMINRYGPWMDTNLAVPLGSTKCKVVFDYFLDKSLLDDQNFIERSLKDSEQVQMEDIALCEGVQRGLESPAYGVGRYAPSVEMAMHHFHCLLHANLSG

SEQ ID NO: 76877 - protein, 166 aa, Setaria italica
  misc_feature (64)..(64): Xaa can be any naturally occurring amino acid
  Transcript Sequence Number=SeqID_10903
  Gene Ontology: Mol. function=protein serine/threonine kinase activity; Cellular component=integral to membrane; Biological process=protein amino acid phosphorylation
  Homolog annotation: Hit_ID=Q7F1L4; Match level="QueryCoverage=99%, HitCoverage=31%, E-value=6e-33, Identity=50%"; Hit description =Serine/threonine kinase receptor-like protein
YSVLSPVYEGRAMLQLAAPPEPPPAATPSPATPESGAGRKGITAGVSVGIAGFVVLMLILSVFXFLRFRRRIKATKKDHPLKKIGNPQCTVFDLMTLQEATEHLSEKNKLGEGGFGTVYKGMLSDGEEIAVKTLLGRTGHALHQLHNEIQVLAKLQHKNLVRLLGG

SEQ ID NO: 76878 - protein, 156 aa, Setaria italica
  misc_feature (29)..(29): Xaa can be any naturally occurring amino acid
  Transcript Sequence Number=SeqID_10904
  Gene Ontology: Mol. function=protein serine/threonine kinase activity; Biological process=protein amino acid phosphorylation
  Homolog annotation: Hit_ID=Q7F1L4; Match level="QueryCoverage=71%, HitCoverage=21%, E-value=4e-37, Identity=63%"; Hit description =Serine/threonine kinase receptor-like protein
  Pfam annotation: Domain name=Pkinase_Tyr; Domain location=28-149; Score=-110.4; E_value=2.2e-06; Accession=PF07714.9; Description =Protein tyrosine kinase
MAPAPKKIGNPQCTVFDLISLQEATEHFXEKNKLGEGGFGTVYKGILSDGEDIAVKTLLGRTRHALHQLHNEIQVLAKLQHKNLVRLLGYCLHQNDTLLVYEYIKNRSLDSILFSTFLSIHSPMYTLEWPRYFVRPLLSWNFGTKQWRLQTGLTSS

SEQ ID NO: 76879 - protein, 202 aa, Setaria italica
  misc_feature (21)..(21): Xaa can be any naturally occurring amino acid
  misc_feature (104)..(104): Xaa can be any naturally occurring amino acid
  Transcript Sequence Number=SeqID_10905
  Gene Ontology: Mol. function=protein serine/threonine kinase activity; Cellular component=integral to membrane; Biological process=protein amino acid phosphorylation
  Homolog annotation: Hit_ID=Q7F1L4; Match level="QueryCoverage=86%, HitCoverage=39%, E-value=8e-30, Identity=38%"; Hit description =Serine/threonine kinase receptor-like protein
  Pfam annotation: Domain name=DUF26; Domain location=7-58; Score=35.6; E_value=2e-07; Accession=PF01657.9; Description=Domain of unknown function DUF26
MAFNPKIYGLAQCASDLTPDXCRGCLGYIQSEIMARHMDGRPQSNVGALVWCLLRYSVLSPVYEARVMLQLAAPPEPPPAATPSPATPESGAGRKEITAGVSHXKKIGNPQCTVFDLISLQEATEHFSEKNKLGEGGFGTVYKGILSDGEDIAVKTLLGRTRHALHQLHNEIQVLRQTIAVVEFWHKTVAASNRLNILLTCL

SEQ ID NO: 76880 - protein, 155 aa, Setaria italica
  misc_feature (134)..(134): Xaa can be any naturally occurring amino acid
  Transcript Sequence Number=SeqID_10906
  Gene Ontology: Mol. function=inositol or phosphatidylinositol phosphatase activity; Biological process=sulfur metabolic process
  Homolog annotation: Hit_ID=B6UA45; Match level="QueryCoverage=100%, HitCoverage=35%, E-value=6e-74, Identity=88%"; Hit description=PAP -specific phosphatase
MEVAVRVVQVACTLCQRVQDSLLRPGADAGGRVHSKLDRSPVTVADWGVQAIVSWLLSNSFQDENVSIVAEEDDETLSSCDGAALLESVVEAVNGCLIEAPKYGLRPPEKELRAHDVIQAIRKCSSTGGPKGRXFWVLDPVDGTLGFVRGDQYAI

SEQ ID NO: 76881 - protein, 409 aa, Setaria italica
  Transcript Sequence Number=SeqID_10907
  Homolog annotation: Hit_ID=Q7Y1D9; Match level="QueryCoverage=86%, HitCoverage=90%, E-value=1e-101, Identity=54%"; Hit description=F -box domain containing protein, expressed
PAVRFVEKNDAAAAAAAGMDFVDRLGPDASAAVFAVLRDPADLAHAAAVSRSWRTLVMVVHMSKIQCLRLCPEVASFTRIELEQPTNSASGSDSGVNEEDAGSTAATTTWENYKTEKMVYMHLVHALFSPHTWMSCITACLGASSTDNFPGESIQNTLEPRERVNNWPCYWSSGGQEDPAVPEFLVYKLCSDLCLIDEIRIQPFRAYFQRGLPIYSSQYVRFKFGCPKLPLRLEDLVSEENEGQLTADDNYIWMYTSSEFPMLQKNVLQSFKLPRPVLCIGGVVKVEFLGRIQKQREDDQYYICVSHVQVLGTPLPREFGAAPCQNGPVLKYYPDHEPSEDSGGRINWKGFEESMWRALVINGQGIGLNQELLSRLLGPSLQLAVEEERMAKAKRRRSLTHYLRRFSGM

SEQ ID NO: 76882 - protein, 68 aa, Setaria italica
  Transcript Sequence Number=SeqID_10908
KVKSKLIVIFEWEYIAMLDRNRQCTCAASSIMPRALANNVLLPKICQLALVCALWSTMSCHLKYEFQG

SEQ ID NO: 76883 - protein, 63 aa, Setaria italica
  Transcript Sequence Number=SeqID_10909
SKILYDLSLHFAMTWSYYYHLHVAHCRVSNCVSNGDSNVCTSVPAGGRVYPRAPATPTRLPLS

SEQ ID NO: 76884 - protein, 324 aa, Setaria italica
  Transcript Sequence Number=SeqID_10910
  Gene Ontology: Mol. function=electron carrier activity; Cellular component=extracellular region; Biological process=response to oxidative stress
  Homolog annotation: Hit_ID=B9SGY3; Match level="QueryCoverage=92%, HitCoverage=90%, E-value=1e-117, Identity=67%"; Hit description =Peroxidase 73, putative
  Pfam annotation: Domain name=peroxidase; Domain location=41-287; Score=414.3; E_value=2e-121; Accession=PF00141.15; Description =Peroxidase
MGAEIRILAAFLAALAAAAGVAAQLRQDYYAAVCPDLESIVRDAVSQKVQDQPVAVGATIRLFFHDCFVEGCDASVIMVSTGNNTAEKDHPSNLSLAGDGFDTVIKAKAAVDAVPACTNQVSCADILALATRDVIALAGGPSYAVELGRLDGLVSLSTNVDGKLPPPSFDLDQLTTLFAAKNLSQADMIALSGAHTLGFAHCNTFAGRIQPESVDPTMNATYAADLQAACPAGVDPNIALQLDPVTPQAFDNQYFVNLVNGRGLFTSDQVLYSDARSQPTVVAWAQNATDFEQAFVDAMTKLGRVDVKTDPSLGNIRRDCAFLN

SEQ ID NO: 76885 - protein, 91 aa, Setaria italica
  Transcript Sequence Number=SeqID_10911
MVIRSIDNQKVGEACIRKIIINSLRPKYHGFIAVVSGWPTQPSLVEIENLLANQDEVARKIGSITVKEEEEALFTNKKKGPPRGQGRLKPR

SEQ ID NO: 76886 - protein, 84 aa, Setaria italica
  Transcript Sequence Number=SeqID_10912
  Gene Ontology: Mol. function=nucleic acid binding
  Homolog annotation: Hit_ID=B9HYM3; Match level="QueryCoverage=98%, HitCoverage=10%, E-value=3e-29, Identity=73%"; Hit description =Chromatin remodeling complex subunit (Fragment)
ITLRLALQDISQPKLEANPPDGVLAVPLLRHQKIALSWMVQKETSSPHCSGGILADDQGLGKTVSAISLILTERPPVPQSSTIK

SEQ ID NO: 76887 - protein, 718 aa, Setaria italica
  Transcript Sequence Number=SeqID_10913
  Gene Ontology: Mol. function=nucleic acid binding; Cellular component= nucleus; Biological process=response to DNA damage stimulus
  Homolog annotation: Hit_ID=B9HYM3; Match level="QueryCoverage=99%, HitCoverage=91%, E-value=0.0, Identity=62%"; Hit description =Chromatin remodeling complex subunit (Fragment)
  Pfam annotation: Domain name=DEAD; Domain location=65-260; Score= -43.8; E_value=0.059; Accession=PF00270.21; Description=DEADDEAH box helicase
  Pfam annotation: Domain name=Helicase_C; Domain location=582-660; Score=79.8; E_value=9.8e-21; Accession=PF00271.23; Description =Helicase conserved C-terminal domain
  Pfam annotation: Domain name=SNF2_N; Domain location=3-386; Score =126.5; E_value=8.8e-35; Accession=PF00176.15; Description=SNF2 family N-terminal domain
  Pfam annotation: Domain name=zf-C3HC4; Domain location=424-464; Score= 15.5; E_value=0.0017; Accession=PF00097.17; Description=Zinc finger, C3HC4 type (RING finger)
  Pfam module annotation: Pfam domain module=DEAD::Helicase_C::SNF2 _N::zf-C3HC4; Domain location=65-260::582-660::3-386::424-464
RRTSHCSGGILADDQGLGKTVSAISLILTERPPVPQSSTIKKEPCEAVTLDDDDEDDCAEPNLKKQMQTCSSELTSNTVKQENPIVAVKTRPAAGTLVVCPTSVLRQWAGELKNKVTSKANLSFLIYHGSNRTKDPDELTKYDVVLTTYSIVSMEVPKQSNPDSDDEEKGKPDRYGAPVSSSGSKKRKPPSSKKMKNKSAAESSLPEKPLAKVAWFRVILDEAQSIKNYRTQVARACWGLRAKRRWCLSGTPIQNAVEDLYSYFRFLRYDPYAVYKQFCSMIKIPISRNPTNGYKKLQLVLKTVMLRRTKATMLDGKPIISLPPKTVSLKTVDFTSEERNFYNTLEVESREQFKEYAAAGTVRQNYVNILLMLLRLRQACDHPHLVRGHESTSNWMSSLEMAKKLPMERQQQLLICLQSCSAICALCNDAPEYAVVTICGHVFCNQCILEQLTGDDSVCPVSNCRVRLNTTSLFSRDTLECSLSRLTCNFKSNDTRMEMVHAEKRPGTDSSYASSKVRAALDILLSLPKIDPTQMINSKNSIGLASEKFDGKGPLEQTNTKLTEKAIVFSQWTRMLDLLEVHLKASHVTYRRLDGTMSVAARDKAVKDFNTVPEVTVMIMSLKAASLGLNMVAACHVLMLDLWWNPTTEDQAVDRAHRIGQTRPVTVSRLTIKDTVEDRILALQEKKREMVASAFGEDRSGSRQTRLTVEDLNYLFMV

SEQ ID NO: 76888 - protein, 230 aa, Setaria italica
  misc_feature (222)..(222): Xaa can be any naturally occurring amino acid
  Transcript Sequence Number=SeqID_10914
  Gene Ontology: Cellular component=plasma membrane
  Homolog annotation: Hit_ID=B6UCN7; Match level="QueryCoverage=93%, HitCoverage=32%, E-value=1e-115, Identity=92%"; Hit description =Protein CYPRO4
RTGDDEDDDAPAAGPWCLVVGSKIRARVGPELQVKTFPAQRRVDFVADGVWALKFLHADGFGDFCAKYHSCLFENSYGVAATDEGRAKVFGKDFAAWARPEDGDESIWEDATDGFSPGPKGSLMPPRTPTLKPLMEDLREFEEPVEEGSGIQSLALGALDNSFLVGDSGIQVVRNFEHGIHGKGMSVKFSGGSTNFSTPKKALLMRAETNMLLMSPATDGNXHAKGVHQL

SEQ ID NO: 76889 - protein, 83 aa, Setaria italica
  Transcript Sequence Number=SeqID_10915
  Gene Ontology: Mol. function=oxidoreductase activity
  Homolog annotation: Hit_ID=B0BLJ7; Match level="QueryCoverage=86%, HitCoverage=13%, E-value=3e-22, Identity=65%"; Hit description =CM0545.530.nc protein (Fragment)
NIYLYLQNRGNKSWNISRKELMEIVEIGILSEAELEQIISSDFNPNRCGFEDKGEIWVENILNLGISPAKLVETMKERFISSG

SEQ ID NO: 76890 - protein, 213 aa, Setaria italica
  misc_feature (202)..(202): Xaa can be any naturally occurring amino acid
  Transcript Sequence Number=SeqID_10916
  Gene Ontology: Mol. function=transferase activity, transferring glycosyl groups; Cellular component=intracellular; Biological process=protein amino acid ADP-ribosylation
  Homolog annotation: Hit_ID=Q0E0Q3; Match level="QueryCoverage=99%, HitCoverage=25%, E-value=7e-97, Identity=81%"; Hit description=Poly [ADP-ribose] polymerase 3
  Pfam annotation: Domain name=WGR; Domain location=1-78; Score=48.8; E_ value=2.1e-11; Accession=PF05406.7; Description=WGR domain
TNLGCDMNQLCIMQLVMVPTDRLHLFYQKGPIGHDQMAEERVEDFGSRVNDAIKEFVRLFEEVTGNEFEPWEREKKFEKKSMKMYPLDMDVGVDVRHGGAALRQLGTAAAHCKLDPAVSFLVKQLCGQEIYRYALMEMAQDLPDLPIGMLSDLHLRRGEEMLLQMRRDAESVPESGPEADAFWTEISAKWFTLFPTTRPYVXGFEQIADNVAS

SEQ ID NO: 76891 - protein, 293 aa, Setaria italica
  Transcript Sequence Number=SeqID_10917
  Gene Ontology: Mol. function=transferase activity, transferring glycosyl groups; Cellular component=intracellular; Biological process=protein amino acid ADP-ribosylation
  Homolog annotation: Hit_ID=Q0E0Q3; Match level="QueryCoverage=98%, HitCoverage=34%, E-value=1e-130, Identity=77%"; Hit description=Poly [ADP-ribose] polymerase 3
  Pfam annotation: Domain name=PARP; Domain location=64-281; Score =249.0; E_value=1.1e-71; Accession=PF00644.12; Description=Poly(ADP -ribose) polymerase catalytic domain
TGRNQRFTLFPTTRPYVLRGFEQIADNVASGLETIRDINDASRLIGDVFGSTLDDPLSECYKKLGCSINPVAEDSEDYKMILRYLETTYEPVKVDDVVYGVSVERIYAVESSSFPSYEKIKNLPNKILLWCGTRSSNLLRHLHKGFLPAVCHLPVPGYMFGKAIVCSDAAAEAARYGFTAVDRPEGYLVLAVASLGNEITEVTGTPGAEDAQGFEEKKIGVKGVGRKKTNESEHLTWRDGVKVPCGKLVPSRNKNGPLEYSEYAVYDPKQVSICFLVAVKYEEQNMEVVPDDV

SEQ ID NO: 76892 - protein, 60 aa, Setaria italica
  Transcript Sequence Number=SeqID_10918
SSCASSWYLVQLCAFVLCTVLYCHFVLVMSAKLYIGCCLQVFACSFAVNRIKYVVPHLEM

SEQ ID NO: 76893 - protein, 187 aa, Setaria italica
  Transcript Sequence Number=SeqID_10919
  Gene Ontology: Mol. function=ATPase activity, coupled to transmembrane movement of substances; Cellular component=integral to membrane; Biological process=transport
  Homolog annotation: Hit_ID=Q7GBY1; Match level="QueryCoverage=100%, HitCoverage=29%, E-value=6e-87, Identity=85%"; Hit description =Tonoplast ABC transporter IDI7
MGKNMRIKTAPKPNRIPLLGNGETSRALSDLEEGSNVQPANVGFCRVIKLARHDAGKLVLATIALLVASLSNILVPKYGGKIIDIVSRDVRRPEDKAQALEDVKGTILYIVLIVVVGSVCTALRAWLFNSASERVVARLRKDLFSHLINQEIAFFDVTRTGELLSRLSEDTQIIKNAATTNLSEALR

SEQ ID NO: 76894 - protein, 499 aa, Setaria italica
  misc_feature (87)..(87): Xaa can be any naturally occurring amino acid
  Transcript Sequence Number=SeqID_10920
  Gene Ontology: Mol. function=diacylglycerol kinase activity; Cellular component=plasma membrane; Biological process=activation of protein kinase C activity
  Homolog annotation: Hit_ID=B6TW73; Match level="QueryCoverage=95%, HitCoverage=97%, E-value=0.0, Identity=81%"; Hit description =Diacylglycerol kinase
  Pfam annotation: Domain name=DAGK_acc; Domain location=293-470; Score= 10.7; E_value=7e-08; Accession=PF00609.11; Description=Diacylglycerol kinase accessory domain
  Pfam annotation: Domain name=DAGK_cat; Domain location=100-246; Score= 97.6; E_value=4.3e-26; Accession=PF00781.16; Description =Diacylglycerol kinase catalytic domain
  Pfam module annotation: Pfam domain module=DAGK_acc::DAGK_cat; Domain location=293-470::100-246
  Subcellular localization annotation: CTP_CleavageSite=38; ConfidenceScore=5.08e-01
MEGAGEVSAAAGNGNGNGSARRPSTAPSARVSIWESVRACGVWGKEVDKAELRSQVVMPLHLRRAVAKAVTTKDEAAGVAAAAAEEXRRGRRRRGPTVAPVVVFVNSRSGGRHGPELKVRLHELITEEQVFDLSVVKPSDFVHYGLSCLERLADQGDNCAKAAREKMRIVVAGGDGTVGWMLGCLSDLYKMKREPVPPTGIIPLGTGNDLARSFGWGGSFPFGWRSAVKRYLSKAATGPICRLDSWQTVIQMPEGEIKELPYALKKVEPADRLEISQENGSELPEKASCYKGVFYNYLSIGMDAQVAYGFHHLRDEKPYLAQGPVANKLIYAGYSCTQGWFCTPCTASPQLRGLKNILRLYIKKVNCSEWEQVQMPSSVRSLVVLNLYNYGSGRHPWGDLKPEYLEKRGFVEAHSDDGLLEIFGLKEGWHASFVMAELIKAKHIAQAAAIKFEMRGGEWNRAYVQMDGEPWKQPLIQELSTILEINKVPYHSLMINGDQ

SEQ ID NO: 76895 - protein, 550 aa, Setaria italica
  misc_feature (18)..(18): Xaa can be any naturally occurring amino acid
  misc_feature (27)..(27): Xaa can be any naturally occurring amino acid
  misc_feature (176)..(176): Xaa can be any naturally occurring amino acid
  Transcript Sequence Number=SeqID_10921
  Gene Ontology: Mol. function=protein tyrosine kinase activity; Cellular component=microtubule organizing center; Biological process= microtubule cytoskeleton organization and biogenesis
  Homolog annotation: Hit_ID=B9N3X7; Match level="QueryCoverage=87%, HitCoverage=48%, E-value=1e-171, Identity=61%"; Hit description =Tubulin gamma complex-associated protein
  Pfam annotation: Domain name=Spc97_Spc98; Domain location=1-461; Score=92.2; E_value=1.8e-24; Accession=PF04130.5; Description=Spc97 Spc98 family
VHEAKDICAENSTEKNWXKLLNMLHQXRKYDGMENNISRNTVMDKPIFVPGDPQDASSNAIEGCSTLSCYENPAITACREVLLSNPNSWSELNISESFHLPPLNDGDMRRAIFADGHSVGTSTSGDTQPTTSFPRLDGTDYKFGFHFDDLEYVRQEDDRRTLEDLYAFPTLLPCAXRNVPLSEILPMQKDSTLASRVLKFIQNMSLKDPLQPVSIIQECLSQCIKRQVDHIGKQILFKLMGEWRLMDELFVLRAIYLLGSGDLLQQFLITIFDKLDRGSSWDDDFELNNLLQESLRNSADKMLLTAPDSLVVSLATHNGEEGASTSKKGRALGFGIDALDMLNFTYKVSWPLDLIVNTEALKKYNQVMGFLLKVKRAKFVLDETRKWMWKARGRTAHNFKQHLIVAQKLLHFVEAFHQYVMDRVYHSAWTELCDGMASATTLDEVMEVHEAYLSSIQRQCFVASDKLWALIASRVKTILGLALDFHNVEQTLSTGGTAPAVRTRCEMEIDRIEKQFDECVVFLLRILSFKLNVGHFPHLADLVTRINYNH

SEQ ID NO: 76896 - protein, 135 aa, Setaria italica
  Transcript Sequence Number=SeqID_10922
  Subcellular localization annotation: CTP_CleavageSite=84; ConfidenceScore=5.49e-01
GGGCWRAAPGRPCRTGRSPPAPAAPSAGCRTPGRPGGSSGDPPWPSSKPSASCPRQKQRGSKITLAPPPLAQPLLAAWSVRACVCSHLRSLPQRPARLSFYIGGGEERRGTRRHATTGRRRGRGGGKAVDLRGRG

SEQ ID NO: 76897 - protein, 123 aa, Setaria italica
  Transcript Sequence Number=SeqID_10923
  Gene Ontology: Mol. function=protein binding; Cellular component =intracellular; Biological process=RNA processing
  Homolog annotation: Hit_ID=Q01GI2; Match level="QueryCoverage=95%, HitCoverage=12%, E-value=1e-14, Identity=40%"; Hit description=[S] KOG1972 Uncharacterized conserved protein
PSIITLLFALSFEWSKAGSDNRIHSLFERALADDKLQKSVLLWRCYLAYEAEKACNASAARRVFFRAIHACPWSKRLWLDGFQKLSSILTLKELSDLQEVMRDKELNIRTDIYEILLQDETDT

SEQ ID NO: 76898 - protein, 270 aa, Setaria italica
  Transcript Sequence Number=SeqID_10924
  Gene Ontology: Mol. function=protein binding; Cellular component =intracellular; Biological process=RNA processing
  Homolog annotation: Hit_ID=Q01GI2; Match level="QueryCoverage=94%, HitCoverage=26%, E-value=3e-16, Identity=28%"; Hit description=[S] KOG1972 Uncharacterized conserved protein
PFIGPISRPQVLRARQGFKEQIRSLRSGFASGGIKEESVALICSASLFESMTSGYSSGLEVIEEIFPMALSDSSHNSEFEDLWVYYIKLLQKNLKRLSLSRIWPSVSQGVHKYPYNPKSYSAMLTLSYLYSVSNNLRLTLDKCSQRDPSIITLLFALSFEWSKAGSDNRIHSLFERALADDKLQKSVLLWRCYLAYEAEKACNASAARRVFFRAIHACPWSKRLWLDGFQKLSSILTLKELSDLQEVMRDKELNIRTDIYEILLQDETDT

SEQ ID NO: 76899 - protein, 124 aa, Setaria italica
  Transcript Sequence Number=SeqID_10925
  Subcellular localization annotation: CTP_CleavageSite=39; ConfidenceScore=5.09e-01
IKLSYPCIYLIVIHLGTAFLWHGKGARTHRQSLCHTSPSLTRREGQSKPQRSPLLFPVTVPPVPSRSPVPPIIHPPPPRCGGVCSSGGGDVRRRHPLRLHPPVRGAAAAAKKQQQQQPRRVTAV

SEQ ID NO: 76900 - protein, 91 aa, Setaria italica
  Transcript Sequence Number=SeqID_10926
  Gene Ontology: Mol. function=nucleic acid binding
  Homolog annotation: Hit_ID=B4FR03; Match level="QueryCoverage=91%, HitCoverage=56%, E-value=9e-40, Identity=95%"; Hit description=OB -fold nucleic acid binding domain containing protein
PASSRAPRIAECLVGDDTGAIVFTARNDQVDLLKPDATVILRNAKIDMFKGSMRLAVDKWGRIEATEPASFTVKEDNNLSLVEYELVNVAE

SEQ ID NO: 76901 - protein, 138 aa, Setaria italica
  Transcript Sequence Number=SeqID_10927
  Subcellular localization annotation: CTP_CleavageSite=62; ConfidenceScore=5.40e-01
PSNPASASLRAVHAERSPTLATPAASPPAPPLQPPLLQSPPKPLARRPCCRTACPPPHLGARGSRRVGRSRLPLRLDPRGGDQRRPLWERRLGVRARSGLVGGSGRRKEEGDDGEMKSSLRSRQEPRCHHHRLSLLPH

SEQ ID NO: 76902 - protein, 94 aa, Setaria italica
  Transcript Sequence Number=SeqID_10928
CRHLCLVGNIEDIILHTANYCTVTDYFSGLTNSNYTELAQLYEKYKDQGVYLIHCLCIFSVFHYLSIFMAIWTMIYFVQCRLFIDLNNFSCWWC

SEQ ID NO: 76903 - protein, 103 aa, Setaria italica
  Transcript Sequence Number=SeqID_10929
  Gene Ontology: Mol. function=glutathione peroxidase activity; Cellular component=mitochondrion; Biological process=response to oxidative stress
  Homolog annotation: Hit_ID=Q6JAG4; Match level="QueryCoverage=75%, HitCoverage=42%, E-value=3e-26, Identity=74%"; Hit description =Glutathione peroxidase
  Pfam annotation: Domain name=GSHPx; Domain location=14-97; Score =28.6; E_value=1.7e-10; Accession=PF00255.11; Description=Glutathione peroxidase
CRHLCLVGNIEDIILHTANYCTVTDYFSGLTNSNYTELAQLYEKYKDQGKSLLSPCNQFGGQEPGTNEEIVQFACTRFKAEYPIFDKVNLPTVFFLSPLYVLI

SEQ ID NO: 76904 - protein, 177 aa, Setaria italica
  Transcript Sequence Number=SeqID_10930
  Gene Ontology: Mol. function=glutathione peroxidase activity; Cellular component=mitochondrion; Biological process=response to oxidative stress
  Homolog annotation: Hit_ID=Q6ESJ0; Match level="QueryCoverage=89%, HitCoverage=66%, E-value=2e-87, Identity=96%"; Hit description =Glutathione peroxidase
  Pfam annotation: Domain name=AhpC-TSA; Domain location=15-156; Score=- 13.3; E_value=0.01; Accession=PF00578.13; Description=AhpCTSA family
  Pfam annotation: Domain name=GSHPx; Domain location=19-127; Score =243.7; E_value=4.4e-70; Accession=PF00255.11; Description =Glutathione peroxidase
  Pfam annotation: Domain name=Redoxin; Domain location=14-174; Score =10.1; E_value=0.00084; Accession=PF08534.2; Description=Redoxin
  Pfam module annotation: Pfam domain module=AhpC-TSA::GSHPx::Redoxin; Domain location=15-156::19-127::14-174
AARLRAAAVVTLCSSASSVHDFTVKDASGKDVDLSTYKGKVLLIVNVASQCGLTNSNYTELSQLYEKYKDQGFEILAFPCNQFGGQEPGTNEEIVQFACTRFKAEYPIFDKVDVNGDNTAPIYKFLKSSKGSLFGENIKWNFSKFLVDKEGRVVERYAPTTSPLSIEKDIKKLLGGS

SEQ ID NO: 76905 - protein, 61 aa, Setaria italica
  Transcript Sequence Number=SeqID_10931
STIVDLWYSLCCHVAWEQAKLPYFSSLLYCRQHHIWCVTAFVVFIHQTLKYSLATFCPFKQ

SEQ ID NO: 76906 - protein, 51 aa, Setaria italica
  Transcript Sequence Number=SeqID_10932
  Gene Ontology: Mol. function=flavin-containing monooxygenase activity; Cellular component=intrinsic to endoplasmic reticulum membrane
  Homolog annotation: Hit_ID=B6U2L7; Match level="QueryCoverage=100%, HitCoverage=14%, E-value=4e-18, Identity=80%"; Hit description =Monooxygenase/ oxidoreductase
NVAHFVKGKHVTIVGSGKSAFDIAAEVAKVNGADQPCTIIYRTKHWLVHKS

SEQ ID NO: 76907 - protein, 102 aa, Setaria italica
  Transcript Sequence Number=SeqID_10933
  Gene Ontology: Mol. function=peptide deformylase activity; Cellular component=chloroplast; Biological process=translation
  Homolog annotation: Hit_ID=Q5VNN5; Match level="QueryCoverage=93%, HitCoverage=34%, E-value=9e-19, Identity=59%"; Hit description =Peptide deformylase 1B, chloroplastic
  Subcellular localization annotation: CTP_CleavageSite=39; ConfidenceScore=5.53e-01
SSVLPSRPLFAAHSGALPPSLRRAGPAMPLAARARRGLSSSTAAAPPAEDDDFATAADLRFEPPLQVVKYPDPILRARNKRINTFDTNLRALADEMFDVMYK

SEQ ID NO: 76908 - protein, 218 aa, Setaria italica
  misc_feature (41)..(41): Xaa can be any naturally occurring amino acid
  Transcript Sequence Number=SeqID_10934
  Gene Ontology: Mol. function=peptide deformylase activity; Cellular component=chloroplast; Biological process=translation
  Homolog annotation: Hit_ID=Q5VNN5; Match level="QueryCoverage=92%, HitCoverage=75%, E-value=5e-97, Identity=84%"; Hit description =Peptide deformylase 1B, chloroplastic
  Pfam annotation: Domain name=Pep_deformylase; Domain location=26-179; Score=175.8; E_value=1.3e-49; Accession=PF01327.13; Description =Polypeptide deformylase
YYLVNFCLNYYSILSLVVSDLRFEPPLQVVKYPDPILRARXKRINTFDTNLRALADEMFDVMYKTDGIGLSAPQVGVNVQLMVFNPAGVKGEGEEIVLVNPVVYKSAKRLLVFEEGCLSFPGIYANVVRPESVKIEAQDVTGAKIKVKLSGLPARVFQHEFDHLLGILFFDRMTMDVLETVRDELKNLEKKYEETTGLTVPETVDNYKGAKDVFSFSR

SEQ ID NO: 76909 - protein, 605 aa, Setaria italica
  misc_feature (588)..(588): Xaa can be any naturally occurring amino acid
  Transcript Sequence Number=SeqID_10935
  Gene Ontology: Mol. function=protein binding; Cellular component =vacuole; Biological process=innate immune response
  Homolog annotation: Hit_ID=B4F9F2; Match level="QueryCoverage=92%, HitCoverage=91%, E-value=0.0, Identity=71%"; Hit description=Protein binding protein
  Pfam annotation: Domain name=LRR_1; Domain location=393-412; Score =5.6; E_value=26; Accession=PF00560.25; Description=Leucine Rich Repeat
  Pfam annotation: Domain name=LRR_1; Domain location=415-435; Score =11.4; E_value=2; Accession=PF00560.25; Description=Leucine Rich Repeat
  Pfam annotation: Domain name=LRR_1; Domain location=437-458; Score =16.8; E_value=0.091; Accession=PF00560.25; Description=Leucine Rich Repeat
  Pfam annotation: Domain name=LRR_1; Domain location=460-480; Score =10.1; E_value=3.6; Accession=PF00560.25; Description=Leucine Rich Repeat
  Pfam annotation: Domain name=LRR_1; Domain location=482-502; Score =8.8; E_value=6.3; Accession=PF00560.25; Description=Leucine Rich Repeat
  Pfam annotation: Domain name=LRR_1; Domain location=508-531; Score =2.5; E_value=1e+02; Accession=PF00560.25; Description=Leucine Rich Repeat
  Pfam module annotation: Pfam domain module=LRR_1::LRR_1::LRR_1::LRR _1::LRR_1::LRR_1; Domain location=393-412::415-435::437-458::460 -480::482-502::508-531
MAKMSCFPNLLAAGRKKKNRKVADAKKASGNECPKVKPVEFIDSPVAAGAGEFEKKAAPNDVKLAATAAADTVPVASREGGGDQFVSKESVEGGELSDFDFDFHAPKKPDGDGTEEVIAGDAAEEPADPSPKLKRSCSNIETKRPGPREAPEMPARSRSYGDLGNLMGGLVADTWATPHGAPEASPVSVKTSYTADRVMLKKRSSSQVLPSRSRKLWWRLFLWSHRNLHRPRSERPVEARSPGRHGGYTSDTLEEDRKNKKVMVDDSPPASVPNQWVAFCAENSLHDRVSAWVCSIENEPPPFRIAEEDEDYDGGDDEVDDDNERGGCAARPRPLELGESSSGKNHGKPKRCAAADEVVQANTIVQSLNAFSSVAHISGMGLKVMPMIAPFSSLRAVNLSSNLIVHISPGSLPKGLHSLDLSRNKIANIEGLRELTKLRVLNLSYNRISRIGHGLSNCTAIRELYLAGNKISDVEGLHRLLKLAVLDLSFNKVTTAKALGQLVANYHSLLALNLVGNPVQANVGDDALRRAVTGLLPNLAYLNKQPVKPQRSAREVANDSVARAALGWSGSGGRSLRKKRASRRLAQXPRSSSLTRGRGGSGGDG

SEQ ID NO: 76910 - protein, 88 aa, Setaria italica
  Transcript Sequence Number=SeqID_10936
  Gene Ontology: Cellular component=integral to membrane; Biological process=peroxisome organization and biogenesis
  Homolog annotation: Hit_ID=Q10SM7; Match level="QueryCoverage=100%, HitCoverage=37%, E-value=4e-41, Identity=92%"; Hit description =Peroxisomal membrane protein 11-1
MGSLDATRAELGLVVLYLNKAEARDKICRAIQYGSKFISNGQAGTAQDVDKSTTIARKVFRLLKWVNDLHALISPAAKGTPLTLVLLG

SEQ ID NO: 76911 - protein, 237 aa, Setaria italica
  Transcript Sequence Number=SeqID_10937
  Gene Ontology: Cellular component=integral to membrane; Biological process=peroxisome organization and biogenesis
  Homolog annotation: Hit_ID=Q10SM7; Match level="QueryCoverage=99%, HitCoverage=99%, E-value=1e-116, Identity=86%"; Hit description =Peroxisomal membrane protein 11-1
  Pfam annotation: Domain name=PEX11; Domain location=11-226; Score =234.4; E_value=2.9e-67; Accession=PF05648.6; Description=Peroxisomal biogenesis factor 11 (PEX11)
MGSLDATRAELGLVVLYLNKAEARDKICRAIQYGSKFISNGQAGTAQDVDKSTTIARKVFRLLKWVNDLHALISPAAKGTPLTLVLLGKSKNALLSTFLFLDQFVWLGRTGIIKNKEATDRVGRISLYCWMASSVCASLVELGELKRLSKSMRKLARELRDTDKYENEQYQNKMKQSDERLLAVVKAAMDVVVAIGLLQLAPKKITPRVTGAFGFITSLISCYQQLPSRAPVAKVKV

SEQ ID NO: 76912 - protein, 202 aa, Setaria italica
  misc_feature (29)..(29): Xaa can be any naturally occurring amino acid
  Transcript Sequence Number=SeqID_10938
  Gene Ontology: Mol. function=transferase activity
  Homolog annotation: Hit_ID=B9SQV1; Match level="QueryCoverage=84%, HitCoverage=57%, E-value=7e-50, Identity=34%"; Hit description =Pentatricopeptide repeat-containing protein, putative
  Pfam annotation: Domain name=PPR; Domain location=108-142; Score =39.5; E_value=1.4e-08; Accession=PF01535.12; Description=PPR repeat
  Pfam annotation: Domain name=PPR; Domain location=38-72; Score=31.8; E_value=2.8e-06; Accession=PF01535.12; Description=PPR repeat
  Pfam annotation: Domain name=PPR; Domain location=73-107; Score=48.6; E_value=2.5e-11; Accession=PF01535.12; Description=PPR repeat
  Pfam module annotation: Pfam domain module=PPR::PPR::PPR; Domain location=108-142::38-72::73-107
NKTKKEQTKNKTRDQQYNSNALRLFNRMXKNGCHPDIGTYTTIIAAYCQQRQMEESQKLFEKCHAIGLVPTKQTYTSMIAGYCKVGKSTSALRMFERMVQHGCLPDSITYGALISGLCKESRLEEARALYESMLDKHLVPCDVTRVTLAFEYCRKEKISIAVSMLDRLDKRQQAHTADALVRKLSAADNLDAASLFLKKCSG

SEQ ID NO: 76913 - protein, 614 aa, Setaria italica
  Transcript Sequence Number=SeqID_10939
  Gene Ontology: Mol. function=protein dimerization activity; Cellular component=nucleus; Biological process=regulation of RNA metabolic process
  Homolog annotation: Hit_ID=Q3LAG0; Match level="QueryCoverage=99%, HitCoverage=74%, E-value=0.0, Identity=58%"; Hit description =Transposase-related protein w-gary2
  Pfam annotation: Domain name=hATC; Domain location=531-613; Score =117.3; E_value=5e-32; Accession=PF05699.6; Description=hAT family dimerisation domain
GVLFQSSVPSFKSRLQDELSPALTNGKVQIAEYASKFLKGSSGNRSPVERHILALPAMDETNSTEQNTTSAQTAADISRKFDQEASYQELTKMIISHGYPLSIVEHEEMKRFAKSLNPAFNMASSIDIEEYSTLLFQKEKTDLKEKIALLSHRVSLSASVWAPHGAEASVKYLCLAVHFIDSEWKLQRKIIKFGVFWSSPTSLERMIHFKEACVLDSDSGPFNVIQEALRDWNLDQKHFSLTSVNAIRRDEGTSKLMDLLIQRKCLPIRGELYNVACVDDVLNSIVSKGQPVLHHVGDILEKFIQVQMSSSLTRQQLLEVVTHIGLKCPQEDAKWWHKIYFRLEVFLHFKKAFPSEELLSAEDTKTVESVCRILRAFYRAVEVISGPVCPTANIYFNELWKVRTTLQEEASSDHTELANMVWVMQEAFNEYWQSSYVWLSIPVVLDPRFKITFIEFRLKRAFGTDAEKYVSAVRDAIRELFHEYCGPSEKSGLDTSTREARIVEFDGFDSDSLEDWDEHLNAQTRSQLMTELDNYLEDGLVPRKDDFDILNWWMNNSTKYPTLSIMARDVLAMPASAANCEAALSSEGNMIHKQWSTLNIKTIEALVCTRDWIK

SEQ ID NO: 76914 - protein, 182 aa, Setaria italica
  misc_feature (13)..(13): Xaa can be any naturally occurring amino acid
  Transcript Sequence Number=SeqID_10940
  Gene Ontology: Mol. function=hydrolase activity, acting on acid anhydrides, catalyzing transmembrane movement of substances; Cellular component=integral to membrane; Biological process=copper ion transport
  Homolog annotation: Hit_ID=Q6ZDR8; Match level="QueryCoverage=98%, HitCoverage=18%, E-value=2e-83, Identity=81%"; Hit description =Putative potential copper-transporting ATPase
  Pfam annotation: Domain name=HMA; Domain location=28-100; Score=51.9; E_value=2.5e-12; Accession=PF00403.18; Description=Heavy-metal -associated domain
LRGWKRPRASQGXGVAEEAAGQGADVIVLDVGGMSCGGCAASVKRILENEPQVRSATVNLATEMAVVWAVPEDRDVQDWKEQLGEKLASQLTTCGYKSNLRDASKISSQAVFERKMHEKLEQLKQSGRELVVSWALCAVCLLGHISHLFGVNVPLMHFIHSTGFHLSLSIFTFVGPGRRLIL

SEQ ID NO: 76915 - protein, 607 aa, Setaria italica
  Transcript Sequence Number=SeqID_10941
  Gene Ontology: Mol. function=molecular_function; Cellular component =Golgi apparatus; Biological process=protein transport
  Homolog annotation: Hit_ID=Q9C9V9; Match level="QueryCoverage=99%, HitCoverage=72%, E-value=0.0, Identity=63%"; Hit description =Putative golgi transport complex protein; 67058-70172
RKVDAAASKLRSEASAVIDRGVAESNQNDVWCGLQVYYNLGELKPAVEGLVGKYKAAGAKSVAVALDMKAISMAAASGGGPGGVQRSGTPQIGGSKKAAEALWDRMRQCMEELHRAVSAAWQLQTVLTKKRVPFTQMLFLEEVWQEGEPLLTERVWDAIVKAFASQMKSTFTASSFVKEIFTLGYPRLFSMVENLLERISRDTDVKGTLPALTPEGKDHMISAIEIFQTAFLALCHSRLSDYINSIFPMSSRGTIPSKDQISRLVSRIQEEIEVVRTHGHLLVLVLREIGKILLLLAQRAEYQISTGPEARQVTGSATPAQLKNFALCLHLQEVHTRISSILSTLPNVASEVLSPSLGVIYGVACDSVTSLFQAMLDRLESCILKMHEQDFAGHGMDAAMDNNASAYMEELQKCAIHFRSEFLSKLLPSSSSRSETICTIMVRRMASRVLIFFIRHASLVRPLSEAGKLRMARDMAELELAVGQNLFPVEQLGAPYRALRAFRPVLFLETSQLEKSPLLQDLPASVILHHLYSRGPDELQSPLQRNKLTPLQYSLWLDSQGEDQIWKGVKATLDDYEMRVRSRGDKEFSPVYSLMLQIGSALSQATI

SEQ ID NO: 76916 - protein, 84 aa, Setaria italica
  Transcript Sequence Number=SeqID_10942
  Subcellular localization annotation: CTP_CleavageSite=57; ConfidenceScore=5.56e-01
HFHSKTCLKMLSRTPGSPWSKYLQRVACFVCLLALATFLTLVFSFFHKKNPSSVQFRVTYGQSFKTHTLPLNQKLCLSFFPFST

SEQ ID NO: 76917 - protein, 108 aa, Setaria italica
  Transcript Sequence Number=SeqID_10943
EGFWRRREDEEEDDLYFDDRDSCGFPSPQVSSCSASDSESEYAEADDVAIDEKMACPATSQPAFQCSSSAEHDCTDAGAPGAAGDGKKMAGGSGGWRFGGGARQGWGW

SEQ ID NO: 76918 - protein, 274 aa, Setaria italica
  Transcript Sequence Number=SeqID_10944
  Gene Ontology: Cellular component=chloroplast
  Homolog annotation: Hit_ID=C1MR64; Match level="QueryCoverage=75%, HitCoverage=76%, E-value=6e-47, Identity=52%"; Hit description=DNA glycosylase
  Pfam annotation: Domain name=SNARE_assoc; Domain location=106-225; Score=171.8; E_value=2e-48; Accession=PF09335.3; Description=SNARE associated Golgi protein
RRKASPNVPFRLGGGGSGNPKDRRPAADEEEEEEAESAGGSGAVTGTLLAGALLVGVVGGFGAAGYVYKDQINTFLTQFSGFIDGYGPAGYALFVLVYAGLEVLAIPAIPLTMSAGLLFGSVTGTIIVSVSGTLAAAVAFLIARYFARERILKLVEGNKKFLAIDKAIGENGFKVVTLLRLSPLLPFSLGNYLYGLTSVKFLPYVLGSWLGMLPGSWAYVSAGAFGRAIIQDESEIGLGGNGQLWTLGVGLLFTAIAAVYVTRLAKDAVKEIDE

SEQ ID NO: 76919 - protein, 733 aa, Setaria italica
  Transcript Sequence Number=SeqID_10945
  Gene Ontology: Mol. function=ubiquitin protein ligase binding; Cellular component=cullin-RING ubiquitin ligase complex; Biological process=ubiquitin-dependent protein catabolic process
  Homolog annotation: Hit_ID=Q0WL17; Match level="QueryCoverage=99%, HitCoverage=100%, E-value=0.0, Identity=70%"; Hit description=Cullin 3-like protein
  Pfam annotation: Domain name=Cullin; Domain location=30-632; Score =860.4; E_value=1e-255; Accession=PF00888.14; Description=Cullin family
  Pfam annotation: Domain name=Cullin_Nedd8; Domain location=660-727; Score=141.2; E_value=3.2e-39; Accession=PF10557.1; Description =Cullin protein neddylation domain
  Pfam module annotation: Pfam domain module=Cullin::Cullin_Nedd8; Domain location=30-632::660-727
MMNGQKKRGTKIEPFRHRVETDPKFFDKSWRKLHDAIREIYNHNASGLSFEELYRTAYNMVLHKFGPKLYDKLIENMKEHLEEMRTCVEAAQGGLFLEELERKWNDHNKALTMIRDILMYMDRTYIPTNKKTPVFDLGLELWRDTIVRSPMIQGRLLDTLLELIHRERTGEVINRCLMRTTTKMLMNLGSSVYQDDFERPFLEVSASFYSGESQQFIDCYSCGDYLKLAERRLSEESERVSQYMDVKTNEKITAVVVKEMLANHMQRLILMENSGLVNMLVEDRYEDLTRMYTLFNHVPDGLTTIRSVMMSHIKDTGKSLVTDPERLKDPVDFVQRLLNEKDKYDNIINVSFNSDKSFMNALNSSFEHFINLNNRSPEFISLFVDDKLRKGVKEANEEDLETVLDKVMMLFRYLQEKDLFEKYYKQHLAKRLLSGKATSDDSERSMLVKLKTECGYQFTSKLEGMFTDLKTSHDTTQGFYASTSDLADYPTISVQILTTGSWPTQPCNTCNLPPEIVAVSERFRAYYLGTHNGRRLTWQTNMGNADIKATFGNGSKHELNVSTYQMCVLMLFNSSDVLTYREIEQSTAIPAADLKRCLQSLALVKGKQVLRKEPMSRDIADDDSFSVNDKFTSKLFKVKIGTVVAQKETDPEKLETRQRVEEDRKPQIEAAIVRIMKSRRVLDHNSIMTEVTKQLQPRFLPNPVVIKKRIESLIEREFLERDKTDRKMYRYLA

SEQ ID NO: 76920 - protein, 50 aa, Setaria italica
  Transcript Sequence Number=SeqID_10946
SWLGVTELYAQTAHVPFCFDVLTFLYILLDSMYVIRVYGICAVGFKPDRP

SEQ ID NO: 76921 - protein, 109 aa, Setaria italica
  misc_feature (11)..(11): Xaa can be any naturally occurring amino acid
  Transcript Sequence Number=SeqID_10947
  Homolog annotation: Hit_ID=B6SNS7; Match level="QueryCoverage=59%, HitCoverage=24%, E-value=2e-16, Identity=66%"; Hit description=FIP1
RLHYKVVIPLXQFRSVNSSSSRTNASEKYIQVASVDNHEFGLWFMGFVYYESAVKNLQEALQEAQRMLVLSDVHRLELACLIHYLSCNILCFDCCCSVCDNMCILPCLL

SEQ ID NO: 76922 - protein, 93 aa, Setaria italica
  misc_feature (19)..(19): Xaa can be any naturally occurring amino acid
  Transcript Sequence Number=SeqID_10948
  Homolog annotation: Hit_ID=Q7XTT0; Match level="QueryCoverage=41%, HitCoverage=8%, E-value=2e-09, Identity=66%"; Hit description =OSJNBa0035M09.19 protein
LQNAQDKLSELEKEAKTEXLKVHAMWLPHWLAVRVVRCQEVASAKWQVHGKPVLGPLMQKVAEKSTYAQQLVEPHLQKTQNVRSFPVSYTRLH

SEQ ID NO: 76923 - protein, 201 aa, Setaria italica
  misc_feature (25)..(25): Xaa can be any naturally occurring amino acid
  misc_feature (54)..(54): Xaa can be any naturally occurring amino acid
  misc_feature (72)..(72): Xaa can be any naturally occurring amino acid
  misc_feature (85)..(85): Xaa can be any naturally occurring amino acid
  misc_feature (132)..(132): Xaa can be any naturally occurring amino acid
  Transcript Sequence Number=SeqID_10949
  Gene Ontology: Cellular component=plasma membrane
  Homolog annotation: Hit_ID=Q7XTT0; Match level="QueryCoverage=82%, HitCoverage=37%, E-value=4e-45, Identity=56%"; Hit description =OSJNBa0035M09.19 protein
QEEEEETSQLESIVRERTAQMAALXGELELLQKLNVADDESVMKANTNVDMLEXQIERLGSDLEDQVRKGEXHLEARATDAEKTXHEFSRKLEHAENINVEQRKKIKDLDDRLQNAQDKLSELEKEAKLKAXKVHAMWLPHWLAVRVVRCQEVASAKWQVHGKPVLGPLMQRLLRIDICSAISGATSSEDTKCEVFSGVLY

SEQ ID NO: 76924 - protein, 115 aa, Setaria italica
  Transcript Sequence Number=SeqID_10950
  Gene Ontology: Mol. function=phosphotransferase activity, alcohol group as acceptor; Cellular component=cytoplasm; Biological process =metabolic process
  Homolog annotation: Hit_ID=B6TGG3; Match level="QueryCoverage=94%, HitCoverage=30%, E-value=3e-48, Identity=86%"; Hit description=ATP binding protein
  Pfam annotation: Domain name=GHMP_kinases_N; Domain location=1-59; Score=12.0; E_value=0.013; Accession=PF00288.18; Description=GHMP kinases N terminal domain
AGLSGSSAIVCAALSCLLDFYDVRHLIKVELRPNLILDAEKELGIVAGLQDRVAQVYGGLVYMDFSKEHMDKLGHGIYRRLDANLLPPLYLIYAENPSDSGKVVIELNQYTTIHA

SEQ ID NO: 76925 - protein, 356 aa, Setaria italica
  Transcript Sequence Number=SeqID_10951
  Gene Ontology: Mol. function=phosphotransferase activity, alcohol group as acceptor; Cellular component=cytoplasm; Biological process =metabolic process
  Homolog annotation: Hit_ID=B6TGG3; Match level="QueryCoverage=99%, HitCoverage=97%, E-value=0.0, Identity=88%"; Hit description=ATP binding protein
  Pfam annotation: Domain name=GHMP_kinases_C; Domain location=251-335; Score=29.3; E_value=1.6e-05; Accession=PF08544.5; Description=GHMP kinases C terminal
  Pfam annotation: Domain name=GHMP_kinases_N; Domain location=109-178; Score=45.8; E_value=1.7e-10; Accession=PF00288.18; Description=GHMP kinases N terminal domain
  Pfam module annotation: Pfam domain module=GHMP_kinases_C::GHMP _kinases_N; Domain location=251-335::109-178
MAAAEMVLERRAYARVGLLGNPSDVYGGRALSFAIADFSATVRLRPSAELLIQPHPHHDLVAFPSLPHLVNRLQSEGYYGGVRLLMAICKVFYNHCIQNNISLKAENFTLSYDTNIPRQAGLSGSSAIVCAALSCLLDFYDVRHLIKVELRPNLILDAEKELGIVAGLQDRVAQVYGGLVYMDFSKEHMDKLGHGIYRRLDANLLPPLYLIYAENPSDSGKVHSTVRQRWFDGDEFIISRMKEVAQLALDGHRALLQKDYTELARLMNRNFDLRREMFGDDVLGSVNIKMVEVARSVGASSKFTGSGGAVVALCPDGEAQVELLHRACQEAGFVVQQIIVAPSALSDEELTSLLTC

SEQ ID NO: 76926 - protein, 99 aa, Setaria italica
  misc_feature (90)..(90): Xaa can be any naturally occurring amino acid
  misc_feature (94)..(94): Xaa can be any naturally occurring amino acid
  Transcript Sequence Number=SeqID_10952
FFCSEKPQVEIEASIHASYKDQETLVRSTVNKVLICISSHIHMLRQVLKVSSRMYISFPEAAAYCDKPKNQDSKAHPTNEETAMDGAAAXVYDXTTRRT

SEQ ID NO: 76927 - protein, 337 aa, Setaria italica
  misc_feature (332)..(332): Xaa can be any naturally occurring amino acid
  Transcript Sequence Number=SeqID_10953
LGAPAEGEDGDEEELLGGGLIEELRRENSVKKRLDMDEAERGMAAGAEAKGKRSKRKRQEEAPKESAREKKRSEKERRAQLDSIHAESQRLLRETRSASFRPIVQPVCKPISSLLEKIRLRKLEILKKSSTTTEDNDAASEPAIDSAVRLDVPQVKEVTRDDKDLRIDGVEELGTNGHELDQCGVAEDEDDLNCKEKDLHTKASDEEASDRSQENHEENTQSSEKHNDSVDQTQLPPSSSPAKKSTDDESSSEDEEEEDNNKENIEPSTQDNDVNTREHLQRAIGGDSCPDNAILKDFLDDEAEEEDDSDNDMMRFKDDDEDDGSDENEVFXDLIAA

SEQ ID NO: 76928 - protein, 286 aa, Setaria italica
  misc_feature (17)..(17): Xaa can be any naturally occurring amino acid
  misc_feature (243)..(243): Xaa can be any naturally occurring amino acid
  misc_feature (255)..(255): Xaa can be any naturally occurring amino acid
  Transcript Sequence Number=SeqID_10954
  Gene Ontology: Mol. function=4 iron, 4 sulfur cluster binding; Cellular component=nucleus; Biological process=base-excision repair
  Homolog annotation: Hit_ID=B3W6G6; Match level="QueryCoverage=91%, HitCoverage=13%, E-value=1e-89, Identity=67%"; Hit description =Putative transcriptional activator DEMETER
VGRPRKELKPGEKPKPXGRPRKDKVVHDVVISKGSHTDPLQNEGISSVLAPHAEGASCARTVTLERVIESVSEAPEPSIDSLDLIIQKIMLLDINKLDTTRVAEPHGALVPYKREICAIIPFEGNVKRKRSRAKVDLDPVTTLMWKLLMGPDMSDGAEAMDKDKEKWLDEERKIFRGRVDSFIARMHLVQGDRRFSPWKGSVVDSVVGVFLTQNVSDHLSSSAFMALSAKFPAKPEVSEKPQXSEDNGCCSSFFXDATKLQGEVLVEEASTTAGSLITAEEKVGKQ

SEQ ID NO: 76929 - protein, 69 aa, Setaria italica
  Transcript Sequence Number=SeqID_10955
IHQTSVLDVELIQAAPPVLRSYTVLLEQRLIRMKIFLAWAPQDTEKKGGTEMGIVLLLYLTRDKDFRVV

SEQ ID NO: 76930 - protein, 56 aa, Setaria italica
  Transcript Sequence Number=SeqID_10956
  Gene Ontology: Mol. function=zinc ion binding
GRVGALQSLVAALVSEAAKSNERMDLATHEASVLLSRIKQQPVSMHVSGEHAPRLQ

SEQ ID NO: 76931 - protein, 603 aa, Setaria italica
  misc_feature (599)..(599): Xaa can be any naturally occurring amino acid
  misc_feature (601)..(601): Xaa can be any naturally occurring amino acid
  Transcript Sequence Number=SeqID_10957
MLLKPGRHRDRHRRDRHRREEKDHHGSGRREREREKEKDDRRKEKDDGKHRDRDRERDKDKDSKHRDRDKEPERDRGRDRDRAKDRERDRGKDRDKEPDRERDKERERRDRDKERSRNRDKDRADRGDREREDREREKSRGKGRGEDEVDLSKGDEGDHKQRVDASGDAEQPATTELRERIARVKEERLKDKKGGGILDGDDGAAEILSWVGKSRKLDEKRQAEKEKALRLARALEEQDNILAENGEDDDEEEEDKQVGDHLSGVKVLHGLDKVLEGGAVVMTLKDQSILANGDINEDADMLENIEIGEQKQRDEAYKSSKKKGTYDDKFSEDSSSKKSILSHYDDPVQDEGVTLDEGGRFTGEAEKKLEELRKRIEGGHVQKKTEDLTSTSKMSTDYFTPDEMLQFKKPKKKKSLRKKGKLDLDALEAEAIASGLGAADRGSRNDDRRQSAREEEQKADAEKRSNAYEAAIAKAEEASRALRPEKIMPAKPAEEEELVFGDDYEDLQKSLEQARKLALRKEEEAAGPLAVVELATATKGQEDTDATEGDSQQNKVVITEMEEFVWGLQLNQEARKTEDDGVYMDEDDDDMPSDNHVKXDXNG

SEQ ID NO: 76932 - protein, 486 aa, Setaria italica
  misc_feature (72)..(72): Xaa can be any naturally occurring amino acid
  misc_feature (276)..(276): Xaa can be any naturally occurring amino acid
  misc_feature (320)..(320): Xaa can be any naturally occurring amino acid
  Transcript Sequence Number=SeqID_10958
  Gene Ontology: Mol. function=3,4-dihydroxy-2-butanone-4-phosphate synthase activity; Cellular component=chloroplast; Biological process=riboflavin biosynthetic process
  Homolog annotation: Hit_ID=Q6Z234; Match level="QueryCoverage=98%, HitCoverage=88%, E-value=0.0, Identity=91%"; Hit description =Putative riboflavin biosynthesis protein ribA
  Pfam annotation: Domain name=DHBP_synthase; Domain location=60-258; Score=444.5; E_value=1.6e-130; Accession=PF00926.11; Description=3,4- dihydroxy-2-butanone 4-phosphate synthase
  Pfam annotation: Domain name=GTP_cyclohydro2; Domain location=263 -433; Score=368.3; E_value=1.4e-107; Accession=PF00925.12; Description=GTP cyclohydrolase II
  Pfam module annotation: Pfam domain module=DHBP_synthase::GTP _cyclohydro2; Domain location=60-258::263-433
GGDSSENVIINGKVNPSNAVQADAVALGTIAADMAPVVDGFSADDDELDLDFPTEGFSSIPEAIEDIRQGKXVIVVDDENRENEGDLIMAASKVTPEAMAFIVRHGTGIVCVSMKEEDLERLQLPLMVTTKENEEKLRTAFTVSVDAKEGTTTGVSAKDRANTILALASPNSKPEDFNRPGHIFPLKYREGGVLKRAGHTEASVDLAMLAGLPPVAVLCEIVDDDDGSMALLPKLQQFAKRENLKIISIADLIRYRRKRDRLVECVCVTPLQVQWXSFTSYCYRSLIDGMEHIAMVKGDVGDGQDILVRVHSECLTGDIXLGSARCDCGNQLALAMTMIEKTGRGVVVYLRGHEGRGIGLGHKLRAYNLQDDGRDTVEANLELGLPADSREYGIGAQILRDLGVRTMRLMTNNPAKYTGLKGYGLSVLGRVPLLTPITNENRRYMEAKRLKMGHVYGNRPSSHTSGSGMTDGSAKEEGRQEQTPEA

SEQ ID NO: 76933 - protein, 59 aa, Setaria italica
  Transcript Sequence Number=SeqID_10959
FLTVEDVNKSKICNFPHLPSFCHLRCLFPTLMYKKFYLSKHETIYISDPSGGFEKHTPF

SEQ ID NO: 76934 - protein, 378 aa, Setaria italica
  misc_feature (117)..(117): Xaa can be any naturally occurring amino acid
  Transcript Sequence Number=SeqID_10960
  Gene Ontology: Mol. function=hydrolase activity, acting on acid anhydrides, catalyzing transmembrane movement of substances; Cellular component=proton-transporting two-sector ATPase complex; Biological process=proton transport
  Homolog annotation: Hit_ID=Q84PC1; Match level="QueryCoverage=96%, HitCoverage=89%, E-value=0.0, Identity=86%"; Hit description =Putative vacuolar ATP synthase subunit C (Fragment)
  Pfam annotation: Domain name=V-ATPase_C; Domain location=5-371; Score= 635.4; E_value=5.5e-188; Accession=PF03223.7; Description=V-ATPase subunit C
MATRYWIVSLPVQSPGATASSIWSRLQDNISRHSFDTPLYRFNVPDLRVGTLDSLLALSDDLVKSNIFVEGVSHKIRRQIEDLERAGGVESGALTVDGVPVDTYLTRFVWDEGRYPXTMSPLKEIVGSIQSQVAKIEDDMKVRAAEYNNVRSQLSAINRKQSGSLAVRDLSNLVKPEDMITSEHLVTLLAIVPKYSQKDWMSSYESLDTFVVPRSSKKLYEDNEYALYSVTLFAKVVDNFKVRAREKGFQVRDFEYSPEAQESRKQEMEKLLQDQEAMRSSLLQWCYASYSEVFSSWMHFCAVRIFVESILRYGLPPSFLSAVLAPSTKSEKKVRSILEELCGNAHSTYWKSEDDVSVAGLGGESEVHPYVSFTINIV

SEQ ID NO: 76935 - protein, 51 aa, Setaria italica
  Transcript Sequence Number=SeqID_10961
  Gene Ontology: Mol. function=single-stranded DNA binding; Cellular component=nucleus; Biological process=nucleotide-excision repair
  Homolog annotation: Hit_ID=B9RUC5; Match level="QueryCoverage=100%, HitCoverage=3%, E-value=2e-18, Identity=78%"; Hit description=DNA -repair protein UVH3, putative
  Pfam annotation: Domain name=XPG_N; Domain location=1-51; Score=-8.0; E_value=0.013; Accession=PF00752.9; Description=XPG N-terminal domain
MGVHGLWELLAPVGRRVSVETLAGKRVAVDASIWMVQFMRAMRDDSGEMVR

SEQ ID NO: 76936 - protein, 51 aa, Setaria italica
  Transcript Sequence Number=SeqID_10962
  Gene Ontology: Mol. function=metal ion binding; Cellular component =nucleus; Biological process=multicellular organismal development
  Homolog annotation: Hit_ID=O04003; Match level="QueryCoverage=100%, HitCoverage=15%, E-value=8e-10, Identity=71%"; Hit description =Protein LIGULELESS 1
MMNLSAAANACDEFPYVASNPAPPSLLPIMEQESSIQREQLGYNLEANSLA

SEQ ID NO: 76937 - protein, 81 aa, Setaria italica
  Transcript Sequence Number=SeqID_10963
NGSWEGGGGWGWRPCPCLVVVAWTPLAWCETAHCYDALGLAFSSGLGMAMEIGGGMEDGHGAVTGKELREGGLRFEIGIGV

SEQ ID NO: 76938 - protein, 313 aa, Setaria italica
  Transcript Sequence Number=SeqID_10964
  Gene Ontology: Mol. function=catalytic activity; Biological process =metabolic process
  Homolog annotation: Hit_ID=B9T3Q7; Match level="QueryCoverage=73%, HitCoverage=73%, E-value=1e-105, Identity=79%"; Hit description=2 -deoxyglucose-6-phosphate phosphatase, putative
  Pfam annotation: Domain name=Hydrolase; Domain location=60-277; Score= 95.2; E_value=2.3e-25; Accession=PF00702.18; Description=haloacid dehalogenase-like hydrolase
  Subcellular localization annotation: CTP_CleavageSite=48; ConfidenceScore=5.68e-01
MAWTSLFLPTTAGATAAATGSRHPSFSHRSHCRVPMTRLRRAPRLVVSASASPASPASSLDALIFDCDGVILESEHLHRQAYNDAFAHFGVRCPPASADPLYWDEAFYDELQNRIGGGKPKMRWYFGENGWPSSNIFETPPSTDSDKEKLVDIIQDWKTERYKEIIKSGTVEPRPGVLRLMDEVKGAGIKLAVCSAATKSSVIMCLENLIGLERFKGLDCFLAGDDVKLKKPDPTIYVTAAEKLGVQSKNCLVVEDSVIGLLAAKGAGMSCIITYTPSTASQDFTDAIATYPDLSDVRLEDLKLLLQKTLVTG

SEQ ID NO: 76939 - protein, 99 aa, Setaria italica
  misc_feature (89)..(89): Xaa can be any naturally occurring amino acid
  misc_feature (94)..(94): Xaa can be any naturally occurring amino acid
  Transcript Sequence Number=SeqID_10965
  Gene Ontology: Cellular component=chloroplast
  Homolog annotation: Hit_ID=Q7X839; Match level="QueryCoverage=56%, HitCoverage=23%, E-value=3e-22, Identity=87%"; Hit description =OSJNBa0042I15.2 protein
  Subcellular localization annotation: CTP_CleavageSite=70; ConfidenceScore=5.07e-01
ELGRRSLTNGLNFRSRYAVQRSGNVLMSFNNKEASSAIPLFSPVIVPMAQSFGPILSQLTSYPTIRFGVRCAAIKQLENLSPPVVKQLXPLLQXLPPLY

SEQ ID NO: 76940 - protein, 114 aa, Setaria italica
  Transcript Sequence Number=SeqID_10966
  Gene Ontology: Cellular component=chloroplast
  Homolog annotation: Hit_ID=Q7X839; Match level="QueryCoverage=78%, HitCoverage=37%, E-value=6e-36, Identity=80%"; Hit description =OSJNBa0042I15.2 protein
  Pfam annotation: Domain name=DUF1350; Domain location=1-112; Score= -147.8; E_value=0.0081; Accession=PF07082.3; Description=Protein of unknown function (DUF1350)
VQFKFDRCLRNLDEPINDLPTFGVGHSLGSVIHMLIGSRYAVQRSGNVLMSFNNKEASSAIPLFSPVIVPMAQSFGPILSQLTSYPTIRFGAETAIKQLENLSPPVVKQLLPLL

SEQ ID NO: 76941 - protein, 107 aa, Setaria italica
  Transcript Sequence Number=SeqID_10967
YMQLKRNNNLTHTWMITSGLRVLGALGVCFDLKLFVFVVLTWSLWTSRKKLMIEKLFSHSPTDVLHKILASLHKWHVLLKTVDQIRVSKQMMKVTFRMDEFVKLPRE

SEQ ID NO: 76942 - protein, 45 aa, Setaria italica
  Transcript Sequence Number=SeqID_10968
LIEHYAISAGKRRMHRTGNRSFGGQVILSHWQRQDLLALIIFCNQ

SEQ ID NO: 76943 - protein, 61 aa, Setaria italica
  Transcript Sequence Number=SeqID_10969
SQTRVHTRMNASTNYLLPSTIHDRACLPFYSWHCCHIRQAGASSRPGALPAPLTLQKEERG

SEQ ID NO: 76944 - protein, 65 aa, Setaria italica
  Transcript Sequence Number=SeqID_10970
VHEQSATIAELWDGATLKCTFRRCVMLVNCSAHLLLSSFCKVNGAGRAPSLLLAPACRIWQQCHE

SEQ ID NO: 76945 - protein, 448 aa, Setaria italica
  Transcript Sequence Number=SeqID_10971
  Gene Ontology: Cellular component=chloroplast
  Homolog annotation: Hit_ID=Q7X839; Match level="QueryCoverage=52%, HitCoverage=78%, E-value=5e-73, Identity=63%"; Hit description =OSJNBa0042I15.2 protein
  Pfam annotation: Domain name=DUF1350; Domain location=105-386; Score =138.1; E_value=2.8e-38; Accession=PF07082.3; Description=Protein of unknown function (DUF1350)
  Subcellular localization annotation: CTP_CleavageSite=55; ConfidenceScore=5.75e-01
MIRMAAASPPPASAVRVRGGGGAAASSSARLFTGPRSRVAAPIGRGRRRCAISCCSSQDGDGPRPAAPPTSASPSDGSIQLYSQIERVITEAAKQSREGWGSTGDWTEVEGAWVLRPKSSEPSFVVHFVGGIFVGAAPQITYRFFLEQLADRGALVIATPYASGFDHFFIADEVQFKFDRCLRNLDEPINDLPTFGVGHSLGSVIHMLIGSRYAVQRSGNVLMSFNNKEASSAIPLFSPVIVPMAQSFGPILSQLTSYPTIRFGAETAIKQLENLSPPVVKQLLPLLQQLPPLYMDLIKGREDFIPKPEETRRLIKSYYGISRNLLIKFKDDQIDETSILAQVLSSEAAISSLLDMSIRSLPGDHSLPLQQVLPDVPPAMADAVNRGGELLANLTAGTPWEAVAKEVGTTLGTDSGILRAQISKDVETLVDVIVSWISSNSGPRLLRP

SEQ ID NO: 76946 - protein, 68 aa, Setaria italica
  Transcript Sequence Number=SeqID_10972
TKMVWEHLLVNLKNDVVRHTRGHLRVAWNSCSRNDTPRLQLDFPTIHPAERHRSSWVYGREVAMTLPA

SEQ ID NO: 76947 - protein, 112 aa, Setaria italica
  Transcript Sequence Number=SeqID_10973
  Gene Ontology: Mol. function=acyl-[acyl-carrier-protein] desaturase activity; Cellular component=chloroplast; Biological process=fatty acid metabolic process
  Homolog annotation: Hit_ID=Q9XFH1; Match level="QueryCoverage=86%, HitCoverage=60%, E-value=3e-42, Identity=84%"; Hit description=Delta- 9-stearoyl desaturase (Fragment)
  Pfam annotation: Domain name=FA_desaturase_2; Domain location=2-112; Score=-84.5; E_value=0.043; Accession=PF03405.6; Description=Fatty acid desaturase
CILSLLCPFQDPRTENNPYLGFIYTSFQERATFISHGNTARHAKDYGDLKLAQICGIIASDEKRHETAYTKIVEKLFEMDPDGTVVALADMMKKKILLIVLVPTLFVPSPFV

SEQ ID NO: 76948 - protein, 33 aa, Setaria italica
  Transcript Sequence Number=SeqID_10974
RKSSHMWLLTTSRSWRTPRAAHNSIMKCDVDIR

SEQ ID NO: 76949 - protein, 74 aa, Setaria italica
  misc_feature (7)..(7): Xaa can be any naturally occurring amino acid
  Transcript Sequence Number=SeqID_10975
  Gene Ontology: Mol. function=structural molecule activity; Cellular component=cytoskeleton
  Homolog annotation: Hit_ID=P24902; Match level="QueryCoverage=90%, HitCoverage=40%, E-value=2e-29, Identity=97%"; Hit description=Actin (Fragment)
IMKCDVXDIRKDLYGNIVLSGGSTMFPGIADRMSKEITALAPSSMKIKVVAPPERKYSVWIGGSILVLPFSLPF

SEQ ID NO: 76950 - protein, 48 aa, Setaria italica
  Transcript Sequence Number=SeqID_10976
  Gene Ontology: Mol. function=structural molecule activity; Cellular component=cytoskeleton
  Homolog annotation: Hit_ID=P02581; Match level="QueryCoverage=85%, HitCoverage=10%, E-value=5e-19, Identity=97%"; Hit description=Actin- 1
KVIPNTSNGIVSNWDDMEKIWHHTFYNELRVAPEEHPVLLTEAPLNPK

SEQ ID NO: 76951 - protein, 80 aa, Setaria italica
  misc_feature (44)..(44): Xaa can be any naturally occurring amino acid
  Transcript Sequence Number=SeqID_10977
  Gene Ontology: Mol. function=protein binding; Cellular component =cytoskeleton; Biological process=nucleocytoplasmic transport
  Homolog annotation: Hit_ID=A9UAM8; Match level="QueryCoverage=91%, HitCoverage=22%, E-value=2e-30, Identity=89%"; Hit description=Actin (Fragment)
AVIISTGINPKANREKMTQIMFETFNVPAMYVAIQACCLFPSYXSGRTTGIVLDSGDGVSHTVPIYEGYALPHAILRLDL

SEQ ID NO: 76952 - protein, 55 aa, Setaria italica
  Transcript Sequence Number=SeqID_10978
  Gene Ontology: Mol. function=structural molecule activity; Cellular component=cytoskeleton; Biological process=actomyosin structure organization and biogenesis
  Homolog annotation: Hit_ID=A9UAM8; Match level="QueryCoverage=94%, HitCoverage=16%, E-value=5e-22, Identity=98%"; Hit description=Actin (Fragment)
TMFPGIADRMSKEITALAPSSMKIKVVAPPERKYSVWIGGSILASLSTFQQVPIV

SEQ ID NO: 76953 - protein, 35 aa, Setaria italica
  Transcript Sequence Number=SeqID_10979
  Gene Ontology: Mol. function=nucleotide binding; Cellular component =cytoskeleton; Biological process=actomyosin structure organization and biogenesis
  Homolog annotation: Hit_ID=P0C540; Match level="QueryCoverage=100%, HitCoverage=9%, E-value=3e-13, Identity=100%"; Hit description=Actin- 7
IGGSILASLSTFQQMWISKAEYDESGPGIVHMKCF

SEQ ID NO: 76954 - protein, 131 aa, Setaria italica
  misc_feature (26)..(26): Xaa can be any naturally occurring amino acid
  Transcript Sequence Number=SeqID_10980
  Gene Ontology: Mol. function=structural molecule activity; Cellular component=cytoskeleton; Biological process=actomyosin structure organization and biogenesis
  Homolog annotation: Hit_ID=P02582; Match level="QueryCoverage=100%, HitCoverage=36%, E-value=2e-56, Identity=79%"; Hit description=Actin- 1
  Pfam annotation: Domain name=Actin; Domain location=1-131; Score= -135.4; E_value=2.2e-07; Accession=PF00022.11; Description=Actin
SSSVEKSYEMPDGQVITIGSERFRCXEVLFQPSLVGMESPGIHEATYNSIMKCDVDIRKDLYGNVVLSGGSTMFPGIADLLAHTITSLAPSSMKVKVIAPPERKYSVWIGGSILASLRNLEALHVDNAGTG

SEQ ID NO: 76955 - protein, 65 aa, Setaria italica
  Transcript Sequence Number=SeqID_10981
NGGKVVLHEILQQSRSSRIQKEPRMMEKPRDLQILHLKIQVQIYCSRNLEAFHVDDAWTRFIILR

SEQ ID NO: 76956 - protein, 73 aa, Setaria italica
  Transcript Sequence Number=SeqID_10982
  Subcellular localization annotation: CTP_CleavageSite=33; ConfidenceScore=5.13e-01
CNQWLHMKKLQPATLHKATPHVLQVQAHVPAFDAFRKSVALTRHVFGTTRRIKPAECAFRNQWHQHAMFFGTR

SEQ ID NO: 76957 - protein, 57 aa, Setaria italica
  Transcript Sequence Number=SeqID_10983
  Gene Ontology: Mol. function=structural molecule activity; Cellular component=cytoskeleton; Biological process=actomyosin structure organization and biogenesis
  Homolog annotation: Hit_ID=Q7XBP8; Match level="QueryCoverage=96%, HitCoverage=11%, E-value=2e-24, Identity=92%"; Hit description =Ubiquitin/actin fusion protein 2
PPAPSSMKIKVVAPPERKYSVWIGGSILASLSTFQQMWISKDEYDESGPAIVHRKCF

SEQ ID NO: 76958 - protein, 135 aa, Setaria italica
  Transcript Sequence Number=SeqID_10984
  Gene Ontology: Mol. function=structural molecule activity; Cellular component=cytoskeleton; Biological process=actomyosin structure organization and biogenesis
  Homolog annotation: Hit_ID=P0C540; Match level="QueryCoverage=100%, HitCoverage=35%, E-value=1e-65, Identity=89%"; Hit description=Actin- 7
  Pfam annotation: Domain name=Actin; Domain location=1-134; Score= -136.4; E_value=2.5e-07; Accession=PF00022.11; Description=Actin
PHAILRLDLAGRDLTYSLMKILTERGYSFTTTAEREIVRDIKEKLAYVALDYEQELETAKTSSSVEKSYELPDGQVITIGAERFRCPEVLFQPSFIGMESPGIHETTYNSIMKCDVDIRKDLYGNMVEPPLSTML

SEQ ID NO: 76959 - protein, 127 aa, Setaria italica
  misc_feature (66)..(66): Xaa can be any naturally occurring amino acid
  Transcript Sequence Number=SeqID_10985
  Gene Ontology: Mol. function=structural molecule activity; Cellular component=cytoskeleton; Biological process=nucleocytoplasmic transport
  Homolog annotation: Hit_ID=B9SXZ5; Match level="QueryCoverage=99%, HitCoverage=40%, E-value=4e-69, Identity=98%"; Hit description=Actin, putative
  Pfam annotation: Domain name=Actin; Domain location=4-127; Score= -141.6; E_value=4.8e-07; Accession=PF00022.11; Description=Actin
MADAEDIQPLVCDNGTGMVKAGFAGDDAPRAVFPSIVGRPRHTGVMVGMGQKDAYVGDEAQSKRGXILTLKYPIEHGIVSNWDDMEKIWHHTFYNELRVAPEEHPVLLTEAPLNPKANREKMTQIIV

SEQ ID NO: 76960 - protein, 378 aa, Setaria italica
  Transcript Sequence Number=SeqID_10986
  Gene Ontology: Mol. function=structural molecule activity; Cellular component=actomyosin, actin part; Biological process=actomyosin structure organization and biogenesis
  Homolog annotation: Hit_ID=P53496; Match level="QueryCoverage=99%, HitCoverage=100%, E-value=0.0, Identity=96%"; Hit description=Actin -11
  Pfam annotation: Domain name=Actin; Domain location=5-378; Score =825.5; E_value=3.2e-245; Accession=PF00022.11; Description=Actin
QMADGEDIQPLVCDNGTGMVKAGFAGDDAPRAVFPSIVGRPRHTGVMVGMGQKDAYVGDEAQSKRGILTLKYPIEHGIVSNWDDMEKIWHHTFYNELRVAPEEHPVLLTEAPLNPKANREKMTQIMFETFNVPAMYVAIQAVLSLYASGRTTGIVLDSGDGVSHTVPIYEGYALPHAILRLDLAGRDLTDSLMKILTERGYSFTTTAEREIVRDIKEKLAYVALDYEQELENAKSSSSVEKSYELPDGQVITIGAERFRCPEVLFQPSFIGMEAPGIHETTYNSIMKCDVDIRKDLYGNIVLSGGTTMFPGIADRMSKEITALAPSSMKIKVVAPPERKYSVWIGGSILASLSTFQQMWISKAEYDESGPAIVHRKCF

SEQ ID NO: 76961 - protein, 376 aa, Setaria italica
  Transcript Sequence Number=SeqID_10987
  Gene Ontology: Mol. function=structural molecule activity; Cellular component=actomyosin, actin part; Biological process=actomyosin structure organization and biogenesis
  Homolog annotation: Hit_ID=P02582; Match level="QueryCoverage=100%, HitCoverage=100%, E-value=0.0, Identity=96%"; Hit description=Actin-1
  Pfam annotation: Domain name=Actin; Domain location=3-376; Score =805.1; E_value=4.6e-239; Accession=PF00022.11; Description=Actin
MADEDIQPIVCDNGTGMVKAGFAGDDAPRAVFPSIVGRPRHTGVMVGMGQKDAYVGDEAQAKRGILTLKYPIEHGIVNNWDDMEKIWHHTFYNELRVAPEDHPVLLTEAPLNPKANREKMTQIMFETFECPAMYVAIQAVLSLYASGRTTGIVLDSGDGVSHTVPIYEGYTLPHAILRLDLAGRDLTDHLMKILTERGYSLTTSAEREIVRDIKEKLAYVALDYEQELETARSSSSVEKSYEMPDGQVITIGSERFRCPEVLFQPSLVGMESPGIHEATYNSIMKCDVDIRKDLYGNVVLSGGSTMFPGIADRMSKEITSLAPSSMKVKVIAPPERKYSVWIGGSILASLSTFQQMWIAKAEYDETGPGIVHMKCF

SEQ ID NO: 76962 - protein, 380 aa, Setaria italica
  misc_feature (38)..(38): Xaa can be any naturally occurring amino acid
  misc_feature (68)..(68): Xaa can be any naturally occurring amino acid
  misc_feature (175)..(175): Xaa can be any naturally occurring amino acid
  Transcript Sequence Number=SeqID_10988
  Gene Ontology: Mol. function=structural molecule activity; Cellular component=actomyosin, actin part; Biological process=actomyosin structure organization and biogenesis
  Homolog annotation: Hit_ID=P53496; Match level="QueryCoverage=99%, HitCoverage=100%, E-value=0.0, Identity=97%"; Hit description=Actin -11
  Pfam annotation: Domain name=Actin; Domain location=5-380; Score =799.3; E_value=2.6e-237; Accession=PF00022.11; Description=Actin
KMADAEDIQPLVCDNGTGMVKAGFAGDDAPRAVFPSIXVGRPRHTGVMVGMGQKDAYVGDEAQSKRGXLTLKYPIEHGIVSNWDDMEKIWHHTFYNELRVAPEEHPVLLTEAPLNPKANREKMTQIMFETFNTPAMYVAIQAVLSLYASGRTTGIVLDSGDGVSHTVPIYEGYAXLPHAILRLDLAGRDLTDYLMKILTERGYSFTTTAEREIVRDMKEKLAYIALDYDQEMETAKTSSSVEKSYELPDGQVITIGAERFRCPEVLFQPSFIGMEAAGIHETTYNSIMKCDVDIRKDLYGNIVLSGGTTMFPGIADRMSKEITALAPSSMKIKVVAPPERKYSVWIGGSILASLSTFQQMWIAKAEYDESGPSIVHRKCF

SEQ ID NO: 76963 - protein, 378 aa, Setaria italica
  Transcript Sequence Number=SeqID_10989
  Gene Ontology: Mol. function=structural molecule activity; Cellular component=actomyosin, actin part; Biological process=actomyosin structure organization and biogenesis
  Homolog annotation: Hit_ID=P53496; Match level="QueryCoverage=99%, HitCoverage=100%, E-value=0.0, Identity=95%"; Hit description=Actin -11
  Pfam annotation: Domain name=Actin; Domain location=5-378; Score =825.4; E_value=3.5e-245; Accession=PF00022.11; Description=Actin
EMADGEDIQPLVCDNGTGMVKAGFAGDDAPRAVFPSIVGRPRHTGVMVGMGQKDAYVGDEAQSKRGILTLKYPIEHGIVSNWDDMEKIWHHTFYNELRVAPEEHPVLLTEAPLNPKANREKMTQIMFETFNVPAMYVAIQAVLSLYASGRTTGIVLDSGDGVSHTVPIYEGYALPHAILRLDLAGRDLTDSLMKILTERGYSFTTSAEREIVRDIKEKLAYVALDYEQELETAKNSSSVEKSYELPDGQVITIGAERFRCPEVLFQPSMIGMESPGIHETTYNSIMKCDVDIRKDLYGNIVLSGGSTMFPGIADRMSKEITALAPSSMKIKVVAPPERKYSVWIGGSILASLSTFQQMWISKDEYDESGPAIVHRKCF

SEQ ID NO: 76964 - protein, 142 aa, Setaria italica
  Transcript Sequence Number=SeqID_10990
  Gene Ontology: Mol. function=helicase activity; Cellular component =chloroplast
  Homolog annotation: Hit_ID=B9R997; Match level="QueryCoverage=100%, HitCoverage=67%, E-value=2e-22, Identity=32%"; Hit description =Pentatricopeptide repeat-containing protein, putative
  Pfam annotation: Domain name=PPR; Domain location=17-51; Score=46.8; E_value=8.6e-11; Accession=PF01535.12; Description=PPR repeat
  Pfam annotation: Domain name=PPR; Domain location=52-86; Score=35.1; E_value=2.8e-07; Accession=PF01535.12; Description=PPR repeat
  Pfam annotation: Domain name=PPR; Domain location=87-121; Score=43.2; E_value=1e-09; Accession=PF01535.12; Description=PPR repeat
  Pfam module annotation: Pfam domain module=PPR::PPR::PPR; Domain location=17-51::52-86::87-121
LKVIDLMIQEGHDPDVFTYNTVINCLSKNGELDAAKGIVNEMVDRGCLPDTTTFNTLIVALCSQNRLEEALDLARELTVKGLSPDVYTFNILINALCKVGDPHLGMRLFEVMKSTGCTPDEVTYNILIDHLCSMGKLGNALD

SEQ ID NO: 76965 - protein, 153 aa, Setaria italica
  Transcript Sequence Number=SeqID_10991
  Gene Ontology: Mol. function=protein serine/threonine kinase activity; Cellular component=cell surface; Biological process =protein amino acid phosphorylation
  Homolog annotation: Hit_ID=Q9FHG4; Match level="QueryCoverage=98%, HitCoverage=22%, E-value=1e-60, Identity=70%"; Hit description =Serine/threonine-specific kinase like protein
  Pfam annotation: Domain name=Pkinase; Domain location=1-151; Score= -26.0; E_value=6.1e-07; Accession=PF00069.17; Description=Protein kinase domain
  Pfam annotation: Domain name=Pkinase_Tyr; Domain location=1-151; Score=-108.9; E_value=1.7e-06; Accession=PF07714.9; Description =Protein tyrosine kinase
  Pfam module annotation: Pfam domain module=Pkinase::Pkinase_Tyr; Domain location=1-151::1-151
LEGWCDDKGELLLVYEYMPNGSLDRALYGEPCTLSWPQRYTVAAGIASVLSYLHQECEQRVIHRDIKTSNILLDGNLSPRLGDFGLARLMDHNKSPVSTLTAGTMGYLAPEYLQSGKATEQTDVFSYGVVVLEVCCGRRPIDKDDSGGKNVET

SEQ ID NO: 76966 - protein, 118 aa, Setaria italica
  misc_feature (105)..(105): Xaa can be any naturally occurring amino acid
  Transcript Sequence Number=SeqID_10992
  Gene Ontology: Mol. function=serine-type endopeptidase activity; Cellular component=cell wall; Biological process=negative regulation of catalytic activity
  Homolog annotation: Hit_ID=B6SZ82; Match level="QueryCoverage=99%, HitCoverage=15%, E-value=9e-47, Identity=82%"; Hit description =Subtilisin-like protease
  Pfam annotation: Domain name=PA; Domain location=15-116; Score=107.7; E_value=4e-29; Accession=PF02225.14; Description=PA domain
GNGETHAGMSLYAGDGLGDGKFPLVYNKGIRAGSNASKLCMEGTLDAAEVKGKVVLCDRGANSRVEKGQVVKQAGGVGMVLANTAQSGEEVVADSHLLPAVAVGXAKSGDAIRRYVES

SEQ ID NO: 76967 - protein, 98 aa, Setaria italica
  Transcript Sequence Number=SeqID_10993
ERETHDLHHGLSWATLAIVSPTICPMYKTPKEKLAKKTQITSGGMAALHLHFLASSLYPWSHDLLLLLNPCLQVVDRLDHRSTAKIMDPMFDSAKKSS

SEQ ID NO: 76968 - protein, 539 aa, Setaria italica
  Transcript Sequence Number=SeqID_10994
  Gene Ontology: Mol. function=DNA binding; Cellular component =intracellular
  Homolog annotation: Hit_ID=B6SY06; Match level="QueryCoverage=70%, HitCoverage=83%, E-value=7e-51, Identity=35%"; Hit description=DNA binding protein
  Pfam annotation: Domain name=ELM2; Domain location=184-237; Score =18.8; E_value=0.0017; Accession=PF01448.16; Description=ELM2 domain
  Pfam annotation: Domain name=Myb_DNA-binding; Domain location=283 -333; Score=30.4; E_value=7.4e-06; Accession=PF00249.23; Description =Myb-like DNA-binding domain
  Pfam module annotation: Pfam domain module=ELM2::Myb_DNA-binding; Domain location=184-237::283-333
MLHQENSEAFVRRHSEQLACGNMRGADNGRPNFLPEKCQIAVCQRDEKVGPFDEDLVNGVHLANADVQSPLVASGVKEASTVDHNKRHASSDMTDIVECKRQKQEVTSKEDNHTTSADEDVHQYPTYTSYERSFDSPIYESEESEDEGVGSPVHFPLAHTYVEDDIWPASFHQSVGPCPTRKPVPIGPNHQAELPECRPFGGRTEDDESNKWIRNSVMPMPDSDLLSLMLKPVHCKAGCDCLDEDSINCVRKHVREARGKLKVSVGTDTFRELGFFDMGEEVASRWTEEEEHLFQEVVSSNPASLRRNFWDELPLAFPSKSSKELVSYYFNVFMLRKRAEQNRFDPMNVDSDDDEWQASCDGEFAVTGRTDEYLPTESLTDQDDVACNRVPTEGEFYEDSEDEDELDDASGDRHNGVQRGGMLSEGLPAMSFVDHNQQTFKLDADAQDDSCTSFEAHQGGVEGGTPTDIAEDHHYRSGFDGVAEHGFFGDHCDTKGWEFGFTTGWDKHDFLSTNNVIEEVFGKGSSEDGSDTASGQDLI

SEQ ID NO: 76969 - protein, 66 aa, Setaria italica
  Transcript Sequence Number=SeqID_10995
  Gene Ontology: Mol. function=ubiquitin-protein ligase activity; Cellular component=ubiquitin ligase complex; Biological process =ubiquitin-dependent protein catabolic process
  Homolog annotation: Hit_ID=B6SVK1; Match level="QueryCoverage=100%, HitCoverage=10%, E-value=7e-32, Identity=96%"; Hit description =Ubiquitin-protein ligase
FWAVERFLAHGSERCVREVTGDRALPSLLVGAFHKGDAATKQAAESVLRCLHRMPDYSATYESVEL

SEQ ID NO: 76970 - protein, 278 aa, Setaria italica
  Transcript Sequence Number=SeqID_10996
  Gene Ontology: Mol. function=nucleic acid binding; Cellular component= mitochondrion
  Homolog annotation: Hit_ID=Q1G1I8; Match level="QueryCoverage=94%, HitCoverage=70%, E-value=1e-151, Identity=48%"; Hit description =Pentatricopeptide repeat protein
  Pfam annotation: Domain name=PPR; Domain location=134-168; Score =42.9; E_value=1.3e-09; Accession=PF01535.12; Description=PPR repeat
  Pfam annotation: Domain name=PPR; Domain location=29-63; Score=25.9; E_value=0.00016; Accession=PF01535.12; Description=PPR repeat
  Pfam annotation: Domain name=PPR; Domain location=64-98; Score=45.1; E_value=2.7e-10; Accession=PF01535.12; Description=PPR repeat
  Pfam annotation: Domain name=PPR; Domain location=99-133; Score=43.4; E_value=8.6e-10; Accession=PF01535.12; Description=PPR repeat
  Pfam module annotation: Pfam domain module=PPR::PPR::PPR::PPR; Domain location=134-168::29-63::64-98::99-133
RGYAAGGDIGKAFEYFTKIKESGLKLDVYIYETLLRACCKSGRMQSALAVTREMSFQKIPRNTFIYNILIDGWARRGDVWEAADLMKQMKEDGVPPNIHTYTSYINACCKAGDMRRAENVIQEMADVGLKPNVKTYTTLIKGWARVSLPDRALKCFEEMKMAGLKPDEAAYHCLVTSLLSRATVMEGSTYTGILGVCREMFENDLTVDLRTAVHWSKWLHKIERTGGALTEALQRIFPPDWNSSENLEASNSVSDGDSESCTDSDFSDNDDDHDIDGH

SEQ ID NO: 76971 - protein, 108 aa, Setaria italica
  Transcript Sequence Number=SeqID_10997
DDREPHAGIKVTAIVALILGDRQEMATQIEHPIRLFFSWSRSDAKPEDLPGDVFVHASCLYPITCCLYPVTACQLPSKTSKPTAVRSGKAMVHGHGHANRYTHGSRRT

SEQ ID NO: 76972 - protein, 72 aa, Setaria italica
  Transcript Sequence Number=SeqID_10998
  Gene Ontology: Mol. function=transferase activity; Biological process= phosphorylation
  Homolog annotation: Hit_ID=B6TDC8; Match level="QueryCoverage=100%, HitCoverage=14%, E-value=1e-32, Identity=94%"; Hit description =Phosphomevalonate kinase
MEVVASAPGKVLVAGGYLVLERPNAGLVLSTTARFYAVVRPLRDSLPADSWAWAWTDVKVASPQLSREATYK

SEQ ID NO: 76973 - protein, 131 aa, Setaria italica
  misc_feature (29)..(29): Xaa can be any naturally occurring amino acid
  Transcript Sequence Number=SeqID_10999
GSRRFMLGVKANDASRSDPHSRLIEELEXSFSDAEEPMEEHAVVVERVHGIVHDAHPQNLGAESAYPCEESLSSFDNRHLKYEQNSHQEIRLIGNADKLKEEYNTEENSTAKDAAEDVVDSSHESGKDWQS

SEQ ID NO: 76974 - protein, 268 aa, Setaria italica
  Transcript Sequence Number=SeqID_11000
  Gene Ontology: Mol. function=nucleotide binding; Cellular component =protein complex; Biological process=transcription
  Homolog annotation: Hit_ID=B9SEY8; Match level="QueryCoverage=100%, HitCoverage=100%, E-value=1e-130, Identity=81%"; Hit description=XPA- binding protein, putative
  Pfam annotation: Domain name=ATP_bind_1; Domain location=7-250; Score= 420.6; E_value=2.6e-123; Accession=PF03029.9; Description=Conserved hypothetical ATP binding protein
MGYAQLVIGPAGSGKSTYCSSLYDHCQTVGRTIHIVNLDPAAEHFNYPVDMDIRELISLDDVMEEFGMGPNGGLIYCMEHLEDSLDDWLDEQLENYLDDDYLVFDCPGQIELFTHVPVLRNFVEHLKRKNFNVCAVYLLDSQFVSDVTKYISGCMASLSAMIQLELPHINILSKMDLVSNKKDVEEYLDPNAQVLLSQLNQQMAPRFGKLNKCLAELVDDYSMVNFIPLDLRKESSIQYVLSYIDSCIQYGEDADVKVRDFDLPEEDD

SEQ ID NO: 76975 - protein, 485 aa, Setaria italica
  misc_feature (1)..(1): Xaa can be any naturally occurring amino acid
  misc_feature (16)..(16): Xaa can be any naturally occurring amino acid
  Transcript Sequence Number=SeqID_11001
  Gene Ontology: Mol. function=ATP-dependent helicase activity; Cellular component=cytoplasm; Biological process=mRNA processing
  Homolog annotation: Hit_ID=Q109G2; Match level="QueryCoverage=91%, HitCoverage=84%, E-value=0.0, Identity=93%"; Hit description=DEAD -box ATP-dependent RNA helicase 12
  Pfam annotation: Domain name=DEAD; Domain location=135-301; Score =232.1; E_value=1.4e-66; Accession=PF00270.21; Description=DEADDEAH box helicase
  Pfam annotation: Domain name=Helicase_C; Domain location=367-443; Score=115.5; E_value=1.8e-31; Accession=PF00271.23; Description =Helicase conserved C-terminal domain
  Pfam annotation: Domain name=ResIII; Domain location=131-296; Score= -31.7; E_value=0.024; Accession=PF04851.7; Description=Type III restriction enzyme, res subunit
  Pfam module annotation: Pfam domain module=DEAD::Helicase_C::ResIII; Domain location=135-301::367-443::131-296
XGGGGGGGNHNYYGRXPQPQPQHHHHYQHQQPQQQQQQQQLAHRNSSHLHQQWLRRDQAAASAAGPGDAAGRTASHLDAVDSSSQDWKAQLNIPAPDTRYRTEDVTATKGNEFEDYFLKRELLMGIYEKGFERPSPIQEESIPIALTGSDILARAKNGTGKTAAFCIPALEKIDPEKNAIQVVILVPTRELALQTSQVCKELGKYLNIQVMVSTGGTSLKDDIMRLYQPVHLLVGTPGRILDLTRKGICVLKDCSMLVMDEADKLLAPEFQPSVEALIHFLPPSRQLLMFSATFPVTVKEFKEKYLPKPYVINLMDELTLKGITQYYAFVEERQKVHCLNTLFSKLQINQSIIFCNSVNRVELLAKKITELGYSCFYIHAKMLQDHRNRVFHDFRNGACRNLVCTDLFTRGIDIQAVNVVINFDFPKTSETYLHRVGRSGRYGHLGLAVNLITYEDRFNLYRIEQELGTEIKTIPPQIDLAVYCQ

SEQ ID NO: 76976 - protein, 69 aa, Setaria italica
  Transcript Sequence Number=SeqID_11002
KELPCAEGSSSPIALKSSGSSGQLMNSCHRQIPPCYDQDLEYMRLSACQSLPFKLQTTTAVCLKQNSNY

SEQ ID NO: 76977 - protein, 108 aa, Setaria italica
  Transcript Sequence Number=SeqID_11003
  Gene Ontology: Mol. function=nucleotide binding; Biological process =defense response
  Homolog annotation: Hit_ID=Q84KB8; Match level="QueryCoverage=87%, HitCoverage=6%, E-value=8e-17, Identity=52%"; Hit description=NBS -LRR disease resistance protein homologue (Fragment)
SRTKTVELRLNFDKIKTELKYTLGLLHGAQGRDFSDNPGLQGLLEDLSKKADEAEDALDELHYFMIQDELDGTREATPDLGDGLGAQALHACHAARNTAGTINILRFS

SEQ ID NO: 76978 - protein, 59 aa, Setaria italica
  Transcript Sequence Number=SeqID_11004
LNLEGEYLKMRGGSFFAAGTWFLHLVKHCQADTMNIYECIWIQAIFLGTDHVVSCSSEM

SEQ ID NO: 76979 - protein, 52 aa, Setaria italica
  Transcript Sequence Number=SeqID_11005
MESWEDKVRRFMLEKEEEDDELFLVTVPALQQCLYEEKRSEHTSTLPGAEKV

SEQ ID NO: 76980 - protein, 129 aa, Setaria italica
  misc_feature (83)..(83): Xaa can be any naturally occurring amino acid
  Transcript Sequence Number=SeqID_11006
  Gene Ontology: Mol. function=transposase activity; Biological process= transposition, DNA-mediated
  Homolog annotation: Hit_ID=Q2QT97; Match level="QueryCoverage=96%, HitCoverage=18%, E-value=2e-38, Identity=57%"; Hit description =Transposon protein, putative, CACTA, En/Spm sub-class
TSSFIAPYRGVKYQLSEFRRHGNWYANYKELFNHRHAQLRNHIERTFGMLKKRFPILKVGTFHPIENQIKIPAAAAVFHNLIXQPNNINPSDYVELPEGDNNYPNELQSNEGTTLRDQIALQMWATRNK

SEQ ID NO: 76981 - protein, 268 aa, Setaria italica
  misc_feature (54)..(54): Xaa can be any naturally occurring amino acid
  misc_feature (168)..(168): Xaa can be any naturally occurring amino acid
  Transcript Sequence Number=SeqID_11007
  Gene Ontology: Mol. function=transposase activity; Biological process= transposition, DNA-mediated
  Homolog annotation: Hit_ID=Q2QT97; Match level="QueryCoverage=79%, HitCoverage=29%, E-value=8e-72, Identity=57%"; Hit description =Transposon protein, putative, CACTA, En/Spm sub-class
MESWEDKVRRFMLEKEEEDDELFLVTVPALQQCLYEEKRSEHTSTLPGAEKVRXILEGHENSCKLKFKMEPEIFRVITNYLRMENLLRDTRDVRVEKQLGMFIFMLSHDASTDRLKKGFQHSGETIHRKIAEFFDIIPALTHRFLKLPNVNHTHVKIASDPRFMSFFXNCIGAIDGTHVPITIAQERAAPYRNRKGTLSHNVMCACGFDLNFTFISCGWEGSASDAGVLRSSFYYYEGFSCVCEVVLPYKWWITQNNLPTIYNLDLPN

SEQ ID NO: 76982 - protein, 164 aa, Setaria italica
  misc_feature (78)..(78): Xaa can be any naturally occurring amino acid
  Transcript Sequence Number=SeqID_11008
  Gene Ontology: Mol. function=peptidyl-prolyl cis-trans isomerase activity; Cellular component=spliceosome; Biological process=protein folding
  Homolog annotation: Hit_ID=Q93VG0; Match level="QueryCoverage=100%, HitCoverage=100%, E-value=1e-77, Identity=83%"; Hit description =Peptidyl-prolyl cis-trans isomerase
  Pfam annotation: Domain name=Pro_isomerase; Domain location=11-163; Score=243.6; E_value=4.9e-70; Accession=PF00160.13; Description =Cyclophilin type peptidyl-prolyl cis-tr
MWGSTEGGTPEVTLETSMGAITVEMYYKHAPKTCRNFVELARRGYYNDVIFHRIIKDFIVQGGDPTGTGRGGESIYGXKFEDEIKSELKHTGAGILSMANAGPNTNGSQFFITLAPCQSLDGKHTIFGRVCRGMEIVKRLGSVQTDKNDRPIHEVKILRAIVKD

SEQ ID NO: 76983 - protein, 145 aa, Setaria italica
  Transcript Sequence Number=SeqID_11009
  Subcellular localization annotation: CTP_CleavageSite=20; ConfidenceScore=5.12e-01
RSRPPPAPSAAGAPHRRPCRTMARPHMTSSGDRSAGKKPIKNLLELLDLISLCSLLSSIKQLLSLLSALSLSTSLRARPLPISKLGMLGHAARAMPMAPPRFASLCGLLPRLGHAIYHRPERSLTASIYIKGRCRERYKWLLDQV

SEQ ID NO: 76984 - protein, 96 aa, Setaria italica
  Transcript Sequence Number=SeqID_11010
  Gene Ontology: Mol. function=zinc ion binding; Cellular component =intracellular; Biological process=regulation of transcription, DNA -dependent
  Homolog annotation: Hit_ID=B6SS63; Match level="QueryCoverage=53%, HitCoverage=9%, E-value=1e-26, Identity=100%"; Hit description =Nucleic acid binding protein
  Pfam annotation: Domain name=zf-C2H2; Domain location=2-24; Score =22.3; E_value=0.002; Accession=PF00096.18; Description=Zinc finger, C2H2 type
  Pfam annotation: Domain name=zf-C2H2; Domain location=29-50; Score =15.7; E_value=0.2; Accession=PF00096.18; Description=Zinc finger, C2H2 type
  Pfam module annotation: Pfam domain module=zf-C2H2::zf-C2H2; Domain location=2-24::29-50
KWKCDKCSKKYAVQSDWKAHVKTCGSREYRCDCGTLFSRRDSFITHRAFCDALAEESAKARAEAPPAEENGGSAAVGPPPASPASLRPQYQPRRCR

SEQ ID NO: 76985 - protein, 152 aa, Setaria italica
  misc_feature (141)..(141): Xaa can be any naturally occurring amino acid
  Transcript Sequence Number=SeqID_11011
  Gene Ontology: Mol. function=zinc ion binding; Cellular component =intracellular; Biological process=regulation of transcription, DNA -dependent
  Homolog annotation: Hit_ID=B9SN27; Match level="QueryCoverage=88%, HitCoverage=24%, E-value=4e-60, Identity=79%"; Hit description =Nucleic acid binding protein, putative
  Pfam annotation: Domain name=RS4NT; Domain location=100-137; Score =12.4; E_value=0.061; Accession=PF08071.4; Description=RS4NT (NUC023) domain
  Pfam annotation: Domain name=zf-C2H2; Domain location=115-137; Score =18.3; E_value=0.033; Accession=PF00096.18; Description=Zinc finger, C2H2 type
  Pfam annotation: Domain name=zf-C2H2; Domain location=37-59; Score =28.2; E_value=3.3e-05; Accession=PF00096.18; Description=Zinc finger, C2H2 type
  Pfam module annotation: Pfam domain module=RS4NT::zf-C2H2::zf-C2H2; Domain location=100-137::115-137::37-59
DQSHLLAWLDGGIDQIADPDAEVVALSPATLMATNRFVCEICGKGFQRDQNLQLHRRGHNLPWKLKQRGAGKDAPRKKVYVCPEASCVHHDPGRALGDLTGIKKHFFRKHGEKKWKCDKCSKKYAVHSDWKAHSKICGTRXYKCDCGTVFSR

SEQ ID NO: 76986 - protein, 137 aa, Setaria italica
  Transcript Sequence Number=SeqID_11012
  Gene Ontology: Mol. function=zinc ion binding; Cellular component =intracellular; Biological process=regulation of transcription, DNA -dependent
  Homolog annotation: Hit_ID=B9RF90; Match level="QueryCoverage=76%, HitCoverage=20%, E-value=1e-45, Identity=74%"; Hit description =Nucleic acid binding protein, putative
  Pfam annotation: Domain name=RS4NT; Domain location=18-55; Score =12.4; E_value=0.061; Accession=PF08071.4; Description=RS4NT (NUC023) domain
  Pfam annotation: Domain name=zf-C2H2; Domain location=33-55; Score =21.4; E_value=0.0037; Accession=PF00096.18; Description=Zinc finger, C2H2 type
  Pfam annotation: Domain name=zf-C2H2; Domain location=60-81; Score =18.4; E_value=0.031; Accession=PF00096.18; Description=Zinc finger, C2H2 type
  Pfam module annotation: Pfam domain module=RS4NT::zf-C2H2::zf-C2H2; Domain location=18-55::33-55::60-81
PEASCVHHNPARALGDLTGIKKHYCRKHGEKKWKCERCGKRYAVHSDWKAHAKVCGTREYKCDCGTVFSRRDSFVTHRAFCDALAQENNKLAQPMNMATVASALQGHAHHLALPPSHADDLDAAAEDDADADFNLDT

SEQ ID NO: 76987 - protein, 86 aa, Setaria italica
  Transcript Sequence Number=SeqID_11013
  Gene Ontology: Mol. function=zinc ion binding; Cellular component =intracellular; Biological process=regulation of transcription, DNA -dependent
  Homolog annotation: Hit_ID=Q5UDB8; Match level="QueryCoverage=100%, HitCoverage=14%, E-value=1e-46, Identity=100%"; Hit description =INDETERMINATE-related protein 10
  Pfam annotation: Domain name=RS4NT; Domain location=4-41; Score=14.2; E_value=0.036; Accession=PF08071.4; Description=RS4NT (NUC023) domain
  Pfam annotation: Domain name=zf-C2H2; Domain location=19-41; Score =19.9; E_value=0.01; Accession=PF00096.18; Description=Zinc finger, C2H2 type
  Pfam annotation: Domain name=zf-C2H2; Domain location=46-67; Score =15.7; E_value=0.2; Accession=PF00096.18; Description=Zinc finger, C2H2 type
  Pfam module annotation: Pfam domain module=RS4NT::zf-C2H2::zf-C2H2; Domain location=4-41::19-41::46-67
GDLTGIKKHFCRKHGEKKWKCDKCSKRYAVQSDWKAHSKVCGTREYRCDCGTLFSRRDSFITHRAFCDALAQESARLPPPGLTASH

SEQ ID NO: 76988 - protein, 183 aa, Setaria italica
  Transcript Sequence Number=SeqID_11014
  Gene Ontology: Mol. function=zinc ion binding; Cellular component =intracellular
  Homolog annotation: Hit_ID=Q10QG1; Match level="QueryCoverage=69%, HitCoverage=23%, E-value=6e-73, Identity=95%"; Hit description=Zinc finger, C2H2 type family protein, expressed
  Pfam annotation: Domain name=RS4NT; Domain location=99-136; Score =14.2; E_value=0.036; Accession=PF08071.4; Description=RS4NT (NUC023) domain
  Pfam annotation: Domain name=zf-C2H2; Domain location=114-136; Score =19.9; E_value=0.01; Accession=PF00096.18; Description=Zinc finger, C2H2 type
  Pfam annotation: Domain name=zf-C2H2; Domain location=38-60; Score =26.4; E_value=0.00011; Accession=PF00096.18; Description=Zinc finger, C2H2 type
  Pfam module annotation: Pfam domain module=RS4NT::zf-C2H2::zf-C2H2; Domain location=99-136::114-136::38-60
LFVVIDGDGAMGGGGGGADPDAEVIALSPKTLLATNRFVCEICNKGFQRDQNLQLHRRGHNLPWKLRQRSGKEARKRVYVCPEPSCVHHDPSRALGDLTGIKKHFCRKHGEKKWKCDKCSKRYAVQSDWKAHSKVCGTREYRCDCGTLFSRYVRRSSHAVRASSIPCVYRLFCTCTCVSSPSI

SEQ ID NO: 76989 - protein, 179 aa, Setaria italica
  misc_feature (10)..(10): Xaa can be any naturally occurring amino acid
  Transcript Sequence Number=SeqID_11015
  Gene Ontology: Mol. function=zinc ion binding; Cellular component =intracellular; Biological process=regulation of transcription, DNA -dependent
  Homolog annotation: Hit_ID=B9SN27; Match level="QueryCoverage=93%, HitCoverage=30%, E-value=9e-75, Identity=79%"; Hit description =Nucleic acid binding protein, putative
  Pfam annotation: Domain name=RS4NT; Domain location=95-132; Score =12.4; E_value=0.061; Accession=PF08071.4; Description=RS4NT (NUC023) domain
  Pfam annotation: Domain name=zf-C2H2; Domain location=110-132; Score =18.3; E_value=0.033; Accession=PF00096.18; Description=Zinc finger, C2H2 type
  Pfam annotation: Domain name=zf-C2H2; Domain location=137-158; Score =18.9; E_value=0.021; Accession=PF00096.18; Description=Zinc finger, C2H2 type
  Pfam annotation: Domain name=zf-C2H2; Domain location=32-54; Score =28.2; E_value=3.3e-05; Accession=PF00096.18; Description=Zinc finger, C2H2 type
  Pfam module annotation: Pfam domain module=RS4NT::zf-C2H2::zf -C2H2::zf-C2H2; Domain location=95-132::110-132::137-158::32-54
NKRKRSLPGXPDPDAEVVALSPATQISHTNRFVCEICGKGFQRDQNLQLHRRGHNLPWKLKQRGTGKEAPKKKVYVCPEASCVHHDPARALGDLTGIKKHFFRKHGEKKWKCDKCSKKYAVHSDWKAHSKICGTREYKCDCGTVFSRRDSFITHRAFCDALTEESAKAIGFNAMAAAAP

SEQ ID NO: 76990 - protein, 148 aa, Setaria italica
  Transcript Sequence Number=SeqID_11016
  Subcellular localization annotation: CTP_CleavageSite=10; ConfidenceScore=5.16e-01
SCMQRPSHVMAPSTTQKLNGNISRLSSLDLSGSSQANLPPMHAKARFHVHVRLFIDSLHLASYFVVVVHCLDPIIISITSSGPGPARRCGAPAAPSSPCRRRGSPLCSACRRRRPRTLRRRWGRGRRDGGHGASASERSQRGGSDEIR

SEQ ID NO: 76991 - protein, 183 aa, Setaria italica
  misc_feature (159)..(159): Xaa can be any naturally occurring amino acid
  misc_feature (178)..(178): Xaa can be any naturally occurring amino acid
  Transcript Sequence Number=SeqID_11017
  Gene Ontology: Mol. function=zinc ion binding; Cellular component =intracellular; Biological process=regulation of transcription, DNA -dependent
  Homolog annotation: Hit_ID=B9SN27; Match level="QueryCoverage=97%, HitCoverage=35%, E-value=9e-65, Identity=64%"; Hit description =Nucleic acid binding protein, putative
  Pfam annotation: Domain name=RS4NT; Domain location=122-159; Score =14.0; E_value=0.038; Accession=PF08071.4; Description=RS4NT (NUC023) domain
  Pfam annotation: Domain name=zf-C2H2; Domain location=137-159; Score =3.4; E_value=5.2; Accession=PF00096.18; Description=Zinc finger, C2H2 type
  Pfam annotation: Domain name=zf-C2H2; Domain location=59-81; Score =28.2; E_value=3.3e-05; Accession=PF00096.18; Description=Zinc finger, C2H2 type
  Pfam module annotation: Pfam domain module=RS4NT::zf-C2H2::zf-C2H2; Domain location=122-159::137-159::59-81
  Subcellular localization annotation: CTP_CleavageSite=27; ConfidenceScore=5.23e-01
AEAAGQERSMSNLTSSASAGPDAPPVSGNKRKRSLPGNPDPDAEVVALSPATLMATNRFVCEICGKGFQRDQNLQLHRRGHNLPWKLKQRGTGKEAPKKKVYVCPEASCVHHDPARALGDLTGIKKHFFRKHGEKKWKCDKCSKKYAVHSDWKAHSTSXVFLSVYCDCGTVFSRRDSXFITHR

SEQ ID NO: 76992 - protein, 228 aa, Setaria italica
  misc_feature (75)..(75): Xaa can be any naturally occurring amino acid
  Transcript Sequence Number=SeqID_11018
  Gene Ontology: Mol. function=zinc ion binding; Cellular component =intracellular; Biological process=regulation of transcription, DNA -dependent
  Homolog annotation: Hit_ID=Q2HVE6; Match level="QueryCoverage=50%, HitCoverage=23%, E-value=7e-44, Identity=69%"; Hit description=Zinc finger, C2H2-type
  Pfam annotation: Domain name=zf-C2H2; Domain location=56-78; Score =24.7; E_value=0.00037; Accession=PF00096.18; Description=Zinc finger, C2H2 type
  Pfam annotation: Domain name=zf-C2H2; Domain location=83-104; Score =14.9; E_value=0.29; Accession=PF00096.18; Description=Zinc finger, C2H2 type
  Pfam module annotation: Pfam domain module=zf-C2H2::zf-C2H2; Domain location=56-78::83-104
NLPWRLRQRGPGAAPPRRRVYVCPEPGCVHHSPARALGDLTGIKKHFCRKHGEKRWACPRCGKRYAVQADLKAHXKTCGTREYRCDCGTLFTRRDSFVTHRAFCGALVEETGRVLAPPAPPSPRPPDLEAEENVDKDKGQEEEETEDSAGAEVEQPKPVEAPAPEEPQRIPSPPPLPQEPPRRPSPPPLPQEPPRRPSPPPLPKEPPRRPSPPPLPKEPQLFPSPLRF

SEQ ID NO: 76993 - protein, 301 aa, Setaria italica
  Transcript Sequence Number=SeqID_11019
  Gene Ontology: Mol. function=zinc ion binding; Cellular component =intracellular
  Homolog annotation: Hit_ID=Q5UDB5; Match level="QueryCoverage=100%, HitCoverage=56%, E-value=1e-137, Identity=79%"; Hit description =INDETERMINATE-related protein 1
  Pfam annotation: Domain name=RS4NT; Domain location=59-96; Score =14.1; E_value=0.038; Accession=PF08071.4; Description=RS4NT (NUC023) domain
  Pfam annotation: Domain name=zf-C2H2; Domain location=1-20; Score =6.6; E_value=2.3; Accession=PF00096.18; Description=Zinc finger, C2H2 type
  Pfam annotation: Domain name=zf-C2H2; Domain location=101-122; Score =15.7; E_value=0.2; Accession=PF00096.18; Description=Zinc finger, C2H2 type
  Pfam annotation: Domain name=zf-C2H2; Domain location=74-96; Score =22.3; E_value=0.0021; Accession=PF00096.18; Description=Zinc finger, C2H2 type
  Pfam module annotation: Pfam domain module=RS4NT::zf-C2H2::zf -C2H2::zf-C2H2; Domain location=59-96::1-20::101-122::74-96
EVCNKGFQREQNLQLHRRGHNLPWKLKQKNPKETRRRVYLCPEPTCVHHDPSRALGDLTGIKKHYCRKHGEKKWKCDKCNKRYAVQSDWKAHSKTCGTREYRCDCGTLFSRRDSFITHRAFCDALAQENARVPPIGAGMYGAGGMAFGLSGMAASQLQSFQDQAHSSATTAISGNPAAQFEHLMPTSTSFRGAQPASSSSSPFYLGGAEDGNQSQPGHTSLLHGKPAFHGLMQLPEQHGQPGSNGLLNLGFFSGASSGGQDARLVFPGQFNGAAGGNGRGDGGEHGNSSANTESAAIFSGN

SEQ ID NO: 76994 - protein, 204 aa, Setaria italica
  Transcript Sequence Number=SeqID_11020
  Gene Ontology: Mol. function=zinc ion binding; Cellular component =intracellular
  Homolog annotation: Hit_ID=Q5UDB8; Match level="QueryCoverage=99%, HitCoverage=35%, E-value=8e-87, Identity=74%"; Hit description =INDETERMINATE-related protein 10
  Pfam annotation: Domain name=RS4NT; Domain location=150-187; Score =14.2; E_value=0.036; Accession=PF08071.4; Description=RS4NT (NUC023) domain
  Pfam annotation: Domain name=zf-C2H2; Domain location=165-187; Score =19.9; E_value=0.01; Accession=PF00096.18; Description=Zinc finger, C2H2 type
  Pfam annotation: Domain name=zf-C2H2; Domain location=88-110; Score =26.9; E_value=8.3e-05; Accession=PF00096.18; Description=Zinc finger, C2H2 type
  Pfam module annotation: Pfam domain module=RS4NT::zf-C2H2::zf-C2H2; Domain location=150-187::165-187::88-110
MASNSSAAAVAALFGIRDGGDHQDQIKPLLTQQQLPPAPLLSAAASSSAGSGQAPAASPPVKKKRNLPDPDAEVIALSPKTLMATNRFVCEVCNKGFQREQNLQLHRRGHNLPWKLKQKDPLQAQRRRVYLCPEPTCAHHDPSRALGDLTGIKKHFCRKHGEKKWKCDKCSKRYAVQSDWKAHSKVCGTREYRCDCGTLFSRLT

SEQ ID NO: 76995 - protein, 431 aa, Setaria italica
  Transcript Sequence Number=SeqID_11021
  Gene Ontology: Mol. function=zinc ion binding; Cellular component =intracellular; Biological process=regulation of transcription, DNA -dependent
  Homolog annotation: Hit_ID=B9SN27; Match level="QueryCoverage=74%, HitCoverage=65%, E-value=1e-95, Identity=54%"; Hit description =Nucleic acid binding protein, putative
  Pfam annotation: Domain name=RS4NT; Domain location=134-171; Score =12.5; E_value=0.058; Accession=PF08071.4; Description=RS4NT (NUC023) domain
  Pfam annotation: Domain name=zf-C2H2; Domain location=149-171; Score =15.6; E_value=0.2; Accession=PF00096.18; Description=Zinc finger, C2H2 type
  Pfam annotation: Domain name=zf-C2H2; Domain location=176-197; Score =15.7; E_value=0.2; Accession=PF00096.18; Description=Zinc finger, C2H2 type
  Pfam annotation: Domain name=zf-C2H2; Domain location=72-94; Score =27.9; E_value=4.2e-05; Accession=PF00096.18; Description=Zinc finger, C2H2 type
  Pfam module annotation: Pfam domain module=RS4NT::zf-C2H2::zf -C2H2::zf-C2H2; Domain location=134-171::149-171::176-197::72-94
MMLKDLAAIQQQQLAADENMSNLTSASGDQTSVSSHPLPPPAKKKRSLPGNPDPDAEVIALSPRTLMATNRYVCEVCGKGFQRDQNLQLHRRGHNLPWKLKQRNPKEVVRKKVYVCPEAGCVHHDPARALGDLTGIKKHFSRKHGEKKWKCDRCAKRYAVHSDWKAHSKVCGTREYRCDCGTLFSRRDSFITHRAFCDALAEESARAVTAAAAAAAVAAGQHHQTHPGMLGDGVHLPAVLDHPSQPPLGGMSLQEMCLKREQFAPSWLTPQQQQHLEMGNPPSVFGSQEYMTGSSTPDSNAQPAAGLGFGFSPPPTASAAHMSATALLQKAAQMGATLSRPSNQGQMASVHSTSTTSANAAAAAAGSLPTTGAHTGALGFGASHHFGGDRERSSRTDRDAGSGGNAAGAAAGGGNDGLTRDFLGLRAFSHG

SEQ ID NO: 76996 - protein, 457 aa, Setaria italica
  Transcript Sequence Number=SeqID_11022
  Gene Ontology: Mol. function=zinc ion binding; Cellular component =intracellular
  Homolog annotation: Hit_ID=Q5UDB5; Match level="QueryCoverage=94%, HitCoverage=91%, E-value=1e-112, Identity=51%"; Hit description =INDETERMINATE-related protein 1
  Pfam annotation: Domain name=RS4NT; Domain location=112-149; Score =12.1; E_value=0.066; Accession=PF08071.4; Description=RS4NT (NUC023) domain
  Pfam annotation: Domain name=zf-C2H2; Domain location=127-149; Score =20.1; E_value=0.0094; Accession=PF00096.18; Description=Zinc finger, C2H2 type
  Pfam annotation: Domain name=zf-C2H2; Domain location=154-175; Score =15.7; E_value=0.2; Accession=PF00096.18; Description=Zinc finger, C2H2 type
  Pfam annotation: Domain name=zf-C2H2; Domain location=50-72; Score =26.9; E_value=8.3e-05; Accession=PF00096.18; Description=Zinc finger, C2H2 type
  Pfam module annotation: Pfam domain module=RS4NT::zf-C2H2::zf -C2H2::zf-C2H2; Domain location=112-149::127-149::154-175::50-72
  Subcellular localization annotation: CTP_CleavageSite=15; ConfidenceScore=5.01e-01
VAGAAPAPATGQGAPAAAAQPPPKKKRTLPDPDAEVIALSPKTLLATNRFVCEVCNKGFQREQNLQLHRRGHNLPWKLKQKNPLQAQRRRVYLCPEPTCVHHDPSRALGDLTGIKKHFCRKHGEKKWKCDKCSKRYAVQSDWKAHSKICGTREYRCDCGTLFSRRDSFITHRAFCDALAQESARLPPTSLSSLTGHLYGATNAGNMALSLSQVGSNLTSTLQDGGHHHHHHHHHHQQHGQPGSNGLLNLGFFSGASSGGQDARLVFPGQFNGAAGGNGRGDGGEHGNSSANTESAAIFSGNLMGNQMTGGGGGGFSSSLYNSAGTVAPPQMSATALLQKAAQMGATSSGGGGGSANSLLKGLGSGGALNGRAAGAAGFMAGESSSRSASQAENESQFRDLMNSLAASGSSGFPGLDDGKPSTRDFLGVGGGVVRSMGGAAGLPLRHGAAGIGMGSFG

SEQ ID NO: 76997 - protein, 511 aa, Setaria italica
  Transcript Sequence Number=SeqID_11023
  Gene Ontology: Mol. function=zinc ion binding; Cellular component =intracellular; Biological process=regulation of transcription, DNA -dependent
  Homolog annotation: Hit_ID=Q5UDB7; Match level="QueryCoverage=90%, HitCoverage=93%, E-value=1e-145, Identity=59%"; Hit description =INDETERMINATE-related protein 7
  Pfam annotation: Domain name=RS4NT; Domain location=132-169; Score =14.1; E_value=0.038; Accession=PF08071.4; Description=RS4NT (NUC023) domain
  Pfam annotation: Domain name=zf-C2H2; Domain location=147-169; Score =22.3; E_value=0.0021; Accession=PF00096.18; Description=Zinc finger, C2H2 type
  Pfam annotation: Domain name=zf-C2H2; Domain location=174-195; Score =15.7; E_value=0.2; Accession=PF00096.18; Description=Zinc finger, C2H2 type
  Pfam annotation: Domain name=zf-C2H2; Domain location=71-93; Score =26.9; E_value=8.3e-05; Accession=PF00096.18; Description=Zinc finger, C2H2 type
  Pfam module annotation: Pfam domain module=RS4NT::zf-C2H2::zf -C2H2::zf-C2H2; Domain location=132-169::147-169::174-195::71-93
  Subcellular localization annotation: CTP_CleavageSite=66; ConfidenceScore=5.45e-01
MAAASSAPFFGLGDTQMQPAQGSSLPQQNSAAAAPGAAAPPKKKRNQPGNPNPDAEVIALSPRTLLATNRFVCEVCNKGFQREQNLQLHRRGHNLPWKLKQKNPKEARRRVYLCPEPTCVHHDPSRALGDLTGIKKHYCRKHGEKKWKCDKCNKRYAVQSDWKAHSKTCGTREYRCDCGTLFSRRDSFITHRAFCDALARESAQIPPIGAGLYVGSGSMSLGLSGAAAQMHGFADQGQSSSAAAAAQFDHIMPSSSGPSMFRSQASASSSSFFLGGGAPSPAQDFSEDGEHSQGGQGSSLLHGKSPFHGLMQLPEQQHQPGSSNANGNLLNLGFFSGNGGGSAGGQDASIAIQDQFNAAAGGSNAEHGGVMASMGSHLSAGFPSSLYNSSPSAGLPQNSATALLMKAAQMGSTSSTHNGPSALLRAAGFSASSGGQGTSRAAGEGTSHEAHFHDLIMNSLTGGGGGFSGAGAGFGAVDDGRLSTRDFLGVGRGSMAPPGLHIGALDPAQMK

SEQ ID NO: 76998 - protein, 67 aa, Setaria italica
  Transcript Sequence Number=SeqID_11024
  Homolog annotation: Hit_ID=B6TFS2; Match level="QueryCoverage=97%, HitCoverage=30%, E-value=1e-16, Identity=84%"; Hit description =Ethylene-responsive transcription factor 3
IPDDDCRSDCGSSASVVDDDCTDAAASPSCRLPLPFDLNLPAGSGCGAGVGWYGDEEDEIRLTALRL

SEQ ID NO: 76999 - protein, 78 aa, Setaria italica
  Transcript Sequence Number=SeqID_11025
MNFFSSVFSAPAEEEEGEEQREGEQEGKQEPAAEQSGGGWIFGGLIDTLKEEIEEQRRVNESAAAAEEEEVQQGAEGD

SEQ ID NO: 77000 - protein, 365 aa, Setaria italica
  Transcript Sequence Number=SeqID_11026
  Gene Ontology: Mol. function=protein binding
  Homolog annotation: Hit_ID=Q2QVT4; Match level="QueryCoverage=83%, HitCoverage=61%, E-value=3e-76, Identity=35%"; Hit description =Leucine Rich Repeat family protein
  Pfam annotation: Domain name=LRR_1; Domain location=118-141; Score =13.2; E_value=0.92; Accession=PF00560.25; Description=Leucine Rich Repeat
  Pfam annotation: Domain name=LRR_1; Domain location=188-210; Score =13.3; E_value=0.86; Accession=PF00560.25; Description=Leucine Rich Repeat
  Pfam annotation: Domain name=LRR_1; Domain location=19-38; Score=4.5; E_value=42; Accession=PF00560.25; Description=Leucine Rich Repeat
  Pfam annotation: Domain name=LRR_1; Domain location=212-234; Score =15.0; E_value=0.31; Accession=PF00560.25; Description=Leucine Rich Repeat
  Pfam annotation: Domain name=LRR_1; Domain location=236-258; Score =18.0; E_value=0.038; Accession=PF00560.25; Description=Leucine Rich Repeat
  Pfam annotation: Domain name=LRR_1; Domain location=260-282; Score =14.6; E_value=0.41; Accession=PF00560.25; Description=Leucine Rich Repeat
  Pfam annotation: Domain name=LRR_1; Domain location=43-65; Score =11.0; E_value=2.3; Accession=PF00560.25; Description=Leucine Rich Repeat
  Pfam annotation: Domain name=LRR_1; Domain location=67-89; Score =10.4; E_value=3.1; Accession=PF00560.25; Description=Leucine Rich Repeat
  Pfam annotation: Domain name=LRR_1; Domain location=91-112; Score =4.9; E_value=35; Accession=PF00560.25; Description=Leucine Rich Repeat
  Pfam module annotation: Pfam domain module=LRR_1::LRR_1::LRR_1::LRR _1::LRR_1::LRR_1::LRR_1::LRR_1::LRR_1; Domain location=118-141::188 -210::19-38::212-234::236-258::260-282::43-65::67-89::91-112
ILTNNISGPIPSCLMERVDLSILKLRGNKLHGVLPENIREGCKLQIVDFNENQIEGALPRSLANCQDLEVLDVGSNHIVDSFPSWMGTLPKLRILVLRSNQLFGTIRDLRSGYQHFTSLQIVDLASNYFSGDLHSEWFENFISMMNNSNDEGQILEHETTGSWTSLCQDTVTITFKDATLSITKILTTFKVIDFSNNSFEGSIPSSIGRLASLHGLNMSHNNFTGEIPSQLGKLTRLESIDLSCNHLSGEIPQEFTSLTSLSWLNLSYNNLTGRIPQGNQFLSFPSSSFEGNAGLCGIQLSKECDTRPDSTTPSILAPERNTLWQDRLDAIILFLCAGLGFGVGFALAIIFGPFYHIEEWLCKHL

SEQ ID NO: 77001 - protein, 114 aa, Setaria italica
  Transcript Sequence Number=SeqID_11027
  Gene Ontology: Mol. function=metal ion binding
MIASSMMVSSDNCVSDADAGEQSWRRYSLEAHLWRTMLGATTGTEEEEEEEEEAELKISAARFDRIMRFCDPMDALMQYPSSSFSRFCRSRYLAAVPPETEAAMFGNLDQRAFV

SEQ ID NO: 77002 - protein, 154 aa, Setaria italica
  Transcript Sequence Number=SeqID_11028
  Homolog annotation: Hit_ID=B6SWN0; Match level="QueryCoverage=100%, HitCoverage=31%, E-value=4e-73, Identity=87%"; Hit description=mTERF family protein
SLNQNVILKPVEFLRGRGISNEDVARMVVRCPQILLQRIELMKNSLYFFKSEIKRPMSELLEYPEYFTYSLESRIKPRYMRVTSKGIRCSLDWFLNCSDLRFEERMRGDFIEGDAPGPLFTMGGKLQMPGSQLVSDDDNEDTDDEVLYRRTVML

SEQ ID NO: 77003 - protein, 47 aa, Setaria italica
  Transcript Sequence Number=SeqID_11029
LDPYHCKFSGFKIGHCNFSISEIHSFHFIFLTNRDISLYNLSLVHFS

SEQ ID NO: 77004 - protein, 64 aa, Setaria italica
  Transcript Sequence Number=SeqID_11030
  Gene Ontology: Mol. function=protein dimerization activity; Cellular component=nucleus; Biological process=regulation of transcription, DNA-dependent
  Homolog annotation: Hit_ID=Q84UA5; Match level="QueryCoverage=76%, HitCoverage=9%, E-value=1e-17, Identity=93%"; Hit description =Liguleless2-like protein
PALPLHLHGGGGGGGDHDKRKQGSTRKDGKLVDAKTERRLAQNREAARKSRLRKKAYVQQLETS

SEQ ID NO: 77005 - protein, 344 aa, Setaria italica
  Transcript Sequence Number=SeqID_11031
  Gene Ontology: Mol. function=protein dimerization activity; Cellular component=nucleus; Biological process=regulation of transcription, DNA-dependent
  Homolog annotation: Hit_ID=Q84UA5; Match level="QueryCoverage=89%, HitCoverage=58%, E-value=1e-145, Identity=83%"; Hit description =Liguleless2-like protein
  Pfam annotation: Domain name=bZIP_1; Domain location=32-84; Score =27.9; E_value=4.3e-05; Accession=PF00170.13; Description=bZIP transcription factor
  Pfam annotation: Domain name=bZIP_2; Domain location=32-82; Score =17.7; E_value=0.0069; Accession=PF07716.7; Description=Basic region leucine zipper
  Pfam module annotation: Pfam domain module=bZIP_1::bZIP_2; Domain location=32-84::32-82
APACCPAPAPPKLSAAPPRPPAAPARRGGGGGDHDKTERRLAQNREAARKSRLRKKAYVQQLETSRIRLQQVEHELQRARSQGLFVGGCSAAGDMSSGAAAFDMEYARWLDDDGKRLAELRGGLQAHLDGNLGLIVEECVQHYDELFQLKAALAHEDVFHLLTGGWATPAERCFFWMGGFRPSELLKILIPQLDPLTEQQLLGICNLQQSSEQAEEALAQGLHQLHQSLADTVAAGTLNDGAAAPNYMSLMAVALEKLASLESFYQQADNLRQQTLHQMRRILTTRQAARCFLSIGEYYRRLRALSNLWASRPRENFIGTESLSPTATELQVMHQQQQNQFSGF

SEQ ID NO: 77006 - protein, 185 aa, Setaria italica
  Transcript Sequence Number=SeqID_11032
  Gene Ontology: Mol. function=binding; Cellular component=plasma membrane
  Homolog annotation: Hit_ID=B6ST20; Match level="QueryCoverage=98%, HitCoverage=27%, E-value=2e-83, Identity=84%"; Hit description =Armadillo/beta-catenin-like repeat family protein
CSIALFLRQSAFKPSSPAAKAVVDQLLRVVRKGEYDVLLLPCITALGCLARTFTASETRVIAPLVQLLDEREPPVTKEAVVALTKFACSENHLHLNHCKAIVDDGGARHLVQLVYLGDEIQIEALILLCYIALYVPESEELAQASVLAVLLWASKQAHMVQDTRVEALLPDANARLELFQSRASR

SEQ ID NO: 77007 - protein, 175 aa, Setaria italica
  Transcript Sequence Number=SeqID_11033
  Gene Ontology: Mol. function=binding; Cellular component=plasma membrane
  Homolog annotation: Hit_ID=B6ST20; Match level="QueryCoverage=98%, HitCoverage=26%, E-value=6e-61, Identity=68%"; Hit description =Armadillo/beta-catenin-like repeat family protein
EVEDPEIKAHLKAMAAKALWKLAHNHLGVCKSITESRALLCFAVLLEKGDGDMGTDVQFFSAMAIMEIARVAEHSLVLRQSAFKPSSPAAKAVVDQLLRVVRKGEYDVLLLPCITALGCLARTFTASETRVIAPLVQLLDEREPPVTKEAVVALTEVDKLDKVACTTIINNGLVV

SEQ ID NO: 77008 - protein, 64 aa, Setaria italica
  Transcript Sequence Number=SeqID_11034
RLRMFEADFVTISWLASFFVGPLMILIVFWDHIMICIMITLTISVFIWDNIAILCLAIGWILFS

SEQ ID NO: 77009 - protein, 412 aa, Setaria italica
  Transcript Sequence Number=SeqID_11035
  Gene Ontology: Mol. function=binding; Cellular component=cellular _component; Biological process=multicellular organismal development
  Homolog annotation: Hit_ID=B3TM17; Match level="QueryCoverage=100%, HitCoverage=100%, E-value=0.0, Identity=83%"; Hit description =Translation initiation factor
  Pfam annotation: Domain name=W2; Domain location=336-412; Score=57.0; E_value=7.2e-14; Accession=PF02020.10; Description=eIF4-gammaeIF5eIF2- epsilon
MSSKEKPTLGGTRIKTRKRNIAAPLDPASFSDAIVQIYLDNGGDLELVAKSIESSDLNFSRYGDTFFEVVFVGGRTQPGTIKPEEEGDRHPYSVLDCAAQREAILPFVLYLQKTLRRRPFLIKNLENVMRKFLQSLEFFEENERKKLAIFTALAFSQKLSGLPPETVFQPLLKDNLVAKGIVLSFITEFFKEYLKENSLDDLIGLLKKGKMEDNLLDFFPSAKRSSEALSEHFTKEGLTSLVEYNEKKMFEVKLKEIKSTLTTMINDEAEISEVIETVKQQVKDAKFPDIEVIRMLWDVLMEAVQWSGKNQQQNSNSALRQVKAWAELLNAFCTSGRLELELIYKVQTQCYEDAKLMKLFPEIIRTLYDQDVLAEDTILLWFRKGSNPKGRQSFVKALEPFVKWLEEAEEEE

SEQ ID NO: 77010 - protein, 650 aa, Setaria italica
  misc_feature (35)..(35): Xaa can be any naturally occurring amino acid
  Transcript Sequence Number=SeqID_11036
  Gene Ontology: Mol. function=DNA-directed RNA polymerase activity; Cellular component=nucleus; Biological process=transcription
  Homolog annotation: Hit_ID=Q69X40; Match level="QueryCoverage=94%, HitCoverage=39%, E-value=1e-179, Identity=59%"; Hit description=DNA -directed RNA polymerase
  Pfam annotation: Domain name=RNA_pol_Rpb1_3; Domain location=2-94; Score=-21.5; E_value=0.0054; Accession=PF04983.10; Description=RNA polymerase Rpb1, domain 3
  Pfam annotation: Domain name=RNA_pol_Rpb1_4; Domain location=133-241; Score=80.6; E_value=5.6e-21; Accession=PF05000.9; Description=RNA polymerase Rpb1, domain 4
  Pfam annotation: Domain name=RNA_pol_Rpb1_5; Domain location=248-601; Score=227.6; E_value=3.2e-65; Accession=PF04998.9; Description=RNA polymerase Rpb1, domain 5
  Pfam module annotation: Pfam domain module=RNA_pol_Rpb1_3::RNA_pol _Rpb1_4::RNA_pol_Rpb1_5; Domain location=2-94::133-241::248-601
LKLKKKNKKKQAKKEKGKARSERKIAISELVLYIXNNELIKGMIDKAQFGQYGIVHTVHELYGADTAGILLSTFSRLFTLFLQFHGFTCGVDDLLLCQKADEARRSIISESDKYSEKAHGTFIKTGKDGEELQMEVEKVIRRDGESATVNMDREISNALSNITSDVNKNVFPYGLQKPFPGNCLTLMTATGAKGGDVNMYQISSLLGQQELEGKRVPRMVSGKTLPCFLPWDTSSRAGGFISDRFLTGLRPQEYYFHCMAGREGLCDTAVKTSRSGYLQRCLIKCLESLKVSYDHTVRDVDGSIVQFCYGEDGVDVLKTSFLNKFKELADNKKVVLDKIKGHKQNQLLSKPNGYITTLPKKLVAEAKEFLKLLKEKKSSDIKKGLMCDIKKKGLMKLLKVKYLYSLVDPGEAVGVVAAQSIGEPSTQMTLNTFHLAGRGEMNVTLGIPRLKEILMTASANISTPIMVCPLLEKWTRDDARRVAAKLRRVRVADIVEKIEVCTVPFYNTNGHVSTLYKLQMKLYPQKHYPPQSDLTVDECQTTLRTVFVDAMEHAIEKHLDLLHKINEIRAVKVNDAEGSLSDGGEESESRHGDGEETGMSDGDDENDNDDDLGTDAEKRKRQERDEMEYDDDTENEEGMDSESEEREPKV

SEQ ID NO: 77011 - protein, 210 aa, Setaria italica
  Transcript Sequence Number=SeqID_11037
  Gene Ontology: Cellular component=integral to membrane
  Homolog annotation: Hit_ID=B9S9X6; Match level="QueryCoverage=99%, HitCoverage=53%, E-value=2e-74, Identity=65%"; Hit description =Organic anion transporter, putative
  Pfam annotation: Domain name=TPT; Domain location=76-208; Score=-8.9; E_value=0.0021; Accession=PF03151.8; Description=Triose-phosphate Transporter family
  Subcellular localization annotation: CTP_CleavageSite=63; ConfidenceScore=5.18e-01
LGAVMSFSTGLANISLKHNSVGFYQMAKIAVTPTIVVAEFILFQKKVSVRKVITLVVVSFGVAVATVTDLEFNWFGACVALAWIIPSAVNKILWSNLQQSGNWTALALMWKTTPITIFFFIVLMPLLDPPGLLSFKWDFKNSSAIIISALFGFLLQWSGALALGATSALAHVVLGQFKTIVIMLSGYLVFNSDPGFTSLCGAVIALAGCQ

SEQ ID NO: 77012 - protein, 155 aa, Setaria italica
  Transcript Sequence Number=SeqID_11038
  Homolog annotation: Hit_ID=B6SW62; Match level="QueryCoverage=77%, HitCoverage=30%, E-value=2e-34, Identity=70%"; Hit description =Calmodulin binding protein
HLRAQRMRVLQEHHHPPPPPPRPRQSPQHPRHRRSYEMDRSCEENAKIVEMDIGEPVRRGAAKDRQLLVEHHGRCSPAPSAMTELSPRAYSGHFDEFSVATARSSPQHASSSASEACPSYMANTESSRAKARSQSAPRQRTDALERQPSRRNGDP

SEQ ID NO: 77013 - protein, 91 aa, Setaria italica
  Transcript Sequence Number=SeqID_11039
  Gene Ontology: Cellular component=cytoplasm
  Homolog annotation: Hit_ID=B9RGK0; Match level="QueryCoverage=98%, HitCoverage=15%, E-value=3e-31, Identity=63%"; Hit description=WD -repeat protein, putative
  Pfam annotation: Domain name=WD40; Domain location=49-87; Score=27.2; E_value=6.9e-05; Accession=PF00400.24; Description=WD domain, G-beta repeat
  Pfam annotation: Domain name=WD40; Domain location=7-45; Score=34.9; E_value=3.3e-07; Accession=PF00400.24; Description=WD domain, G-beta repeat
  Pfam module annotation: Pfam domain module=WD40::WD40; Domain location=49-87::7-45
VDEDGELLLKHTLNGHEKSVMMVAWSPDDCQLLTCGVEETIRRWDVKSGKCLHVYEKPGIGLISCAWFPDGKQILSGLADQHFCIWDLDGM

SEQ ID NO: 77014 - protein, 559 aa, Setaria italica
  Transcript Sequence Number=SeqID_11040
  Gene Ontology: Mol. function=molecular_function; Cellular component =cytoplasm; Biological process=biological_process
  Homolog annotation: Hit_ID=B9RGK0; Match level="QueryCoverage=99%, HitCoverage=92%, E-value=0.0, Identity=61%"; Hit description=WD -repeat protein, putative
  Pfam annotation: Domain name=WD40; Domain location=221-259; Score =36.9; E_value=8.2e-08; Accession=PF00400.24; Description=WD domain, G-beta repeat
  Pfam annotation: Domain name=WD40; Domain location=266-304; Score =34.9; E_value=3.3e-07; Accession=PF00400.24; Description=WD domain, G-beta repeat
  Pfam annotation: Domain name=WD40; Domain location=308-346; Score =27.2; E_value=6.9e-05; Accession=PF00400.24; Description=WD domain, G-beta repeat
  Pfam annotation: Domain name=WD40; Domain location=390-428; Score =6.2; E_value=7.3; Accession=PF00400.24; Description=WD domain, G -beta repeat
  Pfam annotation: Domain name=WD40; Domain location=433-474; Score =13.1; E_value=1.1; Accession=PF00400.24; Description=WD domain, G -beta repeat
  Pfam annotation: Domain name=WD40; Domain location=478-517; Score =57.0; E_value=7.1e-14; Accession=PF00400.24; Description=WD domain, G-beta repeat
  Pfam module annotation: Pfam domain module=WD40::WD40::WD40::WD40::WD4 0::WD40; Domain location=221-259::266-304::308-346::390-428::433 -474::478-517
MARPLPSQGKEVMVGSKGVIKKEEFVRIITKTLYSLGYEKSGAVLEEESGITLHNPMVNLFREQVIDGNWDNAVVTLNKIGLLDENIVKSAAFLILEQKFFELLRDDNVMGAMKTLRSEITPLGVNRKRVHELSSCMISCSPQQLFVGFSKLGIDSSTSRLKLLEELQKVLPPTVMVPERRLENLVEQALTVQRDACYFHNSVDGLSLYIDHHCGKDQIPSRTLQVLHAHHNEVWFIQFSNNGKYLASASNDKSAMIWEVDEDGELLLKHTLNGHEKSVMMVAWSPDDCQLLTCGVEETIRRWDVKSGKCLHVYEKPGIGLISCAWFPDGKQILSGLADQHFCIWDLDGMEVDCWKGQRSTKTPDLTVGKDGKVIISMNRENTILLLDRETKQERLIEEDHTITSFSLSEDGDFLLVNLVNEVIHLWNIRNGPIRVSRYSGHKRSRFVIRSCFGGSEQAFIASGSEDSQVYIWHRATGDLIETLAGHSGTVNCVSWNPANPHMLASASDDHTIRIWGAKKASLKRKDVGSSSCSSNGIHANGNTHGNGFIHQCNGNSTK

SEQ ID NO: 77015 - protein, 74 aa, Setaria italica
  Transcript Sequence Number=SeqID_11041
NSLQIWVQSALNNGMLIALKNGMLILPVYNAERSCSLFVGKLASHPLIHAWFVHPSNSTSLYTSSHLSVCVITP

SEQ ID NO: 77016 - protein, 178 aa, Setaria italica
  Transcript Sequence Number=SeqID_11042
EHYMMRLGAGGGQQLSRVEPIPDLRSRFWQMDVQPGARIDLICPQPRRASRPPLLVDSLSRPSPKPNGALPVYRAESTCDILDLILSKNDPDVDTDPSSQAGFFCGSPPVRTNNPVIHDPLFGKKTPSFSPLGSSFGKMGAGRAEVGSPSCGASSPKVRIEGFACGNKEPAHCAVTFA

SEQ ID NO: 77017 - protein, 82 aa, Setaria italica
  Transcript Sequence Number=SeqID_11043
MVERRQRRKPLVLASTQALLDSLPGDRPPPPPQEPVRLRAGVLRFPSGGGGAEFGELASFVALPAPALRRLAVVTGTPVLVK

SEQ ID NO: 77018 - protein, 76 aa, Setaria italica
  misc_feature (67)..(67): Xaa can be any naturally occurring amino acid
  Transcript Sequence Number=SeqID_11044
  Gene Ontology: Mol. function=protein serine/threonine kinase activity; Biological process=protein amino acid phosphorylation
  Homolog annotation: Hit_ID=Q7XV58; Match level="QueryCoverage=98%, HitCoverage=10%, E-value=2e-33, Identity=89%"; Hit description =OSJNBa0006B20.13 protein
EQLSHPNIVQYHGSDLTDDALSIYLEYVSGGSIHKLLREEYGSFKEPVIRNYTGQILAGLAYLHGRXTVHRDIKGA

SEQ ID NO: 77019 - protein, 666 aa, Setaria italica
  Transcript Sequence Number=SeqID_11045
  Gene Ontology: Mol. function=protein serine/threonine kinase activity; Biological process=protein amino acid phosphorylation
  Homolog annotation: Hit_ID=Q7XV58; Match level="QueryCoverage=91%, HitCoverage=80%, E-value=0.0, Identity=70%"; Hit description =OSJNBa0006B20.13 protein
  Pfam annotation: Domain name=Pkinase; Domain location=262-518; Score =297.2; E_value=3.6e-86; Accession=PF00069.17; Description=Protein kinase domain
  Pfam annotation: Domain name=Pkinase_Tyr; Domain location=262-518; Score=124.4; E_value=3.6e-34; Accession=PF07714.9; Description =Protein tyrosine kinase
  Pfam module annotation: Pfam domain module=Pkinase::Pkinase_Tyr; Domain location=262-518::262-518
AAARARCPAGHGLVGYKLPVPAPDPEPPELVGTLYEEEVASSAEDSSACSVGSSDEAQDHHGFRSMDPVAFGRGRNMPSDSDRMLNEDKHVMSCSMPRDHQKFFDIPVSSVREHHLHSDEPSTSETSCSRGRMVSEDLFAPRTRSLSPVPKGHAFAMSNGNSREFGFSPRSPVRMMDGLRSPPHPLPLPPGSAACSPLPPASAACSPLHPASGACSPLHPAAAACSPLPPNHSSCSPLPSSPSSCPPLPASPTTCSQSQSQWKKGKLLGSGTFGQVYLGFNSENGQFCAIKEVQVIMDDPHSKERLKQLNQEIDMLRQLSHPNIVQYHGSDLTDDALSIYLEYVSGGSIHKLLREYGSFKEPVIRNYTGQILAGLAYLHGRNTVHRDIKGANILVGPNGEVKLADFGMAKHISSFVEIRSFKGSPYWMAPEVIMNSKGYSLAVDIWSLGCTIIEMATARPPWHQYEGVAAIFKIANSKDIPEIPDSFSEEGKNFLQLCLKRNPASRASAAQLMDHPFVRDHPAVKAAKSSALSALSSPADGRLTMSNRELPSRKIITPLRDIGLSARDFTGFSTAVPSPHSSPIPGRTNMSMPVSPCSSPLRQFKQSNRSCMPSPPHPMLSPGAGYNTLSYAQNQTRRSPAPAISDPWMDVGQLKLQSPYGSPKRF

SEQ ID NO: 77020 - protein, 302 aa, Setaria italica
  Transcript Sequence Number=SeqID_11046
  Gene Ontology: Mol. function=triacylglycerol lipase activity; Biological process=lipid metabolic process
  Homolog annotation: Hit_ID=B4FPY6; Match level="QueryCoverage=100%, HitCoverage=48%, E-value=1e-152, Identity=87%"; Hit description=EDS1- like protein
ILHFLLPLDIVPRIPLTPLASFREEIQAVLDWLSPQTPNNSPAGRSLVIPEYYETLLRSTLSIASYEACSFMGCTSSILGTLTSFIDLSPYRPCGTYHFLTSSEQLIVITNSDAVLQLLFYCLQLDPQQQLLDAAARSLSAHWQYEPIKQCMPDIVCVDYLGAISSTVPGRQTDRAAFGSIELSKEAILHLSAAAQWEKQRQRNQTKIDESCQKIQEALRSLNDYKRACELRGVTYYDSFKLQREVHDFNANVRRLELAGLWDEIIEMLRRRELPDGFEAREEWVGLGTLFRRLVEPLDIAN

SEQ ID NO: 77021 - protein, 80 aa, Setaria italica
  misc_feature (26)..(26): Xaa can be any naturally occurring amino acid
  Transcript Sequence Number=SeqID_11047
RSYQWKGQSSSSVASRRKRLELPLIXCTFCKRRTILELEVQTDEKGNRGHIFYKCRNHKVRKLLFEFLFGLLLLFYPDLS

SEQ ID NO: 77022 - protein, 44 aa, Setaria italica
  Transcript Sequence Number=SeqID_11048
  Gene Ontology: Mol. function=voltage-gated potassium channel activity; Cellular component=voltage-gated potassium channel complex; Biological process=potassium ion transport
  Homolog annotation: Hit_ID=B9T3Z0; Match level="QueryCoverage=100%, HitCoverage=9%, E-value=1e-15, Identity=88%"; Hit description =Potassium channel tetramerization domain-containing protein, putative
LTSTLRRSHGGAICDFSIGGDRLFALHNEENVFDVWETPPPPII

SEQ ID NO: 77023 - protein, 105 aa, Setaria italica
  misc_feature (92)..(92): Xaa can be any naturally occurring amino acid
  Transcript Sequence Number=SeqID_11049
VGTRNGAGPIEGIRCDARSIVGTRNDSGPIEAIRHDAGLIIGTGDGAGPVEGIDLNKTPAQKSKRKKHRPKVLKEEKPSKTAKSTTPKPSKXEKPSGKRKYVRKN

SEQ ID NO: 77024 - protein, 145 aa, Setaria italica
  misc_feature (48)..(48): Xaa can be any naturally occurring amino acid
  misc_feature (74)..(74): Xaa can be any naturally occurring amino acid
  Transcript Sequence Number=SeqID_11050
  Subcellular localization annotation: CTP_CleavageSite=49; ConfidenceScore=5.72e-01
RPLSLLQPPPPPPPPPPPPGSPSHAGSRPPPPQQHRIAPATPPPPPPXCASRSAPIRPPNPAPSPGTAPEAGAXDPSPKSSEPPSPQAVRQRPLREEQARKERRKETEAAPRQHQARRRSKQGSWRAPRALDPGGSGGRFGRQPG

SEQ ID NO: 77025 - protein, 125 aa, Setaria italica
  Transcript Sequence Number=SeqID_11051
DTIEHPAKWLLFQNHFGNVMELCYPQLLVHYGSHNGTSSMTRSTTSPHHHITRFLPTSDQLISIACLMCSLPIWLQLWHALFASGALVPFKLWISHHEMICCDQNKYEDAHKVGEETQVLIVKHL

SEQ ID NO: 77026 - protein, 51 aa, Setaria italica
  Transcript Sequence Number=SeqID_11052
TSVGEDWEAYNEQSYQPTQTQSQPADLLIKRSRLNSTLWQSLSIPTGRKFT

SEQ ID NO: 77027 - protein, 110 aa, Setaria italica
  misc_feature (9)..(9): Xaa can be any naturally occurring amino acid
  Transcript Sequence Number=SeqID_11053
  Homolog annotation: Hit_ID=B6U6X1; Match level="QueryCoverage=93%, HitCoverage=17%, E-value=9e-45, Identity=85%"; Hit description =Propionyl-CoA carboxylase
AGDAYRDFXFEQLVDLSLPYAEVSYGGEVIVGKADGSGGLLSHSTCAEQLLYEVGDPANYITPDLVVDFCHVQFHQISKDKVHCEGAKPSDACRPEKLLQLSPTVCKLMH

SEQ ID NO: 77028 - protein, 135 aa, Setaria italica
  Transcript Sequence Number=SeqID_11054
  Gene Ontology: Mol. function=oxidoreductase activity; Biological process=fatty acid metabolic process
  Homolog annotation: Hit_ID=B6U310; Match level="QueryCoverage=86%, HitCoverage=39%, E-value=2e-61, Identity=92%"; Hit description=3 -hydroxybutyryl-CoA dehydrogenase
  Pfam annotation: Domain name=3HCDH; Domain location=26-122; Score =171.9; E_value=1.8e-48; Accession=PF00725.14; Description=3 -hydroxyacyl-CoA dehydrogenase, C-terminal domain
MRCLIRSKLFSERLGKTVICSHDYPGFIVNRVLMPMINEAFWALYTGVATKEDIDTGMKLGTNHPMGPLQLADFIGLDVCLSVLRVLHNGLGDNKYSPCPLLVQYVDAGRLGKKRGLGVYSYGQKSSSSKPKSSL

SEQ ID NO: 77029 - protein, 43 aa, Setaria italica
  misc_feature (33)..(33): Xaa can be any naturally occurring amino acid
  Transcript Sequence Number=SeqID_11055
MRRPWKHPAPAAAAIAGRHGAADLCLREVGDLXPRSFARRAAG

SEQ ID NO: 77030 - protein, 37 aa, Setaria italica
  Transcript Sequence Number=SeqID_11056
KGVKHETTAIKFCVIKSCCILSLIKMPLIHAYSPFTV

SEQ ID NO: 77031 - protein, 182 aa, Setaria italica
  Transcript Sequence Number=SeqID_11057
  Gene Ontology: Mol. function=protein kinase activity; Biological process=protein amino acid phosphorylation
  Homolog annotation: Hit_ID=B9RZY6; Match level="QueryCoverage=86%, HitCoverage=9%, E-value=1e-59, Identity=66%"; Hit description =Neurobeachin, putative
  Pfam annotation: Domain name=WD40; Domain location=46-83; Score=31.4; E_value=3.6e-06; Accession=PF00400.24; Description=WD domain, G-beta repeat
YLSSSLVSAICSCSSDRLSIRTPMASSWIAAGLSSGYCRLLDKRSGSIIAVWRAHDGHITKLAAPDDHLIVSSSLDKTLRVWDIRGNLAMQSNIFRSHSDGISNFSVWGQDVISISRNKIALTSLSRTASDIGHQQLALQNLYSADRGMKHKNLSVLSTIDVLPFSRLFVVGTEDGFLKICH

SEQ ID NO: 77032 - protein, 154 aa, Setaria italica
  misc_feature (40)..(40): Xaa can be any naturally occurring amino acid
  Transcript Sequence Number=SeqID_11058
RPAARPLGSLPGTNRHAWPPPLVGPEPAPRPAGHVQAPQXSDADFPSPGRGGSVQPKPGLETIGEEGDDLAQALALSQSNTPPPSPGTTGPLYPTPGGTPTTTPSAPVATSLSLAPPGPSQSQQSQEAVAATRMSEQRRQAELFGEYQQQQHHH

SEQ ID NO: 77033 - protein, 82 aa, Setaria italica
  Transcript Sequence Number=SeqID_11059
  Gene Ontology: Mol. function=ATP-dependent peptidase activity; Cellular component=chloroplast; Biological process=ATP-dependent proteolysis
  Homolog annotation: Hit_ID=B6SMG8; Match level="QueryCoverage=96%, HitCoverage=27%, E-value=8e-24, Identity=70%"; Hit description =Peptidase S16, lon
LRYRIMMHTVLQTDLRFGVVFAGSGGSAAEVGCVGEVVKHERLADDRFFLICKGQQRFRVARVVRTKPYLVAAVQWLEDRPP

SEQ ID NO: 77034 - protein, 79 aa, Setaria italica
  Transcript Sequence Number=SeqID_11060
  Homolog annotation: Hit_ID=B4FC92; Match level="QueryCoverage=40%, HitCoverage=25%, E-value=1e-09, Identity=90%"; Hit description =Nuclear transport factor 2
  Subcellular localization annotation: CTP_CleavageSite=47; ConfidenceScore=5.33e-01
TPSALRWWCQPSGSQGGMLVFVSGSIRTSPEEHPIKFSQVCTPAPPRSSSSPPLSHSHSPRRRKPYLDSVESALTYQLI

SEQ ID NO: 77035 - protein, 124 aa, Setaria italica
  Transcript Sequence Number=SeqID_11061
  Gene Ontology: Mol. function=Ran GTPase binding; Cellular component =intracellular; Biological process=protein transport
  Homolog annotation: Hit_ID=B4FC92; Match level="QueryCoverage=100%, HitCoverage=100%, E-value=1e-65, Identity=95%"; Hit description =Nuclear transport factor 2
  Pfam annotation: Domain name=NTF2; Domain location=8-121; Score =165.4; E_value=1.7e-46; Accession=PF02136.12; Description=Nuclear transport factor 2 (NTF2) domain
MAMDPDAVAKAFVEHYYRTFDTNRAALVGLYQDTSMLTFEGQKFQGPAAIAGKLGSLPFQHCEHQIVTVDCQPSGPQGGMLVFVSGSIRTGPEEHPIKFSQAFHLLPAGGSFYVQNDMFRLNYG

SEQ ID NO: 77036 - protein, 77 aa, Setaria italica
  Transcript Sequence Number=SeqID_11062
  Gene Ontology: Mol. function=transcription regulator activity; Cellular component=nucleus; Biological process=regulation of transcription
  Homolog annotation: Hit_ID=Q657D1; Match level="QueryCoverage=80%, HitCoverage=14%, E-value=6e-12, Identity=59%"; Hit description=BHLH transcription-like
MDHSFSDMILSESAWSGGGGDGGAVLLPPEMGVVEGGSMTVLERLVLDEALTAAILELQGIQVPAACAGKVPAAAGG

SEQ ID NO: 77037 - protein, 76 aa, Setaria italica
  Transcript Sequence Number=SeqID_11063
  Subcellular localization annotation: CTP_CleavageSite=59; ConfidenceScore=5.72e-01
RRRQRPAPPTSPQRTTHGTVTTPQEAHRPRRSRRRSRRKPGRRRRARPRGAPRRHPPPRARTPTSRVPPAYEPPDR

SEQ ID NO: 77038 - protein, 111 aa, Setaria italica
  Transcript Sequence Number=SeqID_11064
AYEVQLMEAERQRKAEARAEAARVANEERKAAKAAAAQTRAAERRAFEEDFRQALMKERAEKLESWRKKEKLQEQKKAEHKELLHKKSSVWLTEDKLEDQILDAIKNTTPL

SEQ ID NO: 77039 - protein, 494 aa, Setaria italica
  Transcript Sequence Number=SeqID_11065
  Gene Ontology: Mol. function=glucosyltransferase activity; Cellular component=endoplasmic reticulum membrane; Biological process=GPI anchor biosynthetic process
  Homolog annotation: Hit_ID=B6T9G4; Match level="QueryCoverage=96%, HitCoverage=83%, E-value=0.0, Identity=83%"; Hit description=Alpha-1, 2-mannosyltransferase ALG9
  Pfam annotation: Domain name=Glyco_transf_22; Domain location=49-453; Score=465.4; E_value=8e-137; Accession=PF03901.9; Description=Alg9 -like mannosyltransferase family
MSLSSARQRRATAASPLTDDGYAKEAKDRRRRPGDGDGDGADEGIKWFLPFLALGLLRHMSASSNLIHDCDEVFNYWEPLHFLLYRSGFQTWEYSSDFALRSYLYLFIHALVAGPASLIFGEHKVRVFYSVRIFLGLISTITETVLVIALSRRYGERLACYVLAMLCLSSGCFFASTSFLPSSFSMYAVTLSSALFLLEKYAAAVAVAAAGVILGWPFSILVFLPVTVYSLIRGPFGRVFLSGFLTSLSLLVLSFIADYHCYGRLTFSVFNLLKYNVLGGGESHLYGTEGPSFYFRNGFNNFNFAFILALLFLGVVPFARKKYAPDLLIVVSPVYIWLAFMSLQAHKEERFLYPIYTLICVAAAAVIDSFPDFFHDKYSSDQSIFEKIAKGLRPLILGFILCASHSLTFSMLNGYGAPLQIYQHLEYHEDSGPGSVLCVGSEWHRYPSSFFIPSYISEVRWIDDGFRGLLPFPFNETLGGTSAAPSYFNNKNKA

SEQ ID NO: 77040 - protein, 135 aa, Setaria italica
  Transcript Sequence Number=SeqID_11066
  Homolog annotation: Hit_ID=B0K411; Match level="QueryCoverage=75%, HitCoverage=79%, E-value=1e-12, Identity=33%"; Hit description=Iojap- like protein
  Pfam annotation: Domain name=DUF143; Domain location=1-102; Score =91.2; E_value=3.7e-24; Accession=PF02410.7; Description=Domain of unknown function DUF143
KVLRDVRAGDVRVFPVGEGGLHGGACADYMVVATGRSDWHVRNIAQALLYKIKQKQKGSDRILMPSVEGQQAGKWVVIDSGSIIIHALEERAREYYDLESIWSKEVSPNTSVQELETSLVKTRRRNLSQKPMKSL

SEQ ID NO: 77041 - protein, 121 aa, Setaria italica
  Transcript Sequence Number=SeqID_11067
  Gene Ontology: Mol. function=translation release factor activity, codon specific; Cellular component=cytoplasm; Biological process =translational termination
  Homolog annotation: Hit_ID=B6SY98; Match level="QueryCoverage=96%, HitCoverage=25%, E-value=3e-59, Identity=93%"; Hit description =Peptide chain release factor 2
  Pfam annotation: Domain name=PCRF; Domain location=3-65; Score=21.5; E_value=1e-07; Accession=PF03462.10; Description=PCRF domain
GSGLGRGGTESMDWAAMVMNMYRSWAQRRGYTVTVVEEMPGEIAGIKRATIKVDGEYAFGYAKAEVGVHRLVRISPFDSGKRRHTSFAAVAVIPILGAASSRYQIKDSDLRIERFRSGGPG

SEQ ID NO: 77042 - protein, 143 aa, Setaria italica
  misc_feature (23)..(23): Xaa can be any naturally occurring amino acid
  misc_feature (134)..(134): Xaa can be any naturally occurring amino acid
  Transcript Sequence Number=SeqID_11068
  Subcellular localization annotation: CTP_CleavageSite=89; ConfidenceScore=5.42e-01
PPAPLLQAAPGLAGPVRGVGGPXPGMMQPQISRPPMPNLSAGPVAYPQVVRPPQGMPPPPMRPGMPPQMQMQFQRPPGAPPGPFPGAPQQFMRGPPPMGPPQIRPGMPGPPPPGMRPGMPPPPFGQPRPGMPPXPPGPQQPGQ

SEQ ID NO: 77043 - protein, 108 aa, Setaria italica
  Transcript Sequence Number=SeqID_11069
  Homolog annotation: Hit_ID=B6TIB2; Match level="QueryCoverage=81%, HitCoverage=26%, E-value=7e-39, Identity=88%"; Hit description =Calmodulin binding protein
LQLVPRLYIAQCGSSLLLNWIGLTNKLQSEIRNRRAFMVTEGRNRKKKQENQMKLEAKLHNLQVEWNGGSDTMDEILARIQQREEAAVKRERAMAYAFNHQVYTNCYF

SEQ ID NO: 77044 - protein, 342 aa, Setaria italica
  Transcript Sequence Number=SeqID_11070
  Gene Ontology: Cellular component=plasma membrane
  Homolog annotation: Hit_ID=B6TIB2; Match level="QueryCoverage=79%, HitCoverage=81%, E-value=1e-134, Identity=87%"; Hit description =Calmodulin binding protein
  Pfam annotation: Domain name=IQ; Domain location=58-78; Score=23.7; E_ value=0.00075; Accession=PF00612.19; Description=IQ calmodulin -binding motif
  Subcellular localization annotation: CTP_CleavageSite=45; ConfidenceScore=5.22e-01
MGSGDWFKTIISKKKSKRAKSKHAKLAGQLPNGGSQTNQKSNGPSSSSDHEDNAALEEWAATRIQNAFRKYKARKTLRCLRGIKRLRVVGQANPVKKQTAATLSYIQSWNKLQSEIRNRRAFMVTEGRNRKKKQENQMKLEAKLHNLQVEWNGGSDTMDEILARIQQREEAAVKRERAMAYAFNHQWRARSATSLGNFSYEVGKGGWGWSWMDRWIAARPWEPRSLVHPENPKKAQAKKDNSNTNPSALKLQGSITLSNNVNDRKAPKKKPSPLTADQKKPSPSPTDQKKPSPSPPSDQKKAAPKEQRAKAAGTPPKPKAKEMKGRPEKQQQQQQVVPSVSA

SEQ ID NO: 77045 - protein, 126 aa, Setaria italica
  misc_feature (114)..(114): Xaa can be any naturally occurring amino acid
  Transcript Sequence Number=SeqID_11071
  Gene Ontology: Mol. function=RNA binding
ATDAVISHTLQVLVEGCELEQVCTFLRNCIGSFPVIAMDKNGSHVAEAALKSLATHLEDQASRTMIEEILNKICKVIAADAANVMSSCYGSHVLRTLLCLCKGVPLESLQDFHXTTKRSAVLAERL

SEQ ID NO: 77046 - protein, 275 aa, Setaria italica
  misc_feature (248)..(248): Xaa can be any naturally occurring amino acid
  Transcript Sequence Number=SeqID_11072
  Gene Ontology: Mol. function=RNA binding
MVSVGSRAIRPKGSRQNVLIGGDSDDSSHKKRGRKDKSEKPRKGGHGSSKGPSVGKPQHGKDKKQRSDDGKKGKGRGKDHRSGSSAVMNPRNQDKLPSSNTTKPVQNVLRKRVDPETAKYFMEISNLFDNKEIDLDERSTICANALEETRGKELELATDAVISHTLQVLVEGCELEQVCTFLRNCIGSFPVIAMDKNGSHVAEAALKSLATHLEDQASRTMIEEILNKICKVLFFIGNIFSCNGTHIXSRRFRLLSADAANVMSSCYGSHVLRTL

SEQ ID NO: 77047 - protein, 546 aa, Setaria italica
  misc_feature (123)..(123): Xaa can be any naturally occurring amino acid
  misc_feature (158)..(158): Xaa can be any naturally occurring amino acid
  Transcript Sequence Number=SeqID_11073
  Gene Ontology: Mol. function=binding; Cellular component=nucleus
  Homolog annotation: Hit_ID=Q8LNU5; Match level="QueryCoverage=87%, HitCoverage=62%, E-value=0.0, Identity=81%"; Hit description =Nucleolar complex protein 2 homolog
  Pfam annotation: Domain name=Noc2; Domain location=66-387; Score =415.5; E_value=8.9e-122; Accession=PF03715.5; Description=Noc2p family
MITEMTDEQMIAFTIHRVRASAVFLAAFPSLLRKYVKALLHTWARGRGAMPLVSIMFLRDLCIQLGSDCLDTCLKGIYKAYLVNCKLSKSISGSKLQHIQFLGNCVRELYSLDPQSAYQHAFXFIRQLAVILRGALTEKGPKSVKDKRQKESSKSTKXQMEKSYQKVYEWQYIFCLELWTSVVCGCSSEEEFRPLAYPLTQIIYGVACLVPSARYFPVRLRCVKMLNCIAEATGTFIPVSSLLLDMLEMKELRGRPDGGVGKAVNLLSVKQVDKKTVKTRAFQEACIYSVVDELAKHLAQWSYSIAFFEMSFIPLVRLRSFCKTIKADRFRKEMKDLIHQIEANVEFMKSKRAGVAFSPNDPVVESFLQTEKEERSSPLSKYVATLHQRAQDRMDALDETSVIVGAESSTFSLRLTEAQKQQDEQEDDEGTMAFSKNLLTEKKKPKTAKEKNKKRPREHDDVATEEDRVEDLVLSSDDEDGNNQESDEDVSVPVEDDSDEDFVDPDSEYKKQKKAKLKKRNKRQPLSNKASSKTKRKVHPKKKAKH

SEQ ID NO: 77048 - protein, 224 aa, Setaria italica
  Transcript Sequence Number=SeqID_11074
  Homolog annotation: Hit_ID=B6TAK7; Match level="QueryCoverage=100%, HitCoverage=64%, E-value=4e-92, Identity=74%"; Hit description =Pollen-specific protein SF21
  Pfam annotation: Domain name=Ndr; Domain location=1-184; Score=132.5; E_value=1.3e-36; Accession=PF03096.6; Description=Ndr family
CLGVTAGAYVLTLFATKYQERVIGLMLVSPLCKAPSWSEWLYNKILLNLLYYYGTRGLVKECLLQRYFSKRVRGDAQYPESDVVQACKSLLDEKQGESIWRFLQSINERHNLTDSLRKLQCRTLIFVGENSAFHEDAIHMTAKLDRKYCALVEVQDCGSLVTEEQPYAMLMPMEYFLMGYGLYRPYQLSSSPRSPLSPCCISPELLSPESMGVKLKPIKTRVAI

SEQ ID NO: 77049 - protein, 73 aa, Setaria italica
  Transcript Sequence Number=SeqID_11075
  Gene Ontology: Mol. function=sequence-specific DNA binding; Cellular component=nucleus
  Homolog annotation: Hit_ID=Q9LEE8; Match level="QueryCoverage=45%, HitCoverage=3%, E-value=8e-12, Identity=96%"; Hit description=OCL3 protein
PGGNNPHHHAQNGGAAGYMGCRLLPTGCIVQDMNNGYSKVRVILPSLPSPPRPLPVVCIGCALLLHHRPIRLP

SEQ ID NO: 77050 - protein, 215 aa, Setaria italica
  misc_feature (12)..(12): Xaa can be any naturally occurring amino acid
  Transcript Sequence Number=SeqID_11076
  Gene Ontology: Mol. function=sequence-specific DNA binding; Cellular component=nucleus; Biological process=regulation of transcription, DNA-dependent
  Homolog annotation: Hit_ID=Q9LEE8; Match level="QueryCoverage=99%, HitCoverage=24%, E-value=1e-115, Identity=93%"; Hit description=OCL3 protein
  Pfam annotation: Domain name=START; Domain location=1-201; Score =162.0; E_value=1.8e-45; Accession=PF01852.11; Description=START domain
YHRAFARVFGPXPAGFVSEATREAGVAITSSVDLVDSLMDAARWSEMFPCIVARASTTDIISSGMGGTRSGSIQLMHAELQVLSPLVPIREVVFLRFCKQHAEGLWAVVDVSVDAVLRPDGGNNPHHHAQNGGAAGYMGCRLLPTGCIVQDMNNGYSKVTWVVHAEYDETAVHQLYRQLLRSGQALGARRWLASLQRQCQYLAILCSNSLPAREP

SEQ ID NO: 77051 - protein, 103 aa, Setaria italica
  Transcript Sequence Number=SeqID_11077
PFGEVFLGGFLRGFSRSLEVESSNASGVMWAMEEEMFVAVRRTEHVEVTSRAVEVAPAAAAGPRTVRVFCDDYDATDSSGDEDDEEAAAAARRRVKRYVQEIR

SEQ ID NO: 77052 - protein, 216 aa, Setaria italica
  misc_feature (68)..(68): Xaa can be any naturally occurring amino acid
  misc_feature (85)..(85): Xaa can be any naturally occurring amino acid
  misc_feature (106)..(106): Xaa can be any naturally occurring amino acid
  Transcript Sequence Number=SeqID_11078
MTRMDGWILHGRGRKGCGGGVGEKWLQREEWDTVAWCVLDSLSLKAFDLFGSRTNVSKEEKRKKKKTXTNPADLSKRKTTPNLKXRRAVMVVMDHGWVDEERAASXREQRQVASMNASIQRANQLSRQSLTVAEAAGEAGRGEAAAMVDRKTIDRSGAGAVERRLDLLHGGADEAVDGGDGLGVEPGRRQVADEDLERDGDDAARRGRQRGGAAGR

SEQ ID NO: 77053 - protein, 50 aa, Setaria italica
  Transcript Sequence Number=SeqID_11079
KGILHIGLDNESNLGIKKTIYICFFYFVCVFSHFLLNPILKSFLRNPHKR

SEQ ID NO: 77054 - protein, 479 aa, Setaria italica
  Transcript Sequence Number=SeqID_11080
  Gene Ontology: Mol. function=calcium ion binding; Cellular component =late endosome membrane; Biological process=protein transport
  Homolog annotation: Hit_ID=B6UEQ5; Match level="QueryCoverage=99%, HitCoverage=75%, E-value=0.0, Identity=88%"; Hit description =Vacuolar sorting receptor 7
  Pfam annotation: Domain name=EGF_CA; Domain location=365-406; Score =7.0; E_value=0.037; Accession=PF07645.7; Description=Calcium binding EGF domain
RFGESLKKMAQKVAAGDAAGEEVVVKLDWRESMPHPDERVEYELWTNSNDECGARCDEQAEFIRGFRGHAQLLERGGYARFTPHYITWYCPEAFRLTQQCKSQCINHGRYCAPDPEQDFGSGYDGKDVVVENLRQLCVHRVANESGRPWAWWDYVMDYKIRCSMKEKKYSKTCAEDVVAALGLDLKKVLECMGDPEADAENAVLSKEQEDQIGSGSRGDVTILPTLVINNVQYRGKLERTAVLKAVCAGFKEGTEPRVCLSPDIETNECLRRNGGCWRDEATNVTACRDTYRGRVCECPVVNGVRYEGDGYTDCQAVGPGRCALNNGGCWSETIGSHTFSACSETALTGCRCPPGFHGDGHKCEDLDECREKLACTCPDCHCKNTWGNYECTCSGNQLYIRGEDVCVANGMSKLGWFITLVAVACVAGVGIAGYVFYKYRLRSYMDSEIMSIMSQYMPLDSQNNENQPLRQHDSEALRH

SEQ ID NO: 77055 - protein, 94 aa, Setaria italica
  Transcript Sequence Number=SeqID_11081
  Gene Ontology: Mol. function=protein serine/threonine kinase activity; Cellular component=integral to membrane; Biological process=protein amino acid phosphorylation
  Homolog annotation: Hit_ID=B9SM68; Match level="QueryCoverage=98%, HitCoverage=8%, E-value=3e-22, Identity=59%"; Hit description =Leucine-rich repeat receptor protein kinase EXS, putative
  Pfam annotation: Domain name=LRR_1; Domain location=32-54; Score=5.5; E_value=26; Accession=PF00560.25; Description=Leucine Rich Repeat
  Pfam annotation: Domain name=LRR_1; Domain location=56-78; Score =12.1; E_value=1.5; Accession=PF00560.25; Description=Leucine Rich Repeat
  Pfam annotation: Domain name=LRR_1; Domain location=8-30; Score=10.1; E_value=3.6; Accession=PF00560.25; Description=Leucine Rich Repeat
  Pfam annotation: Domain name=LRR_1; Domain location=80-94; Score=2.1; E_value=1.2e+02; Accession=PF00560.25; Description=Leucine Rich Repeat
  Pfam module annotation: Pfam domain module=LRR_1::LRR_1::LRR_1::LRR _1; Domain location=32-54::56-78::8-30::80-94
AVAGNCTELYALDLSKNRLSGGIPDEVFALQKLSKLLLLGNALSGPLPPTVANCVSLVRLRLGENKLAGDIPREIGKLQNLVFLDLYSNRFTGT

SEQ ID NO: 77056 - protein, 54 aa, Setaria italica
  Transcript Sequence Number=SeqID_11082
  Gene Ontology: Mol. function=metal ion binding
  Homolog annotation: Hit_ID=B4FK95; Match level="QueryCoverage=92%, HitCoverage=19%, E-value=3e-16, Identity=84%"; Hit description=PHD finger protein
SLSLKSNRKRLFSMMNDLPTVFEVVSGGVKQSRERDRSASDNSGRNKLSVKQTS

SEQ ID NO: 77057 - protein, 241 aa, Setaria italica
  Transcript Sequence Number=SeqID_11083
  Gene Ontology: Mol. function=metal ion binding
  Homolog annotation: Hit_ID=B6SQT6; Match level="QueryCoverage=100%, HitCoverage=100%, E-value=1e-131, Identity=94%"; Hit description=PHD finger protein
  Pfam annotation: Domain name=C1_3; Domain location=186-216; Score =8.3; E_value=0.063; Accession=PF07649.4; Description=C1-like domain
  Pfam annotation: Domain name=PHD; Domain location=187-237; Score =49.9; E_value=1e-11; Accession=PF00628.21; Description=PHD-finger
  Pfam module annotation: Pfam domain module=C1_3::PHD; Domain location= 186-216::187-237
MGDAAAGRGHVVYPPRSAEDIFKDYRARRSAILRALTHDVEDFYAQCDPEKENLCLYGYANEAWEVALPAEEVPTELPEPALGINFARDGMNRRDWLALVAVHSDSWLLSVAFYYAARLNRNDRKRLFGMINELPTVFEVVSGARQSKERSSMDNGGRAKPSVKIENNEKATDEAYGEDDSDHGETLCGTCGGIYSADEFWIGCDICERWYHGKCVKITPAKAESIKHYKCPSCSSKRARQ

SEQ ID NO: 77058 - protein, 251 aa, Setaria italica
  Transcript Sequence Number=SeqID_11084
  Gene Ontology: Mol. function=metal ion binding
  Homolog annotation: Hit_ID=B4FK95; Match level="QueryCoverage=100%, HitCoverage=100%, E-value=1e-120, Identity=82%"; Hit description=PHD finger protein
  Pfam annotation: Domain name=PHD; Domain location=197-247; Score =45.9; E_value=1.6e-10; Accession=PF00628.21; Description=PHD-finger
MDASYRRAGAGGGSAPRTVEDIFKDYRARRSAILRALTHEVEDFYAQCDPEKENLCLYGYANEVWEVALPAEEVPTELPEPALGINFARDGMNRRDWLALVAVHSDSWLVSVAFYYAARLNRNERKRLFSMMNDLPTVFEVVSGGVKQSRERDRSASDNSGRNKLSVKQTSEPRIENNTREPDEGYDEDDGDHSETLCGTCGGIYSADEFWIGCDMCEKWYHGKCVKITPAKAESIKQYKCPSCSKRPRPM

SEQ ID NO: 77059 - protein, 112 aa, Setaria italica
  Transcript Sequence Number=SeqID_11085
  Gene Ontology: Mol. function=protein binding; Cellular component =chromosome; Biological process=chromosome organization and biogenesis
  Homolog annotation: Hit_ID=Q8L6H8; Match level="QueryCoverage=99%, HitCoverage=8%, E-value=5e-46, Identity=83%"; Hit description=SMC4 protein
ENVADLEKNLSSEREKIQQNSQTVKEMESIYNKHVKRQEDLENNMKSCKDQFKEFERKDVKYREDLKHLKQKIKKLEDKAQKDMSKRDDSTKEMEESSNLIPQLEGKIPQIA

SEQ ID NO: 77060 - protein, 79 aa, Setaria italica
  Transcript Sequence Number=SeqID_11086
  Gene Ontology: Mol. function=GTP binding; Cellular component =intracellular
  Homolog annotation: Hit_ID=B4FAB3; Match level="QueryCoverage=92%, HitCoverage=23%, E-value=2e-26, Identity=82%"; Hit description=GTP -binding protein
CYAQSVQVPMTLVFTKCDKRKKKKNGGRRPEENVETFQSLIREYFEAAPPWIMTSSVTNQGRDEILLHMSQLRNYWLKH

SEQ ID NO: 77061 - protein, 316 aa, Setaria italica
  misc_feature (11)..(11): Xaa can be any naturally occurring amino acid
  Transcript Sequence Number=SeqID_11087
  Gene Ontology: Mol. function=GTP binding; Cellular component =intracellular
  Homolog annotation: Hit_ID=B4FAB3; Match level="QueryCoverage=87%, HitCoverage=88%, E-value=1e-142, Identity=90%"; Hit description=GTP -binding protein
  Pfam annotation: Domain name=ATP_bind_1; Domain location=138-312; Score=-73.7; E_value=0.084; Accession=PF03029.9; Description =Conserved hypothetical ATP binding protein
  Pfam annotation: Domain name=GTP_EFTU; Domain location=131-311; Score= -91.0; E_value=0.033; Accession=PF00009.19; Description=Elongation factor Tu GTP binding domain
  Pfam annotation: Domain name=MMR_HSR1; Domain location=134-255; Score= 121.2; E_value=3.3e-33; Accession=PF01926.15; Description=GTPase of unknown function
  Pfam annotation: Domain name=Miro; Domain location=135-255; Score= -3.1; E_value=0.021; Accession=PF08477.5; Description=Miro-like protein
  Pfam module annotation: Pfam domain module=ATP_bind_1::GTP_EFTU::MMR _HSR1::Miro; Domain location=138-312::131-311::134-255::135-255
  Subcellular localization annotation: CTP_CleavageSite=53; ConfidenceScore=5.18e-01
MLLHHRLLPRXLVLLPSTHTSTSTLLRPSRLPRHLSISPRFCALSHLAVPQIVDQSDNEGTPHGDVQVKLPLDRLFVPPGATVDAGDQEAVSARVLKGSNIVLGPYARGDAQVVNADFVKSSVRPDDCPRDGLPEFALVGRSNVGKSSLLNSLVRRKRLALTSKKPGKTQCINHFKVNDSWYLVDLPGYGYASAPQEARTNWDEFTRNYFLSRENLVSVFLLIDASIPAKKIDLDYASWLGQKKVPMTLVFTKCDKRKKKKNGGRRPEENVETFQSLIREYFEAAPPWIMTSSVTNQGRDEILLHMSQLRNYWLKH

SEQ ID NO: 77062 - protein, 201 aa, Setaria italica
  Transcript Sequence Number=SeqID_11088
  Gene Ontology: Mol. function=asparagine synthase (glutamine -hydrolyzing) activity; Biological process=amino acid biosynthetic process
  Homolog annotation: Hit_ID=B6SVT7; Match level="QueryCoverage=98%, HitCoverage=28%, E-value=1e-109, Identity=95%"; Hit description =Asparagine synthase family protein
  Pfam annotation: Domain name=Asn_synthase; Domain location=1-162; Score=6.0; E_value=2.3e-07; Accession=PF00733.13; Description =Asparagine synthase
MSLIHPSNTYMDLNIGIALWLAAGGDGWVDGSACLMQDGSRHKYKSRSRVLIVGSGADEQCAGYGRHRTKYRLGGWNALDEEMRLDVQRIWKRNMGRDDRCISDHGKEARFPFLDEHVIKTLLEIPLWEIAKLDEPVGKGDKKILREVARLLGLQEAALQPKRAIQFGSRIARESNRKNFGSNRAANQASAGSVQIHQHMQ

SEQ ID NO: 77063 - protein, 108 aa, Setaria italica
  Transcript Sequence Number=SeqID_11089
IKSLVMLPQKLMLLVHWMDEAAIAKLMAEIAICPISNKDLRCYWTGNLGGSLACNMTHEIGRSNMFFSGNAVITCTKDVLQMQKKIIYSTRRSAHPKLNLSEDLQCKF

SEQ ID NO: 77064 - protein, 57 aa, Setaria italica
  Transcript Sequence Number=SeqID_11090
  Gene Ontology: Mol. function=actin binding; Cellular component=actin cytoskeleton; Biological process=actin cytoskeleton organization and biogenesis
  Homolog annotation: Hit_ID=Q9FUD1; Match level="QueryCoverage=71%, HitCoverage=31%, E-value=1e-16, Identity=95%"; Hit description =Profilin-A
MSWQTYVDEHLMCEIEGHHLTSAAIIGHDGTVWAQSAAFPSVSGSAACVLVVFPRRP

SEQ ID NO: 77065 - protein, 131 aa, Setaria italica
  Transcript Sequence Number=SeqID_11091
  Gene Ontology: Mol. function=actin binding; Cellular component=actin cytoskeleton; Biological process=actin cytoskeleton organization and biogenesis
  Homolog annotation: Hit_ID=Q9FUD1; Match level="QueryCoverage=100%, HitCoverage=100%, E-value=2e-61, Identity=86%"; Hit description =Profilin-A
  Pfam annotation: Domain name=Profilin; Domain location=2-126; Score =238.1; E_value=2.2e-68; Accession=PF00235.11; Description=Profilin
MSWQTYVDEHLMCEIEGHHLTSAAIIGHDGTVWAQSAAFPSFKPEEMANIMKDFDEPGFLAPTGLFLGPTKYMVIQGEPGAVIRGKKGSGGVTVKKTGQALVIGIYDEPMTPGQCNMVVERLGDYLVEQGL

SEQ ID NO: 77066 - protein, 123 aa, Setaria italica
  Transcript Sequence Number=SeqID_11092
RGGAGAGLQYKPVFAFPIPGLFFVVLLLLVLVCFWDLDLDFLLQIPACFVPLLQLQLKRARARDLLVVVVQLFQEAADCPCLSSSQVKSKAGRNLRRDTRLSPLSIPRAARRASARAWARERR

SEQ ID NO: 77067 - protein, 117 aa, Setaria italica
  misc_feature (93)..(93): Xaa can be any naturally occurring amino acid
  Transcript Sequence Number=SeqID_11093
  Gene Ontology: Mol. function=kinase activity; Cellular component =chloroplast; Biological process=carbohydrate metabolic process
  Homolog annotation: Hit_ID=Q8H407; Match level="QueryCoverage=45%, HitCoverage=13%, E-value=2e-13, Identity=64%"; Hit description =Xylulose kinase-like protein
  Subcellular localization annotation: CTP_CleavageSite=41; ConfidenceScore=5.11e-01
MVPDLRLSVEPLAHRHYHPAGRGSLGFRGVQSRTVPRRTTRITMLSRQNPGADGAAGTPLYLGIDFGTSGARYALIDRQGAIHSEGKRAYAPXIGDAAAWASSWRAALFQLLDDIPP

SEQ ID NO: 77068 - protein, 47 aa, Setaria italica
  Transcript Sequence Number=SeqID_11094
  Gene Ontology: Mol. function=sugar:hydrogen symporter activity; Cellular component=integral to membrane; Biological process =carbohydrate transport
  Homolog annotation: Hit_ID=Q9SFE9; Match level="QueryCoverage=100%, HitCoverage=14%, E-value=3e-11, Identity=64%"; Hit description =GONST5 Golgi Nucleotide sugar transporter
ITLVGCTFYGYVRHLISQQAATTPGPRTPRGRMEMLPLTGEKQGDKI

SEQ ID NO: 77069 - protein, 92 aa, Setaria italica
  Transcript Sequence Number=SeqID_11095
  Subcellular localization annotation: CTP_CleavageSite=65; ConfidenceScore=5.37e-01
MAMEYTSKKKALLVLFMFSCLLVPMASSAAPLSRSLSLTNNRVPEPAVVEVPLQQGEERNLGEVAARMDIEVNDYPGSGANNRHEPRSPGRA

SEQ ID NO: 77070 - protein, 60 aa, Setaria italica
  Transcript Sequence Number=SeqID_11096
  Homolog annotation: Hit_ID=B6UBV8; Match level="QueryCoverage=100%, HitCoverage=11%, E-value=9e-10, Identity=60%"; Hit description=3 -phosphoinositide-dependent protein kinase 1
MAVGGDDDTMERDFAARLRLAHSPSPAPPPATAAAVASSSPTAAGGIAFRAPQEQFTAVD

SEQ ID NO: 77071 - protein, 432 aa, Setaria italica
  misc_feature (19)..(19): Xaa can be any naturally occurring amino acid
  Transcript Sequence Number=SeqID_11097
  Gene Ontology: Cellular component=nucleus; Biological process =regulation of transcription, DNA-dependent
  Homolog annotation: Hit_ID=B6SWF9; Match level="QueryCoverage=85%, HitCoverage=61%, E-value=1e-123, Identity=66%"; Hit description =Chitin-inducible gibberellin-responsive protein 2
  Pfam annotation: Domain name=GRAS; Domain location=61-432; Score =347.9; E_value=1.9e-101; Accession=PF03514.6; Description=GRAS family transcription factor
  Subcellular localization annotation: CTP_CleavageSite=89; ConfidenceScore=5.93e-01
RTIQQLNSITAAPSPGPPXASATPNNNNNANAGMTRSPSNSSSSTASSSASCSPPTPGAASRQLLSEAAVALADGNHEAAATHLVALKRAANQHGDAEQRLIAMMVAALSSRIVPTASALAQHLAELCGAEQRAGSQLLHDISPCFRLALHAASAAIVEAVGDHRAIHLVDFDVSFQQHTALIQYLADRRVPGTSLKVTAVIDPSSPFTQTQSLTATLSAIGEQLKQLAERAGIEYRFKVVSCRAAELDASRLGCAPGEALAVNLAFALSHVPDESVSPANPRDELLRRVRALGPQVVALVEQELNTNTAPLAARFTDACAHYGAILESLDATLGRESAEKKARAEAALARKAANAVGREGPDRLERCEVFGKWRARFGMAGFRPVALGPGIVDQVAARVGPAPPGITFKADNGVLRLCWMGRVVTVASAWR

SEQ ID NO: 77072 - protein, 73 aa, Setaria italica
  misc_feature (50)..(50): Xaa can be any naturally occurring amino acid
  Transcript Sequence Number=SeqID_11098
  Gene Ontology: Cellular component=mitochondrial respiratory chain; Biological process=electron transport chain
  Homolog annotation: Hit_ID=P46269; Match level="QueryCoverage=100%, HitCoverage=100%, E-value=1e-22, Identity=69%"; Hit description =Cytochrome b-c1 complex subunit 8
MGKVPVRMKAVVYSLSPFQQKVMPGLWKDITTKIHHKVTENWISAGLLLXAPVVGTYQYAMWYKEQEKLSHRY

SEQ ID NO: 77073 - protein, 215 aa, Setaria italica
  Transcript Sequence Number=SeqID_11099
  Gene Ontology: Mol. function=metal ion binding; Cellular component =cytoplasm; Biological process=ubiquitin-dependent protein catabolic process
  Homolog annotation: Hit_ID=B6U108; Match level="QueryCoverage=90%, HitCoverage=68%, E-value=1e-67, Identity=68%"; Hit description =Ubiquitin-protein ligase CIP8
  Pfam annotation: Domain name=zf-C3HC4; Domain location=153-193; Score= 24.6; E_value=0.00016; Accession=PF00097.17; Description=Zinc finger, C3HC4 type (RING finger)
LRGRALFRGALLAPAGEDLGFTEVDAEPDYDGDLTSICWDCLEIEDADEPDLPLVVGSPAEEFEWEEVASPSGAGGDPPEPEWEVLANVPPPADADAEEEGFVYTSHRGMEEVLVAGGDGLFLKSKPPAARLAVESLPSAVVAAGEEGEGDECAVSKDGVAAGQRVKRLPCSHRYHDECIVPWLQVRNSCPLCRFELPTDDPEYETWKAGLTVAA

SEQ ID NO: 77074 - protein, 247 aa, Setaria italica
  misc_feature (73)..(73): Xaa can be any naturally occurring amino acid
  misc_feature (81)..(81): Xaa can be any naturally occurring amino acid
  misc_feature (144)..(144): Xaa can be any naturally occurring amino acid
  misc_feature (183)..(183): Xaa can be any naturally occurring amino acid
  misc_feature (216)..(216): Xaa can be any naturally occurring amino acid
  Transcript Sequence Number=SeqID_11100
  Gene Ontology: Mol. function=aspartic-type endopeptidase activity; Cellular component=chromatin; Biological process=DNA integration
  Homolog annotation: Hit_ID=Q7XM06; Match level="QueryCoverage=82%, HitCoverage=13%, E-value=6e-87, Identity=74%"; Hit description =OSJNBa0086O06.3 protein
  Pfam annotation: Domain name=rve; Domain location=1-108; Score=29.7; E_value=1.2e-05; Accession=PF00665.18; Description=Integrase core domain
VQPQAAAKDECDRKLRVLRTDNGGEFTAAEFASYCADKGIQRYNSAPYTLQQNNIVERRNQTVVAMARVLLKXRRMPTIFXGKAMLTAVHILNRSPTKALDGMTPYEAWNGRKPAVAHLRIFGYLTYVKELSHVGELDDRSYPXVFIGYAEGVKAYRILDSETQRVCMARDVVFDEGRGWASXLMVDDSLTSTYDNFTINYVHFEGVRGVDSSSSXSVPTPVHGSPPTPASTTPAVLVVVVVESSYL

SEQ ID NO: 77075 - protein, 168 aa, Setaria italica
  misc_feature (38)..(38): Xaa can be any naturally occurring amino acid
  misc_feature (64)..(64): Xaa can be any naturally occurring amino acid
  misc_feature (83)..(83): Xaa can be any naturally occurring amino acid
  Transcript Sequence Number=SeqID_11101
  Gene Ontology: Mol. function=protein dimerization activity; Cellular component=nucleus; Biological process=regulation of transcription, DNA-dependent
  Homolog annotation: Hit_ID=B6UHB7; Match level="QueryCoverage=92%, HitCoverage=88%, E-value=1e-19, Identity=38%"; Hit description=BZIP protein
  Pfam annotation: Domain name=bZIP_1; Domain location=81-144; Score =34.9; E_value=3.3e-07; Accession=PF00170.13; Description=bZIP transcription factor
  Pfam annotation: Domain name=bZIP_2; Domain location=81-132; Score =18.6; E_value=0.0056; Accession=PF07716.7; Description=Basic region leucine zipper
  Pfam module annotation: Pfam domain module=bZIP_1::bZIP_2; Domain location=81-144::81-132
MLQQHHYHGAVAMANLHCLSSPNPAFHAHCHSNMIAMXPTPFHFSPSTFEPIHEAPAVVSNSPXAGSGSAEDAYGGRMVMAEXERRRRRMVSNRESARRSRMRKQRQLTELWAQVVHLRGANRRLLDDLNQAMRGCSDMCCENAQLEKEKAELSTKLERDWFLPSTTT

SEQ ID NO: 77076 - protein, 122 aa, Setaria italica
  Transcript Sequence Number=SeqID_11102
  Gene Ontology: Mol. function=sequence-specific DNA binding; Cellular component=nucleus; Biological process=regulation of transcription, DNA-dependent
  Homolog annotation: Hit_ID=B6SWE5; Match level="QueryCoverage=98%, HitCoverage=21%, E-value=1e-19, Identity=52%"; Hit description=Bell -like homeodomain protein 3
PQNINFGMMDGHLDFGAYNDDHATGTGHGFGGGVSLTLGLQQHAGDDPHGGVNVAFAAAPSAAHEFLFMAGGEHQQQMVAGGSVHGHHQGQFGAGMEGDAASHYHRGLSAATGFQLLHDLAG

SEQ ID NO: 77077 - protein, 415 aa, Setaria italica
  Transcript Sequence Number=SeqID_11103
MSPVASCPTHTIHLLITVLLALAAIYVHVPATAIIVVPNSNCYTFDNESRLIDFTHLVGKEYEYNEQGLQRSDLVVEFCKDVQKRSQEGYIEFGRFVSSRSFLFGSGPTDYIQRFHNGDLVHCETTFKMMGRTAQVNIKCGHCSNKACRDEQGCICSISYDERMCRVLVELAIPCSKSGPRVFKGFTVGFHPRSSEIVYNGLTQLGFEQLHHGFSFQTEQIHVSLYLSAMSSLAGLVGKPTLKVNPAKGLSVTLTGSGLNGAMPTTLSPTVLNVDWRCEIARSSPYEVNILIPVEGYDPIEFTLTKECGYAQEKESDLMKGWATFGIISCIFVILSTLLCCGGFIYKTRVEHLYGLDALPGMAFLSAFLDAVGRPRGYLQADNPSENHASQASWEHTGGTIQAAQRANDRAYGSI

SEQ ID NO: 77078 - protein, 290 aa, Setaria italica
  Transcript Sequence Number=SeqID_11104
  Gene Ontology: Mol. function=metal ion binding; Cellular component =intracellular; Biological process=response to stress
  Homolog annotation: Hit_ID=A8QZ63; Match level="QueryCoverage=100%, HitCoverage=100%, E-value=1e-143, Identity=84%"; Hit description =AN110
  Pfam annotation: Domain name=zf-AN1; Domain location=101-145; Score =8.0; E_value=0.0086; Accession=PF01428.8; Description=AN1-like Zinc finger
  Pfam annotation: Domain name=zf-AN1; Domain location=13-55; Score =14.6; E_value=0.0013; Accession=PF01428.8; Description=AN1-like Zinc finger
  Pfam annotation: Domain name=zf-C2H2; Domain location=224-247; Score =10.5; E_value=0.88; Accession=PF00096.18; Description=Zinc finger, C2H2 type
  Pfam annotation: Domain name=zf-C2H2; Domain location=261-284; Score =20.7; E_value=0.0062; Accession=PF00096.18; Description=Zinc finger, C2H2 type
  Pfam module annotation: Pfam domain module=zf-AN1::zf-AN1::zf -C2H2::zf-C2H2; Domain location=101-145::13-55::224-247::261-284
MGTPEFPNLGKHCSVGDCHQIDFLPFTCDRCDNVFCLQHRSYTTHQCPNANLKDVTVLICPLCAKGVRLNPSEDPNITWDTHVNTDCDPSNYQKVTKKKKCPVPGCREALTFSNTIRCKDCTKEHCLKHRFGPDHKCPGPRKVDSGFPFVNMLRRSQKVETRPNSSKNNSSSWWSSSLVNAATNFKSSAEAGMQKLSIATSQAFQKAKDGISADSSSSSSELVEECVHCPARFSTVGALIEHVEKSHQTNQQPSRGRVTIDVCPKCSKGFRDPVLLVEHVEREHGGTSRA

SEQ ID NO: 77079 - protein, 47 aa, Setaria italica
  Transcript Sequence Number=SeqID_11105
LLITIHSEMKIKTVNPSNVQDRVQNLCDSSTLCIPLQQCEAKVMIKA

SEQ ID NO: 77080 - protein, 55 aa, Setaria italica
  Transcript Sequence Number=SeqID_11106
SKIEPHPQNSQTNSSLQAGHYSLATLLMDYKCRRVWVLRHRRQLQMPFAATESYM

SEQ ID NO: 77081 - protein, 107 aa, Setaria italica
  misc_feature (29)..(29): Xaa can be any naturally occurring amino acid
  Transcript Sequence Number=SeqID_11107
  Gene Ontology: Mol. function=translation initiation factor activity; Cellular component=eukaryotic translation initiation factor 3 complex; Biological process=phagocytosis, engulfment
  Homolog annotation: Hit_ID=A0MLT8; Match level="QueryCoverage=79%, HitCoverage=19%, E-value=2e-41, Identity=95%"; Hit description =Eukaryotic initiation factor 3e
NAHHLLRYLATAVVVNKRRRNMLKELIKXIQQEQHSYKDPITEFLECLYVNYDFDGAQLKLMECEQVILNDPFLGKRIEEGNFVTTCSVELVSYLCSFAFVSFLFFR

SEQ ID NO: 77082 - protein, 439 aa, Setaria italica
  Transcript Sequence Number=SeqID_11108
  Gene Ontology: Mol. function=protein binding; Cellular component =eukaryotic translation initiation factor 3 complex; Biological process=phagocytosis, engulfment
  Homolog annotation: Hit_ID=B6TRV3; Match level="QueryCoverage=100%, HitCoverage=100%, E-value=0.0, Identity=94%"; Hit description =Eukaryotic translation initiation factor 3 subunit 6
  Pfam annotation: Domain name=PCI; Domain location=284-400; Score =96.3; E_value=1.1e-25; Accession=PF01399.19; Description=PCI domain
  Pfam annotation: Domain name=eIF3_N; Domain location=5-137; Score =265.3; E_value=1.5e-76; Accession=PF09440.2; Description=eIF3 subunit 6 N terminal domain
  Pfam module annotation: Pfam domain module=PCI::eIF3_N; Domain location=284-400::5-137
MAEHDLTALLAAQMDRHLVFPLLEFLQERQFYSEPEILEAKIRLLSGTNMVDYAMDIHKSLHGTDDVPEDMVRRRTEVVSRLRSLEEAAAPLVTFLQNPQLVQELRPDKQYNIHMLQDRYQIGPDQIEALYQYAKFQFECGNYSGAADYLYQYRALCTNSERSVSALWGKLAAEILMQNWDVALEELNRLKEIIDSKNFSSPLNQLQNRIWLMHWALFIFFNHENGRNGIIDLFFQDRYLNAIQTNAHHLLRYLATAVVVNKRRRNMLKELIKVIQQEQHSYKDPITEFLECLYVNYDFDGAQLKLMECEQVILNDPFLGKRIEEGNFVTVPLRDEFLENARLFIFETYCRIHRCIDISMLSQKLNMSYDEAELWIMNLVRSSKLDARIDSVSGTLIMTTNHVNVHEQIIESLKGLNMRTYMLAKNIVEPAQATQQATR

SEQ ID NO: 77083 - protein, 123 aa, Setaria italica
  Transcript Sequence Number=SeqID_11109
  Gene Ontology: Mol. function=protein serine/threonine kinase activity; Cellular component=ubiquitin ligase complex; Biological process=protein amino acid phosphorylation
  Homolog annotation: Hit_ID=B9T790; Match level="QueryCoverage=92%, HitCoverage=16%, E-value=8e-36, Identity=64%"; Hit description =Receptor protein kinase, putative
  Pfam annotation: Domain name=U-box; Domain location=46-119; Score =55.9; E_value=1.5e-13; Accession=PF04564.7; Description=U-box domain
WPTEVAGRLAYFGLSCSETSSRDRPELTPGTVQDLEQLCFTREEGRAPSSFLCPILKEIMHDPQVCADGLTYEGRAIRKWMETGKGTSPVTGQKLEHRNLTPNHALRFAIQDWLRHSHSLMKL

SEQ ID NO: 77084 - protein, 92 aa, Setaria italica
  Transcript Sequence Number=SeqID_11110
  Gene Ontology: Cellular component=chloroplast
AHAASLLLGLVGVDVAVAAPAPARADDESGGGEEGVLGAIKSIFDPNEKTKAGKVLPKAYLKAAREVVRTLRESLEEDDGGDMAKFRRNADA

SEQ ID NO: 77085 - protein, 155 aa, Setaria italica
  Transcript Sequence Number=SeqID_11111
  Gene Ontology: Mol. function=metal ion binding; Cellular component =plasma membrane
  Homolog annotation: Hit_ID=B6TK33; Match level="QueryCoverage=83%, HitCoverage=23%, E-value=8e-39, Identity=61%"; Hit description =Copine family protein
  Pfam annotation: Domain name=Copine; Domain location=96-155; Score= -43.0; E_value=0.0043; Accession=PF07002.8; Description=Copine
MGGVFGALFGSHRRAGRAPAVRHRGLATQPSSAYDGGRRRAMLSKKYSYIPDTYTSLDQVAAALRQQGLESSNLILGVDFTKSNEWTGKQSFGGQSLHRLGDTPNPYEQAISIIGKTLAPFDEDNLIPCFGFGDATLLDSTARLIIWQQQCLLVS

SEQ ID NO: 77086 - protein, 91 aa, Setaria italica
  Transcript Sequence Number=SeqID_11112
VHNKIYKRKKVKTTYNLKRKEYSEAPQCKSCVRSFSHPSDGRQIPCHSCSAATQGAPRSPHRPTSSLLLPLRRRECPPNRQPPVPPGPVLS

SEQ ID NO: 77087 - protein, 488 aa, Setaria italica
  Transcript Sequence Number=SeqID_11113
  Gene Ontology: Mol. function=protein serine/threonine kinase activity; Cellular component=plasma membrane; Biological process =protein amino acid phosphorylation
  Homolog annotation: Hit_ID=Q7XVM0; Match level="QueryCoverage=86%, HitCoverage=68%, E-value=0.0, Identity=72%"; Hit description =OSJNBa0072K14.3 protein
  Pfam annotation: Domain name=APH; Domain location=88-266; Score=-6.4; E_value=0.0053; Accession=PF01636.15; Description=Phosphotransferase enzyme family
  Pfam annotation: Domain name=Pkinase; Domain location=85-359; Score =151.1; E_value=3.5e-42; Accession=PF00069.17; Description=Protein kinase domain
  Pfam annotation: Domain name=Pkinase_Tyr; Domain location=85-359; Score=110.3; E_value=6.7e-30; Accession=PF07714.9; Description =Protein tyrosine kinase
  Pfam module annotation: Pfam domain module=APH::Pkinase::Pkinase_Tyr; Domain location=88-266::85-359::85-359
GSSSAAAAYGAGSGGGRHGDRGYPDLQQAPMVAPRVEKLCTAAEKARVKSNALAREASAPKDANGNIISAQTFTFRELATATRNFRPECFLGEGGFGRVYRGRLESTGQVVAIKQLNRDGLQGNREFLVEVLMLSLLHHQNLVSLIGYCADGDQRLLVYEYMPFGSLEDHLHDLPLDKEALDWNTRMKIAAGAAKGLEYLHDKANPPVIYRDFKSSNILLDEGFHPKLSDFGLAKLGPVGDKSHVSTRVMGTYGYCAPEYAMTGQLTVKSDVYSFGVVLLELITGRRAIDSTRPHGEQNLVSWARPLFNDRRKLPKMADPRLEGRYPMRGLYQALAVASMCIQSEAASRPLIADVVTALSYLASQSYDPNAALASRKPGGDPRSKPSENGRVVSRNDETSSSGHKSPGKDREDSPRDLPGILNKDFDRERMVAEAKMWGDRERMVAEAKMWGDRERMVAEAKMWGENWRDKRRTENGQGSLDSPTGNI

SEQ ID NO: 77088 - protein, 81 aa, Setaria italica
  Transcript Sequence Number=SeqID_11114
  Gene Ontology: Mol. function=hydrolase activity; Cellular component =cell wall
  Homolog annotation: Hit_ID=A6N1T8; Match level="QueryCoverage=100%, HitCoverage=38%, E-value=2e-37, Identity=87%"; Hit description =Catalytic hydrolase (Fragment)
KSRQQGTYESIHRDLLVAFGSWDFDPMNSTNPFPQNEGSVHIWQGYEDRLVLVELQRYISKKLPWIKYHEVPEGGHMFMLV

SEQ ID NO: 77089 - protein, 99 aa, Setaria italica
  misc_feature (5)..(5): Xaa can be any naturally occurring amino acid
  Transcript Sequence Number=SeqID_11115
  Subcellular localization annotation: CTP_CleavageSite=54; ConfidenceScore=5.14e-01
RMRMXPVYRSSLLQIMDGLLLAGTSTSPRERNQSAQTLPRVVSIDAPLTSTSACAEMVRGQALRPLASFLPSVRESLECESSGPEEWPPPPPAVGVREN

SEQ ID NO: 77090 - protein, 46 aa, Setaria italica
  misc_feature (29)..(29): Xaa can be any naturally occurring amino acid
  Transcript Sequence Number=SeqID_11116
ILMLFKLPIVDQKVLKMLLSGKHHNRNKXGKKIRLSYLNKVSLLSM

SEQ ID NO: 77091 - protein, 79 aa, Setaria italica
  Transcript Sequence Number=SeqID_11117
  Subcellular localization annotation: CTP_CleavageSite=41; ConfidenceScore=5.31e-01
HSAESKYHKATQKSCADHGCVRTTPRTAARLRPFSHERYLRSAAKFRTGRRGFEARRAAAACEAPLSLRRLGGRERTET

SEQ ID NO: 77092 - protein, 66 aa, Setaria italica
  misc_feature (23)..(23): Xaa can be any naturally occurring amino acid
  Transcript Sequence Number=SeqID_11118
  Subcellular localization annotation: CTP_CleavageSite=39; ConfidenceScore=5.04e-01
DDSNYKIFPRSVVRGICIFSKSXVKQGSSNVLVVFPPKSLEEKQVAAVRLLQLKTRQILRQVIDPY

SEQ ID NO: 77093 - protein, 76 aa, Setaria italica
  misc_feature (31)..(31): Xaa can be any naturally occurring amino acid
  Transcript Sequence Number=SeqID_11119
  Gene Ontology: Biological process=regulation of GTPase activity
EFKSVDRGSLLYWGGCLYPVPGARNDIFKDXATSASADERGEDAAAAMISEEDLDRPFLEFLNQHGLSPKMRAVVL

SEQ ID NO: 77094 - protein, 127 aa, Setaria italica
  misc_feature (59)..(59): Xaa can be any naturally occurring amino acid
  Transcript Sequence Number=SeqID_11120
  Gene Ontology: Biological process=intracellular protein transport
  Homolog annotation: Hit_ID=Q8LLD4; Match level="QueryCoverage=80%, HitCoverage=20%, E-value=9e-16, Identity=41%"; Hit description=Rab escort protein
SKLRTEIRPSRTRRFLMDEEKKHFVGARLASGQDISCKRLIIDPSYKIPTLDVPSDDSXFNFPRSVARGICIFSKSLKQGTSNVLVVFPPKSLEEKQVAAVRLLQLSSNLAVCPSESCGCGLKRASI

SEQ ID NO: 77095 - protein, 56 aa, Setaria italica
  Transcript Sequence Number=SeqID_11121
  Gene Ontology: Biological process=regulation of GTPase activity
MAEEPAAAGAAHEYPTIDPSFDVVLCGTGLPESVLAAACAAAGKTVLHVDPNPFYG

SEQ ID NO: 77096 - protein, 88 aa, Setaria italica
  Transcript Sequence Number=SeqID_11122
KGHLESTSESTDDMKPTLIWSCVYVQEITQGTSTPGSLWSCPMPDENLDYRFILESTKKLFGDIYPDEEFLPRSSAPVHGDDDSDSAE

SEQ ID NO: 77097 - protein, 292 aa, Setaria italica
  misc_feature (223)..(223): Xaa can be any naturally occurring amino acid
  misc_feature (260)..(260): Xaa can be any naturally occurring amino acid
  Transcript Sequence Number=SeqID_11123
  Gene Ontology: Mol. function=transferase activity; Cellular component= Rab-protein geranylgeranyltransferase complex; Biological process =intracellular protein transport
  Homolog annotation: Hit_ID=Q8LLD4; Match level="QueryCoverage=99%, HitCoverage=50%, E-value=2e-55, Identity=40%"; Hit description=Rab escort protein
ALYLSSIGRFANAEGAFIYPMYGHGELPQAFCRCAAVKGALYVLRMPVAALLMDEEKKHFVGARLASGQDISCKRLIIDPSYKIPTLDVPSDDSNSNFPRSVARGICIFSKSLKQGTSNVLVVFPPKSLEEKQVAAVRLLQLSSNLAVCPSGMFMAYLSTPCTDASARKQCIRKAIDALFSPQPQDSDGFEGHLESTSESTDDMKPTLIWSCVYVQEITQHWXNIHCPVLHYQGTSTSGSSWSCPMPDENLDYRNILESXTKKLFADIYPDEEFLPRLSAPVHGDDDSDSAE

SEQ ID NO: 77098 - protein, 571 aa, Setaria italica
  misc_feature (24)..(24): Xaa can be any naturally occurring amino acid
  misc_feature (82)..(82): Xaa can be any naturally occurring amino acid
  misc_feature (402)..(402): Xaa can be any naturally occurring amino acid
  Transcript Sequence Number=SeqID_11124
  Gene Ontology: Mol. function=Rab-protein geranylgeranyltransferase activity; Cellular component=Rab-protein geranylgeranyltransferase complex; Biological process=intracellular protein transport
  Homolog annotation: Hit_ID=Q8LLD4; Match level="QueryCoverage=83%, HitCoverage=82%, E-value=1e-100, Identity=41%"; Hit description=Rab escort protein
  Pfam annotation: Domain name=GDI; Domain location=86-520; Score= -74.2; E_value=1.2e-12; Accession=PF00996.10; Description=GDP dissociation inhibitor
  Subcellular localization annotation: CTP_CleavageSite=83; ConfidenceScore=5.27e-01
MAEEPAAAGAAHEYPTIDPSFDVXSVARGSRSPSSPPPAPPPGRRSSTSTPTRSTAPTTPPSRSSPSPPSSPLTLPRPPRPXAAAATSGSHTVVDLHRRTVYSEVETSGAIPELARRFTVDLVGPRVLYCADEAVDLLLRSGGSHHVEFKSVDGGSLLYWEGCLYPVPGSRGAIFSDTTLKHTEKFVAYKFLKVVQEHIAATSASADERGEEEDAAMISEEDLYRPFVEFLNQHSLSAKMRAVVLYAIAMADYDQDGPEPSDKLITTREGIKTIALYLSSIGRFANAEGAFIYPMYGHGELPQAFCRCAAVKGALYVLRMPVAALLMDEEKKHFVGARLASGQDISCKRLIIDPSYKIPTLDVPSDDSNSNFPRSVARGICIFSKSVKQGSSNVLVVFPPKXVAMVVLFLLVDPVSTVYLALEEKQVAAVRLLQLSSNLAVCPSGMFMAYLSTPCTDASAGKHCIKKAIDALFSPQPQDSDGFEGHLESTSESTDDMKPTLIWSCVYVQEITQGTSTSGSSWSCPMPDENLDYRNILESTKKLFADIYPDEEFLPRNSAPVHGDDDSDSAE

SEQ ID NO: 77099 - protein, 48 aa, Setaria italica
  Transcript Sequence Number=SeqID_11125
GVFGSLGPPKIYVTSNIGRLIRRTKYELIIKLITQMEANSRNESIKPN

SEQ ID NO: 77100 - protein, 54 aa, Setaria italica
  Transcript Sequence Number=SeqID_11126
HCCFRILIQTAKLVLTFLIQPVVVPFYSDYKANSPHVLQSSMKFPHIQLGRKNK

SEQ ID NO: 77101 - protein, 90 aa, Setaria italica
  Transcript Sequence Number=SeqID_11127
KKAAQNSERERNRSAKKPKSQQQRHRAERRRALCPFAVSIRIHLCAGRQRRRGAAMNAHVRSSSAADAAAAAPSTSGSGGTASYPYTAAT

SEQ ID NO: 77102 - protein, 66 aa, Setaria italica
  Transcript Sequence Number=SeqID_11128
TIHQYMIYCYINYVPCCPMHYRIHNAVVEYMFFCPQEHWIATIPFLAYMTLTVCAYVTMYFWLSWS

SEQ ID NO: 77103 - protein, 92 aa, Setaria italica
  Transcript Sequence Number=SeqID_11129
  Gene Ontology: Mol. function=hydrolase activity
TLVHVSRDFAAPPYVGRYMQARMLVARCAAAMVTIDSFGHFPQLVAPDELLGILDLVLGAAGTADGDEEETAEAAAAALAEEKTNEVPSGGL

SEQ ID NO: 77104 - protein, 103 aa, Setaria italica
  Transcript Sequence Number=SeqID_11130
SQFNKSILLGLKQDVVAWQLFLWSFLLCMLLAVLSFVLHDLELLCRFFPVEFQLLLDIVIPLVSNHFPAEFSTDLTSDLQNPVFLLDTFSWTICFFRSQETHI

SEQ ID NO: 77105 - protein, 71 aa, Setaria italica
  Transcript Sequence Number=SeqID_11131
YHNNSPLSIEHEDSSLSLYSITCPPRKFAIWVEPNWLKVPVFFVPRTARMNDYEFTLELCEQIDKIMFHRK

SEQ ID NO: 77106 - protein, 384 aa, Setaria italica
  Transcript Sequence Number=SeqID_11132
  Gene Ontology: Mol. function=protein serine/threonine kinase activity; Cellular component=plasma membrane; Biological process =protein amino acid phosphorylation
  Homolog annotation: Hit_ID=B9SME9; Match level="QueryCoverage=94%, HitCoverage=82%, E-value=1e-170, Identity=80%"; Hit description =Protein kinase APK1B, chloroplast, putative
  Pfam annotation: Domain name=Pkinase; Domain location=79-358; Score =162.1; E_value=1.6e-45; Accession=PF00069.17; Description=Protein kinase domain
  Pfam annotation: Domain name=Pkinase_Tyr; Domain location=79-358; Score=126.0; E_value=1.2e-34; Accession=PF07714.9; Description =Protein tyrosine kinase
  Pfam module annotation: Pfam domain module=Pkinase::Pkinase_Tyr; Domain location=79-358::79-358
RPATAAAAADGDGGGAAKASHVHDAAETRYLNASNRELGHHFQTNHDGENGVDASIEKKTPPKLLQFTFQELKSATINFRPDSILGEGGFGYVFKGWIEPNSTAPAKPGTGVTVAVKSLKQDALQGHREWVAEIDFLGQLHHKHLVKLIGYCIEDDQRLLVYEFMARGSLENHLFRRALPLPWPNRMKIALGAAKGLAFLHGGPKPVIYRDFKTSNILLDAEYNAKLSDFGLAKAGPQGDKTHVSTRVVGTYGYAAPEYVMTGHLTSKSDVYSFGVVLLEMLTGRRSMDKKRPTGEQNLVAWARPYLNDRRRLYQLVDPRLGLNYSVKGVQKVAQICHYCLSRDSKSRPSMDEVVKQLTPLQDLNDMASASSRPRSTQRGKVHR

SEQ ID NO: 77107 - protein, 152 aa, Setaria italica
  Transcript Sequence Number=SeqID_11133
  Gene Ontology: Mol. function=transcription regulator activity; Cellular component=nucleus; Biological process=regulation of transcription
  Homolog annotation: Hit_ID=B9RB43; Match level="QueryCoverage=78%, HitCoverage=61%, E-value=9e-18, Identity=43%"; Hit description=DNA binding protein, putative
  Pfam annotation: Domain name=HLH; Domain location=32-100; Score=27.6; E_value=5.2e-05; Accession=PF00010.18; Description=Helix-loop-helix DNA-binding domain
MKSRRQSSGGSSAGATAAGEGNTHSSGGGGGCKLERKDVEKNRRLHMKGLCLKLSSLIPPAARHASLLSEAAASASNPNKDTVTQLDQLDSAAAYIKQLKERIEALKRRKEGRGGGKGGAGAAAAPVGGGAGGVRMPVIEVRYQDGTLDVVL

SEQ ID NO: 77108 - protein, 81 aa, Setaria italica
  Transcript Sequence Number=SeqID_11134
  Gene Ontology: Mol. function=hydrolase activity
  Homolog annotation: Hit_ID=B9RS01; Match level="QueryCoverage=82%, HitCoverage=30%, E-value=1e-22, Identity=77%"; Hit description =Monoglyceride lipase, putative
ENPGVPCFLLGHSTGGAVVLKASLYPHIREKLEGIILTSPALRVKPAHPIVGAVAPIFSLVAPEVHWGLLEDSVKSEWRRR

SEQ ID NO: 77109 - protein, 176 aa, Setaria italica
  misc_feature (24)..(24): Xaa can be any naturally occurring amino acid
  misc_feature (105)..(105): Xaa can be any naturally occurring amino acid
  misc_feature (159)..(159): Xaa can be any naturally occurring amino acid
  Transcript Sequence Number=SeqID_11135
  Gene Ontology: Mol. function=hydrolase activity
  Homolog annotation: Hit_ID=Q8LEE3; Match level="QueryCoverage=93%, HitCoverage=40%, E-value=3e-64, Identity=74%"; Hit description =Lysophospholipase-like protein
SFLSYFRGILVIIHGLNEHSGRYXHFAEQLTACGFGVYAMDWIGHGGSDGLHGYVPSLDYVIEDIEVLLDKIMMENPGVPCFLLGHSTGGAVVLKRNAWLKNGIXLYPHIREKLEGIILTSPALRVKPAHPIVGAVAPIFSLVAPKFQFKGANKRGIPXVPRDPAALLAKSPTIGL

SEQ ID NO: 77110 - protein, 285 aa, Setaria italica
  Transcript Sequence Number=SeqID_11136
  Gene Ontology: Mol. function=hydrolase activity
  Homolog annotation: Hit_ID=Q8LEE3; Match level="QueryCoverage=95%, HitCoverage=70%, E-value=1e-121, Identity=76%"; Hit description =Lysophospholipase-like protein
  Pfam annotation: Domain name=Abhydrolase_1; Domain location=56-274; Score=31.9; E_value=2.7e-06; Accession=PF00561.12; Description =alphabeta hydrolase fold
  Pfam annotation: Domain name=PGAP1; Domain location=26-211; Score= -80.8; E_value=0.019; Accession=PF07819.5; Description=PGAP1-like protein
  Pfam module annotation: Pfam domain module=Abhydrolase_1::PGAP1; Domain location=56-274::26-211
RSDTFLVAGARRNALFCRLWAPASKEMRGILVIIHGLNEHSGRYLHFAEQLTACGFGVYAMDWIGHGGSDGLHGYVPSLDYVIEDIEVLLDKIMMENPGVPCFLLGHSTGGAVVLKASLYPHIREKLEGIILTSPALRVKPAHPIVGAVAPIFSLVAPKFQFKGANKRGIPVSRDPAALLAKYSDPLVYTGPIRVRTGHEILRISSYLLHNLKKVTIPFMVLHGTADRVTDPLASQDLYKEAASRHKDLRLYDGFLHDLLFEPERDEIGAEIIGWMDGMLRRQAV

SEQ ID NO: 77111 - protein, 654 aa, Setaria italica
  Transcript Sequence Number=SeqID_11137
  Gene Ontology: Mol. function=transcription regulator activity; Cellular component=nucleus; Biological process=regulation of transcription
  Homolog annotation: Hit_ID=Q6S7B0; Match level="QueryCoverage=99%, HitCoverage=99%, E-value=0.0, Identity=63%"; Hit description=TAF5
  Pfam annotation: Domain name=TFIID_90kDa; Domain location=33-179; Score=171.7; E_value=2.2e-48; Accession=PF04494.7; Description=WD40 associated region in TFIID subun
  Pfam annotation: Domain name=WD40; Domain location=326-363; Score =21.4; E_value=0.0039; Accession=PF00400.24; Description=WD domain, G- beta repeat
  Pfam annotation: Domain name=WD40; Domain location=394-432; Score =47.1; E_value=6.6e-11; Accession=PF00400.24; Description=WD domain, G-beta repeat
  Pfam annotation: Domain name=WD40; Domain location=436-474; Score =41.9; E_value=2.5e-09; Accession=PF00400.24; Description=WD domain, G-beta repeat
  Pfam annotation: Domain name=WD40; Domain location=478-516; Score =50.8; E_value=5.1e-12; Accession=PF00400.24; Description=WD domain, G-beta repeat
  Pfam annotation: Domain name=WD40; Domain location=520-558; Score =48.5; E_value=2.6e-11; Accession=PF00400.24; Description=WD domain, G-beta repeat
  Pfam annotation: Domain name=WD40; Domain location=562-600; Score =48.4; E_value=2.8e-11; Accession=PF00400.24; Description=WD domain, G-beta repeat
  Pfam module annotation: Pfam domain module=TFIID_90kDa::WD40::WD40::WD 40::WD40::WD40::WD40; Domain location=33-179::326-363::394-432::436 -474::478-516::520-558::562-600
MEDEEMEKKVQQYLQRKGFRLTELALQEERNRLSTSVISDVALERSDNDPARYHDGYSKLRTWAYSSLDQYKHELLRVLYPVFIHCFMDLVAEGHMQEARSFFHTFREDHEVMHSRDLQKLEGVLSPSHLEEMELARSLRQNKFKIKMCEYSYQLLLQYLQKTQAFVVLGVINQHITFEVSPGQPSLISDDADVVALIGTSKDLAKQINQKEVHWGLLEDSVEERMEKALAESDKIEAESKDAEAEDNKKRNAEGGKQGASNKKTKKDKLVGATGKNVRTETSMVSVAPRVKPELTLPTTPIEVEQSILEDLRNRAQLNSMALPSVSFYTFLNTHNGLNCSSISHDGSLVVGGFSDSSVKVWDMSKIGQSGKTSSSQGETGSQGVRVSTVDEGKRPYTLFQGHSGPVYSAAFSPFGDFLLSSSSDSTIRLWSTKLNANLVCYKGHNYPVWDVQFSPVGHYFASASHDRTARIWSMDKIQPLRIMAGHLSDVDCVQWHVNCNYIATGSSDKTVRLWDVQTGECIRMFIGHRSMVLSLAMSPDGRYMASGDEDGTIMMWDLSTGRCVSPLLGHGSCVWTLAFSCEGAMLASGSADCTVKLWDVASSTKALKTEDTKGGSANRLRLLKALPTKSTPVYSLRFSRRNLLFASGALSLS

SEQ ID NO: 77112 - protein, 250 aa, Setaria italica
  Transcript Sequence Number=SeqID_11138
  Gene Ontology: Mol. function=nucleotide binding; Biological process =defense response
FLNVQTEALLKKISGETASATVNSGSLADLPNLANASLYGFEDYHGVDIGVVKAVRVWYTAAGGEMPVEITLEESDTRLGFAISRTEEGFIYVSSVMEDDGDLQLPSTRSGLRDLYREAKRASKLLIISRVSGHKVLPWMVSTSGAIRCFDTVSLSQKLSLHRHALRPIFLHVFMWDGNSDAKARPGREPCPLPLPLPSPAFDELPRQNSFAHVEQRVQTSSAAATRHERDTAGDVSFRFHNFSLPNNWV

SEQ ID NO: 77113 - protein, 387 aa, Setaria italica
  Transcript Sequence Number=SeqID_11139
  Gene Ontology: Mol. function=receptor activity; Cellular component =chloroplast
  Homolog annotation: Hit_ID=B6TVL4; Match level="QueryCoverage=86%, HitCoverage=84%, E-value=1e-134, Identity=77%"; Hit description =Calcium sensing receptor
  Subcellular localization annotation: CTP_CleavageSite=19; ConfidenceScore=5.62e-01
MAPMSASATLAPLAPPPPKATARSPARRAPANAASIAGSAALLTLMPAAPAAALSKEDVADSLTKVVDTVDQAIGVGGKVAEQVSGVVKALGEAAKPALPVLKSATDEAVKLAAPVVSSASKQATEALQGAGVDPAPVLTAAKTAAEQGTKVIDAAKPVASATVETITSLAPGDYVVAAGAAFLAYLLLPPVWSLVSFTLRGYKGELTPAQALDKVTTKDYVLIDVRTDKDKAKAGVPQLPSNAKNKLISVPLEELPSKLKGMVRSAKKAEAEITALKISYLKKIGKGSNVIIMDSYNDISKTVAKTLNSVGFKNCWVMAGGFSGRKGWAQSRLGTDSFNLSVVEVVTPSRVIPAAAGRIGTTAGRIGTTSSASRATSRKLLPGSAD

SEQ ID NO: 77114 - protein, 288 aa, Setaria italica
  Transcript Sequence Number=SeqID_11140
  Gene Ontology: Mol. function=hydrolase activity
  Homolog annotation: Hit_ID=B6TCI4; Match level="QueryCoverage=97%, HitCoverage=80%, E-value=1e-151, Identity=89%"; Hit description =Tartrate-resistant acid phosphatase type 5
  Pfam annotation: Domain name=Metallophos; Domain location=20-229; Score=82.9; E_value=1.1e-21; Accession=PF00149.20; Description =Calcineurin-like phosphoesterase
APAGAELTRVEHPPKTEGSLNILAVGDWGRRGQYNQTLVAEQMGLVGEKLDIDFVISTGDNIYDDGIANTSDPLFKECFTNIYTAESLQTPWYIVLGNHDYTGNALAQQDPAIREVDSRYLSIAKSFIVNSEIADFFLVDTSPFYLKYWNSSKYDWRNVSPRDTYIETLLKDLDDALTLSEAPWKIVVGHHPISSGCEHGNTTELQQLLRPILEARGVDMYVNGHDHCLQHISSRSSPVQFMTSGGGSKAWAGKFKTTSDKIEFIYDGQGFLSMQLSKTEAHLVFYDV

SEQ ID NO: 77115 - protein, 83 aa, Setaria italica
  misc_feature (62)..(62): Xaa can be any naturally occurring amino acid
  Transcript Sequence Number=SeqID_11141
VRGLLGELAMVEDEIFYLEKKVEDLRLRLRREQRWTDQCIQQQQQQQQQSWPQSRQPRHSVXGESVQLQGAQQLPKLPCPSSD

SEQ ID NO: 77116 - protein, 86 aa, Setaria italica
  misc_feature (18)..(18): Xaa can be any naturally occurring amino acid
  Transcript Sequence Number=SeqID_11142
  Homolog annotation: Hit_ID=B6TY52; Match level="QueryCoverage=93%, HitCoverage=17%, E-value=7e-30, Identity=76%"; Hit description =Cytokinin-O-glucosyltransferase 2
MAPMDATFLSWNYMGNRXKKRMVFHYLTTSAWAADAKADVLLCNTFADLEPDIFTQHSPASILPIGPLRTWQRSTTTSEALGPEPG

SEQ ID NO: 77117 - protein, 74 aa, Setaria italica
  Transcript Sequence Number=SeqID_11143
PRRRCLTECHDDWEDEDDCDHDQLEVVSLVRRRWKDDDNDDDDVCRCRDCGRRKGLESYYSGEDAYSGQRRERR

SEQ ID NO: 77118 - protein, 370 aa, Setaria italica
  Transcript Sequence Number=SeqID_11144
  Gene Ontology: Mol. function=hydrolase activity
RRADQRKPGGGSARRVVKIGRGWKDDDNDDDDVCRCRDCGRRKGLESYYSGEDAYSGQRRERRDVDEDRRSFRDSDRRRQQQREYHDDEDDLDLKRRRRRWEGRDKRDFDFDDAVDTRTVETRRYRGDGREYDRRRERRGFDSDDMVDVRRADRHAEDVQRFDQRSESRDFKIDDKVDLRREGRRLSNDDHRYVSRHERSEDTDREDISLLRSRRRNNEEIDYDEQDLAERRYYSGGRSQKSARASSFHEDDSKRASSSRSTVDARRARHEENSSSRVRWHDNVDQRTEQTSEERKRRHSVGWSNDERDTHDYDDARFVRITDARTSMQDVKVITEDDTKLTSSSKKASILKHSSNVDQQAAVHKDESRK

SEQ ID NO: 77119 - protein, 818 aa, Setaria italica
  misc_feature (691)..(691): Xaa can be any naturally occurring amino acid
  Transcript Sequence Number=SeqID_11145
  Gene Ontology: Mol. function=hydrolase activity
QCRPRTEQTSEERKRRHSVGWSNDERDTHDYDDARFVRITDARTSMQDVKVITEDDTKLTSSSKKASILKHSSNVDQQAAVHKDESRKSSQKIMDISEVQDNRTERGSRSQNYHQEDRRNYIENMSSSVQNSANMVSDSRRQVDQHNEVNQNLVSLTESSKHSENLINVTTDSTHNVSRASHSQRNYDEVNQADIDDRSTSLQNIIHVTRDKKRIVNQQIIHETDIDMQNITQVDVSKIRASDTSTSRSSQSHSETKSDVNSTSNMSFINSTRSQEKEVYQNKISASNSAMVRGSQSHLETGLYDQFHSSSSANIADNTKKSQEQVELNIGNASNVVVASTSGSHLDDQFQATSAVNTIGSMREQIDHSNIHASDATVASSSQGLVTRNGNQVHRTSAAHWPREKQGKNDWQIIQVSSTERNDEMGSKFSESSHDSRYRMVRSEDTHQNMDLIWQQADTSRISDDKDTTGLLLESTEEGSSMVNVDMAQGAAIMGSNEQEVRSETTAGSIMPSSSSAGQPVKESMLESAARLEKASTFHVGRFVDELQKGVSDAETTSTKKNEKSMVEGTTRSSSRSRMKGPADEMWDVHSTSSQETFKTADKEEGSSADGATNSASQTPKNESALARKVHKSLWAYVADIIRLGWIQRGDSPDSSDKSVKKSSSSNSQSTEGWLSSQERDNDGTRKKIKXKDQQLIKSHSGESEPGVASTSEEGYFNSSTQGLQISETVIEPQLGRSEGDLLARSSKDDLHISRERIKQSDVGESPKRNTRDDSMPTLVDVTIGHLPEHKTATSSSITAKDSGEFNTGKGMLADSSS

SEQ ID NO: 77120 - protein, 426 aa, Setaria italica
  Transcript Sequence Number=SeqID_11146
  Gene Ontology: Mol. function=hydrolase activity
  Homolog annotation: Hit_ID=C1MPQ9; Match level="QueryCoverage=35%, HitCoverage=84%, E-value=2e-32, Identity=47%"; Hit description =Cytidine/deoxycytidylate deaminase family protein
  Pfam annotation: Domain name=dCMP_cyt_deam_1; Domain location=222 -323; Score=145.5; E_value=1.7e-40; Accession=PF00383.14; Description= Cytidine and deoxycytidylate deaminas
FKFFTEEGYFNSSTQGLQISETVIEPQLGRSEGDLLARSSKDDLHISRERIKQSDVGESPKRNTRDDSMPTLVDVTIGHLPEHKTATSSSITAKDSGEFNTGKGMLADSSSVAISATEAGRSGDGADWMNDPSGAITPYRHPQTQAAMPHESTSTGILEPPAVRVGGIRFEEKNVVQEAPEIIKTGGKDAELKRRMFQRNKQVLKETFDEWEEAYQRDAEQRKADELFMREALLEAQRAADIWEVPVGAVLVQNGEIIARGCNLVEDLRDSTAHAEIVCIREASNKLKTWRLADTTLYVTLEPCAMCAGAILQARIDTVVWGAPNKLLGADGSWVRLFPGDGQTSTLDSANQSQAAGPIHPFHPKITIRRGVLSAECSEIMQQFFQLRRRKKQKPQSPPRAHHQGHHHPVKFFSKMHHMFGTIFCL

SEQ ID NO: 77121 - protein, 79 aa, Setaria italica
  Transcript Sequence Number=SeqID_11147
  Gene Ontology: Mol. function=transferase activity; Cellular component= membrane
  Homolog annotation: Hit_ID=Q9ZUV3; Match level="QueryCoverage=100%, HitCoverage=17%, E-value=9e-27, Identity=64%"; Hit description =Putative glucuronyltransferase
ARGLLAEAVDLVRSQMPYWNRSAGADHVFVASHDFGACFHPMEDVAIADGIPAFLKRSILLQTFGVQGHHVCQEVEHVV

SEQ ID NO: 77122 - protein, 290 aa, Setaria italica
  Transcript Sequence Number=SeqID_11148
  Gene Ontology: Mol. function=actin binding; Cellular component =integral to membrane; Biological process=actin cytoskeleton organization and biogenesis
  Homolog annotation: Hit_ID=Q0D519; Match level="QueryCoverage=92%, HitCoverage=34%, E-value=1e-125, Identity=82%"; Hit description =Formin-like protein 13
  Pfam annotation: Domain name=FH2; Domain location=1-240; Score=51.7; E_value=2.7e-12; Accession=PF02181.15; Description=Formin Homology 2 Domain
RVDALLYRANFDTEVNYLKNSFGTMEAACADLRSSKLFLKLLDAVLKTGNRMNDGTNRGEARAFKLDTLLKLADIKSTDGNTTVLHFVVQEIIRSEGFSSDQTAVVNPVSTSKEQFKKDGLKVLAGLSSELSNVKRAATLEMDTLIGNVSRLETDLEKVKLIMQLKETCPNQGASEKFFEAMDAFLGRSRVEIESVKTAGESALQRVKETTEYFHGDATKEEPHPLRIFMVVSDFLSTLDRVCRDVGRTPERVMMGSGKSFRVSAGTSLPPRRYEPRREPSSSEEDSSSS

SEQ ID NO: 77123 - protein, 426 aa, Setaria italica
  Transcript Sequence Number=SeqID_11149
  Gene Ontology: Mol. function=RNA binding; Cellular component =ribonucleoprotein complex; Biological process=RNA processing
  Homolog annotation: Hit_ID=B9R8D8; Match level="QueryCoverage=27%, HitCoverage=25%, E-value=6e-19, Identity=43%"; Hit description=Lupus la ribonucleoprotein, putative
  Pfam annotation: Domain name=La; Domain location=345-404; Score =102.6; E_value=1.4e-27; Accession=PF05383.9; Description=La domain
GIIGGDASWPALAESARAWPKSASSDSLKSLSDGSVPSQQEDSTASSVTPAHPVVEVNPIPTGSNPTSMPPPNATAAASSQRNGSATQPNPVRRSGSNSGNNGGGSRGNGSNGGRRAANSSGGDGSSGSGGDGHWNDGSLVTGSGCNSSNGNGSSNLSDNVPGGGSSGNVNEGSRSAPGNNQWNHNIRGVGVSSSNGTGSGDGNNTNSGGSSNHWNNNPRNSSGSNNGVGGRGGYRGRRDHERGGNFSPRNFPRIPVMPYQQQQQQPPGAYQPGPFHRPPPPHAAHFMVPQHFYVPPFPYSADVQHYPVYLPPVEQFQNMHLVRPAMQPAWVPPPQDQPNFQDDIRNQIEFYFSTNNLCHDTFLRRHMNDQGWVPIDLILGFNRMRAFTGLVDTNYILDAIRGSDILEVQGNNVRRRNDWFEWLLH

SEQ ID NO: 77124 - protein, 56 aa, Setaria italica
  Transcript Sequence Number=SeqID_11150
LVTFTISFIMFFHRMRAFTGLVDTNYILDAIRGSDILEVQGNNVRRRNDWFEWLLH

SEQ ID NO: 77125 - protein, 71 aa, Setaria italica
  misc_feature (52)..(52): Xaa can be any naturally occurring amino acid
  Transcript Sequence Number=SeqID_11151
  Gene Ontology: Mol. function=nucleic acid binding
  Homolog annotation: Hit_ID=B4FR03; Match level="QueryCoverage=57%, HitCoverage=28%, E-value=3e-14, Identity=95%"; Hit description=OB -fold nucleic acid binding domain containing protein
  Subcellular localization annotation: CTP_CleavageSite=4; ConfidenceScore=5.40e-01
MSTAAAQGGDKPALRKPVFTKVDQLRPGTNGHTLTVKVVSAHPRPGRARPGXAPAPASSRAPRIAECLGRG

SEQ ID NO: 77126 - protein, 146 aa, Setaria italica
  Transcript Sequence Number=SeqID_11152
EMMSLSPRPGDDYYDNGALPAPLPQLSFQFVGAPTPLESIDLSSFKRSPRDIELKGDETSFRKPVMAETRISWREGLVSRMFDIGDLDCCKWISDDEDSPVLQFNDEALPDGTNSQPGGDQQEASGFGSVEFSCISDELNNDSSKA

SEQ ID NO: 77127 - protein, 142 aa, Setaria italica
  Transcript Sequence Number=SeqID_11153
  Gene Ontology: Mol. function=metal ion binding; Cellular component =integral to membrane; Biological process=ubiquitin-dependent protein catabolic process
  Homolog annotation: Hit_ID=B6SXA5; Match level="QueryCoverage=93%, HitCoverage=54%, E-value=7e-50, Identity=76%"; Hit description=RING -H2 finger protein ATL2K
  Pfam annotation: Domain name=PHD; Domain location=39-84; Score=-3.8; E_value=0.069; Accession=PF00628.21; Description=PHD-finger
  Pfam annotation: Domain name=zf-C3HC4; Domain location=40-81; Score =34.1; E_value=5.7e-07; Accession=PF00097.17; Description=Zinc finger, C3HC4 type (RING finger)
  Pfam module annotation: Pfam domain module=PHD::zf-C3HC4; Domain location=39-84::40-81
LPTTTAAAAKCGLDPAAIAALPTAVYGGEAGGEPGACTECAICLGNVQEGEVVRALPACGHVFHVPCVDTWLASSSSCPVCRAEVEPPPMEEGAARLVQEKLQDAVKEEAGSCSSTPERGISACASLMKMLSRERPAPREAQ

SEQ ID NO: 77128 - protein, 86 aa, Setaria italica
  misc_feature (14)..(14): Xaa can be any naturally occurring amino acid
  Transcript Sequence Number=SeqID_11154
MGLPLLAFVAARGXLMQVFNLSAPHDLRLPIARHLPEVCAVLFGVLASHAAWVHEALERGAVAWRHRGNSDALDDYVLRAMLSISD

SEQ ID NO: 77129 - protein, 131 aa, Setaria italica
  misc_feature (106)..(106): Xaa can be any naturally occurring amino acid
  Transcript Sequence Number=SeqID_11155
  Gene Ontology: Mol. function=acid-amino acid ligase activity; Cellular component=intracellular; Biological process=ubiquitin -dependent protein catabolic process
  Homolog annotation: Hit_ID=B6TEQ7; Match level="QueryCoverage=97%, HitCoverage=28%, E-value=1e-64, Identity=93%"; Hit description =Uncharacterized ACR, COG1565 family protein
MGLAKCILDYMMLNAPPKVYNDMKYISVEISSSLAAKQLETVGEVQSHLSKFTVEHRDATNRLGWGRKDPRPCWVLMLEVLDNLPHDLVYSPDQVSPWMEVWIEKXGSSQASEVYKPLQDPLISRCVEIIG

SEQ ID NO: 77130 - protein, 211 aa, Setaria italica
  Transcript Sequence Number=SeqID_11156
  Gene Ontology: Mol. function=oxidoreductase activity, acting on the CH-CH group of donors; Cellular component=intracellular; Biological process=metabolic process
  Homolog annotation: Hit_ID=B6TEQ7; Match level="QueryCoverage=91%, HitCoverage=43%, E-value=1e-104, Identity=92%"; Hit description =Uncharacterized ACR, COG1565 family protein
RPTNKDPLISRCVEIIGMNEEKASVSEKLAFAAKGVLSKVFPKPRRAWLPTGCLKLMDTLHQALPSMSLVASDFSYLPDVSIPGDRAPLVSSKKDGKTSDHCNYLDAQGDADIFFPTDFRLLEQIDHHCSGFSKEQKNPGAFKPVKKRRTIILDTAAFMEEFGLPLKTRTKDGYNPLLDDFKNTKFYLSVPTHKASSHPLLLRQVRRSGKT

SEQ ID NO: 77131 - protein, 287 aa, Setaria italica
  misc_feature (275)..(275): Xaa can be any naturally occurring amino acid
  Transcript Sequence Number=SeqID_11157
  Gene Ontology: Cellular component=nucleus; Biological process =ribosome biogenesis
  Homolog annotation: Hit_ID=B9SKC1; Match level="QueryCoverage=86%, HitCoverage=84%, E-value=4e-73, Identity=55%"; Hit description=rRNA -processing protein EBP2, putative
  Pfam annotation: Domain name=Ebp2; Domain location=20-286; Score =372.3; E_value=8.6e-109; Accession=PF05890.4; Description=Eukaryotic rRNA processing protein EBP2
MVGLSSEEALAHDEVVMDDVDSDVEESDSEDDSGEEAQATPSDKAIYNKEAILEKLEDIAWPKNVDWRHKLTIEHDHGEKVDVNDDLARELAFYTQALDGTRQAFEKLQSMKVRFLRPTDYYAEMVKTDVHMHKIKGRLLSEKRRIEEAEERKKAREAKKIAKEVQAEKNKQRAKDKKEQIESVKKWRKQRQQGGFAKGNDDVPDLNFEGEEGFKQSKKKRPGVSPGDRSGGLAKRGKEGKNRRSRDAKFGHGGRKGLKKQNTADTTNDFRSFNXGGQSQNKKRKRS

SEQ ID NO: 77132 - protein, 51 aa, Setaria italica
  Transcript Sequence Number=SeqID_11158
MAMATQASAATRHLLAAAPSPLRAAAEEAPAAATQEAPKGFVPPQLDPNTP

SEQ ID NO: 77133 - protein, 53 aa, Setaria italica
  Transcript Sequence Number=SeqID_11159
  Subcellular localization annotation: CTP_CleavageSite=44; ConfidenceScore=5.25e-01
MAMATQASAATRHLLAAAWSPAAKAPRSSQLALPSSSRGPAPLRAAAEDAPAA

SEQ ID NO: 77134 - protein, 104 aa, Setaria italica
  Transcript Sequence Number=SeqID_11160
  Subcellular localization annotation: CTP_CleavageSite=60; ConfidenceScore=5.28e-01
MGLPQIPMVKEEVPTTLSTPATSPHSSVSGPCNLDKLPVGCSKSAFPPSTSDFKRKSALSASNGFNSHFRTSHATDGPAGCQRLNPESRDPSYRSCHKFRSTVQ

SEQ ID NO: 77135 - protein, 211 aa, Setaria italica
  misc_feature (11)..(11): Xaa can be any naturally occurring amino acid
  misc_feature (29)..(29): Xaa can be any naturally occurring amino acid
  misc_feature (186)..(186): Xaa can be any naturally occurring amino acid
  Transcript Sequence Number=SeqID_11161
  Homolog annotation: Hit_ID=Q8L557; Match level="QueryCoverage=49%, HitCoverage=51%, E-value=9e-38, Identity=67%"; Hit description=EMB514
  Pfam annotation: Domain name=GRP; Domain location=136-208; Score= -19.5; E_value=0.0083; Accession=PF07172.3; Description=Glycine rich protein family
GQKREREEGGXDPAAEGGEAAAEEEAAAXAKKPKVEGDTKEEKEEETKDDKEGVEGKGEEAKGKPAKLGPKEFATAVEMFDYFFALLHSWAPQLEFNKYEQMVLEDLLKKGHAEPAKKIGPGIEAFEIRNHPVWQSRCFFVRRVDGSADDFSFRKCVDNILPLPEDMKIGNSKKSGGHHKGGGGGXGGGRGGGGRGGWRGGRGRGRRGGLG

SEQ ID NO: 77136 - protein, 66 aa, Setaria italica
  Transcript Sequence Number=SeqID_11162
PRPILTKLNQCKVLVFSWVAKDILICYTHIWLAAQGDKMTLWVPNPQPRRCAAASPPSSRCRSCSR

SEQ ID NO: 77137 - protein, 145 aa, Setaria italica
  Transcript Sequence Number=SeqID_11163
  Gene Ontology: Mol. function=exonuclease activity; Cellular component= intracellular; Biological process=nucleobase, nucleoside, nucleotide and nucleic acid metabolic process
  Homolog annotation: Hit_ID=Q7XVQ9; Match level="QueryCoverage=97%, HitCoverage=56%, E-value=7e-68, Identity=86%"; Hit description =OSJNBa0079M09.9 protein
  Pfam annotation: Domain name=Exonuc_X-T; Domain location=28-145; Score=9.4; E_value=0.00059; Accession=PF00929.16; Description =Exonuclease
KSSQNKEMIVNYDGENLAPSSSDYRMPLVWIDLEMTGLDITKDRILEIACIITDGKLTKRIEGPDLVIRQSKECLDGMNEWCQVHHVASGLAEQVLKSEISEHDAEKQVLEFIRKYIGSATPLIAGNSVYMDLLFLKKYMPQLAG

SEQ ID NO: 77138 - protein, 167 aa, Setaria italica
  misc_feature (96)..(96): Xaa can be any naturally occurring amino acid
  Transcript Sequence Number=SeqID_11164
  Gene Ontology: Mol. function=exonuclease activity; Cellular component= intracellular; Biological process=nucleobase, nucleoside, nucleotide and nucleic acid metabolic process
  Homolog annotation: Hit_ID=Q7XVQ9; Match level="QueryCoverage=100%, HitCoverage=71%, E-value=3e-68, Identity=76%"; Hit description =OSJNBa0079M09.9 protein
MSNLANMFAVLNLDAEDDREEAEKPTSSKPEADAAPRKPEKSSQNKEMIVNYDGENLAPSSSDYRMPLVWIDLEMTGLDITKDRILEIACIITDGXPDLVIRQSKECLDGMNEWCQVHHVASGLAEQVLKSEISEHDAEKQVLEFIRKYIGSATPLIAGNSVYMDLL

SEQ ID NO: 77139 - protein, 159 aa, Setaria italica
  Transcript Sequence Number=SeqID_11165
  Gene Ontology: Mol. function=exonuclease activity; Cellular component= intracellular; Biological process=nucleobase, nucleoside, nucleotide and nucleic acid metabolic process
  Homolog annotation: Hit_ID=Q7XVQ9; Match level="QueryCoverage=100%, HitCoverage=63%, E-value=2e-81, Identity=89%"; Hit description =OSJNBa0079M09.9 protein
  Pfam annotation: Domain name=Exonuc_X-T; Domain location=1-146; Score= 47.4; E_value=5.7e-11; Accession=PF00929.16; Description=Exonuclease
EIACIITDGKLTKRIEGPDLVIRQSKECLDGMNEWCQVHHVASGLAEQVLKSEISEHDAEKQVLEFIRKYIGSATPLIAGNSVYMDLLFLKKYMPQLAGIFSHVIVDVSSITALCSRWFPKERKAAPRKEKNHRALDDIRESIKELQYYKENIFKSRRS

SEQ ID NO: 77140 - protein, 113 aa, Setaria italica
  Transcript Sequence Number=SeqID_11166
GFRYERARSRRTTASSELDHREMATDMAVDLEKGTEETMGALDAQLPVPAMAGGGEKELLSGDLRRLLPAKHMPDLEKGMDTHAGQVQAMAEDEEQEHLILKDLRYHQVEGVQ

SEQ ID NO: 77141 - protein, 166 aa, Setaria italica
  Transcript Sequence Number=SeqID_11167
CGCATRHALITTFRVTGVTDEFGCFVPNGVDILHSTCRQIDMLKSNASGDTCYDTFCFLQKCQDRGAKFHPSDLSETRQFYCPQVEKFSEMLTCCREFLNGKPEPAPGVVALDFCKMATRSDFYFICQADQCSLLYQISTSGGKLTCGDEALEAVLRLDTVRFGDI

SEQ ID NO: 77142 - protein, 109 aa, Setaria italica
  misc_feature (69)..(69): Xaa can be any naturally occurring amino acid
  Transcript Sequence Number=SeqID_11168
MLCAVWINMHQLCGCATRHALITTFRVTGVTDEFGCFVPNGVDILHSTCRQIDMLKSNASGDTCYDTFXFLQKCQDRGAKFHPSDLSETRQFYCPQVEKILRNAYLLQV

SEQ ID NO: 77143 - protein, 179 aa, Setaria italica
  Transcript Sequence Number=SeqID_11169
  Gene Ontology: Mol. function=binding; Cellular component=integral to membrane; Biological process=transport
  Homolog annotation: Hit_ID=Q5JJW1; Match level="QueryCoverage=96%, HitCoverage=69%, E-value=2e-84, Identity=61%"; Hit description =Mitochondrial carrier protein-like
  Pfam annotation: Domain name=Mito_carr; Domain location=1-66; Score =11.6; E_value=0.00027; Accession=PF00153.19; Description =Mitochondrial carrier protein
  Pfam annotation: Domain name=Mito_carr; Domain location=72-162; Score= 86.1; E_value=1.3e-22; Accession=PF00153.19; Description =Mitochondrial carrier protein
  Pfam module annotation: Pfam domain module=Mito_carr::Mito_carr; Domain location=1-66::72-162
KELITQRLQSGAATGRSWQVLLQIIQADGFFGLYAGYAATLLRNLPAGVLSYSSFEYLKAFTLRTRGKDRLTPGESVLCGALAGAISAALTTPLDVVKTRLMTRVGTEGSRTVLGTMRGVVAEEGLVGLYRGIGPRVLHSACFAAIGYCAFETARLAILQLYLEGCQRKAAAQHSTALP

SEQ ID NO: 77144 - protein, 238 aa, Setaria italica
  Transcript Sequence Number=SeqID_11170
  Homolog annotation: Hit_ID=B6TW94; Match level="QueryCoverage=83%, HitCoverage=55%, E-value=1e-21, Identity=35%"; Hit description=F-box domain containing protein
QILPKPTCGRHVSAAAVLCAAGAGCDHLDCHGGPFLVVCLGISATHGGVVDAHVYSSEAGSWGALASVQLGLDSYGRMNCGLVIRDEVYFTLKFSARILKYSLGTNAFSLIGVPVDIQFVLTRTEDDSLGLASVRDSNLYLWSRKDNLEGVAGWVNCRVIKLQAPFSTHDRFATSVIGFAEGVDVILVTANAMFAVELKSGKVTKVGRPGDYYSALPIMGFYTPDCGRRNHRHGLADF

SEQ ID NO: 77145 - protein, 76 aa, Setaria italica
  Transcript Sequence Number=SeqID_11171
IPFTRISGGTPPQSICPYNCVITLAPVGIRDAPTLRCELLPYWGRKGHHQPRTLLFAQLIDLVLQNVAFKNFGSIY

SEQ ID NO: 77146 - protein, 75 aa, Setaria italica
  Transcript Sequence Number=SeqID_11172
GVRWLIYSAWTVFKISTLHYSTRPKILDGSTDCGGVWSYQICQNILIYLQNSRQLLILCLRVTVCSELVSYGVVT

SEQ ID NO: 77147 - protein, 94 aa, Setaria italica
  misc_feature (86)..(86): Xaa can be any naturally occurring amino acid
  Transcript Sequence Number=SeqID_11173
  Homolog annotation: Hit_ID=Q67UH8; Match level="QueryCoverage=94%, HitCoverage=58%, E-value=3e-23, Identity=66%"; Hit description =Mitochondrial transcription termination factor-like
ASNAAPFAVEEYLVATCHLTPAQALKASKVLSHLKSPSRPDAVLAFLSGLGLSDADIAAAVAYDPKLLCSEVERTLAPRLAELRDXGLSPSRSP

SEQ ID NO: 77148 - protein, 51 aa, Setaria italica
  Transcript Sequence Number=SeqID_11174
RSFNLRQLSYPYLYMHIHIRLHAFEYFEKILWFFHVNEIRVSETHLIGFNV

SEQ ID NO: 77149 - protein, 83 aa, Setaria italica
  Transcript Sequence Number=SeqID_11175
  Gene Ontology: Mol. function=protein binding
  Homolog annotation: Hit_ID=Q5QYK5; Match level="QueryCoverage=77%, HitCoverage=42%, E-value=3e-20, Identity=64%"; Hit description =Uncharacterized conserved protein
  Pfam annotation: Domain name=UPF0047; Domain location=10-81; Score =28.9; E_value=1.7e-09; Accession=PF01894.9; Description =Uncharacterised protein family UPF0047
YFAGVCFGCLLTLPIQGHNAPWKHTMEGPDDMPAHIKSSMFGCALTIPITDGRLNMGTWQGIWLCEHRDHASPRKIVITLNGV

SEQ ID NO: 77150 - protein, 82 aa, Setaria italica
  misc_feature (8)..(8): Xaa can be any naturally occurring amino acid
  misc_feature (19)..(19): Xaa can be any naturally occurring amino acid
  Transcript Sequence Number=SeqID_11176
  Subcellular localization annotation: CTP_CleavageSite=40; ConfidenceScore=5.45e-01
QDNLSPTXTGRSGWCLPCXRVSRGSPLQPRTSAHLSLEVRMMLVLERSPSLGLFVGRNRRHLGLTKAPARFLHLDATMPPTL

SEQ ID NO: 77151 - protein, 44 aa, Setaria italica
  Transcript Sequence Number=SeqID_11177
FNRLIIVSSKLRSSNHAYHAASTEILYIEVSIQLIDHSLDSTKI

SEQ ID NO: 77152 - protein, 105 aa, Setaria italica
  Transcript Sequence Number=SeqID_11178
  Homolog annotation: Hit_ID=B6TW33; Match level="QueryCoverage=93%, HitCoverage=40%, E-value=5e-10, Identity=47%"; Hit description=NAC domain-containing protein 18
FFTCNPQRSNDSQDCVVEPGGEWVVCRVFLKNRPRSRPNRDVDGKNPGNRASTAHRAAPLQHRGDAERQQPSSSSCVTGVTDISDQDEVSSSTIRDAPAASQRED

SEQ ID NO: 77153 - protein, 228 aa, Setaria italica
  Transcript Sequence Number=SeqID_11179
  Gene Ontology: Mol. function=DNA binding; Biological process =regulation of transcription
  Homolog annotation: Hit_ID=B6TW33; Match level="QueryCoverage=99%, HitCoverage=92%, E-value=5e-67, Identity=64%"; Hit description=NAC domain-containing protein 18
  Pfam annotation: Domain name=NAM; Domain location=1-122; Score=130.8; E_value=4.2e-36; Accession=PF02365.7; Description=No apical meristem (NAM) protein
PTDEELVVQYLRRKALSRPLPAAVIPVVHDGARLDPWDLPGASEGEGYFFSLRRAPAMGRGGGRRRRAGSGYWKATGKEKPVFLQCGGKRQLLVGVKTALAFHRSEPSSSRTGWVMHEYRLAVPGGAAEQRKNASHDCVVEPGGEWVVCRVFLKNRPRSRPNRDVDGKNPGNRASTAHRAAPLQHRGDAERQQPSSSSCVTGVTDISDQDEVSSSTIRDAPAASQRED

SEQ ID NO: 77154 - protein, 118 aa, Setaria italica
  Transcript Sequence Number=SeqID_11180
  Subcellular localization annotation: CTP_CleavageSite=78; ConfidenceScore=5.21e-01
SMNNNRSCSRRALDIDTPQIISAGKAYTTSNQSPWYPAMAGMASATTSSFSVRSARAPDDGLYYCINRRGRLIMITTRVDRYSSTCSTYLPLFRSFFRLRRGKYTGDSDDHSISPLPA

SEQ ID NO: 77155 - protein, 237 aa, Setaria italica
  Transcript Sequence Number=SeqID_11181
  Gene Ontology: Mol. function=hydrolase activity; Cellular component =endoplasmic reticulum membrane; Biological process=biological_process
  Homolog annotation: Hit_ID=B6TP50; Match level="QueryCoverage=97%, HitCoverage=90%, E-value=1e-102, Identity=81%"; Hit description =Gtk16 protein
  Pfam annotation: Domain name=SNARE_assoc; Domain location=65-186; Score=105.9; E_value=1.4e-28; Accession=PF09335.3; Description=SNARE associated Golgi protein
AVFAAALAGVYVSMPHSDYSFLKLPHNLQELRVLTDHLEGYTSDYTIQVLVGYCAVYIFMQTFMIPGTIFMSLLAGALFGQLGGLALVIFAATAGASSCYFLSKLVGKPLVSSLWPDKLMFFQKQVAKRREKLLNYMLFLRLTPTLPNTFINFASPIVDVPYHIFFLATATGLIPAAYVTVKAGIALSDLRSLNDLYDPKSIAVLFLIGLVSVTPTLLGKNETRGKAPADLAASTTN

SEQ ID NO: 77156 - protein, 47 aa, Setaria italica
  Transcript Sequence Number=SeqID_11182
NMFTCMIQYISMRQHDTLDITFLLEGGENSNLKPQLVYAHQHTPPMI

SEQ ID NO: 77157 - protein, 48 aa, Setaria italica
  Transcript Sequence Number=SeqID_11183
MEGLIPFVIDAIRRSNERSGYRSVSSDGGSSRGGGSRRHLIDYYELPD

SEQ ID NO: 77158 - protein, 230 aa, Setaria italica
  Transcript Sequence Number=SeqID_11184
  Pfam annotation: Domain name=DUF1683; Domain location=64-156; Score =130.1; E_value=7.1e-36; Accession=PF07919.4; Description=Protein of unknown function (DUF1683)
SNMFEVDYRNCTEVPLRLHSMTIEPDDDGKQLCSVQQVSGISNGHAVIAPSEEYKGIFSVNPRASNSNFHLGEICLNWSRDSRLGEAQERRVIMKQRLPEVSVEEPPLVVSMECPPYVILGIPFTFYVKIHNSTPLLQEIKYSLVDSQNFVFSGAHNHAAFILPKSEHIVSHKLVPLGSGSQQLPKITVTSVRYSAALTPSASAATVFVYPSEPKFNLETSCSASDQCVS

SEQ ID NO: 77159 - protein, 104 aa, Setaria italica
  Transcript Sequence Number=SeqID_11185
  Gene Ontology: Mol. function=catalytic activity; Cellular component =chloroplast; Biological process=metabolic process
  Homolog annotation: Hit_ID=B9S0Z5; Match level="QueryCoverage=68%, HitCoverage=17%, E-value=3e-29, Identity=85%"; Hit description =Pyruvate dehydrogenase, putative
RGGRGRLVARAGAAVAAKADAPSGAAAPKSDGHEVLLFEALREALIEDMKLDPTVCVFGEDVGHYGGSYKVTKGLADMFGDLRVLDTPIAENSFTGMGVGAAMK

SEQ ID NO: 77160 - protein, 77 aa, Setaria italica
  Transcript Sequence Number=SeqID_11186
AVPSIVWFQDLCTYFCAMPVCTQALGIWVVGSRGFPFLWFPLLFFFDLLVISTAPISICRLPQGSRVLSKLDLMLSQ

SEQ ID NO: 77161 - protein, 59 aa, Setaria italica
  Transcript Sequence Number=SeqID_11187
  Subcellular localization annotation: CTP_CleavageSite=38; ConfidenceScore=5.45e-01
SGWCGSTLPSHDFSVLSLGPGLPFLAATTGRVALPVVRRATGASPATNIRQGRSRALPH

SEQ ID NO: 77162 - protein, 57 aa, Setaria italica
  Transcript Sequence Number=SeqID_11188
  Gene Ontology: Mol. function=transporter activity; Cellular component= mitochondrial inner membrane; Biological process=transport
  Homolog annotation: Hit_ID=B4FSA7; Match level="QueryCoverage=92%, HitCoverage=13%, E-value=8e-11, Identity=67%"; Hit description=ADP ,ATP carrier protein
  Pfam annotation: Domain name=Mito_carr; Domain location=1-51; Score= -10.2; E_value=0.029; Accession=PF00153.19; Description=Mitochondrial carrier protein
TLGIDFTKQIVAKEGRKSLFKGAGANILRAVAGAGVLAGYDKLQVIMFGKTYGSGGA

SEQ ID NO: 77163 - protein, 112 aa, Setaria italica
  Transcript Sequence Number=SeqID_11189
  Subcellular localization annotation: CTP_CleavageSite=81; ConfidenceScore=5.64e-01
CRLQPPHHRRPQSVHAARRSPPSPPSLGPCAALHAPLPSCSSSPAGATAPSLPTTSLFSLSRPRSSFLAATTGRVALPVVRRATGASPATNIRQGSLYPRLNCGWYWRYKRS

SEQ ID NO: 77164 - protein, 209 aa, Setaria italica
  Transcript Sequence Number=SeqID_11190
  Gene Ontology: Mol. function=RNA polymerase II transcription mediator activity; Cellular component=mediator complex; Biological process =regulation of transcription, DNA-dependent
  Homolog annotation: Hit_ID=B6TEG4; Match level="QueryCoverage=87%, HitCoverage=88%, E-value=5e-68, Identity=71%"; Hit description =Mediator complex subunit SOH1
  Pfam annotation: Domain name=SOH1; Domain location=24-126; Score =240.5; E_value=4.1e-69; Accession=PF05669.4; Description=SOH1
MSYTGSAPVSDVESAPGEGEKGEKPPPRFELELEFVQCLANPTYIHYLAQNRYFEDEAFIGYLKYLKYWQRPEYIKYIMYPHCLFFLELLQNANFRNAMAHPASKELAHRQQYFFWKNYRNNRMKHILPRPPPEPAPAAPSQGPAVMPLPPSVPTPVAPPVPAPASSMPAVATGGASAMSPMQFVGTPGTNMPKTDMRNAMGNRKRKMG

SEQ ID NO: 77165 - protein, 86 aa, Setaria italica
  Transcript Sequence Number=SeqID_11191
  Gene Ontology: Mol. function=transporter activity; Cellular component= mitochondrial inner membrane; Biological process=transport
  Homolog annotation: Hit_ID=B4FSA7; Match level="QueryCoverage=100%, HitCoverage=22%, E-value=6e-31, Identity=75%"; Hit description=ADP ,ATP carrier protein
  Subcellular localization annotation: CTP_CleavageSite=60; ConfidenceScore=5.09e-01
MEHELRSSSGIQRVHGQPVLLSRISSYSAMNNPVFSNVHSAYNVPLRSYHGMDATVGLPSVMTSSPFFASAPKEKSFSGFMVDFLM

SEQ ID NO: 77166 - protein, 412 aa, Setaria italica
  Transcript Sequence Number=SeqID_11192
  Pfam annotation: Domain name=PWWP; Domain location=29-100; Score=6.2; E_value=0.0041; Accession=PF00855.9; Description=PWWP domain
MVNESVQKDRDVDGSPPTSRVPEIKLRHNFCLGDVTWVKLDGSSWWPAQVIDESCVGSKPKKKDKYDCLVRLYGTCQYLYVDPWKSNSEFEMMLKQENKSAMETFREVIEKELSCDNSPSVYDEEAVNSKGGSTKGTSKKNSSRKVRKQGLKPQYSEEEDQDVGSTETTGVTARKRKGGRLRQSSSTYDAIDKASSESSAEGLRNKRQKHGVQSASVDRREGLRRSARSDAKQYLDAAEDSSEPLTDRHAGEDATGASMLDGTSAPHTEIKAMVRDILFKDIIDREHDAEMAYVDEVINGICGATEDIMSGGATASTKGGRGVKQSGSGVEGESSNVRQRRRDEATEDSLQATSPETKKGNTDTTHSREAVVKTPGQLSARQIRIMQSLGLIAPSGSPFGRDRAVATTNQQF

SEQ ID NO: 77167 - protein, 131 aa, Setaria italica
  Transcript Sequence Number=SeqID_11193
  Subcellular localization annotation: CTP_CleavageSite=42; ConfidenceScore=5.62e-01
KSRRSKVSSSSRRRRRRSLSPSHSLSSSSSPSSIARHHSTCSGSASESLESPPPRSQSRDVHKKKGRGRDRERDRKRRKARRSASSSSTSASSGSSRSRSKSKHRKRRTDAGTTRDKIEIDYDNRHASRSE

SEQ ID NO: 77168 - protein, 88 aa, Setaria italica
  Transcript Sequence Number=SeqID_11194
  Gene Ontology: Mol. function=protein binding; Cellular component =ribonucleoprotein complex; Biological process=ribosome biogenesis
  Homolog annotation: Hit_ID=Q6K950; Match level="QueryCoverage=77%, HitCoverage=26%, E-value=6e-30, Identity=94%"; Hit description =Nucleolar RNA-binding Nop10p-like protein
  Pfam annotation: Domain name=Nop10p; Domain location=27-77; Score =89.9; E_value=8.9e-24; Accession=PF04135.4; Description=Nucleolar RNA-binding protein, Nop10p family
RFFSPPLRSSPPPSSGLTPARGFKMYLQYYINEKGDKVYTTKKESPLGVPTQSAHPARFSPDDKYARQRYLLKKRFGLLPTQKPALKY

SEQ ID NO: 77169 - protein, 84 aa, Setaria italica
  Transcript Sequence Number=SeqID_11195
  Gene Ontology: Mol. function=protein binding; Cellular component =ribonucleoprotein complex; Biological process=ribosome biogenesis
  Homolog annotation: Hit_ID=Q6K950; Match level="QueryCoverage=76%, HitCoverage=24%, E-value=2e-29, Identity=96%"; Hit description =Nucleolar RNA-binding Nop10p-like protein
  Pfam annotation: Domain name=Nop10p; Domain location=23-73; Score =89.9; E_value=8.9e-24; Accession=PF04135.4; Description=Nucleolar RNA-binding protein, Nop10p family
KLKGKPPPPSGGGEERSGGEMYLQYYINEKGDKVYTTKKESPLGVPTQSAHPARFSPDDKYARQRYLLKKRFGLLPTQKPALKY

SEQ ID NO: 77170 - protein, 77 aa, Setaria italica
  Transcript Sequence Number=SeqID_11196
  Gene Ontology: Mol. function=protein binding; Cellular component =ribonucleoprotein complex; Biological process=ribosome biogenesis
  Homolog annotation: Hit_ID=Q6K950; Match level="QueryCoverage=88%, HitCoverage=26%, E-value=7e-30, Identity=94%"; Hit description =Nucleolar RNA-binding Nop10p-like protein
  Pfam annotation: Domain name=Nop10p; Domain location=16-66; Score =89.9; E_value=8.9e-24; Accession=PF04135.4; Description=Nucleolar RNA-binding protein, Nop10p family
LCYPSATPARGFKMYLQYYINEKGDKVYTTKKESPLGVPTQSAHPARFSPDDKYARQRYLLKKRFGLLPTQKPALKY

SEQ ID NO: 77171 - protein, 125 aa, Setaria italica
  Transcript Sequence Number=SeqID_11197
  Gene Ontology: Mol. function=nucleic acid binding; Cellular component= cytoplasm; Biological process=multicellular organismal development
  Homolog annotation: Hit_ID=Q851R2; Match level="QueryCoverage=100%, HitCoverage=11%, E-value=2e-58, Identity=85%"; Hit description =Protein argonaute MEL1
VDQKICHPTEFDFYLCSHAGIQGTSRPTHYHVLYDENRFTADALQSLTNNLCYTYARCTRAVSVVPPAYYAHLAAFRARYYVEGESSDGGSTPGSSGQAVAREGPVEVRQLPKIKDNVKDVMFYC

SEQ ID NO: 77172 - protein, 67 aa, Setaria italica
  Transcript Sequence Number=SeqID_11198
KKAHKLIFTIRTHTTNHVCASQRAGRTPSLPARSEGDKKKSQIKGARPAGLYLGCSIPYSHHVYGRL

SEQ ID NO: 77173 - protein, 144 aa, Setaria italica
  Transcript Sequence Number=SeqID_11199
AARRGLGWLRPSRLSRVVPASESGRVGPTCWFRFGNKDAEGAGIYGSQARDDFDRDDVEQYFNYMGMLAVEGTYDKMEALLNQDIHPVDILLMLAASEGDRPKIEELLRAGAKYDVKDVDGRTALDRASDETREFILGFAAKKA

SEQ ID NO: 77174 - protein, 304 aa, Setaria italica
  misc_feature (182)..(182): Xaa can be any naturally occurring amino acid
  misc_feature (240)..(240): Xaa can be any naturally occurring amino acid
  Transcript Sequence Number=SeqID_11200
  Gene Ontology: Mol. function=transferase activity, transferring phosphorus-containing groups; Cellular component=TORC2 complex; Biological process=negative regulation of cell cycle arrest in response to nitrogen starvation
  Homolog annotation: Hit_ID=Q5EFI5; Match level="QueryCoverage=100%, HitCoverage=12%, E-value=1e-156, Identity=91%"; Hit description =Target of rapamycin
  Pfam annotation: Domain name=HEAT; Domain location=140-176; Score =15.9; E_value=0.17; Accession=PF02985.14; Description=HEAT repeat
  Pfam annotation: Domain name=HEAT; Domain location=237-274; Score =13.9; E_value=0.68; Accession=PF02985.14; Description=HEAT repeat
  Pfam module annotation: Pfam domain module=HEAT::HEAT; Domain location=140-176::237-274
LVPYLPAITSHLQDAIAPRRGRPSLEAISCVGSFAKAMGPAMEPHIRSGLLDAMFSAGLSDKLVEALESISMSIPSLLPTIQERLLDCISQALPKSSIRPGASVGRASRSNSLQQLVDSSSPVLVQLALRTLANFNFKGHELLEFARESVILYLEDEDSSTRKAASLCCCKLVAHSLSASSXSQFSSNRSNRMGGAKRRRLVEEIVEKLLIAAVADADVGVRSSVFKALYRNPAFDDFLXQADILTSIFVALNDEEYDVRELAISVAGRLSEKNPAYVLPALRRYLIQLLTYLDQSMDSKCREE

SEQ ID NO: 77175 - protein, 62 aa, Setaria italica
  Transcript Sequence Number=SeqID_11201
ITLSHDIRQQQIYINVIAVSLAVLLCSLSNQEAWRCSMYPASHPWLHSALYLVSRKAIDSHQ

SEQ ID NO: 77176 - protein, 73 aa, Setaria italica
  Transcript Sequence Number=SeqID_11202
MDLLDAGHRHAAPAADMDGAVASALPLAGAVYQPYVSELLSFSIERLHKVRTPTPTPTPPTSPLIGGGCDPVT

SEQ ID NO: 77177 - protein, 56 aa, Setaria italica
  Transcript Sequence Number=SeqID_11203
LSRTSRHMRLYIIINKPIESDTTAVAPKSASNSKKGEKRILRIQVLWLLLMTRNRC

SEQ ID NO: 77178 - protein, 467 aa, Setaria italica
  Transcript Sequence Number=SeqID_11204
  Gene Ontology: Mol. function=ATP-dependent helicase activity; Cellular component=intracellular; Biological process=gene silencing by RNA
  Homolog annotation: Hit_ID=Q8LMR2; Match level="QueryCoverage=100%, HitCoverage=24%, E-value=0.0, Identity=94%"; Hit description =Endoribonuclease Dicer homolog 1
  Pfam annotation: Domain name=PAZ; Domain location=306-464; Score =154.9; E_value=2.3e-43; Accession=PF02170.14; Description=PAZ domain
  Pfam annotation: Domain name=dsRNA_bind; Domain location=1-57; Score =45.3; E_value=2.5e-10; Accession=PF03368.6; Description=Double stranded RNA binding domain
  Pfam module annotation: Pfam domain module=PAZ::dsRNA_bind; Domain location=306-464::1-57
CKLQLPCNAPFEKLEGPICSSIRLAQQAVCLAACKKLHEMGAFTDMLLPDRGSGEGEKTEQNDEGDPLPGTARHREFYPEGVAEILRGEWILSGRDGCQSSQFIKLYMYSVNCVNIGTSKDPFVTQLSNFALIFGNELDAEVLSTTMDLFVARTMITKASLVFRGPIEITESQLVLLKSFHVRLMSIVLDVDVDPSTTPWDPAKAYLFVPVGAEKCMDVLREIDWTLVNSIVNSDAWNNPLQRARPDVYLGTNERTLGGDRREYGFGKLRHGTAFGQKAHPTYGIRGAIADFDVVKASGLLPARDRGHYNDYQNQGKLFMADSCWDAKDLAGMVVTAAHSGKRFYVDSICYNMNAENSFPRKEGYLGPLEYSSYADYYKQKYGVELIYKKQPLIRARGVSYCKNLLSPRFEHSEATNGEFSENLDKTYYVYLPPELCLVHPLPGSLIRGAQRLPSIMRRVESMLLAI

SEQ ID NO: 77179 - protein, 329 aa, Setaria italica
  misc_feature (292)..(292): Xaa can be any naturally occurring amino acid
  misc_feature (320)..(320): Xaa can be any naturally occurring amino acid
  misc_feature (326)..(326): Xaa can be any naturally occurring amino acid
  Transcript Sequence Number=SeqID_11205
  Gene Ontology: Mol. function=transferase activity; Cellular component= chloroplast envelope; Biological process=biosynthetic process
  Homolog annotation: Hit_ID=B6T479; Match level="QueryCoverage=99%, HitCoverage=79%, E-value=1e-153, Identity=77%"; Hit description =Glycosyl transferase, group 1 family protein
  Pfam annotation: Domain name=Glycos_transf_1; Domain location=162 -325; Score=96.7; E_value=8.3e-26; Accession=PF00534.12; Description =Glycosyl transferases group 1
NGEQFIVVTNHEGVPEEFHGAKVIGSWSFPCPMYGKVPLSLALSPRIISEVAKFKPDIIHASSPGIMVFGALAIAKLLSVPLVMSYHTHVPVYIPRYTFSWLVEPMWQVIRFLHRAADLTLVPSAAISKDFETAHVISANRIRLWNKGVDSASFHPRFRSHEMRVRLSDGEPEKPLIIHVGRFGREKNLDFLKIVMDRLPGVRIAFIGDGPYRTELEKMFEGMPAVFTGMMQGEELSQAYASGDVFVMPSESETLGQVVLESMSSGVPVVAARAGGIPDIIPEDQEGKTSFXFTPGDLDDCVGKVQLLLTNREFRDNMGXTARAEXRKV

SEQ ID NO: 77180 - protein, 258 aa, Setaria italica
  misc_feature (19)..(19): Xaa can be any naturally occurring amino acid
  misc_feature (31)..(31): Xaa can be any naturally occurring amino acid
  Transcript Sequence Number=SeqID_11206
  Gene Ontology: Mol. function=transferase activity, transferring glycosyl groups; Cellular component=integral to membrane; Biological process=protein amino acid glycosylation
  Homolog annotation: Hit_ID=Q2WBL9; Match level="QueryCoverage=100%, HitCoverage=58%, E-value=1e-139, Identity=91%"; Hit description=4 -alpha-L-fucosyltransferase
  Pfam annotation: Domain name=Glyco_transf_10; Domain location=2-257; Score=-133.7; E_value=1.4e-05; Accession=PF00852.11; Description =Glycosyltransferase family 10 (fucosyltransferase)
FEGATPPPQRMKGLPLRVXYLDLEASRKPTXGLRTFFIGYHANDDVQITYAGKSFHTSRSYHISTEKKNDALIYWSSSRCLPHRDKLAKDFLTLVPHHSFGRCLNNVGGPDMALSMYPVCSTNDNGSPHWWDHLHCAMSHYKFVLAIENTKTESYVTEKLFYALEAGSVPIYFGAANVWDFVPPNSIIDASKFSSLKELASYVKALANDPVAYAEYHAWRRCGVLGNFGRAREMSLDTLPCRLCELVSKRGGKSADAL

SEQ ID NO: 77181 - protein, 185 aa, Setaria italica
  Transcript Sequence Number=SeqID_11207
  Gene Ontology: Mol. function=protein serine/threonine kinase activity
  Homolog annotation: Hit_ID=B9S1Z3; Match level="QueryCoverage=85%, HitCoverage=11%, E-value=2e-21, Identity=41%"; Hit description=ATP binding protein, putative
FFVILLNLIIRTKLSDAYGLVVKCLAIARKLLDTNDEIILSSYDSHWCSLYELYSQILVSTVDPSGRISRESTACLALMLSRVISGLKAGMSSEGPKAVDESLIKIIDHARRSQLLELLCECLIASGSDIISGSTNMVPAACEACKAIWYLAHAVDIMSISAPTTSFPFSNSWRHIHYNSRARFN

SEQ ID NO: 77182 - protein, 45 aa, Setaria italica
  Transcript Sequence Number=SeqID_11208
LYVKEGRRPLLPSADPAAFGLHYSQFSLESTFPISDSPLHHATLF

SEQ ID NO: 77183 - protein, 112 aa, Setaria italica
  Transcript Sequence Number=SeqID_11209
  Gene Ontology: Mol. function=electron carrier activity; Cellular component=extracellular region; Biological process=hydrogen peroxide catabolic process
  Homolog annotation: Hit_ID=B9S954; Match level="QueryCoverage=78%, HitCoverage=24%, E-value=3e-26, Identity=57%"; Hit description =Peroxidase 19, putative
PLMDARLVKALRMSCPSSGGSARVVVPFDVSTPFQFDHAYYANLQARLGLLGSDQALSQDPRTRAMAQELAGNKTRFFQAFVASMDRMGSIRIKKGRKGEIRKVCSQHLLAV

SEQ ID NO: 77184 - protein, 74 aa, Setaria italica
  Transcript Sequence Number=SeqID_11210
  Subcellular localization annotation: CTP_CleavageSite=57; ConfidenceScore=5.52e-01
FSLPCSPFQLCFPCYKNKQRANEQPRSISTSHSFRTTWVCRLVRKTSTCLTGTGYMMANSFMNSGMYYYVADYS

SEQ ID NO: 77185 - protein, 139 aa, Setaria italica
  Transcript Sequence Number=SeqID_11211
  Gene Ontology: Mol. function=binding
  Homolog annotation: Hit_ID=UPI0001A7B3D0; Match level="QueryCoverage =79%, HitCoverage=5%, E-value=5e-27, Identity=55%"; Hit description =binding
MEKLLEVLIAIRDEVACLSVANLILRSWPSHHRALHVKKTVECAEPVPFAPRGIDILEPKHVTLIFSNKRKSVDDEIYQETRTKKSKQSATLQLNEAKWLALLDGILSFLSANSKKADENNCINTSEDSVKGIAYNTID

SEQ ID NO: 77186 - protein, 279 aa, Setaria italica
  Transcript Sequence Number=SeqID_11212
  Gene Ontology: Mol. function=transporter activity; Cellular component= mitochondrial inner membrane; Biological process=mitochondrial transport
  Homolog annotation: Hit_ID=Q66PX4; Match level="QueryCoverage=100%, HitCoverage=85%, E-value=1e-127, Identity=84%"; Hit description =Mitochondrial uncoupling protein 4
  Pfam annotation: Domain name=Mito_carr; Domain location=1-78; Score =9.5; E_value=0.00043; Accession=PF00153.19; Description =Mitochondrial carrier protein
  Pfam annotation: Domain name=Mito_carr; Domain location=184-278; Score=118.9; E_value=1.7e-32; Accession=PF00153.19; Description =Mitochondrial carrier protein
  Pfam annotation: Domain name=Mito_carr; Domain location=83-178; Score= 87.7; E_value=4.2e-23; Accession=PF00153.19; Description =Mitochondrial carrier protein
  Pfam module annotation: Pfam domain module=Mito_carr::Mito_carr::Mito_ carr; Domain location=1-78::184-278::83-178
  Subcellular localization annotation: CTP_CleavageSite=50; ConfidenceScore=5.11e-01
PALAFHAGGHTVALPHHHDIPAPPRKPGPVAVGAQILRSEGAAALFSGVSATMLRQTLYSTTRMGLYDILKTKWTQENGGVLPLHRKIAAGLVAGGVGAAVGNPADVAMVRMQADGRLPLAERRNYRSVGDAIGRMARDEGVRSLWRGSSLTVNRAMIVTASQLATYDQAKEAILARRGPGADGLATHVAASFTAGIVAAAASNPVDVVKTRMMNMKVAPGAPPPYAGAVDCALKTVRSEGPMALYKGFIPTVMRQGPFTVVLFVTLEQVRKVFKGVEF

SEQ ID NO: 77187 - protein, 345 aa, Setaria italica
  Transcript Sequence Number=SeqID_11213
  Gene Ontology: Mol. function=nucleic acid binding; Cellular component= nucleus
  Homolog annotation: Hit_ID=Q9LTV5; Match level="QueryCoverage=93%, HitCoverage=16%, E-value=4e-50, Identity=40%"; Hit description =Helicase-like protein
QITEAERNEELAALQAEADLPLDDILKMYTETKVSRESSPDSKDMLSNLGSKNLIVDSSNQANGCDHEPAHSSSDDGNSSEEEDDGHSYAEFVKKNHGKSNGNISSIDEQEDKDYVAADEGKDDEATLSEEEELAKKEVPDHLEEIKLLQKESEIPLEELLAMYQKDGYADHETAELENSPCIVEETNTDMSLDDQSAKILEVNSDTVVGHLSADVMKTEHNVAANSMQSEIVPEPCAQQNFVEENNLADVNTVNGDKSDDVIADAAAAARSAQPTGNTFLTTNVRTKFPFLLKHSLREYQHIGLDWLVAMYEQRLNGILSDEMGLGKTIMTISLLAHLACEKGI

SEQ ID NO: 77188 - protein, 132 aa, Setaria italica
  Transcript Sequence Number=SeqID_11214
  Gene Ontology: Mol. function=GTP binding; Cellular component =intracellular
  Homolog annotation: Hit_ID=O82497; Match level="QueryCoverage=99%, HitCoverage=34%, E-value=3e-34, Identity=53%"; Hit description =T12H20.1 protein
  Pfam annotation: Domain name=MMR_HSR1; Domain location=61-131; Score=- 6.7; E_value=0.0041; Accession=PF01926.15; Description=GTPase of unknown function
LNKADLADPSETEKWVAYVKKQGACPCIAVNSHNRESIKELLSVVQSRIWEIKHGQRDCTGTVLLVGIPNVVKSAIVNAMHQIGRIGAAEKGKLKHSIVSSHPGETRDISGYKVASHPNIYVLDTPGVLSPR

SEQ ID NO: 77189 - protein, 175 aa, Setaria italica
  Transcript Sequence Number=SeqID_11215
  Gene Ontology: Mol. function=GTP binding; Cellular component =intracellular
  Homolog annotation: Hit_ID=O82497; Match level="QueryCoverage=95%, HitCoverage=44%, E-value=3e-34, Identity=45%"; Hit description =T12H20.1 protein
RHKWIQDTPGVLSPRFANDDSGPILALTGAIKGSFLEEYDIAHFLLAVVNSTHEYMKWENLNQVGDSSFYSGNANTSRSHNKKRQYVSDHTQDFIVKAVRQVLFETISSFKGDLRKEDEFRRLIDCQFTSLQEVFKVSIESSEDICKCVALKLLNLYRTGRLGHYTLDNVPDVVA

SEQ ID NO: 77190 - protein, 178 aa, Setaria italica
  Transcript Sequence Number=SeqID_11216
  Gene Ontology: Mol. function=magnesium ion binding; Cellular component=chloroplast; Biological process=photosynthesis, light harvesting
  Homolog annotation: Hit_ID=B6SUC4; Match level="QueryCoverage=100%, HitCoverage=67%, E-value=4e-95, Identity=96%"; Hit description =Chlorophyll a-b binding protein 8
  Pfam annotation: Domain name=Chloroa_b-bind; Domain location=54-178; Score=106.7; E_value=8.1e-29; Accession=PF00504.13; Description =Chlorophyll A-B binding protein
  Subcellular localization annotation: CTP_CleavageSite=33; ConfidenceScore=5.53e-01
MAAQALLSGRQLLGRPVQAVSRSSARKAPFVVRASSSPPAKQGADRQLWFASKQSLSYLDGTLPGDYGFDPLGLSDPEGTGGFIEPKWLAYGEVINGRFAMLGAAGAIAPEVFGKLGLIPPETALPWFKTGVIPPAGTYNYWADSYTLFVFNMALMGFAEHRRLQDWYNPGSMGKPYF

SEQ ID NO: 77191 - protein, 133 aa, Setaria italica
  Transcript Sequence Number=SeqID_11217
  Gene Ontology: Mol. function=transporter activity; Cellular component= membrane; Biological process=oligopeptide transport
  Homolog annotation: Hit_ID=B6SWZ7; Match level="QueryCoverage=89%, HitCoverage=19%, E-value=2e-26, Identity=48%"; Hit description =Peptide transporter PTR2
CCDVLHGDSASNAAAVSSWAGASFLMPVIGAAIADSYWGKYKTVLVGLSISLAGMAVITTSATLPSLRPPPCEHGGTYCAPATLSQRLVFFAGIYLCAIGTGGAKAAIVSFGADQFDDDNGKNAAEREMKASY

SEQ ID NO: 77192 - protein, 166 aa, Setaria italica
  misc_feature (43)..(43): Xaa can be any naturally occurring amino acid
  misc_feature (84)..(84): Xaa can be any naturally occurring amino acid
  misc_feature (99)..(99): Xaa can be any naturally occurring amino acid
  Transcript Sequence Number=SeqID_11218
  Gene Ontology: Mol. function=protein serine/threonine kinase activity; Cellular component=integral to membrane; Biological process=protein amino acid phosphorylation
  Homolog annotation: Hit_ID=Q8W0U9; Match level="QueryCoverage=97%, HitCoverage=20%, E-value=3e-78, Identity=76%"; Hit description =Putative receptor protein kinase
  Pfam annotation: Domain name=Pkinase; Domain location=25-166; Score= -88.0; E_value=0.003; Accession=PF00069.17; Description=Protein kinase domain
  Pfam annotation: Domain name=Pkinase_Tyr; Domain location=22-166; Score=-120.3; E_value=9.9e-06; Accession=PF07714.9; Description =Protein tyrosine kinase
  Pfam module annotation: Pfam domain module=Pkinase::Pkinase_Tyr; Domain location=25-166::22-166
MHAVAVSNGPPKLVILHMNMALHAYEDIMRMTENLSEKYIIGXLKEFETELETVGSIKHRNLVSLQGYSLSPVGNLLFYDYMEXGSLWDVLHESSSKRXKLDWESRLRIALGAAQGLAYLHHDCSPRIIHRDVKSKNILLDKDYEAHLTDFGIAKSLCVSKNSQRT

SEQ ID NO: 77193 - protein, 190 aa, Setaria italica
  Transcript Sequence Number=SeqID_11219
  Gene Ontology: Mol. function=peptidase activity; Biological process =lipid transport
  Homolog annotation: Hit_ID=C3SA92; Match level="QueryCoverage=38%, HitCoverage=44%, E-value=4e-21, Identity=63%"; Hit description =Nonspecific lipid-transfer protein
  Pfam annotation: Domain name=Tryp_alpha_amyl; Domain location=57-134; Score=21.6; E_value=0.0032; Accession=PF00234.14; Description =Protease inhibitorseed storageLTP f
  Subcellular localization annotation: CTP_CleavageSite=39; ConfidenceScore=5.44e-01
ASASSRSRASSRARRSSHGTHRSPSSTAAVACLLLALASSAAGKGSHSPAPAPAVDCIAAAAGLADCLNYVSPGSTEKSPSKTCCGEVKTAVANPAVVDCLCSLAGNKGFPIDMKRVLALPGACGSSNTVFSKCHISAGPPAEAPGASTGGSPSGGATASPPKAAASSRMTATALVAAVVAPLLAYCYLL

SEQ ID NO: 77194 - protein, 990 aa, Setaria italica
  Transcript Sequence Number=SeqID_11220
  Gene Ontology: Mol. function=protein serine/threonine kinase activity; Cellular component=integral to membrane; Biological process=protein amino acid phosphorylation
  Homolog annotation: Hit_ID=Q8W0U9; Match level="QueryCoverage=96%, HitCoverage=97%, E-value=0.0, Identity=80%"; Hit description =Putative receptor protein kinase
  Pfam annotation: Domain name=LRRNT_2; Domain location=30-68; Score =40.8; E_value=5.4e-09; Accession=PF08263.4; Description=Leucine rich repeat N-terminal domain
  Pfam annotation: Domain name=LRR_1; Domain location=121-143; Score =15.7; E_value=0.19; Accession=PF00560.25; Description=Leucine Rich Repeat
  Pfam annotation: Domain name=LRR_1; Domain location=145-167; Score =12.2; E_value=1.4; Accession=PF00560.25; Description=Leucine Rich Repeat
  Pfam annotation: Domain name=LRR_1; Domain location=169-190; Score =12.8; E_value=1.1; Accession=PF00560.25; Description=Leucine Rich Repeat
  Pfam annotation: Domain name=LRR_1; Domain location=193-215; Score =9.9; E_value=3.9; Accession=PF00560.25; Description=Leucine Rich Repeat
  Pfam annotation: Domain name=LRR_1; Domain location=217-239; Score =5.8; E_value=24; Accession=PF00560.25; Description=Leucine Rich Repeat
  Pfam annotation: Domain name=LRR_1; Domain location=241-263; Score =15.8; E_value=0.18; Accession=PF00560.25; Description=Leucine Rich Repeat
  Pfam annotation: Domain name=LRR_1; Domain location=264-285; Score =9.5; E_value=4.7; Accession=PF00560.25; Description=Leucine Rich Repeat
  Pfam annotation: Domain name=LRR_1; Domain location=288-310; Score =16.3; E_value=0.13; Accession=PF00560.25; Description=Leucine Rich Repeat
  Pfam annotation: Domain name=LRR_1; Domain location=312-334; Score =13.6; E_value=0.76; Accession=PF00560.25; Description=Leucine Rich Repeat
  Pfam annotation: Domain name=LRR_1; Domain location=336-358; Score =19.0; E_value=0.02; Accession=PF00560.25; Description=Leucine Rich Repeat
  Pfam annotation: Domain name=LRR_1; Domain location=360-382; Score =11.3; E_value=2.1; Accession=PF00560.25; Description=Leucine Rich Repeat
  Pfam annotation: Domain name=LRR_1; Domain location=384-406; Score =9.7; E_value=4.3; Accession=PF00560.25; Description=Leucine Rich Repeat
  Pfam annotation: Domain name=LRR_1; Domain location=408-430; Score =12.3; E_value=1.3; Accession=PF00560.25; Description=Leucine Rich Repeat
  Pfam annotation: Domain name=LRR_1; Domain location=432-454; Score =14.8; E_value=0.35; Accession=PF00560.25; Description=Leucine Rich Repeat
  Pfam annotation: Domain name=LRR_1; Domain location=456-478; Score =11.8; E_value=1.6; Accession=PF00560.25; Description=Leucine Rich Repeat
  Pfam annotation: Domain name=LRR_1; Domain location=480-502; Score =9.3; E_value=5; Accession=PF00560.25; Description=Leucine Rich Repeat
  Pfam annotation: Domain name=LRR_1; Domain location=504-525; Score =11.0; E_value=2.4; Accession=PF00560.25; Description=Leucine Rich Repeat
  Pfam annotation: Domain name=LRR_1; Domain location=527-547; Score =5.7; E_value=25; Accession=PF00560.25; Description=Leucine Rich Repeat
  Pfam annotation: Domain name=LRR_1; Domain location=73-95; Score=0.3; E_value=2.6e+02; Accession=PF00560.25; Description=Leucine Rich Repeat
  Pfam annotation: Domain name=LRR_1; Domain location=97-119; Score =12.0; E_value=1.5; Accession=PF00560.25; Description=Leucine Rich Repeat
  Pfam annotation: Domain name=Pkinase; Domain location=652-919; Score =121.9; E_value=2e-33; Accession=PF00069.17; Description=Protein kinase domain
  Pfam annotation: Domain name=Pkinase_Tyr; Domain location=652-919; Score=104.4; E_value=3.8e-28; Accession=PF07714.9; Description =Protein tyrosine kinase
  Pfam module annotation: Pfam domain module=LRRNT_2::LRR_1::LRR_1::LRR_ 1::LRR_1::LRR_1::LRR_1::LRR_1::LRR_1::LRR_1::LRR_1::LRR_1::LRR_1::LRR_ 1::LRR_1::LRR_1::LRR_1::LRR_1::LRR_1::LRR_1::LRR_1::Pkinase::Pkinase _Tyr; ...
  Pfam module annotation: Pfam domain module=Domain location=30-68::121- 143::145-167::169-190::193-215::217-239::241-263::264-285::288 -310::312-334::336-358::360-382::384-406::408-430::432-454::456 -478::480-502::504-525::...
  Pfam module annotation: =527-547::73-95::97-119::652-919::652-919
MLVRSSVAMRTTAAATSRALVALLLVAVAVADDGSTLLEIKKSFRNVGNVLYDWAGDDYCSWRGVVCDNVTFAVAALNLSGLNLGGEISPAVGSLKSLSSIDLKSNGLSGQIPDEIGDCSSLRTLDLSFNNLDGDIPFSISKLKQLENLILKNNQLVGAIPSTLSQLPNLKILDLAQNKLTGEIPRLIYWNEVLQYLGLRGNHLEGSLSPDMCQLTGLWYFDVKNNSLTGVIPDTIGNCTSFQVLDLSYNQFTGPIPFNIGFLQVATLSLQGNKFTGPIPSVIGLMQALAVLDLSYNQLSGPIPSILGNLTYTEKLYMQGNRLTGSIPPELGNMSTLHYLELNDNQLTGSIPPELGKLTGLFDLNLANNNLEGPIPDNLSSCVNLNSFNAYGNKLNGTIPLSLRKLESMTYLNLSSNFLSGPIPIELSRINNLDTLDLSCNMMTGPIPPAIGSLEHLLRLNLSKNGFLGFIPAEFGNLRSVMEIDLSYNHLGGLIPQELGMLQNLMLLKLENNNITGDVSSLMNCFSLNILNVSYNNLAGVVPTDNNFSRFSPDSFLGNPGLCGYWLGSSCRSTNHQEKPPISRAAILGIAVGGLVILLMILVAVCRPHRPPVFKDVTVSKPVSNGPPKLVILHMNMALHAYEDIMRMTENLSEKYIIGYGASSTVYKCVLKNCKPVAIKKLYAHYPQSLKEFETELETVGSIKHRNLVSLQGYSLSPVGNLLFYDYMESGSLWDVLHESSSKKKKLDWESRLRIALGAAQGLAYLHHDCSPRIIHRDVKSKNILLDKDYEAHLTDFGIAKSLCVSKTHTSTYVMGTIGYIDPEYARTSRLNEKSDVYSYGIVLLELLTGKKPVDNECNLHHLILSKTASNEVMETVDPDIGDTCKDLGEVKKVFQLALLCTKRQPSDRPTMHEVVRVLDCLVNPDPPPKPPAHQPSGQSPLPPPSSVPSYINEYVSLRGTGALSCANSTSTSDAELFLKFGEAISQNTE

SEQ ID NO: 77195 - protein, 106 aa, Setaria italica
  Transcript Sequence Number=SeqID_11221
  Subcellular localization annotation: CTP_CleavageSite=50; ConfidenceScore=5.13e-01
LRHWPSGSAPSRWIWLCCLPPSRSRRRRRSIPWSRRLPPLPLSLDRLYYCIMKRKKCGGGGREWIGEEEGTDGRTGVDRTVAFPSLPFPRQAKQRRADARKTTTTM

SEQ ID NO: 77196 - protein, 150 aa, Setaria italica
  Transcript Sequence Number=SeqID_11222
  Gene Ontology: Mol. function=O-acyltransferase activity; Cellular component=integral to membrane; Biological process=GPI anchor biosynthetic process
  Homolog annotation: Hit_ID=B6T822; Match level="QueryCoverage=92%, HitCoverage=26%, E-value=9e-64, Identity=86%"; Hit description=GUP1
MTFLHMFLVIKMRRCQVCYSGKTCYFALQERGLSVDRYTFLTYLCYLTYAPLYIAGPIVGYNAFAAQLEVPQKNYSFAQISWYGLRWILSFLLMEGMTHFFHYNAFVVSRLWQQLSPFEIFIISYGVLNFMWLKFFLIWRYFRFLVLLGL

SEQ ID NO: 77197 - protein, 109 aa, Setaria italica
  misc_feature (4)..(5): Xaa can be any naturally occurring amino acid
  Transcript Sequence Number=SeqID_11223
VSSXXLFVFLFFCFFWFFFACVNKKCTAIIFIYPWSDHVVHCFSVCLVSAKPFAFRHRYNNRSWALDAFQLNWSTRSSKSHTLEYYYYYYFTRLLTRHLLFDWIRRRVD

SEQ ID NO: 77198 - protein, 83 aa, Setaria italica
  Transcript Sequence Number=SeqID_11224
AAGKLAIGSLGPSTSRWEEPLRTRQAGTESKNPAEGDDATEVYNPAETNPCSVMIPQTTLLSSTTGKNCTGEGGDSIFSMAST

SEQ ID NO: 77199 - protein, 67 aa, Setaria italica
  Transcript Sequence Number=SeqID_11225
  Homolog annotation: Hit_ID=B6SV76; Match level="QueryCoverage=74%, HitCoverage=10%, E-value=5e-17, Identity=84%"; Hit description =Lysine-specific histone demethylase 1
SLISWWANFSYIGGFFFSYALFDKNGQQVPQEIVMKVGEIFEKILKETVKVRDEHANDMALIQAMAI

SEQ ID NO: 77200 - protein, 72 aa, Setaria italica
  Transcript Sequence Number=SeqID_11226
  Gene Ontology: Mol. function=electron carrier activity; Biological process=oxidation reduction
  Homolog annotation: Hit_ID=B6SV76; Match level="QueryCoverage=90%, HitCoverage=13%, E-value=7e-30, Identity=96%"; Hit description =Lysine-specific histone demethylase 1
YLFYVLPRVTKIIQRYNKVIVCVEDGASFVADAAIITVPLGVLKANIIKFEPELPREKLSAIADLGVGIENK

SEQ ID NO: 77201 - protein, 72 aa, Setaria italica
  Transcript Sequence Number=SeqID_11227
  Homolog annotation: Hit_ID=B6SV76; Match level="QueryCoverage=86%, HitCoverage=12%, E-value=3e-11, Identity=62%"; Hit description =Lysine-specific histone demethylase 1
  Subcellular localization annotation: CTP_CleavageSite=43; ConfidenceScore=5.25e-01
WLSFTGYLSFLPSGFFKHIDGQNSSPPSVIVIGGGISGIAAARALSNASFKVTLLESRDRLGGRVHTDYFFW

SEQ ID NO: 77202 - protein, 89 aa, Setaria italica
  misc_feature (26)..(26): Xaa can be any naturally occurring amino acid
  misc_feature (31)..(31): Xaa can be any naturally occurring amino acid
  Transcript Sequence Number=SeqID_11228
  Subcellular localization annotation: CTP_CleavageSite=55; ConfidenceScore=5.17e-01
IRPWPFLAGSWACAGVTVASPCVQRXTLIDXVNAALLVAYASALVAACVRRRWASAASRRSGGARWWRWWLAVVSACCVLAAVGYSATG

SEQ ID NO: 77203 - protein, 94 aa, Setaria italica
  Transcript Sequence Number=SeqID_11229
  Subcellular localization annotation: CTP_CleavageSite=49; ConfidenceScore=5.74e-01
SPCRTPPTSPPAALPSSRRRRPLRGPPPTGSSPSPVARGGGRHRACEIRGRRERGRGGSVARPPPSAGGLAFRRPRAVAAPWPVGAVAEKLGQL

SEQ ID NO: 77204 - protein, 81 aa, Setaria italica
  Transcript Sequence Number=SeqID_11230
MSVPPAGNRQVSLRGSSAREITRDALLQKVSEERQLRSHLRRAAAAALSIQRIWRRYYVIRMVSEQLHEDWRLLMNEPNIV

SEQ ID NO: 77205 - protein, 106 aa, Setaria italica
  Transcript Sequence Number=SeqID_11231
  Subcellular localization annotation: CTP_CleavageSite=30; ConfidenceScore=5.33e-01
MASPTGNPNPNPNPPFELGKLFRPPNPMPTATATAATIFPGAAGGPAGPPPPSGPYSYPPVTPPFHRGPYLHYPQDPHAMPRPVVSFPMPNPNLNPNPNANPNAAV

SEQ ID NO: 77206 - protein, 109 aa, Setaria italica
  misc_feature (98)..(98): Xaa can be any naturally occurring amino acid
  Transcript Sequence Number=SeqID_11232
  Gene Ontology: Mol. function=binding
  Homolog annotation: Hit_ID=Q9ZW93; Match level="QueryCoverage=94%, HitCoverage=4%, E-value=3e-15, Identity=44%"; Hit description=F5A8.5 protein
LASLLASMPKEELEDQVFDVLLLWAGPFTGNPESYLRHIQDWASELRVLSVAIEALTAFIRSFVYPTITTVDGGILLNPVLAYLGGALSLISSLRSKXLPDVKSALDLF

SEQ ID NO: 77207 - protein, 52 aa, Setaria italica
  Transcript Sequence Number=SeqID_11233
  Gene Ontology: Mol. function=CTP synthase activity; Biological process=pyrimidine nucleotide biosynthetic process
  Homolog annotation: Hit_ID=B6SXZ9; Match level="QueryCoverage=65%, HitCoverage=5%, E-value=2e-13, Identity=97%"; Hit description=CTP synthase
MVLCWMQIIELPSHKFFIGAQFHPEFKSRPGKPSPLFLGNAILLCKKNRYSR

SEQ ID NO: 77208 - protein, 123 aa, Setaria italica
  Transcript Sequence Number=SeqID_11234
  Gene Ontology: Mol. function=CTP synthase activity; Cellular component=cellular_component; Biological process=pyrimidine nucleotide biosynthetic process
  Homolog annotation: Hit_ID=B6SXZ9; Match level="QueryCoverage=100%, HitCoverage=17%, E-value=8e-43, Identity=73%"; Hit description=CTP synthase
  Pfam annotation: Domain name=CTP_synth_N; Domain location=1-123; Score=-23.1; E_value=1.8e-14; Accession=PF06418.6; Description=CTP synthase N-terminus
QVVPHITDEIQDWIERVAMNPVDGKEGHPDVCVIELGGTIGDKIFSPHNDSGILDAGDIESMPFIEALGQFSYRVGPGNFCLVHVSLVPVLNVVGEQKTKPTQHSVRGLRGLGLAPDVLACRS

SEQ ID NO: 77209 - protein, 115 aa, Setaria italica
  misc_feature (26)..(26): Xaa can be any naturally occurring amino acid
  Transcript Sequence Number=SeqID_11235
  Gene Ontology: Mol. function=CTP synthase activity; Biological process=pyrimidine nucleotide biosynthetic process
  Homolog annotation: Hit_ID=B6SXZ9; Match level="QueryCoverage=94%, HitCoverage=17%, E-value=3e-41, Identity=80%"; Hit description=CTP synthase
  Pfam annotation: Domain name=CTP_synth_N; Domain location=2-115; Score=-23.4; E_value=1.9e-14; Accession=PF06418.6; Description=CTP synthase N-terminus
NNITNRKKYYQAVINKERRGDYLGKXTVQVVPHITDEIQDWIERVAMNPVDGKEGHPDVCVIELGGTIGDIESMPFIEALGQFSYRVGPGNFCLVHVSLVPVLNVVGEQVSFTTI

SEQ ID NO: 77210 - protein, 97 aa, Setaria italica
  Transcript Sequence Number=SeqID_11236
  Gene Ontology: Mol. function=CTP synthase activity; Biological process=pyrimidine nucleotide biosynthetic process
  Homolog annotation: Hit_ID=B6SXZ9; Match level="QueryCoverage=94%, HitCoverage=15%, E-value=2e-35, Identity=80%"; Hit description=CTP synthase
MVLCWMQIIELPSHKFFIGAQFHPEFKSRPGKPSPLFLGLIAAASGQLEPLLQRSCNNTTKPPTKVPKRKLYPTVPVKNPLNSLVNGYYPNGTGIHT

SEQ ID NO: 77211 - protein, 602 aa, Setaria italica
  Transcript Sequence Number=SeqID_11237
  Gene Ontology: Mol. function=CTP synthase activity; Cellular component=cellular_component; Biological process=pyrimidine nucleotide biosynthetic process
  Homolog annotation: Hit_ID=B6SXZ9; Match level="QueryCoverage=100%, HitCoverage=100%, E-value=0.0, Identity=84%"; Hit description=CTP synthase
  Pfam annotation: Domain name=CTP_synth_N; Domain location=1-287; Score=671.4; E_value=8.1e-199; Accession=PF06418.6; Description=CTP synthase N-terminus
  Pfam annotation: Domain name=GATase; Domain location=311-548; Score =270.2; E_value=4.9e-78; Accession=PF00117.20; Description=Glutamine amidotransferase class-I
  Pfam annotation: Domain name=Peptidase_C26; Domain location=339-530; Score=-85.5; E_value=0.0014; Accession=PF07722.5; Description =Peptidase C26
  Pfam module annotation: Pfam domain module=CTP_synth_N::GATase::Peptid ase_C26; Domain location=1-287::311-548::339-530
MKYVLVTGGVVSGLGKGVTASSIGVVLKSCGLRVTTIKIDPYLNTDAGTMSPFEHGEVFVLDDGGEVDLDLGNYERFLDIKLTRDNNITTGKIYQAVINKERRGDYLGKTVQVVPHITDEIQDWIERVAMNPVDGKEGHPDVCVIELGGTIGDIESMPFIEALGQFSYRVGPGNFCLVHVSLVPVLNVVGEQKTKPTQHSVRGLRGLGLAPDVLACRSTEPLEEHVKVKLSQFCHVPISNIVNLHDVTNIWHIPLLLRDQKAHEAILKVLELQYAGKVPREPKLAEWTERATKFDKLKTPVNIAMVGKYTGLSDSYLSVLKALLHASVAMERKLVVDWVPSCDLEDSSARETPEAHKKAWKLLKGADGILVPGGFGDRGVQGKILAAKYARENNVPYLGICLGMQIAVIEFARSVMKLRGANSTEFDPAATSPCVIFMPEGSKTHMGATMRLGSRRTYFQVTGSKSAKLYGNATSVDERHRHRYEVNPDMVPDFERAGLQFVGKDESGTRMEIIELPSHKFFIGAQFHPEFKSRPGKPSPLFLGLIAAASGQLEPLLQRSCNNTTKPPTKVPKRKLYPTVPVKNPLNSLVNGYYPNGTGIHT

SEQ ID NO: 77212 - protein, 209 aa, Setaria italica
  misc_feature (19)..(19): Xaa can be any naturally occurring amino acid
  Transcript Sequence Number=SeqID_11238
  Homolog annotation: Hit_ID=B9SGL2; Match level="QueryCoverage=69%, HitCoverage=20%, E-value=9e-37, Identity=57%"; Hit description =Bromodomain-containing protein, putative
ALDSSRPISHTPTYSRTPXSMKKPRAKDPNKRDMTIDEKRKLSENLQNLPPEKLDAVVQVIKNKNLSVRHHEDEIEVEIDSMDAETLWELDRFVANYKKNLSKQKRKAERAMLARQDAELRAQHFVQQPQPTQFTQEPNVGEKSPKQIEKDSIAGEQQAMSALEQNGENRENASSSSNSSSSSSDSGSSSSDSDSDSSSSDGSDAGKSS

SEQ ID NO: 77213 - protein, 583 aa, Setaria italica
  Transcript Sequence Number=SeqID_11239
  Gene Ontology: Mol. function=kinase activity
  Homolog annotation: Hit_ID=B9SGL2; Match level="QueryCoverage=62%, HitCoverage=49%, E-value=5e-91, Identity=50%"; Hit description =Bromodomain-containing protein, putative
  Pfam annotation: Domain name=Bromodomain; Domain location=235-320; Score=125.5; E_value=1.7e-34; Accession=PF00439.17; Description =Bromodomain
AARRPGEAAARPDPVAAASTLAPARPGGRGAASGDPSSGKDRDSSGGGGVPNGHGDDRAAEKARKRRVRSELRRRLAGELDQVRVLSRRLKEAAETLAQQEASAPASLPLVVVPQHQVVDVGYPQQPQFSAGDMVTHMSAQLTPVVPPVRSLLPRRPLTVSVVHNEAFEKEKRTPKANQLYQNSEFLLAKDRIPASDSHGRKKSKHHKKKHRSQESRGADFDAERRLYSHAFKKSSSLLSRLMKHKFGWVFNKPVDPVALGLHDYFTIIKHPMDLGTIRARLSHGQYRNPKEFADDVRLTFHNAMTYNPKGQDVHFMAEQLSGIFEAQWPEIEAEVNYLASCPPLPKKFPPPPIDLRYLERSDSMRRQMALDSSRPISHTPTYSRTPSMKKPRAKDPNKRDMTIDEKRKLSENLQNLPPEKLDAVVQVIKNKNLSVRQHDDEIEVEIDSMDAETLWELDRFVANYKKNLSKQKRKAERAMLARQDAELRAQHSIQQPQQLQQPQPTQVTQEPNVGEKSPKQMEKDSTAGEQLAASVPEQNDENRQNASSSSNSSSSSSDSGSSSSDSDSDSSSSDGSDAGNSS

SEQ ID NO: 77214 - protein, 187 aa, Setaria italica
  misc_feature (74)..(74): Xaa can be any naturally occurring amino acid
  Transcript Sequence Number=SeqID_11240
LHLVIPRIEVPAPVAPPQAAAENPTPILPGAPALLPSVQAPAPSVALKPIPPVVPPPSVNNQPNRPVGSVPPHXPPALPPPANDVPPYPPSGSFPAIPPSASVPHVNPPIASPVVQAPRQQAEAPRSEHKNGNTAPPANISPPANLKKHHVPHASPPKESTGQTVPDHKPPVTGSAPATNPSLRPQV

SEQ ID NO: 77215 - protein, 140 aa, Setaria italica
  Transcript Sequence Number=SeqID_11241
  Gene Ontology: Mol. function=receptor activity; Cellular component =integral to membrane
  Homolog annotation: Hit_ID=B9SRT2; Match level="QueryCoverage=63%, HitCoverage=19%, E-value=6e-28, Identity=60%"; Hit description=Ptm1, putative
  Subcellular localization annotation: CTP_CleavageSite=44; ConfidenceScore=5.08e-01
VPSFVGRGGADASVHEYAGGGFAPRANSFFFHGGSEGLYASDPSSNSSASFIRFDTVIFRRTLESASRHEEMQQKTGLVEAIIVEIQDRDKIGGSYLHSDAICCTPELDKEKSCRVGEVIIRPNPDNPEWPKRLQTFFEG

SEQ ID NO: 77216 - protein, 398 aa, Setaria italica
  Transcript Sequence Number=SeqID_11242
  Gene Ontology: Mol. function=receptor activity; Cellular component =integral to membrane
  Homolog annotation: Hit_ID=B9SRT2; Match level="QueryCoverage=98%, HitCoverage=82%, E-value=1e-146, Identity=65%"; Hit description=Ptm1, putative
  Pfam annotation: Domain name=Lung_7-TM_R; Domain location=69-356; Score=531.6; E_value=1e-156; Accession=PF06814.5; Description=Lung seven transmembrane receptor
QGTRDKIGGSYLHSDAICCTPELDKEKSCRVGEVIIRPNPDNPEWPKRLQTFFEGKNEETTMLPQLVSINKTGMYYLYFMFCDPQLKGLKITGRTVWRNPQGYLPGKMAPMMTFYGFMSLAYLALGLLWFIQFVRCWKDILQLHYHITAVIALGMCEMAFWYFEYANFNSTGTRPMGITLWAVTFTAVKKTVSRLLLLVVSMGYGIVLPTLGGITSRVAALGFIYFVASEALELVENLGNINDFSGKTRLFLVLPVAILDATFIIWIFSSLSRTLEKLQLRRSMAKLELYRKFTNSLAVSVLISIAWIGYELYFNATDPLSELWQRAWIIPAFWNVLSYALLAIICILWSPSRNPAGFAYSEDAGEGVDEEGLSLVGSAMKGTGDMVNMHIFPEDKRA

SEQ ID NO: 77217 - protein, 150 aa, Setaria italica
  Transcript Sequence Number=SeqID_11243
  Gene Ontology: Mol. function=microtubule motor activity; Cellular component=microtubule associated complex; Biological process =microtubule-based movement
  Homolog annotation: Hit_ID=Q75LL2; Match level="QueryCoverage=99%, HitCoverage=11%, E-value=4e-73, Identity=87%"; Hit description =Kinesin-like protein
  Pfam annotation: Domain name=Kinesin; Domain location=21-150; Score= -97.8; E_value=5.9e-09; Accession=PF00225.15; Description=Kinesin motor domain
RFELQEDPSFWKDNNVQVVIRIRPLSGSEISLQGQKRCVRQDSSQSLTWTGHPESRFTFDHVADEHVTQENMFKVAGVPRVENCISGYNSCMFAYGQTGSGKTHTMLGDIENGTRRNNANCGMTPRVFEHLFARIQKEKEIRRDEKLRFT

SEQ ID NO: 77218 - protein, 162 aa, Setaria italica
  misc_feature (106)..(106): Xaa can be any naturally occurring amino acid
  Transcript Sequence Number=SeqID_11244
  Gene Ontology: Mol. function=microtubule motor activity; Cellular component=microtubule associated complex; Biological process =microtubule-based movement
  Homolog annotation: Hit_ID=Q75LL2; Match level="QueryCoverage=77%, HitCoverage=9%, E-value=3e-61, Identity=84%"; Hit description =Kinesin-like protein
  Pfam annotation: Domain name=Kinesin; Domain location=24-162; Score= -90.4; E_value=1.9e-09; Accession=PF00225.15; Description=Kinesin motor domain
VSAGISSSTYRWLLKCSNLQVVIRIRPLSGSEISLQGQKRCVRQDSSQSLTWTGHPESRFTFDHVADEHVTQENMFKVAGVPMVENCISGYNSCMFAYGQTGSGKXTHTMLGDIENGTRRNNANCGMTPRVFEHLFARIQKASLYDLLLFGCLILADMTSAT

SEQ ID NO: 77219 - protein, 853 aa, Setaria italica
  Transcript Sequence Number=SeqID_11245
  Gene Ontology: Mol. function=GTPase activity; Cellular component =chloroplast; Biological process=immune response
  Homolog annotation: Hit_ID=B9RB86; Match level="QueryCoverage=99%, HitCoverage=79%, E-value=0.0, Identity=48%"; Hit description =Interferon-induced guanylate-binding protein, putative
  Pfam annotation: Domain name=CHASE3; Domain location=293-405; Score= -19.4; E_value=0.016; Accession=PF05227.5; Description=CHASE3 domain
  Pfam annotation: Domain name=GBP_C; Domain location=99-398; Score =57.6; E_value=7.5e-15; Accession=PF02841.6; Description=Guanylate -binding protein, C-terminal domain
  Pfam module annotation: Pfam domain module=CHASE3::GBP_C; Domain location=293-405::99-398
IWYLVENDRKITPRDYLEIALRPLEGRGKDISSKNEIRESIRSLFPDRECFTLVRPLNNENELQRLDQIPLEKLRTEFQAGLDELTRFIFERTRPKQVAGTIMTGPVLAGVTQSFLDALNNGAVPTISSSWQSVEEAECRRAYDSAAEIYMSSFGHSRLAEEDALRDAHEAALRKALDAYNAAAVGTGISRAHYEKVLNNFCRKAFQDYKKNAFLEADKQCSNAIQNMEKKIRAACTAPGVKVSAVIQVLEASLAEYETSCTAPAKWRMLAAFLRQCLEGPILDLCLKLINEAESEKTSFALRCRSNEDQLELLKKQLEANEAHKSEYLKRYETAISEKQRTSSDLSGHLANLRTKCSTLEERCVSISKELDHVRHECTDWRAKYEQSSSQQNAEQDRYVAQLASLETRYSSAEGKLGAAREQAASAQEEAVEWKKKYETASLQAKTALERLASVQEQINKIAQEREGAIRAEFATHLEEKEEEIRKLVAKIRQAESEESVLTERLQVAESKTQGHNKETAGLKDEIKELMSKLEFLRDRAVSYEKQARMLEQEKKHLEEKFVSECKKYDEAEQRYKSAERDAKKATELADVARAEAIASQKEKDEAQRLSMEKVAVIERIQRQVDRLEQEKVNLLGEVQRMRNSESDAWSKVTLLESRVAEREKEMDDLLSRSNEQRSSTVHVLESLLATERAARAEANKRAEALSLQLQSTQGKLDILHQELTSIRLVETALDSKLRTTTRGKRLRDNEIGADSVQDMDIDPPERSRKRTKSNTSPLKALYEDGGSVHMGEDSVTVSTDTKGGNPDGYKKFTIAKLKEELTKHGFGAQLLELKNPTKKDILALYKKHVLCE

SEQ ID NO: 77220 - protein, 116 aa, Setaria italica
  Transcript Sequence Number=SeqID_11246
  Gene Ontology: Mol. function=DNA binding; Cellular component=integral to membrane
  Homolog annotation: Hit_ID=B6UE85; Match level="QueryCoverage=100%, HitCoverage=45%, E-value=1e-42, Identity=75%"; Hit description =Transcription regulator
VVFRRWAPRQRLDGASCLISLFHGTPAALAAAGAILALPAGSRSFAAPNERLQEHVLDYSVAYFTMDLLHYLAFLPGDVLFIAHHLATLFVFLTCRYIVRHGAYALLVLLVLAEVT

SEQ ID NO: 77221 - protein, 100 aa, Setaria italica
  Transcript Sequence Number=SeqID_11247
MEQISSFEEKQIYCWNCWMKRSALELHSHCCGCCLDKKSVVLIHRATEIDVCFAGHVRVNSCDHKESFSFHFSLELRPSVVCISFTLGLPLIILSLTNKK

SEQ ID NO: 77222 - protein, 57 aa, Setaria italica
  Transcript Sequence Number=SeqID_11248
  Subcellular localization annotation: CTP_CleavageSite=18; ConfidenceScore=5.03e-01
PSFNIHSFVLLSYQLSTQLSHISRFHKICLRSTSCNEMIFLGSIRKTKQENQTSTKS

SEQ ID NO: 77223 - protein, 118 aa, Setaria italica
  misc_feature (93)..(93): Xaa can be any naturally occurring amino acid
  Transcript Sequence Number=SeqID_11249
  Gene Ontology: Mol. function=protein serine/threonine kinase activity; Biological process=protein amino acid phosphorylation
  Homolog annotation: Hit_ID=Q2R0X3; Match level="QueryCoverage=75%, HitCoverage=44%, E-value=2e-24, Identity=49%"; Hit description =Leucine Rich Repeat family protein
  Pfam annotation: Domain name=LRR_1; Domain location=1-23; Score=6.9; E_value=14; Accession=PF00560.25; Description=Leucine Rich Repeat
  Pfam annotation: Domain name=LRR_1; Domain location=25-47; Score =10.2; E_value=3.5; Accession=PF00560.25; Description=Leucine Rich Repeat
  Pfam annotation: Domain name=LRR_1; Domain location=49-71; Score =12.1; E_value=1.4; Accession=PF00560.25; Description=Leucine Rich Repeat
  Pfam annotation: Domain name=LRR_1; Domain location=73-95; Score=9.4; E_value=4.8; Accession=PF00560.25; Description=Leucine Rich Repeat
  Pfam annotation: Domain name=LRR_1; Domain location=98-118; Score =9.1; E_value=5.6; Accession=PF00560.25; Description=Leucine Rich Repeat
  Pfam module annotation: Pfam domain module=LRR_1::LRR_1::LRR_1::LRR _1::LRR_1; Domain location=1-23::25-47::49-71::73-95::98-118
LTEGFDLSHNQLSGQIPQDIGGLINIGLLNFSNNHLSGQIPVSLGACVRLESLHLEGNFLDGRIPESFINLGGVAEIDLSRNNLSGQIPNFFXQSFNSLKLLNLSFNNLEGQMPEGGI

SEQ ID NO: 77224 - protein, 85 aa, Setaria italica
  Transcript Sequence Number=SeqID_11250
  Homolog annotation: Hit_ID=B6SS58; Match level="QueryCoverage=57%, HitCoverage=14%, E-value=3e-10, Identity=72%"; Hit description =Ribonucleoprotein
  Subcellular localization annotation: CTP_CleavageSite=57; ConfidenceScore=5.61e-01
MAAAAVAAATFRTLHQPASSGVPIPLPSVRFQCLQRHRVGLCLFASPRGRPVLLPPSAAAAGEAFSSDGEEFDGEEDEYFDEGES

SEQ ID NO: 77225 - protein, 50 aa, Setaria italica
  Transcript Sequence Number=SeqID_11251
GSRISCSYRSVEPPTPFSNSEEMDQSSVLLKLWLKLESTLNFVKGHTSLT

SEQ ID NO: 77226 - protein, 118 aa, Setaria italica
  Transcript Sequence Number=SeqID_11252
  Gene Ontology: Mol. function=nucleic acid binding
  Homolog annotation: Hit_ID=Q7XK21; Match level="QueryCoverage=88%, HitCoverage=14%, E-value=3e-30, Identity=66%"; Hit description =OSJNBa0044K18.24 protein
SVLGHSSPLRQLAEPHSCSLKNVKITRFSSAKSLVELTCHILKNAVPLECLTLDTLYGFRCSDKYYGRCQFRDKSVLREAPRALEAIKTHIEDKVPARVKLTVKEPCSRCHAVPVGGW

SEQ ID NO: 77227 - protein, 83 aa, Setaria italica
  Transcript Sequence Number=SeqID_11253
VGVGGNKLLAGYLAHEFLRCGTLLGERRLEPLGRKEKEPALAAPAPEPSRRYAEVSRLLMAGGARIPGIVNPSQLGRWLRIKE

SEQ ID NO: 77228 - protein, 44 aa, Setaria italica
  Transcript Sequence Number=SeqID_11254
LTLKTYSYMLLRRNCTTMAYYKASLLFQRSCNAYFRTLSSMDVA

SEQ ID NO: 77229 - protein, 363 aa, Setaria italica
  Transcript Sequence Number=SeqID_11255
  Gene Ontology: Mol. function=electron carrier activity; Biological process=oxidation reduction
  Homolog annotation: Hit_ID=B6SY23; Match level="QueryCoverage=91%, HitCoverage=61%, E-value=1e-149, Identity=80%"; Hit description =Cytochrome P450 CYP78A54
  Pfam annotation: Domain name=p450; Domain location=1-359; Score=52.6; E_value=3.5e-14; Accession=PF00067.14; Description=Cytochrome P450
FVSFRSLVIGRRHGGRKTERPAAAAGTVTARRFLKRASLHNVMWSVFGRRYELQAASEEAAELKSLVDEGYDLLGQLNWSDHLPWLARFDLQRIRARCSALVPRVNRFVGRIIDEHRARHALGGGVAAVMDFTDVLLSLQGSDKLSDADMIAVLWEMIFRGTDTVAVLMEWVLARLVLHQDVQRRVHEELDRVVGPGKAVTEADTASLVYLQAVIKEVLRLHPPGPLLSWARLATSDVHVGGYLVPAGTTAMVNMWAITHDPAVWSDPTEFKPERFLAGSSDHADEFPIMGSDLRLAPFGSGRRSCPGKSLAMATVVSWLATLLHELEWLPPSDGGVDLSEVLRLSCEMAAPLEARLVPRHAA

SEQ ID NO: 77230 - protein, 84 aa, Setaria italica
  Transcript Sequence Number=SeqID_11256
PIGLSPAPTPRGGGYPFEAARSSGNERGGASTSCCEEFLFLEESGTGRRGSTDEQQELDLNINDRNTRRPRNCEKIDLNGSSWN

SEQ ID NO: 77231 - protein, 45 aa, Setaria italica
  Transcript Sequence Number=SeqID_11257
ILLYFLPLPVNLFTVKSEETISVDKCQVYPFNQTIAHTNLLVLVV

SEQ ID NO: 77232 - protein, 39 aa, Setaria italica
  Transcript Sequence Number=SeqID_11258
IQNSGKSVGVVSVDFRKKKTGKLMAQARHTKYLAVSSRL

SEQ ID NO: 77233 - protein, 154 aa, Setaria italica
  Transcript Sequence Number=SeqID_11259
  Gene Ontology: Mol. function=hydrolase activity; Cellular component =mitochondrion; Biological process=cell communication
  Homolog annotation: Hit_ID=A6QQ83; Match level="QueryCoverage=74%, HitCoverage=74%, E-value=6e-18, Identity=39%"; Hit description=THEM2 protein
  Pfam annotation: Domain name=4HBT; Domain location=62-139; Score =50.5; E_value=6.7e-12; Accession=PF03061.14; Description =Thioesterase superfamily
MDPEAVRRSLEPTASAEEITGSTPARLHFYDPFVLQGVSIESSEHGRLLCSFVVAPRHASPAGYLRSGVTATLADQLGSAVFYCSGLPRSGVSVEISVSFVDVATVGEEIEVEGKLLRAGKSVGVVSVDFRKKKTGKLMAQARHTKYLAVSSRL

SEQ ID NO: 77234 - protein, 320 aa, Setaria italica
  Transcript Sequence Number=SeqID_11260
  Gene Ontology: Mol. function=nucleotide binding; Cellular component =mitochondrion; Biological process=small GTPase mediated signal transduction
  Homolog annotation: Hit_ID=B8NZ40; Match level="QueryCoverage=55%, HitCoverage=36%, E-value=5e-12, Identity=29%"; Hit description=Rab GTPase SrgA, putative
  Pfam annotation: Domain name=NCA2; Domain location=27-306; Score =210.7; E_value=4e-60; Accession=PF08637.2; Description=ATP synthase regulation protein NCA2
SQLTSHKRPNKLTVYWLPYTCGALGLSVCSLWLLRHSSLMGSPDIDNWIQDAKESVAGFWDEHVEKPIISIRDELFETFKQRDKGVMENQEVQLTEDSLRRMLVAFCEQTEGQKLPEDSSVQAMLEILTKRYEKELIHPMKNLFSGELARAMLIQIQKLKLDLESGLLEMDQILRANAINFAVLAALPAFGLSLLLLMLLRTWIQRDHGAEGRGNIARCQRRLLLVDVERRLMEFQHYRDNGMEEEARYKFGLVLYTLDRLCKAVESHAKETGEWLSLREDIFDLAKLDMGMPDKMIVVSRLKWMYNCLLPFSSSRLPRL

SEQ ID NO: 77235 - protein, 113 aa, Setaria italica
  Transcript Sequence Number=SeqID_11261
  Gene Ontology: Mol. function=molecular_function; Cellular component =mitochondrial inner membrane; Biological process=intracellular protein transmembrane transport
  Homolog annotation: Hit_ID=B6TGT3; Match level="QueryCoverage=100%, HitCoverage=100%, E-value=2e-55, Identity=92%"; Hit description =Mitochondrial import inner membrane translocase subunit TIM16
  Pfam annotation: Domain name=Pam16; Domain location=1-111; Score =45.5; E_value=2.1e-10; Accession=PF03656.5; Description=Pam16
MAARLLANLIVMGGSVMGRAMLQAYRKAIVNANQTGAAQEAINGIRRASKVMTEQEARQILGISEKSTWEEIVQKYDTMFERNAKNGSFYLQSKVHRAKECLEPLYQKPDVPN

SEQ ID NO: 77236 - protein, 360 aa, Setaria italica
  misc_feature (218)..(218): Xaa can be any naturally occurring amino acid
  Transcript Sequence Number=SeqID_11262
  Gene Ontology: Mol. function=transcription factor activity; Cellular component=nucleus; Biological process=regulation of transcription
  Homolog annotation: Hit_ID=B6UEJ2; Match level="QueryCoverage=100%, HitCoverage=100%, E-value=1e-125, Identity=66%"; Hit description =Vacuolar protein sorting protein 72
  Pfam annotation: Domain name=YL1; Domain location=11-236; Score =255.7; E_value=1.1e-73; Accession=PF05764.5; Description=YL1 nuclear protein
  Pfam annotation: Domain name=YL1_C; Domain location=264-293; Score =64.4; E_value=4.3e-16; Accession=PF08265.3; Description=YL1 nuclear protein C-terminal domain
  Pfam annotation: Domain name=zf-HIT; Domain location=262-291; Score =10.4; E_value=0.029; Accession=PF04438.8; Description=HIT zinc finger
  Pfam module annotation: Pfam domain module=YL1::YL1_C::zf-HIT; Domain location=11-236::264-293::262-291
MYAGDDEPPVLLDRASRATRGKRITKLLEDEVEQDEVFWNQDALKDEEDDDNYEEEQDAGDEFDSDFDQDEPEPDDEPEKEERERLPIKKRLMFPGKTLRKTNVKKKVTPKLEDDEKAAKSADKASPSTPVDVPDELETEKIIRKSTRTSVIVRQAEREAIRAEKEATAKPIIKKKKEGEEKRMTQEEMLLEAAETEIMNLRNLERVLAREEEVKKKXVVHKDTYDGPTIRFFSRDGESRLEFINGASFGSELCTTSAPYPEKSVCVVTGLPAKYRDPKTGLPYATMETFKIIRESFLKEEADRKRPNMSNMGELFESIAGEHSAPKKRRVEVRSPGISGGLRHGGRFRRIPALDMVDED

SEQ ID NO: 77237 - protein, 276 aa, Setaria italica
  Transcript Sequence Number=SeqID_11263
  Gene Ontology: Mol. function=voltage-gated anion channel activity; Cellular component=mitochondrial outer membrane; Biological process =anion transport
  Homolog annotation: Hit_ID=B6SUS7; Match level="QueryCoverage=100%, HitCoverage=100%, E-value=1e-135, Identity=85%"; Hit description =Outer mitochondrial membrane protein porin
  Pfam annotation: Domain name=Porin_3; Domain location=4-269; Score =213.9; E_value=4.3e-61; Accession=PF01459.14; Description=Eukaryotic porin
MSKGPVPFGNIGKRAKDLLYKDYNFDQKFSLSTSSSSGLNLTATGVRINEDFIGDIRTQHKSGRTTVDVIIDSDSKVSTTVTVDEALTGLKTSFSFKVPDHKSVKLDLQYAHNRFALNSTIGLTSAPLVELAATVGTSELSFGAEVGFDSTSASVTKYNSGIGYNKPDFSASLLLADKGETLKASYIHLFNPTNGATVAAEVTHKLKTKENYFTIGSSHALDSSTSLKTRFSNSGKVGLLCQHEWRPKSLVTLSAEYDPKVVRSPSRFGVAISVKP

SEQ ID NO: 77238 - protein, 102 aa, Setaria italica
  Transcript Sequence Number=SeqID_11264
  Gene Ontology: Mol. function=electron carrier activity; Biological process=oxidation reduction
  Homolog annotation: Hit_ID=Q94EV6; Match level="QueryCoverage=100%, HitCoverage=18%, E-value=2e-40, Identity=81%"; Hit description =Cytochrome P450
LNKLKLVTMVLHETLRLYGAATLIKRRATADADLCGVVVPEGTVLLIPIAMLHRDEEAWGGDAGEFNPLRFKDDAGRAAPAHPGALLSFSAGPRSCIGKDFA

SEQ ID NO: 77239 - protein, 134 aa, Setaria italica
  misc_feature (117)..(117): Xaa can be any naturally occurring amino acid
  Transcript Sequence Number=SeqID_11265
EEEDDSDNDMMRFKDDDEDDGSDENEVFNDLIAAGYEEKEVDHDKRNELHQKWLQQQDAAETNNVMQRLKFGHQEQKSVHEDEDEDIEDSENESEKEMSYDLTPANVVRQNSDCARXMIAKMFADDHKYHYHLQ

SEQ ID NO: 77240 - protein, 86 aa, Setaria italica
  Transcript Sequence Number=SeqID_11266
  Gene Ontology: Mol. function=mannosyl-oligosaccharide 1,2-alpha -mannosidase activity; Cellular component=membrane
  Homolog annotation: Hit_ID=B6SH10; Match level="QueryCoverage=98%, HitCoverage=13%, E-value=6e-43, Identity=98%"; Hit description=ER degradation-enhancing alpha-mannosidase-like 1
TAVAEGVTPSEARRLRDEVKDMFYHAFDGYMKYAFPLDELRPLSCQGEDSLGGYALTLIDSLDTLALLGDKEKFGAAVEWVGKNVR

SEQ ID NO: 77241 - protein, 130 aa, Setaria italica
  Transcript Sequence Number=SeqID_11267
  Gene Ontology: Mol. function=binding
  Homolog annotation: Hit_ID=B9S6P3; Match level="QueryCoverage=99%, HitCoverage=3%, E-value=7e-41, Identity=66%"; Hit description =Inositol or phosphatidylinositol kinase, putative
MRGVDFSGVVEFLAQELFNPNASMVVRKNVQACLSLLASRTGSEVSELLEPLYLPLLQPLISRPLRSKNVEQQVGTVTALNFCLALRPPLLKLSPELVNFLQEALQIAEADETVWVTRMMNAKIVLTWNK

SEQ ID NO: 77242 - protein, 94 aa, Setaria italica
  Transcript Sequence Number=SeqID_11268
  Gene Ontology: Mol. function=binding
  Homolog annotation: Hit_ID=B9S6P3; Match level="QueryCoverage=100%, HitCoverage=2%, E-value=3e-36, Identity=76%"; Hit description =Inositol or phosphatidylinositol kinase, putative
QQVGTVTSLNFCLALRPPLLKLSPELVNFLQEALQIAEADETVWVTRMMNAKIVLTWNKLRTACIELLCTAMAWGDLKAQNHSELRAKIIAIVF

SEQ ID NO: 77243 - protein, 324 aa, Setaria italica
  misc_feature (42)..(42): Xaa can be any naturally occurring amino acid
  Transcript Sequence Number=SeqID_11269
  Gene Ontology: Mol. function=RNA binding; Cellular component =intracellular; Biological process=RNA processing
  Homolog annotation: Hit_ID=Q7XB75; Match level="QueryCoverage=87%, HitCoverage=17%, E-value=1e-128, Identity=79%"; Hit description =Putative pre-rRNA processing protein RRP5
  Pfam annotation: Domain name=S1; Domain location=203-280; Score=21.6; E_value=0.0033; Accession=PF00575.15; Description=S1 RNA binding domain
VDDDRKEGKVNRRVWLSLRLSQLYKGLSLDALQEGMVLAAQXKSVEDHGYILHFGVPSFSGFMQKADKENVKIEPRQLIQCVVKAIDKTRAIVHLSSDEDLVSKSIIKDLKGLSIDHLIPGMMVNARVHSVLENGVMLSFLTYFSGTVDIFNLSNPFPSGNWKDGYSKNKKVNARILFVDPSTRAVGLTLNKHLLHLEVPPINLKAGDIYDKSKVLRIDKKAGLFLEIPSSTPSPGFISIHDVSDKDVKNLEKKFKEGSSLRVRILGVRNLEGVAIGTVKDSAFEGSVFTHDDVKPGMLVRAKVVTVEPFGAIVQFSSGVKARL

SEQ ID NO: 77244 - protein, 242 aa, Setaria italica
  Transcript Sequence Number=SeqID_11270
  Gene Ontology: Mol. function=oxidoreductase activity; Biological process=oxidation reduction
  Homolog annotation: Hit_ID=B6TF29; Match level="QueryCoverage=98%, HitCoverage=59%, E-value=1e-112, Identity=82%"; Hit description =Gibberellin 20 oxidase 2
  Pfam annotation: Domain name=2OG-FeII_Oxy; Domain location=90-189; Score=154.7; E_value=2.8e-43; Accession=PF03171.12; Description=2OG -Fe(II) oxygenase superfamily
PDVRAAVRYGTSFNQARDAVLCWRDFLKLACSHPLRDVVASWPREPADLRGVASAYAAASHALFMELMEAALQALGIASGGVLGELAAGSSHMMTVNCYPACPQPELTLGMPAHSDYGLFTFVLQDHVEGLQVMHGGRWLTVDPIPGSFVVNVGDHLEIYSNGAYKSVLHRVRVNSTRPRISVASFHSLPAERVVGPAPELVDEAAGNPPRYMDTDFATFLAYLASADGKDKTFLQSRMLAL

SEQ ID NO: 77245 - protein, 94 aa, Setaria italica
  Transcript Sequence Number=SeqID_11271
LSDLNSNQDTKGFPSFLDTKEVVSHKPTNSKTRRLQTYYMDTHKHKYNKTSKTITGQLKKPKDLYLTTITTLSNLHLVLTKQVNIAICMPSLVK

SEQ ID NO: 77246 - protein, 107 aa, Setaria italica
  Transcript Sequence Number=SeqID_11272
  Gene Ontology: Mol. function=transporter activity; Cellular component= membrane; Biological process=oligopeptide transport
  Homolog annotation: Hit_ID=B9RUG8; Match level="QueryCoverage=85%, HitCoverage=17%, E-value=5e-18, Identity=47%"; Hit description=Amino acid permease, putative
EPAEAKEALGEAAPSVARVILGLLPIWAILLIFAVIFQQPMTFFTKQGMLMDHKLGAFVVPPAMLQSSITISIILLVPMYDRVIIPLFNAVTRARGITVFQRIGVGM

SEQ ID NO: 77247 - protein, 93 aa, Setaria italica
  Transcript Sequence Number=SeqID_11273
  Gene Ontology: Cellular component=vacuole
  Homolog annotation: Hit_ID=B6U3F4; Match level="QueryCoverage=81%, HitCoverage=36%, E-value=3e-20, Identity=66%"; Hit description =Lipase/lipooxygenase, PLAT/LH2
  Pfam annotation: Domain name=ATS3; Domain location=1-63; Score=2.1; E_ value=2.5e-09; Accession=PF06232.3; Description=Embryo-specific protein 3, (ATS3)
RVAGPCGYGVCYLYLRRSGRDGWAPEWVQVVQPGPRSGDAPATATFYFGDPLPDGVWYGHDRCPKSKASTDDDHPATTTGAPRASNSSAPPQE

SEQ ID NO: 77248 - protein, 40 aa, Setaria italica
  Transcript Sequence Number=SeqID_11274
  Gene Ontology: Mol. function=electron carrier activity; Biological process=oxidation reduction
  Homolog annotation: Hit_ID=Q6XQ14; Match level="QueryCoverage=90%, HitCoverage=7%, E-value=2e-10, Identity=86%"; Hit description =Cytochrome P450 protein CYP71E
AHEKSSGPRVLSYDFLDVAFSPYSDYWREMRKLFILELLS

SEQ ID NO: 77249 - protein, 86 aa, Setaria italica
  misc_feature (23)..(23): Xaa can be any naturally occurring amino acid
  Transcript Sequence Number=SeqID_11275
  Gene Ontology: Mol. function=electron carrier activity; Cellular component=endoplasmic reticulum membrane; Biological process =oxidation reduction
  Homolog annotation: Hit_ID=O48958; Match level="QueryCoverage=79%, HitCoverage=12%, E-value=7e-15, Identity=58%"; Hit description=4 -hydroxyphenylacetaldehyde oxime monooxygenase
MMEGELRRGAPGRQLPVLGNLLXQIGSRPHRYFQAVARRYGPVVEVRLGRVRTVVVSSPEAAKDLLRTNDQHCCSRPNSPGKYIGY

SEQ ID NO: 77250 - protein, 82 aa, Setaria italica
  Transcript Sequence Number=SeqID_11276
  Gene Ontology: Mol. function=aminoacyl-tRNA ligase activity; Cellular component=cytoplasm; Biological process=tRNA aminoacylation for protein translation
  Homolog annotation: Hit_ID=Q7G2B1; Match level="QueryCoverage=54%, HitCoverage=4%, E-value=1e-17, Identity=88%"; Hit description=Valyl -tRNA synthetase
KQKEAARLQAQAASDGGGGKKSDKKLRKKTATDENPEDFIDPETPSGQKKLLASQMAKQYSPAAVEKSWYAWWESSQLLKQM

SEQ ID NO: 77251 - protein, 111 aa, Setaria italica
  Transcript Sequence Number=SeqID_11277
LPPCAMYARIKTIIAEARLESGGGGGYDNSSGGGSSPASPGASESDGSSSADEFYPPDLITSEFPRHASPLSSSARDEFDFDRDCVRQFFVSSPRVLDDVHTHQQRTLLLL

SEQ ID NO: 77252 - protein, 56 aa, Setaria italica
  Transcript Sequence Number=SeqID_11278
  Gene Ontology: Mol. function=voltage-gated potassium channel activity; Cellular component=voltage-gated potassium channel complex; Biological process=potassium ion transport
MAGSGRVRFNVGGQVFETTTTTLANAGRDSMLGALLDSSWNVSSGGGGGGVAEYFI

SEQ ID NO: 77253 - protein, 79 aa, Setaria italica
  Transcript Sequence Number=SeqID_11279
CCARSRSTGARRATEYYTTSEAIEARTSCDSPVAQSLAAYRMPTATTCSATLSFSSTTLPSLTALDPSLVHCSTASTAM

SEQ ID NO: 77254 - protein, 137 aa, Setaria italica
  misc_feature (12)..(12): Xaa can be any naturally occurring amino acid
  misc_feature (132)..(132): Xaa can be any naturally occurring amino acid
  Transcript Sequence Number=SeqID_11280
  Gene Ontology: Mol. function=aspartic-type endopeptidase activity; Cellular component=chromatin; Biological process=chromatin assembly or disassembly
  Homolog annotation: Hit_ID=Q10PF2; Match level="QueryCoverage=100%, HitCoverage=14%, E-value=1e-48, Identity=67%"; Hit description =Retrotransposon protein, putative, unclassified
  Pfam annotation: Domain name=rve; Domain location=26-137; Score=23.0; E_value=0.00014; Accession=PF00665.18; Description=Integrase core domain
KQCTICQQAKQXRTPTPSDLLQPLPIPQGAWQDISMDFIEGLPLSEGFNVILVVVDRFTKYSYFIPLKHPFNAQAVAKVVLDNVVKLHGMPRTIVSDRDKIFTSHFWTALFKLVDTKLLRSSAYHPQTDGQXERVNQ

SEQ ID NO: 77255 - protein, 85 aa, Setaria italica
  Transcript Sequence Number=SeqID_11281
  Subcellular localization annotation: CTP_CleavageSite=41; ConfidenceScore=5.48e-01
CTASSPLNAKTLHLVHRHGQHRSFKRNAHSSKRSISSKDINCAQSQPTRTEAARLSPMPAPACHPTRLGNDRTGGGDGGGIWGPN

SEQ ID NO: 77256 - protein, 133 aa, Setaria italica
  Transcript Sequence Number=SeqID_11282
LFVLVNNISDEYLTDNGGCKCELDCKVWNLLPREHIRLTPKLSSSTSAWSNYRPCQSVTRSTRNILPKITLRREVITCYCWCPLPGIQRQQSAGYRPHTSVSLSQFAAFPTFHFFVGQQRHNNLLRLIFFSTW

SEQ ID NO: 77257 - protein, 89 aa, Setaria italica
  Transcript Sequence Number=SeqID_11283
  Gene Ontology: Mol. function=hydrolase activity
  Homolog annotation: Hit_ID=Q6K4D8; Match level="QueryCoverage=100%, HitCoverage=28%, E-value=1e-41, Identity=91%"; Hit description =Hydrolase-like protein
LPEETYKLLENCELLIMDALRPDRSSSTHFGLPRALEEVRKIKPKKTLFTGMMHLMDHEKVNDDLARLMETEGLDIQLSYDGLRIPVRL

SEQ ID NO: 77258 - protein, 143 aa, Setaria italica
  Transcript Sequence Number=SeqID_11284
NAYLPQSISTTSNAKVWVKTISNDANKIYYIVHTPIQRARLISILLQHGGASGIMKSLTKTIQNCAQAELGTQILPTNYTSLRRRCTDPTITQAIRQLSSGREEEKARAGEASHGVRPAASRRRYPGVQVLAHVPRGVELATR

SEQ ID NO: 77259 - protein, 64 aa, Setaria italica
  Transcript Sequence Number=SeqID_11285
MRVSHKEVHEHVSSILKDGGFYPPGESIDVGNLCPYENVLSEKELPNNHGDMFRVEAGCQHSAK

SEQ ID NO: 77260 - protein, 159 aa, Setaria italica
  misc_feature (26)..(26): Xaa can be any naturally occurring amino acid
  misc_feature (83)..(83): Xaa can be any naturally occurring amino acid
  Transcript Sequence Number=SeqID_11286
RIHTRTITWWCRQRVKEKENKGLEMXKKLTSAALLLVRAILKVGEDLDAYIRSHPEVPHNMRVSHKEVHEHVSSILKDGGFLXPGESIDVGNLCPYENVLSEKELPNNHGDMFRVEAGCQHSAKKVVRNRIPRGWELKYARRSFFPFWRSVLKARSCLR

SEQ ID NO: 77261 - protein, 223 aa, Setaria italica
  Transcript Sequence Number=SeqID_11287
  Gene Ontology: Mol. function=ATPase activity, coupled to transmembrane movement of substances; Cellular component=integral to membrane; Biological process=transport
  Homolog annotation: Hit_ID=Q6UC91; Match level="QueryCoverage=100%, HitCoverage=16%, E-value=1e-101, Identity=80%"; Hit description=P -glycoprotein 1
MGTHDELMAKGEQGTYAKLIRMQEQAHEAALVNARRSSARPSSARNSVSSPIMTRNSSYGRSPYSRRLSDFSTADFTLSIAHHHDSSSKQMAFRAGASSFLRLARMNSPEWGYALLGSLGSMVCGSFSAIFAYVLSAVLSVYYAADPRYMERQIAKYCYLLIGMSSAALVFNTVQHVFWDAVGENLTKRVREKMFAAVLRNEMAWFDADENASARVAARLALD

SEQ ID NO: 77262 - protein, 76 aa, Setaria italica
  Transcript Sequence Number=SeqID_11288
MAEHAQGSRALLICLCLCLCLLLSSSEHLAMSMDLDDDDFFDDSFYDEVAPARRLYDERRLNVLNSNTSSNRSGAA

SEQ ID NO: 77263 - protein, 83 aa, Setaria italica
  Transcript Sequence Number=SeqID_11289
  Homolog annotation: Hit_ID=Q1SKW8; Match level="QueryCoverage=85%, HitCoverage=11%, E-value=8e-19, Identity=60%"; Hit description =Membrane attack complex component/perforin/complement C9
GGSQKDRQQPSKPEAVNIDSGMLAGGPPVPVAAQKMLRLVDTSQVTMGPQDSPGYWLVTGARLDVDNGRISLHVKFSLLAPAS

SEQ ID NO: 77264 - protein, 109 aa, Setaria italica
  misc_feature (98)..(98): Xaa can be any naturally occurring amino acid
  misc_feature (103)..(103): Xaa can be any naturally occurring amino acid
  Transcript Sequence Number=SeqID_11290
  Homolog annotation: Hit_ID=B9RZN7; Match level="QueryCoverage=98%, HitCoverage=6%, E-value=3e-39, Identity=75%"; Hit description=WD -repeat protein, putative
  Pfam annotation: Domain name=WD40; Domain location=20-86; Score=20.4; E_value=0.0077; Accession=PF00400.24; Description=WD domain, G-beta repeat
TFARVWNACKSSSEEHDQPNHEMDLLSGHENDVNYVQFSGCAVASRSFSSDSGHISKEENNLKFRNSWFTHNIVTCSRDGSAIIWVPRSRRSHGKVGXRWTRXYHLKVP

SEQ ID NO: 77265 - protein, 105 aa, Setaria italica
  Transcript Sequence Number=SeqID_11291
FLGAVQSQLCKNSKPRAARPLTVQDGPIWKWCRRFACTKLEQALLPLLASSLSRSDDLPRPHSPPIQTLAMESTPPAVPPSRAAPRHRSSPPPPRDSSCPSLGSQ

SEQ ID NO: 77266 - protein, 102 aa, Setaria italica
  Transcript Sequence Number=SeqID_11292
  Gene Ontology: Cellular component=intracellular; Biological process =signal transduction
  Homolog annotation: Hit_ID=B6SWP2; Match level="QueryCoverage=68%, HitCoverage=13%, E-value=4e-18, Identity=77%"; Hit description=Rac GTPase activating protein 1
  Pfam annotation: Domain name=PBD; Domain location=27-73; Score=44.0; E_value=5.8e-10; Accession=PF00786.20; Description=P21-Rho-binding domain
VKLKSLLGCRTVGAGAGEVQRGGCGMEIGLPTDVQHVAHVTFNRFHGFLGLPVEFELEVPRRAPSARSVPYPVFINRCQVHALKSERYEFYSEFSGLTAFNF

SEQ ID NO: 77267 - protein, 414 aa, Setaria italica
  misc_feature (11)..(11): Xaa can be any naturally occurring amino acid
  Transcript Sequence Number=SeqID_11293
  Gene Ontology: Cellular component=intracellular; Biological process =signal transduction
  Homolog annotation: Hit_ID=B6SWP2; Match level="QueryCoverage=99%, HitCoverage=82%, E-value=0.0, Identity=82%"; Hit description=Rac GTPase activating protein 1
  Pfam annotation: Domain name=PBD; Domain location=27-73; Score=46.4; E_value=1.1e-10; Accession=PF00786.20; Description=P21-Rho-binding domain
  Pfam annotation: Domain name=RhoGAP; Domain location=90-230; Score =97.8; E_value=3.8e-26; Accession=PF00620.19; Description=RhoGAP domain
  Pfam module annotation: Pfam domain module=PBD::RhoGAP; Domain location=27-73::90-230
AAAESLLGCRXVGAGAGEVQRGGCGMEIGLPTDVQHVAHVTFNRFHGFLGLPVEFELEVPRRAPSASASVFGVSTESMQCSYDSRGNSVPTILLMMQRRLYEQGGLQAEGIFRINAENSQEELVRDQLNSGIVPDGIDVHCLAGLIKAWFREMPSGVLDPIPPEQVMQCQSEEDCARAAKCLPPAEAALLDWAVNLMADVVQEEQINKMNDRNIAMVFAPNMTQMADPLTALMYAVQVMNFLKMLVQKTLKDRGESNPEDVLLSQKDPSDENGHQKPSVTLDSLLEEGSRRPSFANEEPLLNSPAHSTGDKPNETNTTEGVTAAFSAQASEVIRSMEDSTSCSQPAIACPAADASSATATNSLQGKASRSPNRRRARNGKGQSGTRATAAAEKSRGVSIVSRINSKVERIEAWR

SEQ ID NO: 77268 - protein, 84 aa, Setaria italica
  Transcript Sequence Number=SeqID_11294
  Gene Ontology: Mol. function=DNA-directed DNA polymerase activity; Cellular component=nucleus; Biological process=nucleobase, nucleoside, nucleotide and nucleic acid metabolic process
  Homolog annotation: Hit_ID=O48653; Match level="QueryCoverage=100%, HitCoverage=5%, E-value=1e-41, Identity=95%"; Hit description=DNA polymerase alpha catalytic subunit
TWLADACGLKRQQFDIQQQALKLTANSMYGCLGFSNSRFYAKPLAELITLQGREILQNTVDLVQNNLNLEVIYGDTDSIMIHTG

SEQ ID NO: 77269 - protein, 156 aa, Setaria italica
  Transcript Sequence Number=SeqID_11295
  Homolog annotation: Hit_ID=A0QLV3; Match level="QueryCoverage=66%, HitCoverage=34%, E-value=8e-10, Identity=34%"; Hit description =Putative S-adenosyl-L-methionine-dependent methyltransferase MAV_4764
PCQDHYRLTTRYIDDKLQNLISNSEDIRQIVLLTDGMDTRPYRLSWPRLSVLYDVSPGKVFSTATQRLRGSGAKVSRNCVLLHIPLESPDLLEVLSKNGFNGNRLSLWVLQGLPLPTTTSLENLLLVISNLAMKGSIFIGVLPHFPDCMASMDMVD

SEQ ID NO: 77270 - protein, 91 aa, Setaria italica
  misc_feature (26)..(26): Xaa can be any naturally occurring amino acid
  misc_feature (36)..(36): Xaa can be any naturally occurring amino acid
  misc_feature (62)..(62): Xaa can be any naturally occurring amino acid
  Transcript Sequence Number=SeqID_11296
  Subcellular localization annotation: CTP_CleavageSite=78; ConfidenceScore=5.16e-01
PTRHLPRTSRLPPYPPPLPPPAPPPXPPPEPAPPPXPPPAPPPAPAPPPYPPPVPPPAPPPXPPPAPAPLSSLLPLPTTSTATSLYNQVNN

SEQ ID NO: 77271 - protein, 344 aa, Setaria italica
  Transcript Sequence Number=SeqID_11297
EKTKSAPSIMNIHFGTIVSDLIVPLDGTERKALPFIRYDGYSDYHNGQHLRDSSVSLAEYLLKRDCLSAFTKVLKTHNLGPMTLLDLPREQGPFSKQVATEDGKVFCSSLLDALWEVEQLGECFEDFNASNIYVRGRKAVLRNVKRQKLQPGQLMLNYKSAKKIIEDAFLLFGPIPQDIQHLLNMMENEHDKRSLFRIHASLWSLSSRGGKYMRMHERLKVLKSFQRDAIMRAMGQLNYIATWRTDVQSNPLLNEIFTHPSATYSTPQFPLDPLTLEVLEGTLFSDYLRNRVAHRMDKYGKFQPFSAQGTELIAQVRWPNALPVLQYELHKVKTPSDPNIGELY

SEQ ID NO: 77272 - protein, 121 aa, Setaria italica
  misc_feature (23)..(23): Xaa can be any naturally occurring amino acid
  Transcript Sequence Number=SeqID_11298
  Gene Ontology: Mol. function=nucleic acid binding; Cellular component= chloroplast; Biological process=cell redox homeostasis
  Homolog annotation: Hit_ID=Q8S7U8; Match level="QueryCoverage=96%, HitCoverage=47%, E-value=4e-40, Identity=67%"; Hit description =Putative thioredoxin
  Pfam annotation: Domain name=Thioredoxin; Domain location=17-113; Score=-25.7; E_value=0.026; Accession=PF00085.12; Description =Thioredoxin
GIRTKWWEKDMESNMKNTKSQEXFDKQLLMAGDKFTVVHFFSPGCGACKALHFFCQMCTKVNQFAAMHPGLQFLMVNYNEQTEICKRLNVHVLPLFHFYRGVEGRIYSFSSRITIVMKGHL

SEQ ID NO: 77273 - protein, 353 aa, Setaria italica
  Transcript Sequence Number=SeqID_11299
  Homolog annotation: Hit_ID=B6U9N5; Match level="QueryCoverage=100%, HitCoverage=100%, E-value=1e-110, Identity=64%"; Hit description=WDL1
  Pfam annotation: Domain name=TPX2; Domain location=185-241; Score =101.9; E_value=2.2e-27; Accession=PF06886.3; Description=Targeting protein for Xklp2 (TPX2)
MDVSDEKCAHPSDLPSAVDVMQSDDGRSEHLGSAAVNGAIGNEGYSGINCSEQTDDEHGGGEDSVVNVGSTADKQENQEKIPMEETEMSDGTSITSMEDALEPNNDLHSEPEDTSNHTPDLSNGKSSNGNSNVFQSAKSVLTSTKKVKKTSSANARKPLQSTNRGNQDDGKSSIGKATVPAGPVFRCTERAEKRREFYMKLEEKHQAMEEEKIQLEARLKKEQEEALKQLRKSLTFKANPMPSFYHEAAPSPRAEVKKLPTTRPKSPKLGRRKTTSMETSNSSSESEGTRPCCRANRDGLDSNCKCSGGAGSRSSKALATNAKPAAAAAKKQKQPKHRAHKIAGESAINIAVH

SEQ ID NO: 77274 - protein, 142 aa, Setaria italica
  Transcript Sequence Number=SeqID_11300
  Gene Ontology: Mol. function=transcription factor activity; Cellular component=nucleus; Biological process=regulation of transcription, DNA-dependent
  Homolog annotation: Hit_ID=Q8GZQ5; Match level="QueryCoverage=47%, HitCoverage=24%, E-value=6e-28, Identity=91%"; Hit description=DREB -like protein
  Pfam annotation: Domain name=AP2; Domain location=34-85; Score=75.9; E_value=1.5e-19; Accession=PF00847.12; Description=AP2 domain
DAEVGGEEEEEEEFAGKATAAKKKRKRSSEGKHPTYRGVRMRAWGKWVSEIREPRKKSRIWLGTFPTAEMAARAHDVAALAIKGRAAHLLRHDLAEVLPRAASAAPKDVQAAAALAAAFESPSSPSSEPGAGATEPCHAQDE

SEQ ID NO: 77275 - protein, 82 aa, Setaria italica
  Transcript Sequence Number=SeqID_11301
MGGDHGGGHGGGDFRQKVWSMTGGPYCRPVHWRRNTAIAMFGVFLVCIPIAMKSAELEQRPHHPVRPIPSQLWCKNFGKKEY

SEQ ID NO: 77276 - protein, 91 aa, Setaria italica
  Transcript Sequence Number=SeqID_11302
MPKMNICMIEMIYLCNTIRNCCLCNMVGVAELVLSLRGMHIDLMCQSFCFKIDCGNISANKCNTSMQQRPHHPVRPIPSQLWCKNFGKKEY

SEQ ID NO: 77277 - protein, 99 aa, Setaria italica
  Transcript Sequence Number=SeqID_11303
PGGGWRGSGPAGGKEGVEREGGSGGQRGWGLVIRRPLVDEHRGGHPQQRVVTPAQISRGAPCSAVPACARPLPHRGPMERRTPLRPPPTPHPQIPFFVS

SEQ ID NO: 77278 - protein, 525 aa, Setaria italica
  misc_feature (45)..(45): Xaa can be any naturally occurring amino acid
  Transcript Sequence Number=SeqID_11304
  Gene Ontology: Mol. function=extracellular-glutamate-gated ion channel activity; Cellular component=integral to membrane; Biological process=ion transport
  Homolog annotation: Hit_ID=Q653Y6; Match level="QueryCoverage=96%, HitCoverage=62%, E-value=1e-164, Identity=52%"; Hit description =Putative ionotropic glutamate receptor ortholog GLR6
  Pfam annotation: Domain name=Lig_chan; Domain location=180-444; Score= 324.1; E_value=2.8e-94; Accession=PF00060.18; Description=Ligand -gated ion channel
  Pfam annotation: Domain name=SBP_bac_3; Domain location=61-403; Score= 11.1; E_value=0.00042; Accession=PF00497.12; Description=Bacterial extracellular solute-binding proteins, family 3
  Pfam module annotation: Pfam domain module=Lig_chan::SBP_bac_3; Domain location=180-444::61-403
  Subcellular localization annotation: CTP_CleavageSite=28; ConfidenceScore=5.03e-01
GLRTIGYWSNFSGLSVVAPEKLNLSSLNSSTNNVQLHSAIWPGQXTETPRGWVFSYHGKPMRIGVPLRTSYKEFVMQDDGPDGVKGFAVDVFKAAISLLPYPVSCNFVLFGDGLKNPSYSDLVQKVSENYFDAAIGDIAIVTNRTRLVDFTQPYIESGLIIVAPAREIESNAWAFLKPFTFQMWCVLGVIFLFVGAVVWVLEHRTNTEFRGPPRQQIMTVCWFSFSTMFFAHRENTVSTLGRFVLLIWLFVVLIINSSYTASLTSLLTVQELTSGIQGLDSLISSSSAIGYQVGSFSRNYLVDELNIAESRLVPLNSPSDYARALELGSGNGGVAAIIDELPYVEIFLSKYCKFKTVGQVFTKSGWGFAFPRDSPLAEDLSTAILTLSENGNLQRIHDEWLSGTECSADNNAAASNSLSLSSFWGLFLICGLACLLALVIFFLRIFCQYSRYSNQVEQFPEPQIVNRPARLTTIKSLISFVDKKEEEVKNALKKRPNGSQHPSIGDSQHPSIGNTATEEQSTLPT

SEQ ID NO: 77279 - protein, 189 aa, Setaria italica
  Transcript Sequence Number=SeqID_11305
  Gene Ontology: Mol. function=transporter activity; Cellular component= plasma membrane; Biological process=transport
  Homolog annotation: Hit_ID=Q38JE2; Match level="QueryCoverage=96%, HitCoverage=99%, E-value=4e-87, Identity=86%"; Hit description =Temperature-induced lipocalin-2
  Pfam annotation: Domain name=Lipocalin; Domain location=23-166; Score= -2.2; E_value=0.057; Accession=PF00061.15; Description=Lipocalin cytosolic fatty-acid binding
  Pfam annotation: Domain name=Lipocalin_2; Domain location=17-164; Score=267.7; E_value=2.6e-77; Accession=PF08212.4; Description =Lipocalin-like domain
  Pfam module annotation: Pfam domain module=Lipocalin::Lipocalin_2; Domain location=23-166::17-164
THASSPAAMAMRVVRDLDLERYAGRWYEIACFPSTFQPKTGTNTRATYTLNPDGTVKVLNETWTDGRRGHIEGTAWRADPASDEAKLKVRFYVPPFLPIIPVTGDYWVLHIDGDYQYALVGQPSRKYLWILCRQPHMDEAVYNELVERAKEEGYDVSKLRKTAHPDPPPESEESPRDGGMWWIKSIFGK

SEQ ID NO: 77280 - protein, 47 aa, Setaria italica
  Transcript Sequence Number=SeqID_11306
  Gene Ontology: Mol. function=structural constituent of ribosome; Cellular component=intracellular; Biological process=translation
  Homolog annotation: Hit_ID=B6TTD8; Match level="QueryCoverage=97%, HitCoverage=31%, E-value=2e-12, Identity=73%"; Hit description =UBiQuitin family member
  Pfam annotation: Domain name=Ribosomal_L40e; Domain location=1-42; Score=53.7; E_value=6.8e-13; Accession=PF01020.9; Description =Ribosomal L40e family
RKHNEAKIVCRKCYARLPLRTTNCRKKKCGYSSELRSKKKFISKYSI

SEQ ID NO: 77281 - protein, 82 aa, Setaria italica
  Transcript Sequence Number=SeqID_11307
LLLCGLRCRPTILDKLGCRWTLKTSCLVKFEIFSCVLLNSPQKLVCTMSYVNCLRKHPYRIVFPYANSILRASLEKGSPQKS

SEQ ID NO: 77282 - protein, 107 aa, Setaria italica
  Transcript Sequence Number=SeqID_11308
SNIRLDNQVLNEPLWFEKNRTFSPKWSNNPVTHGTPSKRWPLDHEVLQERINYHVKLKATKVELDIGPKGNGSNTMSVIGVRWSEGITHGRSCRCTRVSKTPRRQVR

SEQ ID NO: 77283 - protein, 486 aa, Setaria italica
  Transcript Sequence Number=SeqID_11309
  Gene Ontology: Mol. function=protein tyrosine kinase activity; Cellular component=membrane; Biological process=protein amino acid phosphorylation
  Homolog annotation: Hit_ID=Q01KI1; Match level="QueryCoverage=100%, HitCoverage=92%, E-value=0.0, Identity=70%"; Hit description =H0404F02.16 protein
  Pfam annotation: Domain name=MS_channel; Domain location=275-480; Score=135.2; E_value=2.1e-37; Accession=PF00924.10; Description =Mechanosensitive ion channel
SRKPDISVVNQIKVVDRYSTVNHVTRIRRLPLSSRVDTNWLITSKPRHGALPGFLGISSFHRGYSSDTGIKPEASQSTVSNVPSTESSEVGTAGGGGGSWIEILDSARKSTVDATTDAGKKLKELTDAVTPHVQQLFDTYPNLEKVVVPLGGTLCGTMMAWLVMPIILRRLHKYASQSPISALLGNSTKNDVSYQTSLWCALEDPAKYLVTFMAFSEMATLIAPSISTYLPQAWRGAFVLSFVWFLQRWKTNFIAKAMTNPDASSLDHDKISAFDKVSSLGLIGLGVMGLAEACGVAVQSILTVGGVGGVATAFAARDVLGNILSGFSLQFSKPFSVNDYIKAGPIEGRVVEIGLTSTSLINPEKLPVIVPNSLFSSQMIVNRSRANWRASVTKIPIRIEDIEKVPSVSEEIKVMLRSNPNVSFDSDVPYCYLSRLESSYGELTIGCNLKNMRKDEWLSTEQDILLGAARIIKSHGIELGSTMQCC

SEQ ID NO: 77284 - protein, 354 aa, Setaria italica
  misc_feature (337)..(337): Xaa can be any naturally occurring amino acid
  Transcript Sequence Number=SeqID_11310
  Gene Ontology: Mol. function=GTP binding; Cellular component =intracellular; Biological process=sporulation
  Homolog annotation: Hit_ID=Q2QZ37; Match level="QueryCoverage=71%, HitCoverage=48%, E-value=1e-125, Identity=87%"; Hit description =GTP1/OBG family protein, expressed
  Pfam annotation: Domain name=Arf; Domain location=159-340; Score= -72.1; E_value=0.00053; Accession=PF00025.13; Description=ADP -ribosylation factor family
  Pfam annotation: Domain name=GTP1_OBG; Domain location=69-166; Score=- 101.2; E_value=0.048; Accession=PF01018.14; Description=GTP1OBG family
  Pfam annotation: Domain name=GTP_EFTU; Domain location=165-341; Score= -93.4; E_value=0.053; Accession=PF00009.19; Description=Elongation factor Tu GTP binding domain
  Pfam annotation: Domain name=MMR_HSR1; Domain location=168-298; Score= 134.7; E_value=2.9e-37; Accession=PF01926.15; Description=GTPase of unknown function
  Pfam module annotation: Pfam domain module=Arf::GTP1_OBG::GTP _EFTU::MMR_HSR1; Domain location=159-340::69-166::165-341::168-298
NTVTKGFEGGVSHRHIALKHNTEGNETEKESSGRSEDRKYLHACSEPGFSNADCDVRTYPHQEEIDEKDQIESEDEDFWEDEDEFDTDEEEEEEEEREEQDVQYSVAEMTKPGQRLIIARGGEGGLGNAFIVKEMRPSKAYRQEKIARLSTGKPGTETFLVLELKSIADVGLVGLPNAGKSTLLSALSRAQPEIADYEFTTLRPNIGSLTYEDYFSVKVADIPGLIKGAHKNRGLGHAFLRHIERTKVLAYVLDLAATLNGRKGIPPWEQLQDLVMELEHYQEGLTRRPSLIVANKIDEEGADEMYEELKRRVQGVPIFPVCAILQEGLPDLRVGLXLMDDSGPQGIDLRKITV

SEQ ID NO: 77285 - protein, 149 aa, Setaria italica
  Transcript Sequence Number=SeqID_11311
  Gene Ontology: Mol. function=chromatin binding; Cellular component =chromatin; Biological process=chromatin assembly or disassembly
  Homolog annotation: Hit_ID=Q2R2X7; Match level="QueryCoverage=97%, HitCoverage=48%, E-value=9e-69, Identity=87%"; Hit description=MRG family protein, putative, expressed
  Pfam annotation: Domain name=MRG; Domain location=3-137; Score=37.6; E_value=1.4e-13; Accession=PF05712.5; Description=MRG
MIGENVTQLGKLVKLPRSPTVDDILKRYLEHRAKKDNKINDSYAEVLKGLRCYFDKALPAMLLYKKERDQYTEEVKGDVSPSTVYGAEHLLRLFVKLPELLAFVNMEEDALNKLQQKLLDILKFLQKNQSTFFASVYDDRKSADGSKSK

SEQ ID NO: 77286 - protein, 254 aa, Setaria italica
  Transcript Sequence Number=SeqID_11312
  Gene Ontology: Mol. function=chromatin binding; Cellular component =chromatin; Biological process=chromatin assembly or disassembly
  Homolog annotation: Hit_ID=B6TDE5; Match level="QueryCoverage=85%, HitCoverage=67%, E-value=9e-92, Identity=78%"; Hit description =Chromatin modification-related protein EAF3
  Pfam annotation: Domain name=MRG; Domain location=74-254; Score=58.2; E_value=6.6e-15; Accession=PF05712.5; Description=MRG
MGSSSNTNASGGGSDKEEKKEDKGKGKDSSEPSFKEGDRVLAYHGPLLYEAKVQRIENLEDEWRYFVHYLGWNKNWDEWVANDRLLKLTEENVRKQQELEKNQVVDKSMKSGRSTQHKLKGANDAKADKDDTKSLVKGKKRKSQPGTEEKERRSSESLLVSQFPLTLKKQLVDDWENVTQLGKLVKLPRSPTVDDILKRYLEHRAKKDNKINDSYAEVLKGLRCYFDKALPAMLLYKKERDQYTEEVKVVIVLP

SEQ ID NO: 77287 - protein, 118 aa, Setaria italica
  misc_feature (85)..(85): Xaa can be any naturally occurring amino acid
  Transcript Sequence Number=SeqID_11313
  Subcellular localization annotation: CTP_CleavageSite=31; ConfidenceScore=5.54e-01
PATSPRPPSPVRRRFPASVRRKSGLGGSGTRSKQKSKPSKEDSPKSRRHRLPAPPFVPSLPPKPPSPSLPPPARRDPTPGCLRRXSAPNERAPRPLRRRQGLPPPQDRPPGPHPPQAA

SEQ ID NO: 77288 - protein, 162 aa, Setaria italica
  Transcript Sequence Number=SeqID_11314
  Gene Ontology: Mol. function=transferase activity, transferring groups other than amino-acyl groups
  Homolog annotation: Hit_ID=B6SYB0; Match level="QueryCoverage=100%, HitCoverage=37%, E-value=3e-45, Identity=59%"; Hit description =Taxadien-5-alpha-ol O-acetyltransferase
PHREFDAVPPPPPPPPGDMVMRTFTFGPSDISAIRKDLPPNLRDTVTTFEVLTAALWRARTAALELSPDEDVRLVFISNIRGLPELGLPAGYYGNACVPMAVLVTVEALLGGSLGDAVELVREAKATVTAEYARSTADLLVLRGRPYVAMSNLFLVSDNRHA

SEQ ID NO: 77289 - protein, 150 aa, Setaria italica
  misc_feature (50)..(50): Xaa can be any naturally occurring amino acid
  misc_feature (99)..(99): Xaa can be any naturally occurring amino acid
  Transcript Sequence Number=SeqID_11315
  Gene Ontology: Mol. function=unfolded protein binding; Cellular component=mitochondrion; Biological process=cellular protein metabolic process
  Homolog annotation: Hit_ID=P29185; Match level="QueryCoverage=74%, HitCoverage=18%, E-value=2e-49, Identity=91%"; Hit description =Chaperonin CPN60-1, mitochondrial
EGRYHRSTKSHQNQGQYFHAAKELDKLQTANFDQKIGVQIIQNALKTPVXHTIASNAGVEGAVVVGKLLEQGNTDLGYDAAKGEYVDMVKAGIIDPLKXVIRTALVDAASVSSLMTTTESIIVEIPQGRGTRTGNGWHGWNGVLEASHPR

SEQ ID NO: 77290 - protein, 155 aa, Setaria italica
  misc_feature (146)..(146): Xaa can be any naturally occurring amino acid
  Transcript Sequence Number=SeqID_11316
  Gene Ontology: Mol. function=unfolded protein binding; Cellular component=mitochondrion; Biological process=cellular protein metabolic process
  Homolog annotation: Hit_ID=P29185; Match level="QueryCoverage=100%, HitCoverage=26%, E-value=5e-73, Identity=85%"; Hit description =Chaperonin CPN60-1, mitochondrial
MISTSEEIAQVGTISANGEREIGELIAKAMEKVGKEGVITIADGNTLYNELEVVEGMKLDRGYISPYFITNEKNQKCELNDPLILIHDKKISNVHAVANVMELAMKKQKPLLIVVEDLESDVLGTLILNRLRGGIKVCAVKAPGFXGDTKKANLQ

SEQ ID NO: 77291 - protein, 72 aa, Setaria italica
  misc_feature (35)..(35): Xaa can be any naturally occurring amino acid
  Transcript Sequence Number=SeqID_11317
  Gene Ontology: Mol. function=transferase activity, transferring groups other than amino-acyl groups
  Homolog annotation: Hit_ID=B6TXE4; Match level="QueryCoverage=76%, HitCoverage=18%, E-value=1e-11, Identity=65%"; Hit description =Transferase family protein
DSSLRRRRTVTSFEVAQWQELGLADMVLRDSKPVXVSFGIVSGGDEGLVVVMPDGDAGEFLVAATIRLLPSE

SEQ ID NO: 77292 - protein, 41 aa, Setaria italica
  Transcript Sequence Number=SeqID_11318
DYYKRNYKDYFGLIEGPAREKKEEERTESEKRILEWLDKNK

SEQ ID NO: 77293 - protein, 129 aa, Setaria italica
  Transcript Sequence Number=SeqID_11319
  Gene Ontology: Cellular component=mitochondrion
  Homolog annotation: Hit_ID=B6SXN8; Match level="QueryCoverage=100%, HitCoverage=23%, E-value=8e-54, Identity=79%"; Hit description =Nodulin-like protein
  Pfam annotation: Domain name=Nodulin-like; Domain location=1-129; Score=44.3; E_value=4.1e-13; Accession=PF06813.5; Description =Nodulin-like
SSQLKEIKGISQVRLNFLAAASDAGKLFGWFAGVAALHLPLWAVALTGAAFGLVGYGVQFLFLERPGLAYWHLFVLTSLAGNGICWINTVCYLLCIKNFPSDSRVAVSLATSYLGLSAKFYTTMAKTPP

SEQ ID NO: 77294 - protein, 149 aa, Setaria italica
  Transcript Sequence Number=SeqID_11320
  Homolog annotation: Hit_ID=Q9LMX1; Match level="QueryCoverage=99%, HitCoverage=34%, E-value=1e-31, Identity=45%"; Hit description =F21F23.21 protein
GMLLAHITRGHAFSVWASFLSLTMFHMYANYKAVKSLSLTTLNDERTSILLQHFKECGEVLAPQEVSQKEHILPFWSSWRKLIRIKLPHERVHLGAKASMLTHTDMLEIAKTGSHYENTNYLLLDKEGGVHIFIHKQAAPAVLFCKFLS

SEQ ID NO: 77295 - protein, 173 aa, Setaria italica
  misc_feature (48)..(48): Xaa can be any naturally occurring amino acid
  Transcript Sequence Number=SeqID_11321
  Gene Ontology: Mol. function=nucleic acid binding; Cellular component= integral to membrane
  Homolog annotation: Hit_ID=Q9LMX1; Match level="QueryCoverage=97%, HitCoverage=37%, E-value=8e-46, Identity=56%"; Hit description =F21F23.21 protein
  Pfam annotation: Domain name=DUF647; Domain location=1-171; Score= -153.0; E_value=0.00028; Accession=PF04884.6; Description=Protein of unknown function, DUF647
EDFFGLIYCFCVLAGVASGATRAALTQHFALAKNAADISAKKHIQLFXEGSQETLATMVGMGLGMLLAHITRGHAFSVWASFLSLTMFHMYANYKAVKSLSLTTLNDERTSILLQHFKECGEVLAPQEVSQKEHILPFWSSWRKLIRIKLPHERVHLGAKASMLTHTDMLELE

SEQ ID NO: 77296 - protein, 405 aa, Setaria italica
  misc_feature (364)..(364): Xaa can be any naturally occurring amino acid
  misc_feature (373)..(373): Xaa can be any naturally occurring amino acid
  Transcript Sequence Number=SeqID_11322
  Gene Ontology: Mol. function=nucleic acid binding; Cellular component= integral to membrane
  Homolog annotation: Hit_ID=Q9LMX1; Match level="QueryCoverage=93%, HitCoverage=86%, E-value=1e-132, Identity=63%"; Hit description =F21F23.21 protein
  Pfam annotation: Domain name=DUF647; Domain location=1-394; Score =437.0; E_value=2.9e-128; Accession=PF04884.6; Description=Protein of unknown function, DUF647
RESAEADEPLHSSTVNHPVSACAFVPEGFPGSVTPDYVPFQMWDTLQGLSTYIRAMLSTQALLGAIGVGEQSATVIGATFQWFLRDLTGMLGGILFTFYQGSNLDSNAKMWRLVADFMNDLGMLMDLLSPLFPSSLIVIMCLGSLSRSFTGVASGATRAALTQHFALAKNAADISAKEGSQETLATMVGMGLGMLLAHITRGHAFSVWASFLSLTMFHMYANYKAVKSLSLTTLNDERTSILLQHFKECGEVLAPQEVSQKEHILPFWSSWRKLIRIKLPHERVHLGAKASMLTHTDMLEIAKTGSHYENTNYLLLDKEGGVHIFIHKEASRWMDEKSFIHGLMLASSAWNVKSQHAEASRWRXKWYTSRPSXLQAKGYSTERLLSHSIVWRARWLHGTLDEKLK

SEQ ID NO: 77297 - protein, 406 aa, Setaria italica
  Transcript Sequence Number=SeqID_11323
  Gene Ontology: Mol. function=catalytic activity; Biological process =metabolic process
  Homolog annotation: Hit_ID=Q9C8A3; Match level="QueryCoverage=84%, HitCoverage=12%, E-value=1e-29, Identity=36%"; Hit description =Acetyl-CoA synthetase, putative; 45051-31547
  Subcellular localization annotation: CTP_CleavageSite=39; ConfidenceScore=5.74e-01
NFTPSSYFQNSSFLGSSRGLGVNSNFLRLRRKKNKCNNMASSVSSVSSTSDGSEHAVATEGDLLADADSMVRRQSDTPSNNENAGSKTVSKRPRSEITEVSSHAGKDVSENVQGANGQVGRPWGWDDEGVVMDINILLSEFGDFSDFFQEEELDFGEPPGTAESHALVIPASDCGDVTFTDSPSTAMDIPEQRLSPVGFTSLDAFDQQIMAPAQDAVSKVQEPQKDVATPAQSQSLVLSSGRFDYLTKAEAMLTFAPEYAAVEVSVAEVPASLFTNPYLPRSKKPGSSSFSSRVYSYDVTQSSQIESAGDKPEKPSKSGNPLRDVDSSNLYTLVQGGKKESDKSLNSTDIQPTKGGTSPPISGVTSFSSSLVSQKKSDSMFNAGYFLLSMKTALATEIECITFQAA

SEQ ID NO: 77298 - protein, 71 aa, Setaria italica
  Transcript Sequence Number=SeqID_11324
TQVNLCSKNLVFTFTGNMAMNKQKGHRNVAAGIDSYFTRFGGILRSCIRTPLETTLYLVLHAQHEEELTVL

SEQ ID NO: 77299 - protein, 62 aa, Setaria italica
  Transcript Sequence Number=SeqID_11325
TQVNLCRKNLVFTFTGNMAMNKQKGHRNVAAGIDSYFTRFGGILRSCIRMPFLLVHYLVLHA

SEQ ID NO: 77300 - protein, 59 aa, Setaria italica
  Transcript Sequence Number=SeqID_11326
  Gene Ontology: Mol. function=nucleotide binding; Biological process =small GTPase mediated signal transduction
  Homolog annotation: Hit_ID=Q9XEN4; Match level="QueryCoverage=96%, HitCoverage=26%, E-value=1e-17, Identity=75%"; Hit description=Small GTP-binding protein
WSFFLLHGTSAKTAINVNDVFYEIAKKLLQGQQVQNPQGGMVLNQRPPERTVSSSSCCA

SEQ ID NO: 77301 - protein, 78 aa, Setaria italica
  misc_feature (59)..(59): Xaa can be any naturally occurring amino acid
  Transcript Sequence Number=SeqID_11327
EPGFDPLLPASQLEEISAASTWDDSKQLFEDSQEFRALDSETYARELFEECVVHLKERXKEKERLREEEKAKREKDRE

SEQ ID NO: 77302 - protein, 136 aa, Setaria italica
  misc_feature (44)..(44): Xaa can be any naturally occurring amino acid
  misc_feature (129)..(129): Xaa can be any naturally occurring amino acid
  Transcript Sequence Number=SeqID_11328
  Gene Ontology: Mol. function=nucleotide binding; Cellular component =plasma membrane; Biological process=small GTPase mediated signal transduction
  Homolog annotation: Hit_ID=Q2QLR7; Match level="QueryCoverage=99%, HitCoverage=56%, E-value=1e-67, Identity=90%"; Hit description=Ras -related protein RHN1, putative, expressed
  Pfam annotation: Domain name=Miro; Domain location=3-101; Score=15.4; E_value=0.00039; Accession=PF08477.5; Description=Miro-like protein
  Pfam annotation: Domain name=Ras; Domain location=3-136; Score=176.3; E_value=9.1e-50; Accession=PF00071.14; Description=Ras family
  Pfam module annotation: Pfam domain module=Miro::Ras; Domain location= 3-101::3-136
AAKSSLVLRFVKGQFVEFQESTIGAAFFSQTLAVNDETVKFEIXERYHSLAPMYYRGAAAAIVVYDITNAASFTRAKKWVQELQAQGNPNTIMALAGNKADLLDERQVPAEEAKAYAQENGLFFMETSXKTAINVN

SEQ ID NO: 77303 - protein, 87 aa, Setaria italica
  Transcript Sequence Number=SeqID_11329
  Gene Ontology: Mol. function=nucleotide binding; Cellular component =plasma membrane; Biological process=small GTPase mediated signal transduction
  Homolog annotation: Hit_ID=Q2QLR7; Match level="QueryCoverage=94%, HitCoverage=32%, E-value=2e-41, Identity=98%"; Hit description=Ras -related protein RHN1, putative, expressed
  Pfam annotation: Domain name=Miro; Domain location=13-87; Score=-4.9; E_value=0.031; Accession=PF08477.5; Description=Miro-like protein
  Pfam annotation: Domain name=Ras; Domain location=13-87; Score=8.1; E_ value=6e-10; Accession=PF00071.14; Description=Ras family
  Pfam module annotation: Pfam domain module=Miro::Ras; Domain location= 13-87::13-87
AATAGGNKIRNAKLVLLGDVGAGKSSLVLRFVKGQFVEFQESTIGAAFFSQTLAVNDETVKFEIWDTAGQERYHSLAPMYYRGAAAA

SEQ ID NO: 77304 - protein, 63 aa, Setaria italica
  Transcript Sequence Number=SeqID_11330
  Gene Ontology: Mol. function=nucleotide binding; Cellular component =plasma membrane; Biological process=small GTPase mediated signal transduction
  Homolog annotation: Hit_ID=Q2QLR7; Match level="QueryCoverage=100%, HitCoverage=24%, E-value=1e-24, Identity=93%"; Hit description=Ras -related protein RHN1, putative, expressed
  Pfam annotation: Domain name=Ras; Domain location=14-63; Score=-99.0; E_value=0.075; Accession=PF00071.14; Description=Ras family
MAATAGGNKIRNAKLVLLGDVGAGKSSLVLRFVKGQFVEFQESTIGAAFFSQTLAVNDETVKF

SEQ ID NO: 77305 - protein, 151 aa, Setaria italica
  misc_feature (129)..(129): Xaa can be any naturally occurring amino acid
  Transcript Sequence Number=SeqID_11331
  Gene Ontology: Mol. function=nucleotide binding; Cellular component =plasma membrane; Biological process=small GTPase mediated signal transduction
  Homolog annotation: Hit_ID=Q2QLR7; Match level="QueryCoverage=96%, HitCoverage=58%, E-value=2e-75, Identity=93%"; Hit description=Ras -related protein RHN1, putative, expressed
  Pfam annotation: Domain name=Arf; Domain location=1-149; Score=-95.9; E_value=0.033; Accession=PF00025.13; Description=ADP-ribosylation factor family
  Pfam annotation: Domain name=MMR_HSR1; Domain location=13-128; Score=- 13.3; E_value=0.017; Accession=PF01926.15; Description=GTPase of unknown function
  Pfam annotation: Domain name=Miro; Domain location=14-128; Score =78.4; E_value=2.5e-20; Accession=PF08477.5; Description=Miro-like protein
  Pfam annotation: Domain name=Ras; Domain location=14-151; Score =199.0; E_value=1.3e-56; Accession=PF00071.14; Description=Ras family
  Pfam module annotation: Pfam domain module=Arf::MMR_HSR1::Miro::Ras; Domain location=1-149::13-128::14-128::14-151
DGPTAGGNKIRNAKLVLLGDVGAGKSSLVLRFVKGQFVEFQESTIGAAFFSQTLAVNDETVKFEIWDTAGQERYHSLAPMYYRGAAAAIVVYDITNAASFTRAKKWVQELQAQGNPNTIMALAGNKADXVDERHRPAQETKAYAQENGLFF

SEQ ID NO: 77306 - protein, 92 aa, Setaria italica
  misc_feature (60)..(60): Xaa can be any naturally occurring amino acid
  misc_feature (83)..(83): Xaa can be any naturally occurring amino acid
  Transcript Sequence Number=SeqID_11332
  Gene Ontology: Mol. function=nucleotide binding; Cellular component =plasma membrane; Biological process=small GTPase mediated signal transduction
  Homolog annotation: Hit_ID=Q2QLR7; Match level="QueryCoverage=100%, HitCoverage=36%, E-value=3e-33, Identity=80%"; Hit description=Ras -related protein RHN1, putative, expressed
  Pfam annotation: Domain name=Miro; Domain location=14-92; Score= -10.3; E_value=0.1; Accession=PF08477.5; Description=Miro-like protein
  Pfam annotation: Domain name=Ras; Domain location=14-92; Score=-31.9; E_value=6.3e-07; Accession=PF00071.14; Description=Ras family
  Pfam module annotation: Pfam domain module=Miro::Ras; Domain location= 14-92::14-92
MAATAGGNKIRNAKLVLLGDVGAGKSSLVLRFVKGQFVEFQESTIGAAFFSQTLAVNAEXVKFEIWDHARAGEFPSLAPMYYXGAAAAIVVY

SEQ ID NO: 77307 - protein, 75 aa, Setaria italica
  Transcript Sequence Number=SeqID_11333
  Gene Ontology: Mol. function=nucleotide binding; Cellular component =plasma membrane; Biological process=small GTPase mediated signal transduction
  Homolog annotation: Hit_ID=Q94IR3; Match level="QueryCoverage=100%, HitCoverage=41%, E-value=1e-25, Identity=70%"; Hit description=Small GTP-binding protein
MAMLGNGSSSEAKAYAQENGLFFMETSAKTAINVNDVFYEIAKKLLQGQQVQNPQGGMVLNQRPPERTVSSSSCC

SEQ ID NO: 77308 - protein, 69 aa, Setaria italica
  Transcript Sequence Number=SeqID_11334
STSPSISVSSLLDRADVENHGSKDKKRDKQKKHKRRHHDTDDASSERDDKDDAKKSRRHTSDRKKSRKV

SEQ ID NO: 77309 - protein, 296 aa, Setaria italica
  Transcript Sequence Number=SeqID_11335
  Gene Ontology: Mol. function=protein binding
  Homolog annotation: Hit_ID=B9R6W2; Match level="QueryCoverage=99%, HitCoverage=30%, E-value=6e-65, Identity=47%"; Hit description =Protein binding protein, putative
  Pfam annotation: Domain name=FF; Domain location=241-290; Score=57.6; E_value=4.9e-14; Accession=PF01846.11; Description=FF domain
  Pfam annotation: Domain name=WW; Domain location=1-29; Score=37.7; E _value=4.7e-08; Accession=PF00397.18; Description=WW domain
  Pfam annotation: Domain name=WW; Domain location=41-70; Score=38.8; E_ value=2.1e-08; Accession=PF00397.18; Description=WW domain
  Pfam module annotation: Pfam domain module=FF::WW::WW; Domain location=241-290::1-29::41-70
SSDWQEHTAAEGKKYYYNKKTRQSSWEKPVELMTPLERADASTEWKEFTTPEGRKYYFNKVTKQSKWTIPDELKAARELAEKASNQQSDRETGTAAALVGSAASEPSTVPANQSSTAVGLIAPSAHDASANPVPPGPVPSHNVDNTSSSSTIGMQNGGTSTAVVPVPTSTEVKLVATDAGTSRNNNESSSVTTGADIEDGTSAEDLEEAKKTMPVAGKINVTPLEEKTSEEEPVVYATKTEAKNAFKSLLESVNVESDWTWEQTMRVIINDKRYGALKTLGERKQAFNEYLNQTKK

SEQ ID NO: 77310 - protein, 98 aa, Setaria italica
  Transcript Sequence Number=SeqID_11336
  Gene Ontology: Mol. function=transferase activity, transferring glycosyl groups; Biological process=metabolic process
  Homolog annotation: Hit_ID=B6TCK9; Match level="QueryCoverage=100%, HitCoverage=20%, E-value=8e-16, Identity=52%"; Hit description =Anthocyanidin 5,3-O-glucosyltransferase
ELAKLLLSRGLTVVIAVPTPPASTADFFASSASAIAALAAANPAVSFHHLPPPDYPIPDPDPFLQMLDALRLTVPALAAFLRSLPSVAALVLDLFCVD

SEQ ID NO: 77311 - protein, 128 aa, Setaria italica
  misc_feature (44)..(44): Xaa can be any naturally occurring amino acid
  Transcript Sequence Number=SeqID_11337
  Gene Ontology: Mol. function=RNA-directed DNA polymerase activity; Biological process=RNA-dependent DNA replication
  Homolog annotation: Hit_ID=Q01HQ6; Match level="QueryCoverage=95%, HitCoverage=7%, E-value=1e-27, Identity=50%"; Hit description =OSIGBa0153E02-OSIGBa0093I20.19 protein
LFILAGRRTLVRAVLSSQLIYYLSVLNAPASILEEIDRRRKRFXWTGTYEIAGGKCKVAWHTPCKPTKLGGLGILHLKKFARALRLRWLWPEWKEPRKPWVGIPTPCNERDNSVRFSNAIMLEDGEKG

SEQ ID NO: 77312 - protein, 141 aa, Setaria italica
  Transcript Sequence Number=SeqID_11338
  Gene Ontology: Mol. function=protein serine/threonine kinase activity; Cellular component=plasma membrane; Biological process =protein amino acid phosphorylation
  Homolog annotation: Hit_ID=B9RS14; Match level="QueryCoverage=99%, HitCoverage=13%, E-value=6e-57, Identity=72%"; Hit description =Serine-threonine protein kinase, plant-type, putative
  Pfam annotation: Domain name=Pkinase; Domain location=1-141; Score= -101.9; E_value=0.02; Accession=PF00069.17; Description=Protein kinase domain
  Pfam annotation: Domain name=Pkinase_Tyr; Domain location=1-141; Score=-163.7; E_value=0.0077; Accession=PF07714.9; Description =Protein tyrosine kinase
  Pfam module annotation: Pfam domain module=Pkinase::Pkinase_Tyr; Domain location=1-141::1-141
GDESKLLVYDYMDNGSLDNWLHGNTLCTGHSMVRPQSVQRVPLDWPTRLIVAVGAAQGLCYMHHDCSPPIIHRDIKTSNILLDSEFQAKVADFGLARMLVGAGEPNTMSAVAGSFGYMAPEYAYTRKVNEKVDVYSFGVVL

SEQ ID NO: 77313 - protein, 59 aa, Setaria italica
  Transcript Sequence Number=SeqID_11339
  Gene Ontology: Cellular component=integral to membrane
MACRGFFECLLKLLNLIVMAVGLAMVGYGAYLLVMWLQVVPPPAPPLPPSPAPPLPPSP

SEQ ID NO: 77314 - protein, 41 aa, Setaria italica
  Transcript Sequence Number=SeqID_11340
EGRPFCVWSISLIKHSKLVRVIEWTPYLGVSAIVKRSLLSF

SEQ ID NO: 77315 - protein, 153 aa, Setaria italica
  Transcript Sequence Number=SeqID_11341
  Subcellular localization annotation: CTP_CleavageSite=34; ConfidenceScore=5.76e-01
MAPPAASLSLVCCVPFPAPGPRRASTSSTRRLPRFAARSSSGGSRPEPKTGDNESKAVLDAFFLGKAFAEALTERVESVVGEVFSVVGQWQAEQQKQVQEFQEEVVQRAQKAKERAATEVTDDKGPKTLREPSATIVTPAPTSPPPATPTQAE

SEQ ID NO: 77316 - protein, 289 aa, Setaria italica
  misc_feature (239)..(239): Xaa can be any naturally occurring amino acid
  misc_feature (255)..(255): Xaa can be any naturally occurring amino acid
  Transcript Sequence Number=SeqID_11342
  Homolog annotation: Hit_ID=B9RP29; Match level="QueryCoverage=93%, HitCoverage=35%, E-value=3e-35, Identity=36%"; Hit description =Ubiquitin-protein ligase BRE1A, putative
LAQKENEYFNSQKLVDTKESELLEVRHEVEDMKLKVDSIQFAVHKKDLELLETQRRLDEVNNEVVELQQMISTKEDQLVQVRTKLHDKEQRIQLMQGELDKMRLGCSQAESVVQKIVELTGNLIGSVEGQEFDIYNLLDNEILNTGTALESNLHKHNQLEADIDMLKESLQQKDMDLRVAYKALDSKDLELKAVLRRLDVRDKELDKLDELSIDPNDVRRLSSLADEAMATKDNNVEEXELQKHEIEPVEVEALXATTMLKKLANIAKEFLRSGRTDSGTNLLPSRHTK

SEQ ID NO: 77317 - protein, 80 aa, Setaria italica
  Transcript Sequence Number=SeqID_11343
  Gene Ontology: Mol. function=nucleotide binding
  Homolog annotation: Hit_ID=Q1EP28; Match level="QueryCoverage=93%, HitCoverage=9%, E-value=5e-35, Identity=92%"; Hit description =Dynamin family protein
SSLSQRKIQAAVSSKPIVMRAEYAHCPNLTIIDTPGFVLKAKRGEPESTPDEILSMVKSLATPPHRLVLFLQQSSVEWCS

SEQ ID NO: 77318 - protein, 114 aa, Setaria italica
  Transcript Sequence Number=SeqID_11344
  Gene Ontology: Mol. function=structural constituent of ribosome; Cellular component=ribonucleoprotein complex; Biological process =translation
  Homolog annotation: Hit_ID=P0C488; Match level="QueryCoverage=100%, HitCoverage=56%, E-value=5e-56, Identity=96%"; Hit description=30S ribosomal protein S4, chloroplastic
  Pfam annotation: Domain name=Ribosomal_S4; Domain location=2-88; Score=131.5; E_value=2.6e-36; Accession=PF00163.11; Description =Ribosomal protein S4S9 N-terminal domain
MSRYRGPRLKKIRRLGALPGLTRKTPKSGSNQKKKFHSGKKEQYRIRLQEKQKLRFHYGLTERQLLRYVHIAGKAKRSTGQVLLQLLEMRLDNILFRLGMASTIPGARQLVNHR

SEQ ID NO: 77319 - protein, 221 aa, Setaria italica
  Transcript Sequence Number=SeqID_11345
  Gene Ontology: Mol. function=translation initiation factor activity; Cellular component=cytoplasm; Biological process=regulation of translation
  Homolog annotation: Hit_ID=O81481; Match level="QueryCoverage=100%, HitCoverage=100%, E-value=1e-116, Identity=91%"; Hit description =Eukaryotic translation initiation factor 4E-1
  Pfam annotation: Domain name=IF4E; Domain location=1-221; Score =439.4; E_value=5.5e-129; Accession=PF01652.10; Description =Eukaryotic initiation factor 4E
MADETDTRPTSAGSRGRPAPDDDDREEGEIADDSSAPAPPLQPATHPLEHSWTFWFDNPQGKSKQAAWGSSIRPIHTFSTVEDFWGLYNNIHHPSKLIVGADFHCFKNKIEPKWEDPICANGGKWTISCGRGKSDTMWLHTLLAMIGEQFDYGDEICGAVVSVRGKQERIAIWTKNAGNEAAQVSIGKQWKEFLDYKDSIGFIVHDDAKKMDKGPKNRYTV

SEQ ID NO: 77320 - protein, 100 aa, Setaria italica
  Transcript Sequence Number=SeqID_11346
VERDAAAIAESYASRILLLRRAETKVTSTSAENIECLGDVVGRLQESALEASSKGNKYINSCLRLNEEMRGLESLAMQLKTLRKNVDSLDLAVNQLLRLP

SEQ ID NO: 77321 - protein, 123 aa, Setaria italica
  Transcript Sequence Number=SeqID_11347
VSGQVGIGVPGSKCSALEYMWVHEPNGVHPVQSESEPTSPKSNYDGRRQSQVILKTSTMLLRTSPCSIVRTGPLAQCPPRRREILVSSTFLPNFLPPSLTLTARQGVNGGVGDEGGVLKLWQG

SEQ ID NO: 77322 - protein, 49 aa, Setaria italica
  Transcript Sequence Number=SeqID_11348
  Subcellular localization annotation: CTP_CleavageSite=20; ConfidenceScore=5.13e-01
PMTKRDAARKTSHANGLTKRRATKMGRESSAIWRRGRRGRRGRRRRSIG

SEQ ID NO: 77323 - protein, 105 aa, Setaria italica
  Transcript Sequence Number=SeqID_11349
  Subcellular localization annotation: CTP_CleavageSite=63; ConfidenceScore=5.66e-01
LSRTCRSPAVSRAVPTTRLQATSQQSAAGESNRSPRGSPAADRLSAPRRAAPTTLSVRIPICVAAWVSGWRRGGSSRRRRRRVARAAGRRPRPGTSSTGSTTRCC

SEQ ID NO: 77324 - protein, 112 aa, Setaria italica
  Transcript Sequence Number=SeqID_11350
FVCTLRRAASGSPGDGGCCGHQATRFSTRSYLDKGVVRDEQVLDEGCCGHQSNGDFQAESADCRPSPMGIAEEGAQDTRARHTLTCRRSCGQRGLVATGGSLGIGHASEAHL

SEQ ID NO: 77325 - protein, 87 aa, Setaria italica
  Transcript Sequence Number=SeqID_11351
  Gene Ontology: Mol. function=hydrolase activity, acting on ester bonds; Biological process=lipid metabolic process
  Homolog annotation: Hit_ID=Q2R3H2; Match level="QueryCoverage=97%, HitCoverage=22%, E-value=3e-35, Identity=78%"; Hit description=GDSL -like Lipase/Acylhydrolase family protein, expressed
PPYVPQVIKTIMNVAKEVIELGATQIIIPGNFPIGCSPSYLSLFSVSGTGDLDDRGCLKSYNAFAQYHNEQLQAAIDDLRKANTDVT

SEQ ID NO: 77326 - protein, 747 aa, Setaria italica
  Transcript Sequence Number=SeqID_11352
  Gene Ontology: Mol. function=polynucleotide adenylyltransferase activity; Cellular component=nucleus; Biological process=RNA 3'-end processing
  Homolog annotation: Hit_ID=B9SFV5; Match level="QueryCoverage=65%, HitCoverage=63%, E-value=0.0, Identity=71%"; Hit description=Poly(A) polymerase alpha, putative
  Pfam annotation: Domain name=NTP_transf_2; Domain location=70-167; Score=30.2; E_value=8.2e-06; Accession=PF01909.15; Description =Nucleotidyltransferase domain
  Pfam annotation: Domain name=PAP_RNA-bind; Domain location=358-493; Score=181.1; E_value=3.1e-51; Accession=PF04926.7; Description =Poly(A) polymerase predicted RNA binding domain
  Pfam annotation: Domain name=PAP_central; Domain location=8-357; Score=584.3; E_value=1.3e-172; Accession=PF04928.9; Description =Poly(A) polymerase central domain
  Pfam module annotation: Pfam domain module=NTP_transf_2::PAP_RNA -bind::PAP_central; Domain location=70-167::358-493::8-357
MSKAKNSNGYLGVTEPISLSGPTEKDLVQTAEVEKYLSSAGLYESQEEAVSREEVLGKLDQTVKAWIKKATRISGYGEQFVHEANAKIFTFGSYRLGVHGPGADIDTLCVGPRHATRNEYFFRWLHEMLAEMPEVTELHPVPDAHVPVLGFKINGVSIDLLYANLAHAVIPEDLDLSQDSILYNVDEQTVRSLNGCRVTDQILKLVPNIPSFRTTLRFIRYWGKRRGVYSNVMGFLGGINWAILVGRICQLYPNASPSMLISRFFRVYSKWKWPNPVMLCHIEEGPLGLAVWDPRRNYRDRGHQMPIITPAYPCMNSSYNVSVSTRYVMIQEFTRAFEICQAIDEGKADWDALFEPFPFFESYKNYLEVNITARNEDDLRNWKGWVESRLRTLVLKIERYSHETILAHPYPRDFSDKSRPLHCFYFMGLWRKQTVQAQEAEQFDIRGIVNEFKSNICAYQHWKEGMDIEVSHVKRREIPLFVFPGGVRPSRSSRTAHKNSRTVPACDVSAGQVENVLCTVSCSDAQPIPYKGSYTKQPEPDNGCLQLLGSTSVLPSSLPNKEALNGHANFHAESVEREHPEHYQESTFAPVQNNVCHAVKQHNILLPNSNNGWQSYGPGSSLNSSQRECADSAANNLPSLPPAIPAEPDELDELVSYHQVKANQVDINADQRPSLEGSSEDNLEQPCSLRPQNSNNPKRKATEELEPLELAAPSVGAAPASASTAPRKPLRLRLTTLAKPKPAEGSS

SEQ ID NO: 77327 - protein, 242 aa, Setaria italica
  misc_feature (218)..(218): Xaa can be any naturally occurring amino acid
  Transcript Sequence Number=SeqID_11353
  Pfam annotation: Domain name=RNA_GG_bind; Domain location=92-175; Score=145.0; E_value=2.3e-40; Accession=PF10258.1; Description=PHAX RNA-binding domain
MEEGECALGAAAIGEETLNYDGDDVEMADADEEAPAAEVSAAAAAGGGGGGAQAEKSGQQDRNKRKKKRNKGKKKNKGRQDGPPTNIADINRFVLNTCKRLKEKKSYLVWNAVGCLGVTAVSDLVREVEAIEKCGGQTIADGSRFRTGGGILWNILKSREPKAYKEIMAKGKELEKQFRYTNRQEMRKNKEKRKNRQSLQQGAVRLIDDDIEAQEQKXVLDDPEQLDDAEKAPPSDNKAQRK

SEQ ID NO: 77328 - protein, 168 aa, Setaria italica
  Transcript Sequence Number=SeqID_11354
  Pfam annotation: Domain name=RNA_GG_bind; Domain location=2-77; Score= 117.5; E_value=4.3e-32; Accession=PF10258.1; Description=PHAX RNA -binding domain
VRLKENKAYLVWNAVGCLGVTAVSDLVREVEAIEKCGGQTIADGSRFRTGGGILWNILKSREPKAYKEIMAKGKELEKQFRYTKRPQMSRNEDASSQGSALIDDDIEAQEQNEVLDDPEQLDDAEKAPPSDNKAQRKPLADRIRVPVAYDDLFEEGEIHEGEPQNGSI

SEQ ID NO: 77329 - protein, 383 aa, Setaria italica
  misc_feature (229)..(229): Xaa can be any naturally occurring amino acid
  Transcript Sequence Number=SeqID_11355
  Gene Ontology: Mol. function=transferase activity, transferring glycosyl groups; Cellular component=cell wall
  Homolog annotation: Hit_ID=B6SPG7; Match level="QueryCoverage=100%, HitCoverage=49%, E-value=0.0, Identity=89%"; Hit description =Phosphoribosylanthranilate transferase
  Pfam annotation: Domain name=C2; Domain location=122-204; Score=30.3; E_value=7.9e-06; Accession=PF00168.22; Description=C2 domain
  Pfam annotation: Domain name=C2; Domain location=283-377; Score=58.6; E_value=2.4e-14; Accession=PF00168.22; Description=C2 domain
  Pfam module annotation: Pfam domain module=C2::C2; Domain location =122-204::283-377
TASPEWNDVFAFSRERIQASFLDVVVRGKGFAKDDYVGKLRFDLCDAPVRVPPDSALAPQWYHVLDKNGERKGEVMMAVWFGTQADECFPLAVHADAPLAVDAKLAAHIRCKQYTVPRLWYVRVNIIEARDVAFVDKARVGEVFVRSRIAGQVHKTKTCVSRLPSYGWNEDHLFVAAEPFEDHLILSVEDRVKVDKEEVIGHVHIPFKEFERRWDARPIRPRWFNLVRXPEGAAKIEKFSTKICVRLCLEGGYRVLTEPVHYLSDVRPAARELWHNRPPIGLIELGIHNAFGLSSMRTRDGRGSCDAYCVAKYGVKWFRTQTVIDSLAPRFHQQCYWEVHDHCTVLTVAVFHNCQVGDKGGLVTGDPVKDVLLGKVRIRLSTL

SEQ ID NO: 77330 - protein, 271 aa, Setaria italica
  Transcript Sequence Number=SeqID_11356
  Gene Ontology: Mol. function=transferase activity, transferring glycosyl groups; Biological process=metabolic process
  Homolog annotation: Hit_ID=B9T3Q2; Match level="QueryCoverage=95%, HitCoverage=57%, E-value=4e-66, Identity=45%"; Hit description=UDP -glucosyltransferase, putative
PMKRVVQVFSNVRKAQCVIFTSFYELESGAINGISQVLPCPVYTFGPSIPHMPPEGNSDKIQHEKYSDWLDAQPKKSVMYVSFGSYVSMPSSQLEEVAMGLHDSAVRFFWVARDKATTTTLQQISGDKGLVVPWCDQLKVLSHPSVGGFLSHCGWNSTLEAVFTGVPVLAFPVAWDQLVNARLVADEWKIGINLREQRREDGAVSRAAMSAAVTKLMDLGDGDSLEMRRRAEGLREASHSAIQEGGSSGRSLKSFVQDFIKAKLNVAETSR

SEQ ID NO: 77331 - protein, 460 aa, Setaria italica
  Transcript Sequence Number=SeqID_11357
  Gene Ontology: Mol. function=transferase activity, transferring glycosyl groups; Biological process=mesoderm development
  Homolog annotation: Hit_ID=B7EDH2; Match level="QueryCoverage=77%, HitCoverage=100%, E-value=0.0, Identity=92%"; Hit description=(RAP Annotation release2) Glycosyl transferase
  Pfam annotation: Domain name=Glyco_transf_8; Domain location=41-263; Score=15.3; E_value=7.8e-07; Accession=PF01501.12; Description =Glycosyl transferase family 8
LRRTAAVAVVVGAEGEVAVGVAAPPRRHAYAAMMYMGTPRDYEFYVATRVMMRSLGRLSASADRVVIASLDVPPRWVQALKDDGVKVVSVENLKNPYEKQENFNMRFKLTLNKLYAWSLVSYERVVMLDSDNIFLQNTDELFQCGQFCAVFINPCIFHTGLFVLQPSMDVFKNMLHELAVGRENPDGADQGFLASYFPDLLDQPMFHPPANGTKLEGTYRLPLGYQMDASYYYLKLRWSIPCGPNSVITFPSAPWFKPWYWWSWPVLPLGLSWHEQRRENLGYSSEIPVALIQAVLYVGVIAVTRLARPSLSKMCYNRRMEKSTMFLLSLLRVVAAWSILAAYTIPFFIIPRTVHPLLGWPLYLLGSFSLSSIVINIFLLHPLSVLTTWFGIIGTLLVMSFPWYLNGVVRALAVFVYAFCCAPLIWASLVKTMSSLQVLVERDAFRLGEPNQNAEFTKLY

SEQ ID NO: 77332 - protein, 337 aa, Setaria italica
  Transcript Sequence Number=SeqID_11358
  Gene Ontology: Mol. function=transferase activity, transferring glycosyl groups; Cellular component=Golgi apparatus; Biological process=protein amino acid glycosylation
  Homolog annotation: Hit_ID=B9RYW6; Match level="QueryCoverage=94%, HitCoverage=79%, E-value=1e-121, Identity=62%"; Hit description=Beta- 1,3-galactosyltransferase sqv-2, putative
  Pfam annotation: Domain name=Galactosyl_T; Domain location=80-279; Score=165.0; E_value=2.1e-46; Accession=PF01762.13; Description =Galactosyltransferase
SNLRKGTVRLVALNQVSQTREVIMALDKTISDIEMRLAAARAAQAMSQGMSPSDSEEDQGSMRHRMSFVMGVFTTFANRKRRNSIRQTWMPQGDQLRRLEEKGVIIRFVIGRSENPNPDNEVDRAIDAEDKEYNDILRLNHVEGHGGLPMKIQMFLSTALTMWDADFYVKADDNVHVNIGITRSILARHRMKPRVYIGCMKSGPVVTKNDSKYYEPDHWKFGTEGNNYFRHATRQLYAVTRDLATYISANRHILHKYSNEDVSFGSWLIGLEVEHVDERSLCCGTPPDCEWKAQAGNPCAASFDWNCTGICNPVERMTEVHRRCWEGRGGTEGHAQF

SEQ ID NO: 77333 - protein, 135 aa, Setaria italica
  Transcript Sequence Number=SeqID_11359
  Subcellular localization annotation: CTP_CleavageSite=48; ConfidenceScore=5.32e-01
PGAVRGRRPRRRARGAHGPTPQRPSRATAQGGRRPLRLASHLAVRRARAAGLAHQSPLLSFTQGGGLAWHRVASMYIRAAPAIRRSIRVLDAKYNRIISFKQVVVLLRRRGGMLVRGNIVTGGFARKRQDLNVIT

SEQ ID NO: 77334 - protein, 438 aa, Setaria italica
  Transcript Sequence Number=SeqID_11360
  Gene Ontology: Mol. function=transferase activity
  Homolog annotation: Hit_ID=B9T3V5; Match level="QueryCoverage=85%, HitCoverage=53%, E-value=1e-140, Identity=60%"; Hit description =Transferase, transferring glycosyl groups, putative
  Subcellular localization annotation: CTP_CleavageSite=20; ConfidenceScore=5.61e-01
MAGQAARRGGAMRPPGRSMRAAVARSPAASFLLAVAASATVVGGLYFWVVVSSFRLPDSGAAGCRPDGEGSWSVGMFYGSSPLELRPIELEGRSNGNSSAWPVANPVLTCATPTEAGYPSNFVADPFLYVEGDTLYLFFETKTTASMQGDIGVARSFDKGATWEFLGIALDEAWHLSYPFVFKYENEIYMMPEGNKKKELRLYRATKFPLEWTLEKVLVNKPLIDASLVQFEGYWWLFASDFTRYGVEKNAELEIWYSNSPLGPWTEHKKNPIYKSDKSLGARNGGRLFIFEGSLYRPGQDCSGTYGRRVKLYRVEKLTKEEYKEVPVKLGIEEPKKGRNAWNGMRYHHMDAQQLASGGWIAVMDGDRVPSGDSTRRSLFGYIGFLLAIALVFFVGFVKGAISCYIPPNFWVALTRGELSRILPGNRFNQKVRRYSTN

SEQ ID NO: 77335 - protein, 404 aa, Setaria italica
  Transcript Sequence Number=SeqID_11361
  Gene Ontology: Mol. function=transferase activity; Cellular component= endoplasmic reticulum membrane; Biological process=heparan sulfate proteoglycan biosynthetic process, polysaccharide chain biosynthetic process
  Homolog annotation: Hit_ID=B9T3V5; Match level="QueryCoverage=99%, HitCoverage=56%, E-value=1e-138, Identity=58%"; Hit description =Transferase, transferring glycosyl groups, putative
  Pfam annotation: Domain name=Glyco_transf_64; Domain location=153 -402; Score=378.7; E_value=1e-110; Accession=PF09258.2; Description =Glycosyl transferase family 64 domain
GYHHMDAQQLASGGWIAVMDGDRVPSGDSTRRSLFGYIGFLLAIALVFFVGFVKGAISCYIPPNFWVALTRGELSRILPGNRFNQKVRRYSTNIGRYISATKTRLNEKTWSNMLFFWVVALIGIVNVCIAVHFLCGGNGAEEAYTYQGQHSQFTMVTMTYEARLWNLKLFVEHYSRCESVREIVVVWNKGNPPSSDAFDSTVPVRIRVEEINSLNNRFRVDPLIKTRAVFELDDDIMMTCTDLEKGFKVWREHPERMVGFYPRMIDGNPLQYRNERYARGKKGYNLILTGAAFMDSEFAFKKYWSEEAREGRDYVHKNFNCEDVLMNFLYANASSSRTTDSFRTVEYVHPAWAIDTSKLSSAAISRNTQKHYDIRTNCLSKFSSIYGPLPQKWEFGMREDGWDK

SEQ ID NO: 77336 - protein, 65 aa, Setaria italica
  Transcript Sequence Number=SeqID_11362
RGPASPSPRDLLPSPGAAAAALHGDGVVVGRHPPHRTACKKERNPRIYLLAAILSFFAILSLYLL

SEQ ID NO: 77337 - protein, 101 aa, Setaria italica
  Transcript Sequence Number=SeqID_11363
MCCCPSKACCICTLIILVLVAVGLVFGFGIYTRGFHKLTSNIHLDDHHSAGGSFRAYGHFAAAAASSTRSPLRILAPPRDLLPSPGAAAAALHGDGVVVGR

SEQ ID NO: 77338 - protein, 122 aa, Setaria italica
  Transcript Sequence Number=SeqID_11364
  Gene Ontology: Mol. function=aspartic-type endopeptidase activity; Cellular component=chromatin; Biological process=RNA-dependent DNA replication
  Homolog annotation: Hit_ID=Q8SA93; Match level="QueryCoverage=100%, HitCoverage=4%, E-value=4e-31, Identity=52%"; Hit description =Putative polyprotein
LPGWKASMMNRAGRLVMVRVVMTAFPIYHMLAFDLPKWVIKAIDKRRRGFLWKGQEHANGGNCLVSWERVQRPLEYGGLGIHNFELLGWALRIRWLWTKKMDPSRPWDGFQIQVPQNAQGLF

SEQ ID NO: 77339 - protein, 593 aa, Setaria italica
  Transcript Sequence Number=SeqID_11365
  Gene Ontology: Mol. function=nucleoside-triphosphatase activity; Biological process=inflammatory response
  Homolog annotation: Hit_ID=B9RUV8; Match level="QueryCoverage=92%, HitCoverage=76%, E-value=0.0, Identity=70%"; Hit description=ATP -dependent transporter, putative
  Pfam annotation: Domain name=ABC_tran; Domain location=393-567; Score= 162.6; E_value=1.2e-45; Accession=PF00005.19; Description=ABC transporter
  Pfam annotation: Domain name=ABC_tran; Domain location=66-259; Score =145.0; E_value=2.2e-40; Accession=PF00005.19; Description=ABC transporter
  Pfam annotation: Domain name=SMC_N; Domain location=37-570; Score= -120.9; E_value=0.011; Accession=PF02463.11; Description=RecFRecNSMC N terminal domain
  Pfam module annotation: Pfam domain module=ABC_tran::ABC_tran::SMC_N; Domain location=393-567::66-259::37-570
TLTFLTLTVYVYLISVRSFVRFPGIPSTADDGAVDDNVKDIVLENFSVSARGKELLKSASLRISHGRRYGLVGPNGMGKSTLLKLLAWRQVPVPRNIDVLLVEQEIIGDDRSALEAVVAADEELTALRAEQARLEASNNADDNERLVEVYEKLNLRDSDAARARASKILAGLGFDQSMQARSTKSFSGGWRMRISLARALFMQPTLLLLDEPTNHLDLRAVLWLEEYLCSQWKKTLIVVSHDRDFLNTVCNEIIHLHDKSLHVYRGNFDDFESGYEQKRKEMNRKFEVYEKQMKAARKSGSKAAQDKVKGQALSKAAKEAAKNKGKGKNTADDDDDQKQAAVPQKWRDYSVEFHFPEPTELTPPLLQLIEVGFSYPCRPDFKLSDVDVGIDMGTRVAIVGPNGAGKSTLLNLLAGDLTPTEGEVRRSQKLRIGRYSQHFVDLLTMEENAVQYLLRLHPDQEGMSKAEAVRAKLGKFGLPGHNHLTPIVKLSGGQKARVVFTSISMSNPHILLLDEPTNHLDMQSIDALADALDEFTGGVVLVSHDSRLISRVCEDEQRSEIWVVEEGTVKKYDGTFEDYKDELMEEIKKEVEE

SEQ ID NO: 77340 - protein, 44 aa, Setaria italica
  Transcript Sequence Number=SeqID_11366
MLQPREADVPVLFLVFIVLPVVAYFLLGRWHEAASKKARVSVLA

SEQ ID NO: 77341 - protein, 79 aa, Setaria italica
  Transcript Sequence Number=SeqID_11367
  Subcellular localization annotation: CTP_CleavageSite=36; ConfidenceScore=5.12e-01
IVDTLSDSVPLSFKTVDTFTLYFDSVCRHLQKASPSASARRNRRHHLVRADQTRATDGDDACIGRSRRIDRSRSKSPPV

SEQ ID NO: 77342 - protein, 337 aa, Setaria italica
  Transcript Sequence Number=SeqID_11368
  Gene Ontology: Mol. function=catalytic activity; Biological process =cellular metabolic process
  Homolog annotation: Hit_ID=B6TPA7; Match level="QueryCoverage=93%, HitCoverage=94%, E-value=1e-169, Identity=90%"; Hit description =Dihydroflavonol-4-reductase
  Pfam annotation: Domain name=3Beta_HSD; Domain location=16-281; Score= -29.7; E_value=5.7e-08; Accession=PF01073.11; Description=3-beta hydroxysteroid dehydrogenaseisomerase family
  Pfam annotation: Domain name=Epimerase; Domain location=15-259; Score= 46.9; E_value=8.1e-11; Accession=PF01370.13; Description=NAD dependent epimerasedehydratase family
  Pfam annotation: Domain name=NAD_binding_4; Domain location=17-272; Score=-11.4; E_value=1.6e-08; Accession=PF07993.4; Description=Male sterility protein
  Pfam annotation: Domain name=NmrA; Domain location=15-233; Score= -88.7; E_value=0.004; Accession=PF05368.5; Description=NmrA-like family
  Pfam module annotation: Pfam domain module=3Beta_HSD::Epimerase::NAD _binding_4::NmrA; Domain location=16-281::15-259::17-272::15-233
MSSAAAAMMGAGKVVCVTGASGYIASWIVKLLLARGYTVRATVRDTADPKKTLHLSVLDGAKDRLHFFKASLLEEGSFDAAVDGCETVFHTASPFYHNVKDPKAELLDPAVKGTLNVLGSCKKASIKKVVVTSSIAAVAYNGKPRTPEVIVDETWFSDPHICEKNQQWYVVSKTLAEEAAWKFSRDSGFEIITINPAMVIGPLLQPTLNTSAEAILKLINGSSSTYPNFSFGWVNVKDVALAHILAYEVPSANGRYCMVERVVHYSEVVNIIRKMYPTIPLPEKCADDKPFVPTYQVSKEKIRSLGIELKLIPLETSIKETIESLKEKDLFVLTSNL

SEQ ID NO: 77343 - protein, 234 aa, Setaria italica
  Transcript Sequence Number=SeqID_11369
  Gene Ontology: Mol. function=protein serine/threonine kinase activity; Biological process=protein amino acid phosphorylation
  Homolog annotation: Hit_ID=P17801; Match level="QueryCoverage=98%, HitCoverage=27%, E-value=4e-81, Identity=66%"; Hit description =Putative receptor protein kinase ZmPK1
  Pfam annotation: Domain name=Pkinase; Domain location=3-226; Score =69.3; E_value=1.5e-17; Accession=PF00069.17; Description=Protein kinase domain
  Pfam annotation: Domain name=Pkinase_Tyr; Domain location=1-226; Score=-63.6; E_value=1.7e-09; Accession=PF07714.9; Description =Protein tyrosine kinase
  Pfam module annotation: Pfam domain module=Pkinase::Pkinase_Tyr; Domain location=3-226::1-226
WGRAFCSDGPHRILISEYVKNGSLEKTLFAVEASEILLEWKQRFNIALGVARGLAYLHHECLEWVIHCDVKPENILLDENLVPKIADFGLAKLLNRGGSNIDVSRIQGTRGYLAPEWVSSLPITAKVDVYSFGVVLLELLKGARISDMENNENEEVEMVLGRIVRMLKENLQLDGSEEFWIPDFIDSRLNGDFNYLQARTMIKLAVSCLEEDRGRRPTMENVVQTLVSVDACFS

SEQ ID NO: 77344 - protein, 385 aa, Setaria italica
  Transcript Sequence Number=SeqID_11370
  Gene Ontology: Mol. function=protein serine/threonine kinase activity; Biological process=protein amino acid phosphorylation
  Homolog annotation: Hit_ID=P17801; Match level="QueryCoverage=91%, HitCoverage=44%, E-value=1e-109, Identity=53%"; Hit description =Putative receptor protein kinase ZmPK1
  Pfam annotation: Domain name=PAN_2; Domain location=46-108; Score =15.3; E_value=4e-05; Accession=PF08276.3; Description=PAN-like domain
  Pfam annotation: Domain name=Pkinase; Domain location=228-385; Score=- 39.7; E_value=3.9e-06; Accession=PF00069.17; Description=Protein kinase domain
  Pfam annotation: Domain name=Pkinase_Tyr; Domain location=229-383; Score=-89.4; E_value=8.8e-08; Accession=PF07714.9; Description =Protein tyrosine kinase
  Pfam module annotation: Pfam domain module=PAN_2::Pkinase::Pkinase _Tyr; Domain location=46-108::228-385::229-383
TWCLRQIGPGVYTHTPGPICVCPPGFEVIDQSDWVEGCRPKISITCDEQKVKFVHLPNTNFDGLDLSGQRNVSLNFCKQICLSDCNCNGFSYFQGSGDCYPKAILLNGRSLDGIGSMYLKIAKDLEVSGSSIPRSQVLFGPKYGPNCSAANEHVDMNKASQNISKYLYFYGFLSAIFVAELIFIVLGWFILRRERGQLGGAWPAESGYEMITNHFRRYTYRELVKATRKFKDELGRGASSIVYKGVLKDNRVVAVKKLEDINQGGEEFQHELSVIGRIYHMNLVRVWGFCSDGPHRILISEYVKNGSLEKTLFAVEGSEILLEWKQRFNIALGVARGLAYLHHECLEWVIHCDVKPENIYLSWYCSNFGCSLKLFRSLQARRIKD

SEQ ID NO: 77345 - protein, 74 aa, Setaria italica
  Transcript Sequence Number=SeqID_11371
  Gene Ontology: Mol. function=Rho guanyl-nucleotide exchange factor activity
  Homolog annotation: Hit_ID=B6U1X9; Match level="QueryCoverage=98%, HitCoverage=12%, E-value=4e-36, Identity=94%"; Hit description =Pollen-specific kinase partner protein
TNLCATIFGQLWRLEPLLPEKKAMWRREMDWLLCVSDHIVELVPTWQTFPDGTRLEIMTSRPRSDLYINLPALP

SEQ ID NO: 77346 - protein, 106 aa, Setaria italica
  Transcript Sequence Number=SeqID_11372
  Gene Ontology: Mol. function=molecular_function; Cellular component =cellular_component; Biological process=biological_process
  Homolog annotation: Hit_ID=B9RPU3; Match level="QueryCoverage=100%, HitCoverage=50%, E-value=3e-44, Identity=74%"; Hit description=AMME syndrome candidateprotein 1 protein, putative
  Pfam annotation: Domain name=AMMECR1; Domain location=8-104; Score =12.3; E_value=1.1e-08; Accession=PF01871.9; Description=AMMECR1
MVVATEEMAVYCFDTLVSHFTGDQPPAPAFEDGNHPLFVTWKKATNGSEPRLRGCIGTLEPRQIVSGFKDYALTSALRDRRFPPIQSKELPTLECTVSILTDYETA

SEQ ID NO: 77347 - protein, 208 aa, Setaria italica
  Transcript Sequence Number=SeqID_11373
  Gene Ontology: Mol. function=molecular_function; Cellular component =cellular_component; Biological process=biological_process
  Homolog annotation: Hit_ID=B9RPU3; Match level="QueryCoverage=84%, HitCoverage=83%, E-value=4e-74, Identity=73%"; Hit description=AMME syndrome candidateprotein 1 protein, putative
  Pfam annotation: Domain name=AMMECR1; Domain location=8-176; Score =212.0; E_value=1.6e-60; Accession=PF01871.9; Description=AMMECR1
SQIYGVDIVILAYDGLTCLVNFCNFSPLFVTWKKATNGSEPRLRGCIGTLEPRQIVSGFKDYALTSALRDRRFPPIQSKELPTLECTVSILTDYETAEGYLDWEVGKHGLIIEFTDPDYNIRRSATYLPEVASHEGWGHVETIDTLMKKAGYHGTITESLRKKIRVTRYQSTLYTMHYGEYVAYVKKNRGAAPAINGVTVVNGFKPGH

SEQ ID NO: 77348 - protein, 110 aa, Setaria italica
  Transcript Sequence Number=SeqID_11374
  Gene Ontology: Mol. function=signal transducer activity; Biological process=G-protein coupled receptor protein signaling pathway
  Homolog annotation: Hit_ID=Q2R941; Match level="QueryCoverage=100%, HitCoverage=12%, E-value=4e-44, Identity=81%"; Hit description=G -protein alpha subunit, putative, expressed
RDEVPYSARTVPDYLDQKRIQKLLLLGPPGAGTSTIFKQAKYLYGTRFTQEELEGIKLMIQSNMFKYLGILLEGRERFEEEALSRLNCTTSEGDETQHGNMVKSFDLCFF

SEQ ID NO: 77349 - protein, 591 aa, Setaria italica
  Transcript Sequence Number=SeqID_11375
  Gene Ontology: Mol. function=signal transducer activity; Biological process=G-protein coupled receptor protein signaling pathway
  Homolog annotation: Hit_ID=Q2R941; Match level="QueryCoverage=100%, HitCoverage=69%, E-value=0.0, Identity=90%"; Hit description=G -protein alpha subunit, putative, expressed
  Pfam annotation: Domain name=G-alpha; Domain location=158-570; Score =22.5; E_value=1.8e-20; Accession=PF00503.12; Description=G-protein alpha subunit
SEKECQANQLRPEQLIVNGCPLRPEELTDLLSCSRPPQKLKPGKYWYDKESGLWGKEGEKPDRIISSNLNFTGKLQANASNGNTQVFINGREITKIELKILKVANVQCPRDTHFWVYDDGRYEEEGQNNIKGKIWESALTRFACALFSLPVPPGNSNGTRDEVPYSARTVPDYLDQKRIQKLLLLGPPGAGTSTIFKQAKYLYGTRFTQEELEGIKLMIQSNMFKYLGILLEGRERFEEEALSRLNCTTSEGDETQHDDSKANGSNSCVYSINARLKKFSDWLLDIIAMGDLDAFFPAATREYAPFVDEMWKDPAIQATFKRKEELHFLPDVAEHFLSRAIEVSSNEYEPSEKDVIFAEGVTQGNGLAFIEFTLDDRSPMSEPYIDNPEAHSQPLTKYQLIRVSAKGMNDGCKWVEMFEDVRMVIFCIALSDYDQLGPPVNGSGRPLVNKMMQSKELFEATIRQPCFCDTPFVLVLNKYDLFEEKINRAPLSSCEWFNDFCPVRTHHNNQSLAHQAYYYIAMKFKDMYFAHTNRKLFVWQARARDRQTVDEAFKYIREVLKWEEEKDENYYQEESFYSTTEMSSSPFIRAE

SEQ ID NO: 77350 - protein, 249 aa, Setaria italica
  Transcript Sequence Number=SeqID_11376
  Gene Ontology: Mol. function=oxidoreductase activity; Biological process=oxidation reduction
  Homolog annotation: Hit_ID=Q6ZBF0; Match level="QueryCoverage=96%, HitCoverage=66%, E-value=2e-46, Identity=44%"; Hit description =Putative 2-oxoglutarate-dependent oxygenase
  Pfam annotation: Domain name=2OG-FeII_Oxy; Domain location=91-192; Score=151.0; E_value=3.5e-42; Accession=PF03171.12; Description=2OG -Fe(II) oxygenase superfamily
KRPYYSRDPARRVRYQSNFDLFPAPAASWRDTLFLELPAPEEEIPPACRGAVPEYAREARGLGARLLELLSEALGLHARYLEHDAGCLDGGGVAVGCHYYPPCPEPHLTLGTAKHSDPSFLTVLLQDGVGGLQVLVGGRWVDVPPVPGALVVNIGDLLQLVSNDRFKSVEHRVVATSPAAAARVSAACFFRTTGAAASTRAYGPITTLTPPRYRSVTMAEFLGYYKGKGLDGRSALDRFRLPSSDDPCI

SEQ ID NO: 77351 - protein, 61 aa, Setaria italica
  Transcript Sequence Number=SeqID_11377
ELLMFRTRKHLYQESGLLHRDGHKIQLCCNLIFRKLHLIRWRAWNEHEMREPIHRVGRERK

SEQ ID NO: 77352 - protein, 73 aa, Setaria italica
  Transcript Sequence Number=SeqID_11378
  Gene Ontology: Mol. function=catalytic activity; Biological process =trehalose biosynthetic process
  Homolog annotation: Hit_ID=O64896; Match level="QueryCoverage=67%, HitCoverage=12%, E-value=2e-17, Identity=81%"; Hit description =Trehalose-6-phosphate phosphatase
HKSFTILQVLEVRPVIDWDKGKAVEFLLQSLGLNDSENVIPIYIGDDRTDEDAFKVATSSEGTSVVAHLTHSK

SEQ ID NO: 77353 - protein, 63 aa, Setaria italica
  Transcript Sequence Number=SeqID_11379
  Gene Ontology: Mol. function=catalytic activity; Biological process =trehalose biosynthetic process
  Homolog annotation: Hit_ID=B9R9S0; Match level="QueryCoverage=73%, HitCoverage=11%, E-value=1e-12, Identity=73%"; Hit description =Trehalose-6-phosphate synthase, putative
IFGVSPQVLRERNCGYGILVSQVPKDTEAFYSLRDPSEVMGFLNSLVKMEEALTVNENRKYDD

SEQ ID NO: 77354 - protein, 368 aa, Setaria italica
  Transcript Sequence Number=SeqID_11380
  Gene Ontology: Mol. function=catalytic activity; Biological process =trehalose biosynthetic process
  Homolog annotation: Hit_ID=Q3ZTF5; Match level="QueryCoverage=99%, HitCoverage=98%, E-value=1e-118, Identity=58%"; Hit description =Trehalose-phosphate phosphatase
  Pfam annotation: Domain name=Hydrolase_3; Domain location=117-357; Score=-82.1; E_value=0.09; Accession=PF08282.4; Description=haloacid dehalogenase-like hydrolase
  Pfam annotation: Domain name=Trehalose_PPase; Domain location=118 -351; Score=312.4; E_value=9.2e-91; Accession=PF02358.8; Description =Trehalose-phosphatase
  Pfam module annotation: Pfam domain module=Hydrolase_3::Trehalose _PPase; Domain location=117-357::118-351
  Subcellular localization annotation: CTP_CleavageSite=61; ConfidenceScore=5.62e-01
MDMSTSSPVITDPLSISPPLLGSLASNMMQFSVMSGGCSSPSMNVSASRRKIEEVLVNGLLDAMKSSSPRKKHNLAFGQGNSLDEDPVYSSWMSKCPSALTSFKQIVANAQGKKIAVFLDYDGTLSPIVDDPDKAFMSPVMRAAVRNVAKSFPTAIVSGRSRKKVFEFVKLKELYYAGSHGMDIVTSVAEHNTEKCKEANLFQPACEFLPMIDEVSKSLLEVISGIEGASIENNKFCVSVHYRNVAEKDWQVVARLVNEVLEAFPRLKVTNGRMVLEVRPVIDWDKGKAVEFLLQSLGLNDSENVIPIYIGDDRTDEDAFKVLRERNCGYGILVSQVPKDTEAFYSLRDPSEVMGFLNSLVRWRKRSL

SEQ ID NO: 77355 - protein, 116 aa, Setaria italica
  Transcript Sequence Number=SeqID_11381
  Homolog annotation: Hit_ID=B6TK73; Match level="QueryCoverage=93%, HitCoverage=20%, E-value=9e-37, Identity=72%"; Hit description=WD -repeat protein 4
  Pfam annotation: Domain name=WD40; Domain location=26-64; Score=23.1; E_value=0.0011; Accession=PF00400.24; Description=WD domain, G-beta repeat
PFADKFGVVWLVTLGEDGTEQVSVDNKPVSILGHYCSIITSMNFSPDGRFIATADRDSKIRVTLFPDGRFIATADRDSKIRVTLFPKNPLKGAREIQSFCLGHTDFVKAMHDTNTK

SEQ ID NO: 77356 - protein, 60 aa, Setaria italica
  Transcript Sequence Number=SeqID_11382
  Homolog annotation: Hit_ID=B6TK73; Match level="QueryCoverage=90%, HitCoverage=12%, E-value=2e-13, Identity=87%"; Hit description=WD -repeat protein 4
MHLIQLQVITMEKSYIPTSLASSFSSELLWTVMGASNMPNQASSQLLTRLRIIRRFQKDL

SEQ ID NO: 77357 - protein, 433 aa, Setaria italica
  Transcript Sequence Number=SeqID_11383
  Gene Ontology: Mol. function=molecular_function; Cellular component =nucleoplasm; Biological process=tRNA processing
  Homolog annotation: Hit_ID=B6TK73; Match level="QueryCoverage=100%, HitCoverage=100%, E-value=0.0, Identity=86%"; Hit description=WD -repeat protein 4
  Pfam annotation: Domain name=WD40; Domain location=144-182; Score =23.1; E_value=0.0011; Accession=PF00400.24; Description=WD domain, G- beta repeat
  Pfam annotation: Domain name=WD40; Domain location=192-233; Score =41.8; E_value=2.7e-09; Accession=PF00400.24; Description=WD domain, G-beta repeat
  Pfam annotation: Domain name=WD40; Domain location=52-90; Score=30.4; E_value=7.1e-06; Accession=PF00400.24; Description=WD domain, G-beta repeat
  Pfam annotation: Domain name=WD40; Domain location=94-129; Score=0.9; E_value=31; Accession=PF00400.24; Description=WD domain, G-beta repeat
  Pfam module annotation: Pfam domain module=WD40::WD40::WD40::WD40; Domain location=144-182::192-233::52-90::94-129
MEDTAVEEAEVSGAAEFAPALIAAHPHGNSVAVAIGPELRVFDLKVGSPVLLSDDCGGRSHSDAIRAICFSVSGALFASAGDDKLVKVWKTDSWRCIRTITSEKRVSAVAISNDDLYVTFADKFGVVWLVTLGEDGTEQVSVDNKPVSILGHYCSIITSMNFSPDGRFIATADRDSKIRVTLFPKNPLKGAREIQSFCLGHTDFVSCIAFTNISENQSFLISGGGDSTVRLWDHINGCLLDTCQVRDKMEELLELNETDDSSLAIADIRPSNDGSLVAVAIQSFNGVMLLACDLVGKKLSFLKVITMEKSYIPTSLASSFSSELLWTVMGASNMPNQASSQLLTRLRIIRRFQKDLLSSDNCPAILEDSEVPHGEKLLLALQGSLDVAKQEEVLASVLAALKVSMHKMLVKKHYSEERREQRKRGRNDKKIKS

SEQ ID NO: 77358 - protein, 679 aa, Setaria italica
  Transcript Sequence Number=SeqID_11384
  Homolog annotation: Hit_ID=Q53JH6; Match level="QueryCoverage=98%, HitCoverage=77%, E-value=2e-71, Identity=33%"; Hit description =Coiled-coil protein, putative, expressed
  Pfam annotation: Domain name=DUF641; Domain location=395-515; Score= -33.6; E_value=0.064; Accession=PF04859.4; Description=Plant protein of unknown function (DUF641)
  Pfam annotation: Domain name=DUF869; Domain location=1-645; Score =93.8; E_value=6.1e-25; Accession=PF05911.3; Description=Plant protein of unknown function (DUF869)
  Pfam annotation: Domain name=M; Domain location=103-125; Score=2.3; E_ value=73; Accession=PF02370.8; Description=M protein repeat
  Pfam annotation: Domain name=M; Domain location=217-237; Score=3.8; E_ value=46; Accession=PF02370.8; Description=M protein repeat
  Pfam annotation: Domain name=M; Domain location=238-258; Score=0.1; E_ value=1.4e+02; Accession=PF02370.8; Description=M protein repeat
  Pfam annotation: Domain name=M; Domain location=280-300; Score=3.6; E_ value=48; Accession=PF02370.8; Description=M protein repeat
  Pfam annotation: Domain name=M; Domain location=339-359; Score=5.5; E_ value=27; Accession=PF02370.8; Description=M protein repeat
  Pfam annotation: Domain name=M; Domain location=429-449; Score=1.8; E_ value=84; Accession=PF02370.8; Description=M protein repeat
  Pfam annotation: Domain name=Pox_A_type_inc; Domain location=287-309; Score=3.3; E_value=31; Accession=PF04508.4; Description=Viral A-type inclusion protein repeat
  Pfam annotation: Domain name=Pox_A_type_inc; Domain location=339-361; Score=2.8; E_value=37; Accession=PF04508.4; Description=Viral A-type inclusion protein repeat
  Pfam annotation: Domain name=Pox_A_type_inc; Domain location=405-427; Score=5.3; E_value=16; Accession=PF04508.4; Description=Viral A-type inclusion protein repeat
  Pfam annotation: Domain name=Pox_A_type_inc; Domain location=499-521; Score=6.8; E_value=9.5; Accession=PF04508.4; Description=Viral A-type inclusion protein repeat
  Pfam module annotation: Pfam domain module=DUF641::DUF869::M::M::M::M: :M::M::Pox_A_type_inc::Pox_A_type_inc::Pox_A_type_inc::Pox_A_type _inc; Domain location=395-515::1-645::103-125::217-237::238-258::280 -300::339-359::...
  Pfam module annotation: Domain location=429-449::287-309::339 -361::405-427::499-521
KECVRQLRRAKEEQDQTVQDALAQQARQWESHKADLELRIIELTARLEAKSERSAAADGDTGSRLAAMEKENSALKAQLLAKAEELELRTIEKELNRRAAETASKQQLEGIKKVAKLQAECRRLQATAARRPPMNAELRRSPSSACAESVTDCQSDCSDSWASALITELDQFKNNDKSGSASTRAGSLAAADIAVMDDFLEMERLASANESSKGDAAAVEDASGQVAKLEEKVKRLAAEKVEREKALHEAQRELRNSRHRVMVAEEKSAELQRQLNLANGEKHAMETEVEAAEAKRSELQGKLELARAEITGLLGKERILEERLESEKALTLELAAKYQDMEALGAEKSELSAQLEASRSEAKKLSNKITLFERKLEVEKALSIRLATKCHGIDALEAKKKGVELELESAREEIASLHKKVSSLELEVQEEKASSAELATRCEELEALGKHRDELRTQLESANSDIVKLNGKVNMLEDAMEKQRPVAVELESQLQSRQAEIESLKENVGLLEKKLESQKNLSSAYISALGASETEKKELATRFELKEKEAEELLRKMSLLEEHIYKEKARSSEFAAKCLKMEEQVPSRSLGHEPVKSTSVQDLQIRKEKELAKAAGKLADCQKTIASLSSQLKSLADFDEFLPGMESGGATSADSWDGGDPKLLQPASYPSQFGCLAVT

SEQ ID NO: 77359 - protein, 85 aa, Setaria italica
  Transcript Sequence Number=SeqID_11385
  Gene Ontology: Mol. function=hydrolase activity, hydrolyzing O -glycosyl compounds; Biological process=carbohydrate metabolic process
  Homolog annotation: Hit_ID=B9REF8; Match level="QueryCoverage=71%, HitCoverage=11%, E-value=3e-19, Identity=68%"; Hit description=Beta -glucosidase, putative
MGRTERSGRCRMALLLLAGVSLMLQGCIAQGEGALTRGSFPEGFVFGTASSAYQYEGAVKEDGRGKTTWDTFAHTFGKVADFSNA

SEQ ID NO: 77360 - protein, 56 aa, Setaria italica
  Transcript Sequence Number=SeqID_11386
CQNPSVSRFETQQKKVCKSLPNRWHLCVIIRGTTHRKYYTYRHSVTKLFFHKFNAC

SEQ ID NO: 77361 - protein, 168 aa, Setaria italica
  misc_feature (114)..(114): Xaa can be any naturally occurring amino acid
  misc_feature (139)..(139): Xaa can be any naturally occurring amino acid
  Transcript Sequence Number=SeqID_11387
MSIDKGPRRFLYRNTFGRFKTEKDLLNDAEESMMEYKTSIANLKKESKYTLDKVAIGESDLQRGQTDLRSTGKQIQSLIGSIYKAESTAAGLMDRLRTIPTRQSLELRAEASTXLLVHGIFSRLHEVLIKIHCFFLSFXVASMASDLKNQRYALQERINKISEYGVRV

SEQ ID NO: 77362 - protein, 214 aa, Setaria italica
  Transcript Sequence Number=SeqID_11388
MASPDPGRTPAQGDEAGSTSPWPLRKLQSFTPGLWSQYKVYENAVVESTKGTIADALVLVKEHQAEAIGCATVAGFILFRGPRRFLYRNTFGRFKTEKDLLNDAEESMMEYKTSIANLKKESKYTLDKVAIGESDLQRGQTDLRSTGKQIQSLIGSIYKAESTAAGLMDRLRTIPTRQSLELRAEVASMASDLKNQRYALQERINKISEYGVRV

SEQ ID NO: 77363 - protein, 105 aa, Setaria italica
  Transcript Sequence Number=SeqID_11389
  Gene Ontology: Mol. function=flavin-containing monooxygenase activity; Cellular component=vacuole; Biological process=oxidation reduction
  Homolog annotation: Hit_ID=B4FZ60; Match level="QueryCoverage=58%, HitCoverage=13%, E-value=2e-23, Identity=83%"; Hit description =Disulfide oxidoreductase/ monooxygenase
EVTAVDVLQDRHHWRVRWRKAAGGGGTDADAARTGEDEEEQEESYDAVVVCNGHYTEPRIADIPGVDAWPGKQMHSHSYRVPDPFRDQVVVIIGAKNSGGDISRD

SEQ ID NO: 77364 - protein, 349 aa, Setaria italica
  Transcript Sequence Number=SeqID_11390
  Gene Ontology: Mol. function=flavin-containing monooxygenase activity; Cellular component=vacuole; Biological process=oxidation reduction
  Homolog annotation: Hit_ID=B4FZ60; Match level="QueryCoverage=99%, HitCoverage=76%, E-value=1e-123, Identity=61%"; Hit description =Disulfide oxidoreductase/ monooxygenase
  Pfam annotation: Domain name=FMO-like; Domain location=1-329; Score= -301.9; E_value=1.7e-11; Accession=PF00743.11; Description=Flavin -binding monooxygenase-like
  Pfam annotation: Domain name=Pyr_redox; Domain location=110-188; Score=-3.4; E_value=0.011; Accession=PF00070.19; Description =Pyridine nucleotide-disulphide oxidore
  Pfam module annotation: Pfam domain module=FMO-like::Pyr_redox; Domain location=1-329::110-188
LRYLQEFARRFDLHGLVRFGTEVTAVDVLQDRHHWRVRWRKAAGGGVTDADAARTGEDEEEQEESYDAVVVCNGHYTEPRIADIPGVDAWPGKQMHSHSYRVPDPFRDQVVVIIGAKNSGGDISRDIAGVAREVHMANRASPAATCERLPGYHNLWLHSMVERADADGSVVFRDGTSVRADVIMHCTGYKYSFPFLAGETVSVHDNRIHPLYKHVFVPRLAPSLAFIGLPFKVIPFPLVQLQASWVAGALSGRIQLPSEEEMMEDVRALYSQLEAIGWPVRYTHCLKHDQFDYDDWLAEQCGHAKVEGWRRQMYDAASKKKVECPETYRDEWDDHHLLEQANQDFQKYH

SEQ ID NO: 77365 - protein, 104 aa, Setaria italica
  misc_feature (30)..(30): Xaa can be any naturally occurring amino acid
  Transcript Sequence Number=SeqID_11391
  Homolog annotation: Hit_ID=B6TWB6; Match level="QueryCoverage=100%, HitCoverage=33%, E-value=9e-35, Identity=72%"; Hit description =Phytoene synthase
EECGLLTREGGRSEVRMDERLPDAVFKVAXVAEAHLLKARELASSVPREAIPVLLPALPAQVLLDSLRRCEFNVFDSRVSRGVHGVSPLWYQLKLNWYAWRNKY

SEQ ID NO: 77366 - protein, 268 aa, Setaria italica
  Transcript Sequence Number=SeqID_11392
  Homolog annotation: Hit_ID=B6TWB6; Match level="QueryCoverage=86%, HitCoverage=73%, E-value=1e-91, Identity=73%"; Hit description =Phytoene synthase
  Pfam annotation: Domain name=SQS_PSY; Domain location=22-268; Score= -7.9; E_value=9.3e-10; Accession=PF00494.11; Description =Squalenephytoene synthase
MSRAPAASSSLQAALSYCVRQVRSYDYHNYLCLLHLPPAMRKAAFTFRAFNVETAKAMDVVSDPKTGLMRLLWWKDVIDKVFANKLVEHPVAQALSSVVSDHKVSKHWLKRSVEARINDANRDEGAIPETSAELERYAEDTQSTILYMTLQAGGIQSTAADHAASHIGKASGLLLLLKALPHHVNKQGVIPYIPANVAEECGLLTREGGRSEVRMDERLPDAVFKVASVAEAHLLKARELASSVPREAIPVLLPALPAQVPSLVFPLS

SEQ ID NO: 77367 - protein, 65 aa, Setaria italica
  Transcript Sequence Number=SeqID_11393
  Subcellular localization annotation: CTP_CleavageSite=30; ConfidenceScore=5.16e-01
AKRSAPNPKVSWDQIRIQIAYFRVWGAPFRSAGRKGRKRAGLPGACSSLATGPAKGVAARQSSPL

SEQ ID NO: 77368 - protein, 48 aa, Setaria italica
  Transcript Sequence Number=SeqID_11394
TYNFTDTLLKQNTTSEIQSERVQFRQLFPQKIFCCLRKKVYRSWLQPF

SEQ ID NO: 77369 - protein, 168 aa, Setaria italica
  misc_feature (158)..(158): Xaa can be any naturally occurring amino acid
  Transcript Sequence Number=SeqID_11395
  Subcellular localization annotation: CTP_CleavageSite=78; ConfidenceScore=5.63e-01
VGTTSPLLPNHANTMQKGNGKVGRPMENTAVSMQRLDSPSTSSAAVGMDRGIPRSTIPSPSITIRRPNGMVRSSENLSASANKPDAGALSPAMWKEKEHGGRLPQPNISTDQKVVMSKPPAAVKAADGRAERMEKVRDGAPDVAKKEDKKSDRHEKKXRKEKDKHKEK

SEQ ID NO: 77370 - protein, 342 aa, Setaria italica
  misc_feature (79)..(79): Xaa can be any naturally occurring amino acid
  Transcript Sequence Number=SeqID_11396
MSRCFPFPPPGYEKTARPDAQLVSNLQQLDKEKHKEKKHKKDKKDKDKKEGKEKKDKDRSKDKHKDKKDRKEKHRDKKXDKSKDKSRESVEGIERHDEVLHDQKVGESSRKSEEIKDLKSREDLVRKIPDEKGAASRPIENHAVSNDRSRGGFSASPAIENERPAVNRMHIHSSNASRKIEGLGQQNININQQKNGTSMRHSENFTTSAQRPAAGFAPAPTMEERGRVGRPPSNTEATPRKEGIGQRISNISILVQKRTETTNKDLAKKEVGTTSPLLPNHANTMQKGNGKVGRPMENTAVSMQRLDSPSTSSAAVGMDRGIPRSTIPKTQRQLTNYGRTKN

SEQ ID NO: 77371 - protein, 91 aa, Setaria italica
  Transcript Sequence Number=SeqID_11397
  Gene Ontology: Mol. function=enzyme inhibitor activity
MAPERRRSAAAPTLPALLLVLLSCCCWCGATAARPAPSSGDALPLPGFIKSWCAGTEYPALCEATLAPYAAAVGSSPAHLSWAALTVTLGG

SEQ ID NO: 77372 - protein, 64 aa, Setaria italica
  misc_feature (14)..(14): Xaa can be any naturally occurring amino acid
  Transcript Sequence Number=SeqID_11398
GGVHVHCATYLFAXDCGSCFCCDSGSYSCSCSCFLMDSSKLTPRKPPGGSGSGRMEVAWREREP

SEQ ID NO: 77373 - protein, 102 aa, Setaria italica
  Transcript Sequence Number=SeqID_11399
  Gene Ontology: Mol. function=chromatin binding; Cellular component =signal recognition particle, endoplasmic reticulum targeting; Biological process=chromatin assembly or disassembly
  Homolog annotation: Hit_ID=Q8LSQ2; Match level="QueryCoverage=100%, HitCoverage=25%, E-value=4e-40, Identity=86%"; Hit description =Probable signal recognition particle 43 kDa protein, chloroplastic
  Pfam annotation: Domain name=Chromo; Domain location=50-101; Score =42.9; E_value=1.2e-09; Accession=PF00385.16; Description='chromo' (CHRromatin Organisation MOdifier)
EVEKVIDGRGEGKWREYLVEWRDGGEREWVRAPWVAEDLVSDFEAGLEYAVAEAVVDKRPAAAEGGEEKWEYLVKWVDIEEATWEPAENVDDELVQEFELRQ

SEQ ID NO: 77374 - protein, 203 aa, Setaria italica
  Transcript Sequence Number=SeqID_11400
  Gene Ontology: Cellular component=integral to membrane
  Homolog annotation: Hit_ID=B6TI82; Match level="QueryCoverage=98%, HitCoverage=74%, E-value=3e-81, Identity=72%"; Hit description =Transmembrane protein 56
  Pfam annotation: Domain name=TRAM_LAG1_CLN8; Domain location=1-193; Score=146.1; E_value=1.1e-40; Accession=PF03798.8; Description=TLC domain
  Subcellular localization annotation: CTP_CleavageSite=40; ConfidenceScore=5.34e-01
MFNNRGMSTVHAIFITVMSVYLVFFSNLFSDQLDGPVTFRSSNLSNFTLGVSVGYFITDLAMIFWAYPSLGGMEYVLHHMLSLISIFYAMYSGEGQLYTYMVLISETTTPGINLRWFLDTAGMKKSKAYLVNGVAMFVAWLVARIILFVYLFYHIYFHYDQVKQMHTFSCILIFAVPTILLVMNTMWFAKILRGLKKTLAKRQ

SEQ ID NO: 77375 - protein, 163 aa, Setaria italica
  Transcript Sequence Number=SeqID_11401
  Subcellular localization annotation: CTP_CleavageSite=90; ConfidenceScore=5.36e-01
MWKRLLETTKQAVSSASKPAIPAAAVAPKPATPSAAKPATSAAASASKGDTAVAAPKLCTRKRPSSGRRAAVTPATSVTQASLLRLKQAAASKKTNLPSSLPQAHACALDEDDPPEALTKALMSVLDGPDDVEEATPSEVPVEDSEDAGEVATSNKILDFEWF

SEQ ID NO: 77376 - protein, 334 aa, Setaria italica
  misc_feature (275)..(275): Xaa can be any naturally occurring amino acid
  misc_feature (309)..(309): Xaa can be any naturally occurring amino acid
  Transcript Sequence Number=SeqID_11402
  Gene Ontology: Mol. function=ATP-dependent helicase activity; Cellular component=intracellular; Biological process=RNA processing
  Homolog annotation: Hit_ID=Q5N870; Match level="QueryCoverage=99%, HitCoverage=19%, E-value=1e-147, Identity=75%"; Hit description =Endoribonuclease Dicer homolog 3a
  Pfam annotation: Domain name=Helicase_C; Domain location=96-176; Score=69.1; E_value=1.7e-17; Accession=PF00271.23; Description =Helicase conserved C-terminal domain
  Pfam annotation: Domain name=dsRNA_bind; Domain location=246-333; Score=64.2; E_value=5e-16; Accession=PF03368.6; Description=Double stranded RNA binding domain
  Pfam annotation: Domain name=dsrm; Domain location=246-317; Score =14.4; E_value=0.082; Accession=PF00035.17; Description=Double -stranded RNA binding motif
  Pfam module annotation: Pfam domain module=Helicase_C::dsRNA _bind::dsrm; Domain location=96-176::246-333::246-317
NGPGLFAENSMLHMKFFEEALHIIDKRLQQQQGIDALLNSESGCVEAIKGGYISPKLHELIQIFLSFSDVEHVRCLIFVDRKITARVIERTMKKIGRLPYFRVSFLTGGSSSVDALTPKMQKDTLDSFRSGEVNLLFTTDVAEEGIHVPDCSCVVRFDLPKTTRSYVQSRGRARQKDSQYILMIEQGNVKQNDLISSLMRSKTLMAEIASNREPEDSHPSFFPIPTEEINEYHISTTGAKITTDSSISVLYQYCDKLPKDKYYTPRPTFQFSQYXVNGYECTVTLPSSAMFQLLVGPKARNMQKAKQLXCLDACKRLHQLGALDDHLSPSAEEL

SEQ ID NO: 77377 - protein, 539 aa, Setaria italica
  Transcript Sequence Number=SeqID_11403
  Gene Ontology: Mol. function=binding; Cellular component=mitochondrion
  Homolog annotation: Hit_ID=B9RM09; Match level="QueryCoverage=88%, HitCoverage=74%, E-value=6e-97, Identity=42%"; Hit description =Pentatricopeptide repeat-containing protein, putative
  Pfam annotation: Domain name=PPR; Domain location=157-191; Score =14.2; E_value=0.19; Accession=PF01535.12; Description=PPR repeat
  Pfam annotation: Domain name=PPR; Domain location=192-226; Score =12.5; E_value=0.3; Accession=PF01535.12; Description=PPR repeat
  Pfam annotation: Domain name=PPR; Domain location=298-332; Score=9.1; E_value=0.75; Accession=PF01535.12; Description=PPR repeat
  Pfam annotation: Domain name=PPR; Domain location=339-373; Score =26.8; E_value=9.1e-05; Accession=PF01535.12; Description=PPR repeat
  Pfam annotation: Domain name=PPR; Domain location=374-408; Score =35.0; E_value=3.1e-07; Accession=PF01535.12; Description=PPR repeat
  Pfam annotation: Domain name=PPR; Domain location=409-443; Score =35.5; E_value=2.1e-07; Accession=PF01535.12; Description=PPR repeat
  Pfam annotation: Domain name=PPR; Domain location=444-478; Score =50.0; E_value=8.9e-12; Accession=PF01535.12; Description=PPR repeat
  Pfam module annotation: Pfam domain module=PPR::PPR::PPR::PPR::PPR::PP R::PPR; Domain location=157-191::192-226::298-332::339-373::374 -408::409-443::444-478
PFPEASSPTAATPDDGTEAGEDSLSSMWEEAGDADDIFASPGGADAVADEEEVARVRDVVESTPEDKIASTLADMVVDFNEPLLAAVLLAADQCSCKKLISLFNYAAKNNPATKSLSNLEILVGKVADSDEIDKMDAYLLWDSVKEIGSVPGSVSTPLLNEMIAIFWKLEKSKAALEVFAKFDEFGCTPDSNSYYLAIEAARKKSMFRSACEVCEKMIGSGCFPNCEKVGRILTFLCDGKKVKVAHSLYLAAKEKKIQIPKSALDFLVSALARNDETVGTALELLEEYQGESLKHAGKSFATVVHALCRTNKLEDANNLLTRMVQLEEYQGESLKDAGKTFATVIHGLCRKKKLEDAKKLLLRMVDLGPAPGKAVFNFVITALSKQGEMEDAKGLLRLMENEGVSPDIYTYSVLMSGYAKGGMIDEAHALLREAKKIHLKLNRVSYHILIRGYCKMEEFEKAIECLKEMRKDGLLPNVDEYDKLIQSLCLKALDWRRAEKLLEEMEDSGLCLKGISRSLIAAVKELEGEEMQSKSSLEA

SEQ ID NO: 77378 - protein, 180 aa, Setaria italica
  Transcript Sequence Number=SeqID_11404
  Homolog annotation: Hit_ID=Q9S799; Match level="QueryCoverage=45%, HitCoverage=65%, E-value=1e-29, Identity=73%"; Hit description =F28J7.7 protein
  Pfam annotation: Domain name=Ribosomal_L37; Domain location=95-179; Score=98.9; E_value=1.7e-26; Accession=PF08561.2; Description =Mitochondrial ribosomal protein L37
  Subcellular localization annotation: CTP_CleavageSite=39; ConfidenceScore=5.59e-01
APPHASRSFFHRSDVASPRRHPQIGAARRSIPSTRSLIGSSTRRENFNQGMAMSWTRGLKHVVAPRHTAQLVESRGLAIASKAKKGGKGGADAAKTPALSKELKSSTVFGANILKEGSDPKIQADSEYPEWLWHLLEKRPVLSELRRKDPKTLPYEDLKRFVKLDNRSRIKENNALTAKN

SEQ ID NO: 77379 - protein, 89 aa, Setaria italica
  Transcript Sequence Number=SeqID_11405
  Gene Ontology: Cellular component=integral to membrane
  Homolog annotation: Hit_ID=B6ST67; Match level="QueryCoverage=80%, HitCoverage=12%, E-value=2e-17, Identity=68%"; Hit description=K -exchanger-like protein
LAAAAAHTTTSTSPPETRCGRLPWLAGGFLMSVLWSYLLARELVALLVAIGLVAGVKASVLGATVLAWGNSLGDLVADVAMAMHGGAGG

SEQ ID NO: 77380 - protein, 190 aa, Setaria italica
  misc_feature (158)..(158): Xaa can be any naturally occurring amino acid
  Transcript Sequence Number=SeqID_11406
  Gene Ontology: Mol. function=kinase activity; Biological process =carbohydrate metabolic process
  Homolog annotation: Hit_ID=B6T9R4; Match level="QueryCoverage=99%, HitCoverage=33%, E-value=1e-76, Identity=71%"; Hit description =Xylulose kinase
LTREDLRNRYAEGSWDMFNRLLEETALLNGGKLGFYYKEHEILPPLPVGFHRYIVKNLSSGSLDQMVEEEVDEFDPPSEVRAIIEGQFLSMRGHAEQCGLPVPPKHIIATGGASSNPIILKIMASIFGCPVYTSQRSDSASLGAALRAAHGWLCNQQXSFVPFSCVYSGRIDRTSLSMKLAVPLGTARET

SEQ ID NO: 77381 - protein, 72 aa, Setaria italica
  Transcript Sequence Number=SeqID_11407
  Subcellular localization annotation: CTP_CleavageSite=42; ConfidenceScore=5.09e-01
PKYLTSGILSSQPKPKHDRAHDKISSNKDKRFCSPYSNSCIRSKNQQKVILPKDMLSSTTNRRQNQLQAAPC

SEQ ID NO: 77382 - protein, 68 aa, Setaria italica
  Transcript Sequence Number=SeqID_11408
TTTPAPGSGATAAAAPETGPTGVDTTAPGGGAGVKSVPGLLDTGAAAAGYRGISAAALFMTLLGVYLL

SEQ ID NO: 77383 - protein, 469 aa, Setaria italica
  misc_feature (97)..(97): Xaa can be any naturally occurring amino acid
  Transcript Sequence Number=SeqID_11409
  Homolog annotation: Hit_ID=Q5N730; Match level="QueryCoverage=100%, HitCoverage=33%, E-value=0.0, Identity=74%"; Hit description =Erythroid differentiation-related factor 1-like protein
YGRKKNKKTLGRNHQSQYKENGEKPTTQEAMQGSEKKQHCVKDTCIENNSVSNDDVDRYNHARENQSGNVDGVPEKSHTSVPTVRDGGIFKFLGGPXPGDIEYNLSSAIHCYGAAKGALFAYPVHSAETSIVLKKRGWAFNELGRCRLESRNLGSAEIAFADAITAFQDVHDHTNVILINCNLGHGRRALAEECVSRIDEFQKYDLPEGTYMQSFKSAKSEYFQAINYYSAAKRQLKYVNTEVDKVLFHEVYTQYAHTYLRLGMLLARESFLTDSYEGGLIDDSSNIAVLEISAGDAFREALSTYESLGEHRKQEAAFGHFQLACYQRDLCLRSLDLVDKEVKQKNEDKYRQKSKWYGSRAEKNWLKALEFYGPKTHPTMFLNILMAQSALTINISNSFHSTSMLETALGHLLEGRHVVEANEDYSNDVDLDIKPKFWSQLQSLLKRMLAASLPCVAQSSTSNREAAKL

SEQ ID NO: 77384 - protein, 136 aa, Setaria italica
  misc_feature (11)..(11): Xaa can be any naturally occurring amino acid
  Transcript Sequence Number=SeqID_11410
RMGFEKEDAYXFKQMGKAMLCTYTLFGVAWLWNETSPLGWWTLKPRPKEEKEMAHLYERREFPYPGDEEAVEEFIKSGGALGTTIGPKGFADANMDSDNMQKQLQSEKFEQEARKLWLRMRNEVIQEVQEKGFDIE

SEQ ID NO: 77385 - protein, 73 aa, Setaria italica
  Transcript Sequence Number=SeqID_11411
  Gene Ontology: Mol. function=protein transporter activity; Cellular component=clathrin adaptor complex; Biological process=intracellular protein transport
  Homolog annotation: Hit_ID=B6SV75; Match level="QueryCoverage=83%, HitCoverage=7%, E-value=2e-16, Identity=67%"; Hit description=AP-1 complex subunit gamma-1
  Pfam annotation: Domain name=Alpha_adaptinC2; Domain location=3-73; Score=-3.6; E_value=0.08; Accession=PF02883.12; Description=Adaptin C-terminal domain
  Subcellular localization annotation: CTP_CleavageSite=54; ConfidenceScore=5.45e-01
PPDGNAAYPTITAFQSATLRITFSFKKQPGKPQETTINATFTNLATTTFTDFVFQAAVPKVVFTSDSCSHYRH

SEQ ID NO: 77386 - protein, 241 aa, Setaria italica
  Transcript Sequence Number=SeqID_11412
  Gene Ontology: Mol. function=protein transporter activity; Cellular component=clathrin adaptor complex; Biological process=intracellular protein transport
  Homolog annotation: Hit_ID=B6SV75; Match level="QueryCoverage=100%, HitCoverage=28%, E-value=9e-90, Identity=71%"; Hit description=AP-1 complex subunit gamma-1
  Pfam annotation: Domain name=Alpha_adaptinC2; Domain location=118 -238; Score=159.6; E_value=9.5e-45; Accession=PF02883.12; Description= Adaptin C-terminal domain
APAVTPGGQLKLPNGVAKPPAAPLADLLDLSSDDTPVTTSSPTTAPNDFLQDLLGIGLIDSSPAGGAPSTSTDILMDLLSIGSTPVQNGPPTSNFIPPGIAETKPVPVTPQVVDLLDDGNAAYPTITAFQSATLRITFSFKKQPGKPQETTINATFTNLATTTFTDFVFQAAVPKFIQLRLDPASSSTLPASGNGSVTQSLSVTNNQHGQKPLAMRIRMSYKVNGEDRLEQGQVSNFPAGL

SEQ ID NO: 77387 - protein, 708 aa, Setaria italica
  Transcript Sequence Number=SeqID_11413
  Gene Ontology: Mol. function=protein transporter activity; Cellular component=clathrin adaptor complex; Biological process=intracellular protein transport
  Homolog annotation: Hit_ID=B6SV75; Match level="QueryCoverage=100%, HitCoverage=81%, E-value=0.0, Identity=85%"; Hit description=AP-1 complex subunit gamma-1
  Pfam annotation: Domain name=Adaptin_N; Domain location=1-424; Score =214.1; E_value=3.6e-61; Accession=PF01602.12; Description=Adaptin N terminal region
  Pfam annotation: Domain name=Alpha_adaptinC2; Domain location=585 -705; Score=159.6; E_value=9.5e-45; Accession=PF02883.12; Description= Adaptin C-terminal domain
  Pfam module annotation: Pfam domain module=Adaptin_N::Alpha _adaptinC2; Domain location=1-424::585-705
KKKAALCSIRIVRKVPDLAENFMGAAASLLKEKHHGVLISAVQLCTELCKASTEALEYLRKNSLEGLVRILRDVSNSSYAPEYDVAGITDPFLHIRVLKLMRTLSQGDADCSEYINDILAQVATKTESNKNAGNAILYECVETIMGIEATSGLRVLAINILGRFLSNRDNNIRYVALNMLMKAIAVDTQAVQRHRATILECVKDADVSIRKRALELVYLLVNDTNVKPLTKELVDYLEVSDQDFKDDLTAKICSIVEKFSQDKLWYLDQMFRVLSLAGNHVKDDVWHALIVLISNASELQGYSVRSLYKALQACGEQESLVRVAVWCIGEYGEMLVNNVSMLDIEEPITVTESDAVDAVEVYLKRYSADVTTRAMCLVSLLKLSSRFPPTSERIKEIVAQNKGNTVLELQQRSIEFSSIIQRHQSIKSSLLERMPVLDEANYLVKRAASMQATVSSVKSAPAVTPGGQLKLPNGVAKPPAAPLADLLDLSSDDTPVTTSAPTTAPNDFLQDLLGIGLIDSSPAGGAPSTSTDILMDLLSIGSTPVQNGPPTSNFIPPGIETKPVPVTPQVVDLLDGLSSSTSLPDGNAAYPTITAFQSATLRITFSFKKQPGKPQETTINATFTNLATTTFTDFVFQAAVPKFIQLRLDPASSSTLPASGNGSVTQSLSVTNNQHGQKPLAMRIRMSYKVNGEDRLEQGQVSNFPAGL

SEQ ID NO: 77388 - protein, 103 aa, Setaria italica
  Transcript Sequence Number=SeqID_11414
LERTLEIRDRSYRFNIERRDDGSQVSEAQHRADGRFADNAAPLDPACDESAATDSDESAATDSDGEEFSRYVKEAAELLSKAKVAMADEETADALLYKSARLL

SEQ ID NO: 77389 - protein, 49 aa, Setaria italica
  Transcript Sequence Number=SeqID_11415
PTNSLTHKCGLAVIRSLCHSWLEALNLLHLKYACSFKYYLRVKCKEFLD

SEQ ID NO: 77390 - protein, 306 aa, Setaria italica
  misc_feature (252)..(252): Xaa can be any naturally occurring amino acid
  misc_feature (263)..(263): Xaa can be any naturally occurring amino acid
  misc_feature (280)..(280): Xaa can be any naturally occurring amino acid
  misc_feature (285)..(285): Xaa can be any naturally occurring amino acid
  Transcript Sequence Number=SeqID_11416
  Gene Ontology: Mol. function=receptor activity
  Homolog annotation: Hit_ID=Q6Z027; Match level="QueryCoverage=100%, HitCoverage=14%, E-value=1e-128, Identity=74%"; Hit description =Putative death receptor interacting protein
SGLLEEASFVASSVSNLCFPSECDEGHIKKKCMEASVSEFISIYACKILDLWFICIQLLEDEDAYLRQNLAKNIQNIIANGSASNFCDDSTPLQVDRVIELSFDYLTSLFGPWLKYIEYLLRIVLDTGNTLNSREDLVRQIFDKEIDNHHEEKLLICQICCFNIQKLLQSKYQMETGGKTESFLQNWRERFLSQLTLLTSGYLEKEGKIDWIGGIGNHKDVFISVYADLLGLYVLAPSGSLEHQDSHATYLXKNFQNLDGFIXPFLKNPLISNLYVLVKXSHERXDAPDKPEDQMASSFDPYFLIR

SEQ ID NO: 77391 - protein, 135 aa, Setaria italica
  misc_feature (117)..(117): Xaa can be any naturally occurring amino acid
  Transcript Sequence Number=SeqID_11417
  Gene Ontology: Mol. function=translation initiation factor activity
GKIENKETKINDQYDSKPPSTCDQRVNLEKSSGSGRLDSLIERARPDRSSSPSKIHSRSSPSPSSYHDKDQSRHGSKAMDHGKREMPYDERNSRPRTSSGRERTPASRLRDRDAENXTSERLKQKDDHQPRDVPL

SEQ ID NO: 77392 - protein, 259 aa, Setaria italica
  Transcript Sequence Number=SeqID_11418
  Gene Ontology: Mol. function=translation initiation factor activity
LPNRRDTEINEISAKEKYNNPEMQPDKHSRRKDDSEDTDKWPADNRDSDDRKTLSRYEHGKSRSSKEQRFDDDKYKEKYKDDYGRDKRQQDDKFLDERVTRGHESDRADYKSAKDGHRSSESHYRKEAVQDGDHYEDYSNRYKESRGKKRPEENDDQYDSKPPSTCDQRVNLEKSSGSGRLDSLIERARPDRSSSPSKIHSRSSPSPSSYHDKDQSRHGSKAMDHGKREMPYDERNSRPRTSSGRERTPASLSRSLSKS

SEQ ID NO: 77393 - protein, 802 aa, Setaria italica
  Transcript Sequence Number=SeqID_11419
  Gene Ontology: Mol. function=translation initiation factor activity
EWILLGLELRSGLALSIRESKRPSSYHDKDQSRHGSKAMDHGKREMPYDERNSRPRTSSGRERTPASRLRDRDAENWSSERLKQKDDHQPRDVPLEISASSQYDRTPRKDKHTSPKQFSEKSPSSGDQRFSGRLSGGRSLDSKGERNSLTKYRDRDGDLSQERSHHQDRTPAKVPFREPTPSGSSMSRGGHFSGTSPNHPLPPSRHRNDDSFLGSHDDDRRPQSGDRRFHGHQKRNDMNSVRGHGHAWNNPPNWPSPVSNGFVPIQHGAPGFHPPVHQFPGPPMFNLRPQMKLNQPGVSYPMHDGVDRFSTHMRPFGWPNPLDESCPPHMQVWNGGSGVFPSEPYLYSRQEWDQNRPHAGSRGWELTGDTSKGLNEVPDAELPVAKKEPDSAATAISDSSSGQHNLQPLVEQKEIEHLTSEHFEAKDDSKSALKSLEAPRGAQLVTSMLSKNGAVFCKSYLSRISVSHDLVESELYKRCISLLGDLGVAKAPIVVRNELSQRDDGNIRKITENYGSPNPFSSLYLKSNSAIFQRALALHKNQTGKGLVPTFASVKMEEKMDAPEGSQDTEMLDCTSKESMVSSPAPQHHTDVMEEWSPSKQELGDRIGVATAAATESGGVEAPPAITQPDEEMEVVAPPAITSPGKDMEDVIPSENEVPADGLEDGEPQATLEHAGDLLEVISADGLEDVAQPSADGESGDNMEIMPPAMTDPSLGKEEVAPVAASPPGSQERPFIMHADAEKGMEDQIGKVIDDNPGDGEVSSILATKLDVAASDDQDSEALLVESRVNLSRIPNSPESTH

SEQ ID NO: 77394 - protein, 125 aa, Setaria italica
  Transcript Sequence Number=SeqID_11420
  Gene Ontology: Cellular component=intracellular
  Homolog annotation: Hit_ID=B6SHE5; Match level="QueryCoverage=97%, HitCoverage=19%, E-value=1e-50, Identity=84%"; Hit description =Pescadillo
RGKCGRVPPPHLSPFVDNDAEGYIPEYAETIKRLQAAARNEVLPLPGDEDLDNSLVAAMMDRTESNEAAEKKRKLEMLEKQYHDELKMEIDGVTFSNLSNKKADKSPDTMDKDDTNSDHVEDEKK

SEQ ID NO: 77395 - protein, 626 aa, Setaria italica
  Transcript Sequence Number=SeqID_11421
  Gene Ontology: Mol. function=protein binding; Cellular component =intracellular; Biological process=cell proliferation
  Homolog annotation: Hit_ID=B6SHE5; Match level="QueryCoverage=94%, HitCoverage=94%, E-value=0.0, Identity=82%"; Hit description =Pescadillo
  Pfam annotation: Domain name=BRCT; Domain location=360-437; Score =50.8; E_value=5.2e-12; Accession=PF00533.18; Description=BRCA1 C Terminus (BRCT) domain
  Pfam annotation: Domain name=Pescadillo_N; Domain location=8-294; Score=515.3; E_value=7.9e-152; Accession=PF06732.3; Description =Pescadillo N-terminus
  Pfam module annotation: Pfam domain module=BRCT::Pescadillo_N; Domain location=360-437::8-294
MPKHYRPAGKKKEGNAAKYITRTKAVNYLQVSLAIFRKLCILKGVFPRQPKKKVEGNHKTYYHMKDIAFLAHDPLIEKFRQIKVHRKKVKKAVAKKNRDLADRLLNRPPTYKLDRLVLERYPTFVDALRDLDDCLTMVHLFAALPAVDGERVEVKRIHNCRRLSHEWQAYISRTHSLRKTFISVKGIYFQAEVQGQKITWLTPHALQQVLTDDVDFNVMLSFLEFYETLLGFVNFKLYHSINVNYPPILDSRLEALAAELYALCRYMSTGSGKVIRNSESGGAIKENEDENNKTSSKADETGGAIKENEDANNKTSSKADESELRLAQLQHQLPANEPGALMHLVEETTAVDTDDDETKECKSLFKNLKFYLSREVPRESLLFIIPAFGGTVSWEGEGAPFTEVDEDITHQIVDRPTQSHVFLTREYVQPQWIFDCVNARIILPTEGYIVGRVPPPHLSPFVDNDAEGYIPEYAETIKRLQAAARNEVLPLPGDEDLDNSLVAAMMDRTESNEAAEKKRKLEMLEKQYHDELKMEIDGVTFSNLSNKKADKSPDTMDKDDTNSDHVEDEKKQAEKDSADISTVTMSRKGRGLYKAMKIGKERKQDKVEILKKRKKSAESSASAKQR

SEQ ID NO: 77396 - protein, 53 aa, Setaria italica
  Transcript Sequence Number=SeqID_11422
ITVLISSLRFYIMFVGVPEYSVPPIEIYSQSYSYLLKTIFVLVITMIFLGLNN

SEQ ID NO: 77397 - protein, 264 aa, Setaria italica
  misc_feature (179)..(179): Xaa can be any naturally occurring amino acid
  Transcript Sequence Number=SeqID_11423
  Gene Ontology: Cellular component=vacuole
  Homolog annotation: Hit_ID=B6U1C0; Match level="QueryCoverage=99%, HitCoverage=44%, E-value=1e-127, Identity=85%"; Hit description =Microtubule-associated protein MAP65-1a
QRKQTELEDIYARAHIAIDTSAARDRIMSIIESSSFEPSELLANMENQILQANEEALSRKDILERVDRWMSACEEESWLEDYSRDDNRYSATRGAHLNLKRAEKARVLVNKIPAIVDTLVAKTQAWEQEHGMPFTYDGVPLLAMLDEYKILRQDKEDEKRRMRDQKKINDQLAAEQEKXFGSKPSPARPQSSRKVAGARANSGGGAVNGTPVRRLSALQSGGRTASRDGRRDASRPVAPVNYVAIAKEDVASQASSNHTGLSTP

SEQ ID NO: 77398 - protein, 44 aa, Setaria italica
  Transcript Sequence Number=SeqID_11424
  Gene Ontology: Mol. function=nucleoside-triphosphatase activity; Cellular component=membrane; Biological process=transport
  Homolog annotation: Hit_ID=Q8H8V5; Match level="QueryCoverage=100%, HitCoverage=5%, E-value=7e-11, Identity=65%"; Hit description=ABC transporter family protein, putative
DVLALQAVTDIGKWKCLLVTVACGFLFRALFYVVLLVSSKNKRK

SEQ ID NO: 77399 - protein, 109 aa, Setaria italica
  Transcript Sequence Number=SeqID_11425
  Gene Ontology: Mol. function=nucleoside-triphosphatase activity; Cellular component=membrane; Biological process=transport
  Homolog annotation: Hit_ID=B6U174; Match level="QueryCoverage=100%, HitCoverage=13%, E-value=6e-53, Identity=92%"; Hit description =ATPase, coupled to transmembrane movement of substances
GRLVSGATDGSVSVHSGEPLPAAAVSKFANPFWIEMGVLTRRAFINTKRTPEIFIIRLAAVLVTGFILATIFWRLDDSPKGVQERLGFFAIAMSTMFYTCSDALPVFLN

SEQ ID NO: 77400 - protein, 159 aa, Setaria italica
  Transcript Sequence Number=SeqID_11426
  Gene Ontology: Mol. function=nucleoside-triphosphatase activity; Cellular component=membrane; Biological process=transport
  Homolog annotation: Hit_ID=Q9FNB5; Match level="QueryCoverage=100%, HitCoverage=21%, E-value=3e-65, Identity=71%"; Hit description=ABC transporter G family member 6
VTFLSGVIPHVMIGYTVVVAILAYFLLFSGFFINRDRIPGYWIWFHYLSLVKYPFEGVLQNEFGRSGECFVRGAQIFDNSPLAALPDAVKARVLASISSALGVGIGVDTCVVTGRGVLQQAAVTQLGKWECLLVTAAWGFLFRLFFYFSLVLGSKNKRR

SEQ ID NO: 77401 - protein, 185 aa, Setaria italica
  misc_feature (19)..(19): Xaa can be any naturally occurring amino acid
  Transcript Sequence Number=SeqID_11427
  Gene Ontology: Mol. function=nucleoside-triphosphatase activity; Cellular component=membrane; Biological process=transport
  Homolog annotation: Hit_ID=B6U174; Match level="QueryCoverage=92%, HitCoverage=21%, E-value=1e-92, Identity=95%"; Hit description =ATPase, coupled to transmembrane movement of substances
  Subcellular localization annotation: CTP_CleavageSite=44; ConfidenceScore=5.33e-01
LAGGAEGFFFFVAIVLASXSWAGSGFATFLSGVVTNVMLGYPVVVSTLAYFLLFSGFFINRDRIPRYWIWFHYLSLVKYPYEAVMQNEFSDPGRCFVRGVQMFDNTPLAALPGVLKVRVLRAMSQSLGVDIGTATCITTGPDFLAQQAVTDLTKWDCLWITVAWGFLFRILFYISLLLGSRNKRR

SEQ ID NO: 77402 - protein, 664 aa, Setaria italica
  Transcript Sequence Number=SeqID_11428
  Gene Ontology: Mol. function=nucleoside-triphosphatase activity; Cellular component=membrane; Biological process=transport
  Homolog annotation: Hit_ID=B9SGG5; Match level="QueryCoverage=100%, HitCoverage=88%, E-value=0.0, Identity=61%"; Hit description=ATP -binding cassette transporter, putative
  Pfam annotation: Domain name=ABC2_membrane; Domain location=358-568; Score=199.6; E_value=8.5e-57; Accession=PF01061.16; Description=ABC -2 type transporter
  Pfam annotation: Domain name=ABC_tran; Domain location=57-247; Score =132.7; E_value=1.2e-36; Accession=PF00005.19; Description=ABC transporter
  Pfam module annotation: Pfam domain module=ABC2_membrane::ABC_tran; Domain location=358-568::57-247
  Subcellular localization annotation: CTP_CleavageSite=31; ConfidenceScore=5.01e-01
VLNFTDLSYSVKKGGGLLGCLPSRPSNRLASADAPPAAPAGNTKTLLDGISGEACAGELFAVMGASGSGKSTLVDALAGRIARESLHGSVTLNGEPLHGRRLRAISAYVMQDDLLYPMLTVRETLHFAAEFRLPRGLSQEKKRARVDALIDQLGLTRAADTIIGDEGHRGVSGGERRRVSIGTDIIHDPILLFLDEPTSGLDSASAFMVVQVLRRIAQSGSVVIMTIHQPSARILGILDRLLLLSRGRTVYAGTPAGLKPFFAEFGAPIPDNENPAEFALDTIREYERQPDGAAALADFNAKWQNNGSSTDKDSKLMSTMPLELAIAESVSRGKLVAGSGSGSAVSGTVPTFANPPWTEVWVLIKRSFTNTARMPELFAMRLGTIMVTGFILATIFWRLDDTPKGVQERLGFFAMAMSTMFYVCADALPVFVQERHIYLRETAHNAYRRISYVLANAAVAFPPLVLLSLAFAVTTFWAVGLAGGASSFLFFVLIILASFWAGSGFVTFLSAVVPHVMLGYTVVVAILAYFLLFSGFFINRDRIPDYWIWFHYLSLVKYPYQAVLQNEFRDASRCFSRGIEMFDGTPVGRMSEAVKLKVLDAISKTLGSNMTASTCVTTGADVLVQQAVTDISKWKCLLVTVAWGFFFRALFYVVLLVGSKNKRK

SEQ ID NO: 77403 - protein, 93 aa, Setaria italica
  misc_feature (9)..(9): Xaa can be any naturally occurring amino acid
  Transcript Sequence Number=SeqID_11429
  Gene Ontology: Mol. function=protein transporter activity; Cellular component=nuclear pore; Biological process=protein import into nucleus, docking
  Homolog annotation: Hit_ID=Q10GR1; Match level="QueryCoverage=100%, HitCoverage=9%, E-value=3e-41, Identity=86%"; Hit description =Importin-beta N-terminal domain containing protein, expressed
PQILRTLFXIILFEDAGNQWSLSRPILSLIMTSEQMFSDLRAHLLASQTVDQQQRLSQCFDKLMTDVNRNLEPKNRDRFTQNLTAFRHDFRMK

SEQ ID NO: 77404 - protein, 622 aa, Setaria italica
  misc_feature (209)..(209): Xaa can be any naturally occurring amino acid
  Transcript Sequence Number=SeqID_11430
  Gene Ontology: Mol. function=protein transporter activity; Cellular component=nuclear pore; Biological process=protein import into nucleus, docking
  Homolog annotation: Hit_ID=Q10GR1; Match level="QueryCoverage=98%, HitCoverage=56%, E-value=0.0, Identity=79%"; Hit description =Importin-beta N-terminal domain containing protein, expressed
LIFSFNELQYQSASLYIINIMEPLLQAYTERSRLPAPGDADELSVIEGQIAWMVHIIAAILKVRQTVGVSQESQESIDAELSARVLQLISVTDTGAHAQRYQELSKQRLDRAILIFVQNFRRSYVGDQAMHSSKLLYTRLSELLGLNDHLVLLNVIVGKIATNLKCYAQCEDVIDHTLSLFLELASGYMTGKLVLKLESVKFIIASHSXENFPFLAEYRCSRSRTTFYYILGSLVFMEDSPIKFRTFMEPLQQVAFNLEATPDAAFWNDVAKRAFIGWMRDLRGIAMATNSRKTYGLLFDWLYPSRMPLLLRAIALWTDEPEVTTPLLKFMCEFVLNKAQRVTFDSASPNGILLFREVSKIIVAYGSRILVLPNGTDIYGSKYKGIWISLTILSRALCGNYVNYGVFELYGDRALADALDISLKMTLSVPLSDIMAFRKLSKAYFGYMEVLFNNHIKFVLNLDTNTFVHIVSSLESGLKGLDTGISTQCASAIDSLAAFYFNNITAGDTPPSPAALNLARHIGECPNLFPQILRTLFEIILFEDAGNQWSLSRPILSLIMTSEQMFSDLRAHLLASQTVDQQQRLSQCFDKLMTDVNRNLEPKNRDRFTQNLTAFRHDFRMK

SEQ ID NO: 77405 - protein, 202 aa, Setaria italica
  Transcript Sequence Number=SeqID_11431
  Gene Ontology: Mol. function=structural constituent of cell wall
  Homolog annotation: Hit_ID=B6TJK1; Match level="QueryCoverage=65%, HitCoverage=48%, E-value=4e-37, Identity=68%"; Hit description =Proline-rich protein
  Pfam annotation: Domain name=DUF1210; Domain location=36-200; Score =205.7; E_value=1.2e-58; Accession=PF06735.3; Description=Protein of unknown function (DUF1210)
MVASLPQAAALFAALLAVSFGAAAWKAEAAAPPPVVVGSIKCLDCFPNDINAEDAFKGLQVAIKCKSAADENYDYETKAVGPLDDVGVFRIPLAAELLRDDGNLDRDCYAQLHSAPDTPCVGQAPPRIAPTQDGTAAATSAIYLAAAADTVFSPVACACGKKKKKHFMFGPPPPPPRPTPTPTPHPPTPTYGPPTPTPTPVP

SEQ ID NO: 77406 - protein, 87 aa, Setaria italica
  Transcript Sequence Number=SeqID_11432
  Subcellular localization annotation: CTP_CleavageSite=39; ConfidenceScore=5.15e-01
RSSANPPPRPTPTPTPNPPTPTYGPPTPTPTPVPEPRPPAPEEPEPFFKKKPKMKFMHKKKPCPPLVDDDTTRPAAAGQEKLPKKLN

SEQ ID NO: 77407 - protein, 158 aa, Setaria italica
  misc_feature (12)..(12): Xaa can be any naturally occurring amino acid
  misc_feature (136)..(136): Xaa can be any naturally occurring amino acid
  Transcript Sequence Number=SeqID_11433
KLHNQQQQMRGXVFTPKHPSSGKSSWADVKYRGEWMRRPISETEVAWLARILIRLSDWLNGALGLDCGDADDSPATASATYIRFDGNEVNTVGGPKDAARMAVVALCSVIAVVGQALLKFMRSHRVKINLRVFASXKKLLPAAVVLYAVVAVTRNASG

SEQ ID NO: 77408 - protein, 106 aa, Setaria italica
  Transcript Sequence Number=SeqID_11434
DESALLASRLRQHQISGGPGGAESAAAKQMVLQQLADLRQGHHMLLQGMGRSTGGPCPGAACGGPSLGSGGSGGDVQALLKAAANSAGGEAGGVFGGAFAGSLQQQ

SEQ ID NO: 77409 - protein, 150 aa, Setaria italica
  Transcript Sequence Number=SeqID_11435
  Gene Ontology: Mol. function=aspartic-type endopeptidase activity; Cellular component=chromatin; Biological process=regulation of transcription, DNA-dependent
  Homolog annotation: Hit_ID=Q2QZI0; Match level="QueryCoverage=100%, HitCoverage=5%, E-value=8e-33, Identity=50%"; Hit description =Retrotransposon protein, putative, unclassified
  Subcellular localization annotation: CTP_CleavageSite=44; ConfidenceScore=5.38e-01
LKTKMQFLLNSIGRLSNLTSLNLVPRTSSCANSLDDAGAASITVSDSISSMPTPTLLQSLEVSPRICIFFCLPKWIGQLCKLCTLKVGVRKLARNDIDVLRGMPLLAVLSLYVHTKPASRIVIGKTGFPVIRYFKFKCCDPLLKFEEDAM

SEQ ID NO: 77410 - protein, 478 aa, Setaria italica
  misc_feature (10)..(10): Xaa can be any naturally occurring amino acid
  misc_feature (18)..(18): Xaa can be any naturally occurring amino acid
  Transcript Sequence Number=SeqID_11436
  Gene Ontology: Mol. function=anthranilate synthase activity; Cellular component=chloroplast; Biological process=tryptophan biosynthetic process
  Homolog annotation: Hit_ID=Q41156; Match level="QueryCoverage=98%, HitCoverage=76%, E-value=0.0, Identity=71%"; Hit description =Anthranilate synthase alpha subunit
  Pfam annotation: Domain name=Anth_synt_I_N; Domain location=1-128; Score=98.7; E_value=2e-26; Accession=PF04715.5; Description =Anthranilate synthase component I, N terminal region
  Pfam annotation: Domain name=Chorismate_bind; Domain location=188 -468; Score=561.0; E_value=1.4e-165; Accession=PF00425.10; Description=chorismate binding enzyme
  Pfam module annotation: Pfam domain module=Anth_synt_I_N::Chorismate _bind; Domain location=1-128::188-468
VEQGFEGTNXGRYSVVGXQPTMEIVAKANHVTVMDHDMKSKREHFVPDPMKIPRSIMEQWKPHITAGLPDAFCGGWVGFFSYDTVRYVETKKLPFSKAPHDDRNLPDIHLGLYNDVIVFDHVEKKTHVIHWVRLDCYNSADEAYEDGTNRLEALLSRLHCLNVPTLSSGSIKLNVGHFGSALQKSSMSCEDYKNAVVQAKEHILAGDIFQVVLSQRFERRTFADPFEIYRALRIVNPSPYMAYLQARGCILVASSPEILTRVQKRTVINRPLAGTIRRGKTKAEDKVLEQLLLSDQKQCAEHIMLVDLGRNDVGKVSKPGSVKVEKLMNIERYSHVMHISSTVTGELRDDLTCWDALRAALPVGTVSGAPKVRAMELIDELEVNMRGPYSGGFGGISFNGDMDIALALRTMVFPTGSRFDTMYSYTDGNPRKEWVAHIQAGAGIVADSKPDDEHQECLNKAAGAARAIDLAESTFLDE

SEQ ID NO: 77411 - protein, 353 aa, Setaria italica
  misc_feature (23)..(23): Xaa can be any naturally occurring amino acid
  misc_feature (30)..(30): Xaa can be any naturally occurring amino acid
  misc_feature (86)..(86): Xaa can be any naturally occurring amino acid
  misc_feature (137)..(137): Xaa can be any naturally occurring amino acid
  misc_feature (225)..(225): Xaa can be any naturally occurring amino acid
  misc_feature (331)..(331): Xaa can be any naturally occurring amino acid
  Transcript Sequence Number=SeqID_11437
  Gene Ontology: Mol. function=pseudouridine synthase activity; Biological process=pseudouridine synthesis
  Homolog annotation: Hit_ID=B6TXP4; Match level="QueryCoverage=100%, HitCoverage=79%, E-value=1e-167, Identity=84%"; Hit description=RNA binding protein
  Pfam annotation: Domain name=PseudoU_synth_2; Domain location=60-258; Score=147.4; E_value=4.3e-41; Accession=PF00849.14; Description=RNA pseudouridylate synthase
RVQASIRAGLVAVNGRPVSKVSXSMVKGGXDLVSCTVSELQPLRAEAEDIPLDIVYEDDHVLVVNKPAHMVVHPAPGNANGTLVNXILHHCRISTFTCLARNSTGDECPDSSDDDVDVFDVDQFTTEDVSSEVRNAXLVRPGIVHRLDKGTSGLLVVAKDEHSHAQLAEQFKLHTIRRVYISLTCGVPHPNSGRIEASIARDPNNRIRMIAIAGSGQRYARHAAXYKVREVFAGGGSALVEWRLETGRTHQIRAHAKYLGIPLLGDETYGGTKSMALSLLRPRTPSKYHSGLSDLISKVDRPCLHAALLGFKHPHSGKILEFSCPPPDDFXEVLDELRRVTSADGQNGDDVVQ

SEQ ID NO: 77412 - protein, 369 aa, Setaria italica
  misc_feature (71)..(71): Xaa can be any naturally occurring amino acid
  misc_feature (283)..(283): Xaa can be any naturally occurring amino acid
  misc_feature (324)..(324): Xaa can be any naturally occurring amino acid
  misc_feature (340)..(340): Xaa can be any naturally occurring amino acid
  misc_feature (353)..(353): Xaa can be any naturally occurring amino acid
  misc_feature (368)..(368): Xaa can be any naturally occurring amino acid
  Transcript Sequence Number=SeqID_11438
  Gene Ontology: Mol. function=binding; Cellular component=chloroplast envelope
  Homolog annotation: Hit_ID=B4WQ73; Match level="QueryCoverage=44%, HitCoverage=57%, E-value=9e-12, Identity=31%"; Hit description =Tetratricopeptide repeat domain protein
  Subcellular localization annotation: CTP_CleavageSite=36; ConfidenceScore=5.39e-01
LQQTTLLPRDKTLAMAMSFILLTTTPVASASLLPIRRQLAAGPSLSFPLKPHRFPSRFRIPPKPPRFSRGXSVSPSCEAPTVSALSPVASTSRTLLFLLAAGLLSLSGIRPLPALASAPPPTQQPQEIEGQDEQQPQEIEEQDEQQESEERKEQVEDEVEKAEVKENEEQQEDEEEEEDDEVRMYSAILSRDPGDLDTLKCALYAKMRRADWAGALRYTRRLRDAEPGEVEWRLMEAQLHELKGDLAEAERQFRGVLAEEPLLIRALHGLAICMQKKHEGPAXFEMLDNALQLAASDKRVPEERNIKLLIAQMHVVMGQLGIAXSEKLQNLINEDPRDFXRPHLCQGIVYALXLDRKEDADKQFDIYXS

SEQ ID NO: 77413 - protein, 170 aa, Setaria italica
  Transcript Sequence Number=SeqID_11439
  Gene Ontology: Mol. function=protein serine/threonine kinase activity; Biological process=protein amino acid phosphorylation
  Homolog annotation: Hit_ID=Q2R102; Match level="QueryCoverage=97%, HitCoverage=21%, E-value=3e-38, Identity=47%"; Hit description =Leucine Rich Repeat family protein, expressed
YDDHLAHVGDFGLARFVLDFSSYGGYQNSTSLIGPRGSVGYIPPEYGMGSRISTEGDIYSYGIVLLEMLTGKHPTDELFDDGFTLHKYVEEALPHIAKILDPVLSKEIGMDHSSHTQSQEQGNITEVQKCILQLLNLGLICSEEAPKTRPNIQDVYSEVVEVKEHFLSAA

SEQ ID NO: 77414 - protein, 97 aa, Setaria italica
  Transcript Sequence Number=SeqID_11440
  Subcellular localization annotation: CTP_CleavageSite=36; ConfidenceScore=5.21e-01
WTLDKQKYPPMASGPQLSASPQDQDPAFESARHLMMAAMTASDLLVVSALVLGLVTNGVGKCSCLCRLPSPEFFGAWVGPLSHLTPPAAFLLATSTE

SEQ ID NO: 77415 - protein, 174 aa, Setaria italica
  misc_feature (58)..(58): Xaa can be any naturally occurring amino acid
  misc_feature (154)..(154): Xaa can be any naturally occurring amino acid
  Transcript Sequence Number=SeqID_11441
  Homolog annotation: Hit_ID=B9S1X8; Match level="QueryCoverage=89%, HitCoverage=22%, E-value=7e-36, Identity=36%"; Hit description =Pentatricopeptide repeat-containing protein, putative
  Pfam annotation: Domain name=PPR; Domain location=116-149; Score=6.7; E_value=1.4; Accession=PF01535.12; Description=PPR repeat
  Pfam annotation: Domain name=PPR; Domain location=46-80; Score=41.7; E_value=2.9e-09; Accession=PF01535.12; Description=PPR repeat
  Pfam annotation: Domain name=PPR; Domain location=81-115; Score=28.1; E_value=3.7e-05; Accession=PF01535.12; Description=PPR repeat
  Pfam module annotation: Pfam domain module=PPR::PPR::PPR; Domain location=116-149::46-80::81-115
KSKRKRKTKLSNLRIRITLGERMDRIAEAGKVLEEMAAAGLKPTLVTFSALICAYAKXGRWAESEKTFDCMVASGVKPDRLAYLVMLDVFARSGETEKLLDLYRKMMKDSYRPDDGLYQVLLAALAKEDKHEEIEEVIQDMELLCKMNPGIISXILIKARCISQGAKLLKKACL

SEQ ID NO: 77416 - protein, 94 aa, Setaria italica
  Transcript Sequence Number=SeqID_11442
  Gene Ontology: Mol. function=endodeoxyribonuclease activity, producing 5'-phosphomonoesters
  Homolog annotation: Hit_ID=B6UG16; Match level="QueryCoverage=100%, HitCoverage=30%, E-value=9e-45, Identity=92%"; Hit description =Deoxyribonuclease ycfH
MDSLRRFFAETPEAAVGEIGLDKGSHGKTIDFGEQVEVFQRQLELAKELERPVSVHCVRAFGDLLEILKQTGPFPAGVLVHSYMGSAEMVPGLA

SEQ ID NO: 77417 - protein, 116 aa, Setaria italica
  Transcript Sequence Number=SeqID_11443
  Gene Ontology: Mol. function=endodeoxyribonuclease activity, producing 5'-phosphomonoesters
  Homolog annotation: Hit_ID=B6UG16; Match level="QueryCoverage=100%, HitCoverage=37%, E-value=1e-61, Identity=95%"; Hit description =Deoxyribonuclease ycfH
  Pfam annotation: Domain name=TatD_DNase; Domain location=1-116; Score= -40.4; E_value=3.7e-05; Accession=PF01026.13; Description=TatD related DNase
SGVAHFAVNGTSEKDWHLVKQMAEDHPAVVPCFGLHPWWVPERSPDWMDSLRRFFAETPEAAVGEIGLDKGSHGKTIDFGEQVEVFQRQLELAKELERPVSVHCVRAFGDLLEILK

SEQ ID NO: 77418 - protein, 135 aa, Setaria italica
  Transcript Sequence Number=SeqID_11444
  Homolog annotation: Hit_ID=B6U539; Match level="QueryCoverage=100%, HitCoverage=55%, E-value=6e-39, Identity=65%"; Hit description =Homeobox-leucine zipper protein ATHB-6
  Pfam annotation: Domain name=HALZ; Domain location=1-46; Score=28.6; E_value=2.6e-05; Accession=PF02183.10; Description=Homeobox associated leucine zipper
QLEHDYAALRAQYDALHARVESLRQEKVALATQDGLDELKGRLNGRQDQQQQSGSCEVNGAEAADDRRNTNSASCVVEDDGAVTPAVDVSEESAAAATAEYCYDDHVAYGGLPDPFCTTPDLWDTWPLLEWNAVA

SEQ ID NO: 77419 - protein, 209 aa, Setaria italica
  Transcript Sequence Number=SeqID_11445
  Gene Ontology: Mol. function=sequence-specific DNA binding; Cellular component=nucleus; Biological process=regulation of transcription, DNA-dependent
  Homolog annotation: Hit_ID=Q7XUJ5; Match level="QueryCoverage=97%, HitCoverage=74%, E-value=5e-67, Identity=67%"; Hit description =Homeobox-leucine zipper protein HOX22
  Pfam annotation: Domain name=HALZ; Domain location=64-108; Score =33.6; E_value=7.7e-07; Accession=PF02183.10; Description=Homeobox associated leucine zipper
  Pfam annotation: Domain name=Homeobox; Domain location=8-63; Score =73.5; E_value=7.5e-19; Accession=PF00046.21; Description=Homeobox domain
  Pfam annotation: Domain name=Transposase_8; Domain location=6-94; Score=-0.0; E_value=0.036; Accession=PF01527.12; Description =Transposase
  Pfam module annotation: Pfam domain module=HALZ::Homeobox::Transposase _8; Domain location=64-108::8-63::6-94
NGGGKGERKRRFTEEQIRSLESMFHAHQAKLEPREKVELARELGLQPRQVAIWFQNKRARWRSKQLEHDYAALRAKFDALHARVEFLKQEKLALTTQLHELSERLREREDRAGSGVAATASSSSCNGGGVVGEEAEDDKRNVVLGCVDMEPPESCVLGGACATPADVSVESECDDHHHHLDYDDGFPESFCATPELWEPWPLVEWNAVA

SEQ ID NO: 77420 - protein, 93 aa, Setaria italica
  Transcript Sequence Number=SeqID_11446
  Subcellular localization annotation: CTP_CleavageSite=49; ConfidenceScore=5.08e-01
ISSLPHAYLRTQQQQQPMQQLHLQQQQQLQSGQAWQQTNNAWWQAQGVPAAASTAVAPVTNIVQQPQYGVVPGSGSVQGYDAGSVGGMAWRPR

SEQ ID NO: 77421 - protein, 123 aa, Setaria italica
  Transcript Sequence Number=SeqID_11447
  Gene Ontology: Mol. function=transferase activity
  Homolog annotation: Hit_ID=Q5ZCH7; Match level="QueryCoverage=99%, HitCoverage=22%, E-value=1e-52, Identity=81%"; Hit description=O -acetyltransferase-like
MGPGTLLQVSFLLGVFPVLIAWIYSEILEYRKSSSIKVHADSNLEKETVREDDKAVLLEGGLSKSPSTMLRNMSTKTKIIRFITMEESFLLENRAVMRAMAEFGIVLVYFYVCDRTNTFPESK

SEQ ID NO: 77422 - protein, 134 aa, Setaria italica
  Transcript Sequence Number=SeqID_11448
  Gene Ontology: Mol. function=hydrolase activity, hydrolyzing O -glycosyl compounds; Cellular component=extracellular region; Biological process=cell wall organization and biogenesis
  Homolog annotation: Hit_ID=Q6L4I2; Match level="QueryCoverage=72%, HitCoverage=15%, E-value=2e-32, Identity=76%"; Hit description =Endoglucanase 15
  Pfam annotation: Domain name=CBM49; Domain location=41-121; Score =111.2; E_value=3.5e-30; Accession=PF09478.2; Description =Carbohydrate binding domain CBM49
  Subcellular localization annotation: CTP_CleavageSite=51; ConfidenceScore=5.01e-01
NLRTDTGLEEYQLPPAANQTSPPPPAHRRRPHRHAAQSSPIEIEQNVTRTWAMRRATYSRYSVTVTNRSRKTVRELHLGVSELRGRLWGLDKARYGFVPPKWMAALRAGESLRFVYVQPGETPANVWVTGYKLV

SEQ ID NO: 77423 - protein, 53 aa, Setaria italica
  Transcript Sequence Number=SeqID_11449
SLHVMAKQMMDASKDTKCPMYLQPLSSCLTFCMIDDHSYSSSCNCHICSIYVA

SEQ ID NO: 77424 - protein, 146 aa, Setaria italica
  Transcript Sequence Number=SeqID_11450
  Homolog annotation: Hit_ID=B9S250; Match level="QueryCoverage=88%, HitCoverage=16%, E-value=8e-23, Identity=49%"; Hit description=ATP binding protein, putative
KEKEKGKVLEELGIAKKVADEANTKLQEALDVQRRAAEASEAEKFPAGDSEQASIESVQRKLESMQSQQEVDAAVLRSTVEQLEKARYELADAIDAKNEALSQVDGAIRASEAKAEEVELLTAEVKRLKELVDSKVDGKARKTTER

SEQ ID NO: 77425 - protein, 562 aa, Setaria italica
  Transcript Sequence Number=SeqID_11451
  Homolog annotation: Hit_ID=B9S250; Match level="QueryCoverage=88%, HitCoverage=59%, E-value=3e-62, Identity=36%"; Hit description=ATP binding protein, putative
  Pfam annotation: Domain name=Cenp-F_leu_zip; Domain location=146-272; Score=-13.2; E_value=0.087; Accession=PF10473.1; Description=Leucine -rich repeats of kinetochore p
  Pfam annotation: Domain name=M; Domain location=230-250; Score=5.0; E_ value=31; Accession=PF02370.8; Description=M protein repeat
  Pfam annotation: Domain name=M; Domain location=371-391; Score=1.8; E_ value=84; Accession=PF02370.8; Description=M protein repeat
  Pfam annotation: Domain name=M; Domain location=52-72; Score=10.0; E _value=6.9; Accession=PF02370.8; Description=M protein repeat
  Pfam module annotation: Pfam domain module=Cenp-F_leu_zip::M::M::M; Domain location=146-272::230-250::371-391::52-72
GNELADAIDAKNEALSQVDGAIRASEAKAEEVELLTAEVKRLKELVDSKVDGKARKTTERIQKLETENSALKLELEKAKAAEEKAVGLECMVQELKVDIADAKKVCSESGELADEWQKKAQLLEVRLEEADQSNILKGESLNSAMEELDATSSLLRDKESKVAALEDKVRFLEDEVARQKGDIDVSGERLAAAEKEATDLWAEVEGLRLKLRAAEEEKMDALNSDKNASSEIETLTEQNHQLAEELEASRDEVEKVKKAMEGLASALQEMSAESREAQEKYLLKQDEIEQAQAQVEELNMSLKNTKENYEVMLDEANYEKVCLTKTVERLEAEAKNAHEEWQSKELSFVNSIKNSEEEIVAIRVQMDRTLEMVKDKENENAELQEKMQHLEAQLMEANKIKEEAKAETIQWKEKLLDKENELQNIKQENDDLQAKESASSEKIKELSSQLANAKDGMINGSTKQEDNEKGGSEEDDEPVVVVAKMWENSKYTDYDSSKEKENDGDSQVDLESNKGDAALDSNGLHSTKENSGSTSPTKQQQQQKKKPLLKRFGGLLKKKSEN

SEQ ID NO: 77426 - protein, 84 aa, Setaria italica
  Transcript Sequence Number=SeqID_11452
  Gene Ontology: Cellular component=mitochondrion
  Homolog annotation: Hit_ID=B2ZAT1; Match level="QueryCoverage=98%, HitCoverage=10%, E-value=9e-23, Identity=61%"; Hit description =Putative pentatricopeptide repeat protein
LMGANNAVHDEALCGHSSKLAIAFGVLNLSEGRPVRVTKNSRVCSHCHESAKFISKMCNREIILRDSSRFHHFEEGRCSCRGYC

SEQ ID NO: 77427 - protein, 88 aa, Setaria italica
  Transcript Sequence Number=SeqID_11453
  Subcellular localization annotation: CTP_CleavageSite=60; ConfidenceScore=5.64e-01
PRAAPRRRTSTPGRQAGTAIFFVLSSSNSRRRPSFQGRSPRGRGMWGRHYWGGGRRPDPAAAGVVVMFAWLSSQERHVRAYVELYAAR

SEQ ID NO: 77428 - protein, 51 aa, Setaria italica
  Transcript Sequence Number=SeqID_11454
PFVNSTLKIPGPLLPLCTMQGQLIVNGVAQKEHYTASHALYTMEAMVQGFS

SEQ ID NO: 77429 - protein, 114 aa, Setaria italica
  Transcript Sequence Number=SeqID_11455
  Gene Ontology: Mol. function=serine-type peptidase activity; Cellular component=integral to membrane; Biological process=proteolysis
  Homolog annotation: Hit_ID=B9R7J2; Match level="QueryCoverage=61%, HitCoverage=8%, E-value=3e-14, Identity=52%"; Hit description=Signal peptidase I, putative
  Pfam annotation: Domain name=Peptidase_S24; Domain location=48-114; Score=35.1; E_value=2.7e-07; Accession=PF00717.15; Description =Peptidase family S24
  Subcellular localization annotation: CTP_CleavageSite=51; ConfidenceScore=5.54e-01
VPSPPSSSPPSAPPGSPPLPRLRPPASDGFKLLLVLLLFSAALAEVRYIASSSMAPTLRPGDRAVAEKVTYLFRRPSIGDIVFFKVPTAVQNYGVNKDVVFIKRVLATPGDFIE

SEQ ID NO: 77430 - protein, 133 aa, Setaria italica
  Transcript Sequence Number=SeqID_11456
  Gene Ontology: Mol. function=serine-type peptidase activity; Cellular component=integral to membrane; Biological process=proteolysis
  Homolog annotation: Hit_ID=B9R7J2; Match level="QueryCoverage=95%, HitCoverage=15%, E-value=3e-35, Identity=54%"; Hit description =Signal peptidase I, putative
  Pfam annotation: Domain name=Peptidase_S24; Domain location=1-70; Score=14.4; E_value=0.02; Accession=PF00717.15; Description =Peptidase family S24
  Pfam annotation: Domain name=Peptidase_S26; Domain location=10-128; Score=37.8; E_value=4.5e-08; Accession=PF10502.1; Description=Signal peptidase I
  Pfam module annotation: Pfam domain module=Peptidase_S24::Peptidase _S26; Domain location=1-70::10-128
YRTKEGDRAVAEKVTYLFRRPSIGDIVFFKVPTAVQNYGVNKDVVFIKRVLATPGDFIEVRQGQLIVNGVAQKEHYTASHALYTMEAMRLPEGHVFVMGDNRNNSCDSRAWGPLPIGNIVGRYMTSFTRSSFQ

SEQ ID NO: 77431 - protein, 113 aa, Setaria italica
  Transcript Sequence Number=SeqID_11457
RSYCLLAIVQINHVAIVTVDSRPFVLSFSGWLPLTNIFLQFPLVKFSQDQSHGGTRKMALFYSVCTTTGDIFPSKFIVCSSTLTRNNEEPRIVLQRIENNSLICRIRDLMFSR

SEQ ID NO: 77432 - protein, 163 aa, Setaria italica
  Transcript Sequence Number=SeqID_11458
  Gene Ontology: Mol. function=binding; Cellular component=nucleus; Biological process=cell cycle
  Homolog annotation: Hit_ID=B9SJD1; Match level="QueryCoverage=97%, HitCoverage=9%, E-value=6e-50, Identity=60%"; Hit description=Pearli, putative
SASVYSAVQKLCLVLGFLKELLTTVRLSDSCILQLAKTCFTTFLVDNMQLLQLKAIGVIGTVFSSYTQHRSYLVDETIVLLRKLQFSRNAVRTYHLADEEQKQIQMITALLVHLVQFSAIVPDSLKGTVDWSTIIDAPVDASYPIKCHEAATEACLSFFLVLS

SEQ ID NO: 77433 - protein, 164 aa, Setaria italica
  misc_feature (9)..(9): Xaa can be any naturally occurring amino acid
  Transcript Sequence Number=SeqID_11459
  Gene Ontology: Mol. function=unfolded protein binding; Cellular component=endoplasmic reticulum; Biological process=protein folding
  Homolog annotation: Hit_ID=Q75IN6; Match level="QueryCoverage=100%, HitCoverage=35%, E-value=3e-74, Identity=82%"; Hit description =Putative calreticulin protein
  Pfam annotation: Domain name=Calreticulin; Domain location=1-164; Score=-13.6; E_value=5.1e-17; Accession=PF00262.10; Description =Calreticulin family
ADKLTHFTXIILRPDATYSLLIDNREREFGSMYTDWDILPPRRIKDVNAKKPKDWDDREYIEDPDQVKPEGYDSIPKEIPDPKDKKPESWDDDDNGIWKPRMIPNPEYKGPWKRKKIKNPNYKGKWKTPWIDNPEFEDDPDLYVLKPLQYVGIEVWQVKAGSVF

SEQ ID NO: 77434 - protein, 32 aa, Setaria italica
  Transcript Sequence Number=SeqID_11460
CPADFERDRDRGRDRFRDRYKRHRHYDYHDEL

SEQ ID NO: 77435 - protein, 415 aa, Setaria italica
  Transcript Sequence Number=SeqID_11461
  Gene Ontology: Mol. function=unfolded protein binding; Cellular component=endoplasmic reticulum; Biological process=protein folding
  Homolog annotation: Hit_ID=Q75IN6; Match level="QueryCoverage=80%, HitCoverage=71%, E-value=1e-172, Identity=86%"; Hit description =Putative calreticulin protein
  Pfam annotation: Domain name=Calreticulin; Domain location=23-335; Score=482.0; E_value=8.5e-142; Accession=PF00262.10; Description =Calreticulin family
MGRAFLHRALVLASLLLLASGEIFFEERFDDGWEHRWVKSDWKKSQGQAGTFRHTAGTYSGDPDDKGIQTTGDARHFAISAKFPEFSNKNRTLVIQYSLKIEQDIECGGAYIKLMSGYLNQKKFGGDTPYSFMFGPDICGDQKKKLHLILSYQGQNYPIKKELKCEADKLTHFYTFILRPDATYSLLIDNREREFGSMYTDWDILPPRRIKDVNAKKPKDWDDREYIEDPDQVKPEGYDSIPKEIPDPKDKKPESWDDDDNGIWKPRMIPNPEYKGPWKRKKIKNPNYKGKWKTPWIDNPEFEDDPDLYVLKPLQYVGIEVWQVKAGSVFDNILICDDPDYARHVVDETFAANKEAEKEAFEGAEKKRKAREEEEARRAREEGERRRRERDRDRGRDRFRDRYKRHRHYDYHDEL

SEQ ID NO: 77436 - protein, 76 aa, Setaria italica
  misc_feature (74)..(74): Xaa can be any naturally occurring amino acid
  Transcript Sequence Number=SeqID_11462
FHCVAVLLVLSLFLLCPFGNGQLVMSMMIVFIDVWRFECHAKPHGRTEQQKGLKCTKYDPSNPFFGAKLKKKKXKK

SEQ ID NO: 77437 - protein, 155 aa, Setaria italica
  misc_feature (84)..(84): Xaa can be any naturally occurring amino acid
  Transcript Sequence Number=SeqID_11463
  Gene Ontology: Mol. function=protein serine/threonine kinase activity; Biological process=protein amino acid phosphorylation
  Homolog annotation: Hit_ID=B6U0Y9; Match level="QueryCoverage=96%, HitCoverage=29%, E-value=2e-20, Identity=38%"; Hit description=ATP binding protein
  Pfam annotation: Domain name=ACT; Domain location=82-146; Score=22.5; E_value=0.0018; Accession=PF01842.17; Description=ACT domain
LYGLDRYALDVNVERVEDVLLHNKLLEQAREPMNGLVFDVRPSQGVVTPEDSTGFESSTSFKQEEQDPQSSAFTSRDQRPLYEXIFACDDKPKLLSQLTLLLGELGLNIQEAHAYSTSDGYSLDIFVVNGWEYEVDILRSALRKGIDKIKYSMAI

SEQ ID NO: 77438 - protein, 59 aa, Setaria italica
  Transcript Sequence Number=SeqID_11464
RISDRLINPAEFSCNSAGSKRWITVQGSTNIKRAFKCTPLFQNIRCFSFLPTLQENCII

SEQ ID NO: 77439 - protein, 101 aa, Setaria italica
  Transcript Sequence Number=SeqID_11465
  Gene Ontology: Mol. function=protein binding; Cellular component =cytoplasm; Biological process=multicellular organismal development
  Homolog annotation: Hit_ID=Q9LPV9; Match level="QueryCoverage=80%, HitCoverage=18%, E-value=7e-21, Identity=65%"; Hit description=WD repeat-containing protein LWD1
MVTMEMVTLPLVPVPIDDRSHICTAGDDMQALIWDLSSMGTGSNGGNNGNGNAAAAAAAEGGLDPILAYTAGAEIEQLQWSATQPDWVAIAFANKLQILRV

SEQ ID NO: 77440 - protein, 193 aa, Setaria italica
  Transcript Sequence Number=SeqID_11466
  Gene Ontology: Mol. function=protein binding; Cellular component =cytoplasm; Biological process=multicellular organismal development
  Homolog annotation: Hit_ID=Q9LPV9; Match level="QueryCoverage=96%, HitCoverage=44%, E-value=1e-63, Identity=68%"; Hit description=WD repeat-containing protein LWD1
  Pfam annotation: Domain name=WD40; Domain location=88-127; Score =33.7; E_value=7.4e-07; Accession=PF00400.24; Description=WD domain, G-beta repeat
KVTYDNTVSADGSVRVFDLRDKEHSTIIYESGSGGGGGGGSNSGAGDGGAASPTPLVRLGWNKQDPRYMATIIMDSPKVVVLDIRYPTLPVVELHRHHAPVNAIAWAPHSSCHICTAGDDMQALIWDLSSMGTGSNGGNNGNGNAAAAAAAEGGLDPILAYTAGAEIEQLQWSATQPDWVAIAFANKLQILRV

SEQ ID NO: 77441 - protein, 146 aa, Setaria italica
  Transcript Sequence Number=SeqID_11467
  Gene Ontology: Mol. function=peptidyl-prolyl cis-trans isomerase activity; Cellular component=chloroplast; Biological process=protein folding
  Homolog annotation: Hit_ID=B6SZG7; Match level="QueryCoverage=89%, HitCoverage=61%, E-value=2e-68, Identity=97%"; Hit description=FKBP -type peptidyl-prolyl cis-trans isomerase 4
  Pfam annotation: Domain name=FKBP_C; Domain location=34-141; Score =161.3; E_value=2.9e-45; Accession=PF00254.20; Description=FKBP-type peptidyl-prolyl cis-trans isomer
SSSSPPAAEAADSGGECPLEVAPSGLAFCDRVVGTGAAAQEGQLIRAHYTGKLEDGTVFDSSYKRGKPLTFRVGVGEVIKGWDQGIVGGEGIPPMLAGGKRTLKLPPALAYGEKGAGCRGWEPTSCVIPPNSTLLFDVEYVGTAFG

SEQ ID NO: 77442 - protein, 375 aa, Setaria italica
  Transcript Sequence Number=SeqID_11468
  Gene Ontology: Mol. function=ATPase activity, coupled to transmembrane movement of substances; Cellular component=integral to membrane; Biological process=transport
  Homolog annotation: Hit_ID=Q5JJV5; Match level="QueryCoverage=100%, HitCoverage=78%, E-value=0.0, Identity=66%"; Hit description =Putative ABC transporter
  Pfam annotation: Domain name=ABC_tran; Domain location=177-360; Score= 71.5; E_value=3.1e-18; Accession=PF00005.19; Description=ABC transporter
SRLRTHAESIAFFGGGSREKAMIDAKFTTWLNHSKVLLRKKWLYGIFDDFVTKQLPHNVTWGLSLLYALEHKGDRALTSTQGELAHALRFLASVVSQSFIAFGDILELHKKFLELSGGINRIFELEELLQAAQSNPAVPSDAIKAASEEIISFRNVDIVTPSQKLLASQLSCDVSQGKSLLVTGPNGSGKSSIFRVLRGLWPIASGRLTKPSEGIFNVPQRPYTCLGTLRDQIIYPLSREEAELKMLSHETSDKSAASKMLDDHLKMILENVRLVYLLEREGWDATPNWEDILSLGEQQRLGMARLFFHCPKYGILDECTNATSVDVEEHLYRLATNMGITVITSSQRPALIPFHSLELKLIDGEGKWKLCAIHQ

SEQ ID NO: 77443 - protein, 107 aa, Setaria italica
  Transcript Sequence Number=SeqID_11469
CLLEKAIGRKEPLCTSLKQCRLPKKVAAYKPCISEIANDPRKKGYSYQNVRPLSTWICSICCLGNVLPLLCHLKDWSLKERQYGEDTDSGNEDQATKITKLQVPLVL

SEQ ID NO: 77444 - protein, 181 aa, Setaria italica
  misc_feature (19)..(19): Xaa can be any naturally occurring amino acid
  misc_feature (25)..(25): Xaa can be any naturally occurring amino acid
  misc_feature (32)..(32): Xaa can be any naturally occurring amino acid
  misc_feature (42)..(42): Xaa can be any naturally occurring amino acid
  Transcript Sequence Number=SeqID_11470
  Gene Ontology: Mol. function=extracellular-glutamate-gated ion channel activity; Cellular component=integral to membrane; Biological process=ion transport
  Homolog annotation: Hit_ID=Q653Y6; Match level="QueryCoverage=100%, HitCoverage=21%, E-value=8e-71, Identity=76%"; Hit description =Putative ionotropic glutamate receptor ortholog GLR6
  Pfam annotation: Domain name=Lig_chan; Domain location=1-181; Score= -3.3; E_value=1.4e-10; Accession=PF00060.18; Description=Ligand-gated ion channel
TASLTSILTVQQLDTGITXGLDSLXSSSLPIXGYQNGKFTKXYLILELNIPESRLVALNTIQDYADALNRGPKNGGVAAIVDEKPYIDIFLSHYCNFRIVGQQFTREGWGFTFQRDSPIAADMSTAILQLSESGQLQRIHDDWFKRPSCTYDDESQVGATRLGIGSFSGLFLMCALICLFA

SEQ ID NO: 77445 - protein, 166 aa, Setaria italica
  misc_feature (125)..(125): Xaa can be any naturally occurring amino acid
  Transcript Sequence Number=SeqID_11471
  Gene Ontology: Mol. function=extracellular-glutamate-gated ion channel activity; Cellular component=integral to membrane; Biological process=ion transport
  Homolog annotation: Hit_ID=Q653Y6; Match level="QueryCoverage=93%, HitCoverage=22%, E-value=7e-64, Identity=63%"; Hit description =Putative ionotropic glutamate receptor ortholog GLR6
NNNSNDANIGWVFPNNGQPLRVGIPNKASFKELVSSGGPGNVTGYCIDVFSAAIKLLPYPVPLEFVTIGDGTKNPSYIGIVRMVANNSLDAAVGDFAIVRNGTAISEYTQPYVEAGLVIVAPVKXIWLLEHRINEEFRGSPRRQVVTIFWFSFSTMFHSHRENTVR

SEQ ID NO: 77446 - protein, 386 aa, Setaria italica
  misc_feature (229)..(229): Xaa can be any naturally occurring amino acid
  Transcript Sequence Number=SeqID_11472
  Gene Ontology: Mol. function=oxidized purine base lesion DNA N -glycosylase activity; Cellular component=intracellular; Biological process=protein amino acid phosphorylation
  Homolog annotation: Hit_ID=Q5JNH7; Match level="QueryCoverage=55%, HitCoverage=68%, E-value=2e-80, Identity=68%"; Hit description =Putative receptor-like protein kinase 1
  Pfam annotation: Domain name=LRR_1; Domain location=24-46; Score=5.7; E_value=24; Accession=PF00560.25; Description=Leucine Rich Repeat
  Pfam annotation: Domain name=LRR_1; Domain location=48-70; Score =15.1; E_value=0.29; Accession=PF00560.25; Description=Leucine Rich Repeat
  Pfam annotation: Domain name=LRR_1; Domain location=71-92; Score =16.5; E_value=0.11; Accession=PF00560.25; Description=Leucine Rich Repeat
  Pfam annotation: Domain name=Pkinase; Domain location=196-386; Score =54.8; E_value=3.2e-13; Accession=PF00069.17; Description=Protein kinase domain
  Pfam annotation: Domain name=Pkinase_Tyr; Domain location=196-371; Score=-21.9; E_value=2.8e-12; Accession=PF07714.9; Description =Protein tyrosine kinase
  Pfam module annotation: Pfam domain module=LRR_1::LRR_1::LRR _1::Pkinase::Pkinase_Tyr; Domain location=24-46::48-70::71-92::196 -386::196-371
MIFLDLSFNQLDSGIPKELGNMYYLMIMNLGYNNLSGVIPAALAGARVLAVLDLSHNMLEGPIPSSLESLSLSEINLSNNRLSGMIPQLGSLATFPAISFENNYGLCGSPLPPCKQSVIDTQQPKSHRRQVALAGGIVAAFSLSLFALLICLCQRKEPKAHNNANESLRFTSNLFSIWNFDGGDAYKQIVEATENFDEKYCIGIGGHGSVYEASLQTGEIFAVKKIRKXEDESLKNKELFSREIEALVQIRHRNIVKLYGYCSTDQDKFLVYEYMKRGSLSTILMANVSAVELDWNRRLDIAKDVAQALSYLHHDCSFPIVHRDITSNNILIDMEFRACVSDFGLAKILSLDASSSTSKLAGTTGYLAPELAYMTRVTEKCDVYSF

SEQ ID NO: 77447 - protein, 103 aa, Setaria italica
  Transcript Sequence Number=SeqID_11473
IFRRYCQCTREAESLKEKPTGVYITTFCYQSTSCQTPSNLEGWTSLVQSSIQQVSCFLFSTNFSRASLTAANPKSVSVSNPEDRRKATVTFLYGSPILTSKTK

SEQ ID NO: 77448 - protein, 85 aa, Setaria italica
  misc_feature (2)..(2): Xaa can be any naturally occurring amino acid
  Transcript Sequence Number=SeqID_11474
  Gene Ontology: Mol. function=secondary active sulfate transmembrane transporter activity; Cellular component=integral to membrane; Biological process=sulfate transport
  Homolog annotation: Hit_ID=A7YF68; Match level="QueryCoverage=100%, HitCoverage=12%, E-value=8e-38, Identity=87%"; Hit description =Sulfate transporter
PXREYKDLPKSKKIWLGLQQVFPVLDWSRDYSLGKFKGDLIAGLTIASLCIPQDIGYSKLANLPPHVGLYSSFVPPLIYAAMGSS

SEQ ID NO: 77449 - protein, 142 aa, Setaria italica
  Transcript Sequence Number=SeqID_11475
  Gene Ontology: Mol. function=secondary active sulfate transmembrane transporter activity; Cellular component=integral to membrane; Biological process=sulfate transport
  Homolog annotation: Hit_ID=A7YF68; Match level="QueryCoverage=90%, HitCoverage=19%, E-value=1e-56, Identity=79%"; Hit description =Sulfate transporter
MPRAVSDGGEGFEDIASRTSSHRRMDSIQHGHGYKVGFPPKKGLFAEFSDAVKETFFADDPLREYKDLPKSKKIWLGLQQVFPVLDWSRDYSLGKFKGDLIAGLTIASLCIPQDIGYSKLANLPPHVGLCKCTHTHSSLRSS

SEQ ID NO: 77450 - protein, 40 aa, Setaria italica
  Transcript Sequence Number=SeqID_11476
CLKAQIVSCMLNAKIVLLFVGKKLQIVMSGTILSCPWCLY

SEQ ID NO: 77451 - protein, 182 aa, Setaria italica
  misc_feature (17)..(17): Xaa can be any naturally occurring amino acid
  misc_feature (47)..(47): Xaa can be any naturally occurring amino acid
  Transcript Sequence Number=SeqID_11477
  Homolog annotation: Hit_ID=B6TRQ0; Match level="QueryCoverage=100%, HitCoverage=41%, E-value=2e-66, Identity=67%"; Hit description=F-box domain containing protein
TVWNRRHYAHDRFYWVXDCLTNRWLMLDTRAMELALSIIPLPTGYWXEHVAVVEAPDGNVGVFAHDFHHPGGKADLHYYTIVQDADGPRWRLENTIPLPWPAAYHRPFCLRGTANGCLILEVSEEKPAFMASYRVRDAELFKIDVNSFQLEKICQARCAGGAAGQCCWPYFGFPPSLSVPTV

SEQ ID NO: 77452 - protein, 72 aa, Setaria italica
  Transcript Sequence Number=SeqID_11478
  Gene Ontology: Mol. function=structural constituent of ribosome; Cellular component=intracellular; Biological process=translation
  Homolog annotation: Hit_ID=B6SNV5; Match level="QueryCoverage=90%, HitCoverage=46%, E-value=4e-27, Identity=93%"; Hit description=40S ribosomal protein S17-4
  Pfam annotation: Domain name=Ribosomal_S17e; Domain location=1-71; Score=51.4; E_value=3.5e-12; Accession=PF00833.10; Description =Ribosomal S17
KRLRNKVAGFTTHLMRRIQRGPVRGISLKLQEEERERRMDFVPEKSALEVDAIRVDKETMEMLDAGEIGHAE

SEQ ID NO: 77453 - protein, 101 aa, Setaria italica
  Transcript Sequence Number=SeqID_11479
DKDFALSAIVDSQFVNFLCKLEADIIENTGMGRLMFVCTVRLTNSFLHIVGTLQQLDCTSSAALRILVRFKLSSDPIDNQPSLFSDTFPSFRWLFRGVSVG

SEQ ID NO: 77454 - protein, 127 aa, Setaria italica
  misc_feature (15)..(15): Xaa can be any naturally occurring amino acid
  misc_feature (20)..(20): Xaa can be any naturally occurring amino acid
  Transcript Sequence Number=SeqID_11480
  Gene Ontology: Mol. function=structural constituent of ribosome; Cellular component=intracellular; Biological process=translation
  Homolog annotation: Hit_ID=B6SNV5; Match level="QueryCoverage=87%, HitCoverage=78%, E-value=1e-50, Identity=90%"; Hit description=40S ribosomal protein S17-4
  Pfam annotation: Domain name=Ribosomal_S17e; Domain location=1-106; Score=138.5; E_value=2.1e-38; Accession=PF00833.10; Description =Ribosomal S17
KYYSRMTLDFHTNKXKVVLXEVSILPSKRLRNKVAGFTTHLMRRIQRGPVRGISLKLQEEERERRMDFVPEKSALEVDAIRVDKETMEMLAALGMADLPGVERQPENTNAPAYGGRQQFGGPRRDRV

SEQ ID NO: 77455 - protein, 148 aa, Setaria italica
  misc_feature (30)..(30): Xaa can be any naturally occurring amino acid
  misc_feature (48)..(48): Xaa can be any naturally occurring amino acid
  Transcript Sequence Number=SeqID_11481
  Gene Ontology: Mol. function=nucleotide binding; Biological process =response to stress
  Homolog annotation: Hit_ID=B6SV64; Match level="QueryCoverage=99%, HitCoverage=17%, E-value=1e-35, Identity=57%"; Hit description=Heat shock 70 kDa protein 4
HQLAYCITSFREAALSNDLKFEHIDISEKXQKVINECSEAETWLLEKXQQQDALPKHANPVLLAADLKKKAEALDRFCKPIMTKPKPAPKPQTPPPAETPAPEPQTPEQQQSNGENAASEPTSEDAAEEPAAEQMETDKPEGGADASA

SEQ ID NO: 77456 - protein, 147 aa, Setaria italica
  Transcript Sequence Number=SeqID_11482
  Gene Ontology: Mol. function=structural constituent of ribosome; Cellular component=intracellular; Biological process=translation
  Homolog annotation: Hit_ID=B6SNV5; Match level="QueryCoverage=93%, HitCoverage=94%, E-value=8e-58, Identity=86%"; Hit description=40S ribosomal protein S17-4
  Pfam annotation: Domain name=Ribosomal_S17e; Domain location=1-123; Score=206.0; E_value=1e-58; Accession=PF00833.10; Description =Ribosomal S17
MGRVRTKTVKKTSRQVIEKYYSRMTLDFHTNKKVLEEVSILPSKRLRNKVAGFTTHLMRRIQRGPVRGISLKLQEEERERRMDFVPEKSALEVDQIRVDKETMEMLAAMPRAASMADLLVGVELQPENSNAPAFGRPQYGGPRRDRV

SEQ ID NO: 77457 - protein, 231 aa, Setaria italica
  misc_feature (90)..(90): Xaa can be any naturally occurring amino acid
  Transcript Sequence Number=SeqID_11483
  Gene Ontology: Mol. function=structural constituent of ribosome; Cellular component=intracellular; Biological process=translation
  Homolog annotation: Hit_ID=B6SNV5; Match level="QueryCoverage=53%, HitCoverage=87%, E-value=2e-57, Identity=92%"; Hit description=40S ribosomal protein S17-4
  Pfam annotation: Domain name=Ribosomal_S17e; Domain location=29-151; Score=192.6; E_value=1.1e-54; Accession=PF00833.10; Description =Ribosomal S17
  Subcellular localization annotation: CTP_CleavageSite=33; ConfidenceScore=5.40e-01
STPAPPPPPPQPASAKPPLSSPKKGREPWVGVRTKTVKKTSRQVIEKYYSRMTLDFHTNKKVLEEVSILPSKRLRNKVAGFTTHLMRRIXSVGPVRGISLKLQEEERERRMDFVPEKSALEVDAIRVDKETMEMLAALGMADLPGVERQPENTNAPALRRPPAVRRSPPRPRLGARLGCSGCLLIAYLLSSLSCYYVKLVLDQWLLLWQFSLEPICFALNSEVFWSACDGS

SEQ ID NO: 77458 - protein, 850 aa, Setaria italica
  misc_feature (640)..(640): Xaa can be any naturally occurring amino acid
  Transcript Sequence Number=SeqID_11484
  Gene Ontology: Mol. function=nucleotide binding; Cellular component =cytoplasm; Biological process=response to stress
  Homolog annotation: Hit_ID=B6U237; Match level="QueryCoverage=99%, HitCoverage=99%, E-value=0.0, Identity=81%"; Hit description=Heat shock 70 kDa protein 4
  Pfam annotation: Domain name=HSP70; Domain location=3-692; Score =564.3; E_value=1.4e-166; Accession=PF00012.12; Description=Hsp70 protein
MSVVGFDLGNESCIVAVARQRGIDVVLNEESKRETPAIVCFGDKQRFIGTAGAASSTMNPKNSISQIKRLLGRKFSDPELQSDLASFPFRVTEGPDGFPLVHVRFLGEERTFTPTQLLAMVLSNLKGIAEGNLNAAVVDCCIGIPVYFSDLQRRAVLDAATIAGLRPLRLFHETTATALAYGIYKTDLPEHEQLNVAFVDVGHASMQVSIVGYKKGQLKMLSHAYDRSLGGRDFDEALFKHFAAKFKEEYKIDVYQNARACLRLRVACEKLKKVLSANPEAPLNIECLMDEKDVRGFIKREEFEQISAPVLERVKGPLEKALAEAGLTTENVHFVEVVGSGSRVPAIIKIITEFFGKEPRRTMNASECVARGCALQCAILSPTFKVREFQVNDGFPFSIALSWKPDSQDGSPQQTVVFPKGNAIPSVKALTFYRSSTFEVDVLYVDTGDSQISQKISTYTIGPFQPSKGEKAKLKVKVRLNIHGIVTVDSALMLEEDDVEVPVSSVNEAPKDATKMDTDDAPSDPSSGTDVNMQEPKSADTTEGAAAAENGAQDPEEKSVPMETDAKVEPSKKKVKKTAVPVHELVYGALPAAELEKAVEKEYEMALQDRIMEETKEKKNAVEAYVYDMRNKLYDKYNDXFTPEEKEGLIARLQEVEDWLYEDGEDETKGVYIAKLEELKKIGDPIETRYKEWTERGSAIDQLVYCINSFREAALSNDQKFEHIDISEKQKVINECSEAENWLRERKQQQDALPKHANPVVLVSDLKKKAETLDRFCKPTMTKPKPAPKPQTPPPQTPPSQPETQAPEPQTPEQQQGAAGAAGEPTSEGGAQEASGEQMDTDKPDNSAEA

SEQ ID NO: 77459 - protein, 845 aa, Setaria italica
  misc_feature (589)..(589): Xaa can be any naturally occurring amino acid
  Transcript Sequence Number=SeqID_11485
  Gene Ontology: Mol. function=nucleotide binding; Cellular component =cytoplasm; Biological process=response to stress
  Homolog annotation: Hit_ID=B6SV64; Match level="QueryCoverage=100%, HitCoverage=100%, E-value=0.0, Identity=80%"; Hit description=Heat shock 70 kDa protein 4
  Pfam annotation: Domain name=HSP70; Domain location=3-690; Score =537.9; E_value=1.3e-158; Accession=PF00012.12; Description=Hsp70 protein
MSVVGFDLGNESCIVAVARQRGIDVVLNEESKRETPAIVCFGDKQRFIGTAGAASSTMNPKNSISQIKRLLGRKFSDPELQRDLASFPFRVSEGPDGFPLVHARYLGEEQAFTPTQLLAMVLSNLKVIAEGNLNAAVVDCCIGIPVYFNDLQRRAVLDAATIAGLRPLRLFHETTATALAYGIYKTDLPENDQLNVAFVDVGHASMQVSIVGYKKGQLKMLSHTYDRSLGGRDFDEALFKHFAVKFKEEYKIDVYQNARACLRLRVACEKLKKVLSANPEAPLNIECLMDEKDVRGFIKRDDFEQISAPVLERVKGPLEKALAEAGLTTENVHFVEVVGSGSRVPAIIKIITEFFGKEPRRTMNASECVARGCALQCAILSPTFKVREFQVNDGFPFTIALSWKPDAQNNETQQTIIFPKGNAIPSVKALTFYRANTFAVDVVNVDANDAQIEPKISTYTIGPFQSSNGEKAKLKLKVRLNIHGIVSVESATMLEEEEVEVPVSATNEAQKEATKMDTDDAPNDPASGTDVNMQESKGATDTAEGAENGAPTSEEKTVPMDTDAKAEPSKKKVKKTNVPVSELVYGALXAAELDKAVEKEYEMALQDRVMEETKEKKNAVEAYVYDMRNKLYDKYGDFVTPEDKEGLISKLQEVEDWLYEDGEDETKGVYIAKLEELKKVGDPIEARFKEWEIRDSAVNQLAYCITSFREAALSNDLKFEHIDISEKQKVINECSEAETWLLEKKQQQDALPKHANPVLLAADLKKKAEALDRFCKPIMTKPKPAPKPQTPPPAETPAPEPQTPEQQQSNGENAASEPTSEDAAEEPAAEQMETDKPEGGADASA

SEQ ID NO: 77460 - protein, 93 aa, Setaria italica
  misc_feature (78)..(78): Xaa can be any naturally occurring amino acid
  Transcript Sequence Number=SeqID_11486
  Subcellular localization annotation: CTP_CleavageSite=28; ConfidenceScore=5.37e-01
MPLLFPKAAPPLPLCLAARVSRGARLAVASTAGGSSSASASFDAAAFEAERLRLDAAARDGMASAAAAAEADPRAWKXWAIRKRVWDARGRPE

SEQ ID NO: 77461 - protein, 133 aa, Setaria italica
  misc_feature (35)..(35): Xaa can be any naturally occurring amino acid
  Transcript Sequence Number=SeqID_11487
  Gene Ontology: Mol. function=protein tyrosine kinase activity; Biological process=protein amino acid phosphorylation
  Homolog annotation: Hit_ID=B9S040; Match level="QueryCoverage=98%, HitCoverage=24%, E-value=1e-59, Identity=81%"; Hit description =Kinase, putative
YRFLHDKVKPQVVHRDIRASNVLLDEEFGAHLMGXGLSKFVPWEVMHERTVKAASYGYLAPEFIYRNELTTKSDVYSFGVLLLEIISGRRPAQSVESVGWQTIFEWATPLVQSHRYLDLLDPLIQELPDVGVV

SEQ ID NO: 77462 - protein, 76 aa, Setaria italica
  Transcript Sequence Number=SeqID_11488
  Gene Ontology: Mol. function=protein tyrosine kinase activity; Cellular component=integral to membrane; Biological process=protein amino acid phosphorylation
  Homolog annotation: Hit_ID=B9S040; Match level="QueryCoverage=100%, HitCoverage=13%, E-value=1e-32, Identity=81%"; Hit description =Kinase, putative
KEKDFYSEIRRVAKLYHPNLVAVKGCCYDHGDRFIVYEFVANGPLDVWLHHIPRGGRSLDWAMRMRAATTLAQGIA

SEQ ID NO: 77463 - protein, 136 aa, Setaria italica
  misc_feature (123)..(123): Xaa can be any naturally occurring amino acid
  Transcript Sequence Number=SeqID_11489
  Gene Ontology: Mol. function=protein serine/threonine kinase activity; Cellular component=membrane; Biological process=protein amino acid phosphorylation
  Homolog annotation: Hit_ID=B6UGS9; Match level="QueryCoverage=100%, HitCoverage=38%, E-value=6e-69, Identity=95%"; Hit description =Protein kinase domain containing protein
  Pfam annotation: Domain name=Pkinase; Domain location=1-136; Score= -81.6; E_value=0.0012; Accession=PF00069.17; Description=Protein kinase domain
  Pfam annotation: Domain name=Pkinase_Tyr; Domain location=1-132; Score=-165.7; E_value=0.01; Accession=PF07714.9; Description=Protein tyrosine kinase
  Pfam module annotation: Pfam domain module=Pkinase::Pkinase_Tyr; Domain location=1-136::1-132
HERLHGGGKAAGTMPWARRVSVALQVARALEYLHDQCEPQVVHGDVKASNVLLDASMAAKLCDFGSARMGFSAAVRPRSSAHTMLGSPGYVDPHYIRSGVVTKKSDVYSFGVLLLELLTGMEXAFCPEEGRLLTAV

SEQ ID NO: 77464 - protein, 513 aa, Setaria italica
  Transcript Sequence Number=SeqID_11490
  Gene Ontology: Mol. function=protein serine/threonine kinase activity; Cellular component=plasma membrane; Biological process =protein amino acid phosphorylation
  Homolog annotation: Hit_ID=B4FAE7; Match level="QueryCoverage=97%, HitCoverage=97%, E-value=0.0, Identity=91%"; Hit description =BRASSINOSTEROID INSENSITIVE 1-associated receptor kinase 1
  Pfam annotation: Domain name=Pkinase; Domain location=190-461; Score =150.1; E_value=6.6e-42; Accession=PF00069.17; Description=Protein kinase domain
  Pfam annotation: Domain name=Pkinase_Tyr; Domain location=190-461; Score=112.2; E_value=1.8e-30; Accession=PF07714.9; Description =Protein tyrosine kinase
  Pfam module annotation: Pfam domain module=Pkinase::Pkinase_Tyr; Domain location=190-461::190-461
MESPTASPTLKDHLSAPTGPLHLKVWEVVCIALGVFMVVVFFVAVWLTIRSKKRVRRASANIPITQIPAISKEIKEVRVEEVPASDFAAHDGVLLTIQDKCSDRDSDKAMAHLGVSKSRRGDESHSGSFRYMDKDAGFQSAEEGGSGTFRQASAHAITAPSPLVGLPEFSYLGWGHWFTLRDLELATNRFSKDNIIGEGGYGIVYRGQLINGSPVAVKKLLNNLGQAEKEFRVEVEAIGHVRHKNLVRLLGYCVEGTQRMLVYEYVNNGNLEQWLHGAMSQRGSLTWEARIKILLGTAKALAYLHEAIEPKVVHRDIKSSNILIDDEFESKVSDFGLAKLLGAGKSHVTTRVMGTFGYVAPEYANTGLLNEKSDIYSFGVVLLEAITGRDPVDYGRPANEVNLVDWLKMMVASRRSEEVVDPTIETRPSTRALKRALLTALRCVDPDSEKRPKMGQVVRMLESDDPIPRGDRRSKHHRGGSTEMDSQRDNNSDTEKSDNPDSKPSRSRASSSK

SEQ ID NO: 77465 - protein, 132 aa, Setaria italica
  Transcript Sequence Number=SeqID_11491
  Homolog annotation: Hit_ID=B1PYP0; Match level="QueryCoverage=91%, HitCoverage=12%, E-value=2e-14, Identity=50%"; Hit description =Lipoxygenase
  Subcellular localization annotation: CTP_CleavageSite=62; ConfidenceScore=5.76e-01
MLTATQPLGAVLSPSHGLSSFCSSTASPGQWAPRRAVSSKVSRTRVSLSEASVNGQAAVGTVANVDQEQAAGLLTRHDKDELVMLKATVTLRLNEEWSTTEKVADMVGQPWLFLEFFSSELNPQTDKEMKTQ

SEQ ID NO: 77466 - protein, 159 aa, Setaria italica
  Transcript Sequence Number=SeqID_11492
IAVIVTIEFYNRPTQGSTPPCSNNWSNCINQIINKSRQIFVPRRNHDVPCSSSLEALVGHERSEVFQRKITPYIPLCWLAFLIGRCWILGVLGLDGHGRRHGDFVGGEGVAHPLLVDDVDEDAQAQAQLLLQPAHLLALLFFPGHALLSCRDVLSSCFV

SEQ ID NO: 77467 - protein, 69 aa, Setaria italica
  Transcript Sequence Number=SeqID_11493
  Gene Ontology: Mol. function=electron carrier activity; Cellular component=endoplasmic reticulum membrane; Biological process =oxidation reduction
  Homolog annotation: Hit_ID=Q109R8; Match level="QueryCoverage=100%, HitCoverage=16%, E-value=6e-25, Identity=73%"; Hit description =Cytochrome P450 family protein, expressed
KLAKPGTYQVFGGGYRMCAGNMLARLQLTILLHHLSVGYKWDLVNPDAEIIYIPHSYPSDGAVIAISEL

SEQ ID NO: 77468 - protein, 297 aa, Setaria italica
  Transcript Sequence Number=SeqID_11494
  Gene Ontology: Mol. function=electron carrier activity; Cellular component=endoplasmic reticulum membrane; Biological process =oxidation reduction
  Homolog annotation: Hit_ID=Q6J4H0; Match level="QueryCoverage=95%, HitCoverage=60%, E-value=4e-55, Identity=36%"; Hit description =Putative ent-Kaurenoic acid hydroxylase-like cytochrome P450
  Pfam annotation: Domain name=p450; Domain location=2-294; Score= -73.3; E_value=4.1e-08; Accession=PF00067.14; Description=Cytochrome P450
TLAVQVTFENICKMFVGMDPSPLTEEMDAWFAGLLGGLRAFPLDLPGTAFRRALRCRHKLSAVFRDELRRRKDVADGGEDLMGALMRTEDEGGRLLSDEEVVDNIVSLVLAGYQSTASALMWAVYHLAKAPHALAKLREENAAIGRDKNGEFITPDDISKMKYTAKVVEETLRVANIAAMVHRVALKDVEYAGYTIPQGWRVVVWLRSLHMDPNYYDDPLRFNPDRWGKLAKPGTYQVFGGGYRMCAGNMLARLQLTILLHHLSVGYKWDLVNPDAEIIYIPHSYPSDGAVIAISEL

SEQ ID NO: 77469 - protein, 67 aa, Setaria italica
  Transcript Sequence Number=SeqID_11495
  Gene Ontology: Mol. function=GTP binding
DAPEANNLFDDEHYGLDDLEKLMSEIGNMRSNLRLMPDFQRREMAAKLAMKMAAMFGDDDEEAFEDL

SEQ ID NO: 77470 - protein, 49 aa, Setaria italica
  Transcript Sequence Number=SeqID_11496
PDNISNNSANNDAVNGITNIQSSGTSVQKRIHGCCWCTAVYTDRKLGLN

SEQ ID NO: 77471 - protein, 166 aa, Setaria italica
  Transcript Sequence Number=SeqID_11497
  Gene Ontology: Mol. function=nucleic acid binding; Cellular component= intracellular
  Homolog annotation: Hit_ID=B9RAP0; Match level="QueryCoverage=78%, HitCoverage=7%, E-value=4e-28, Identity=46%"; Hit description =Nucleic acid binding protein, putative
VVASIETDMTHLADLGESLTAYDQWSAYLDLDDDPTAPGVKASLSTSFSRAKGAMEPDALTLLKYSKDSCRMHVFCLEHALETWTRLQQFGGANIVLLCHPEYPKAESAAKVIAEELGMKHAWKDITFKNATDEDIGRIRLALQDEDAEPTSSDWAVTLGINIYYS

SEQ ID NO: 77472 - protein, 136 aa, Setaria italica
  Transcript Sequence Number=SeqID_11498
  Gene Ontology: Mol. function=nucleic acid binding; Cellular component= intracellular
DHIKDVGVLDQGRLPCVQCGILSYACVAIIQPKEAAVQYVISQECMSSSAKHGEIMKSNDTSNWITTVPPQGHSSETDDNRIHNMSSARVSDRCRQLYTSSTHGCASALGLLASAYESSDSDEEAEAPDNISNNSA

SEQ ID NO: 77473 - protein, 63 aa, Setaria italica
  Transcript Sequence Number=SeqID_11499
RNIILSYILVLDTYTSRITKCVCAYAENLGQLSYYIDNRLYEGNEWVHGLLFDHEHLQSYSCS

SEQ ID NO: 77474 - protein, 132 aa, Setaria italica
  Transcript Sequence Number=SeqID_11500
  Gene Ontology: Mol. function=sequence-specific DNA binding; Cellular component=nucleus; Biological process=regulation of transcription, DNA-dependent
  Homolog annotation: Hit_ID=Q6PL52; Match level="QueryCoverage=96%, HitCoverage=57%, E-value=7e-65, Identity=96%"; Hit description=Leafy hull sterile 1 (Fragment)
  Pfam annotation: Domain name=K-box; Domain location=13-110; Score =138.0; E_value=3e-38; Accession=PF01486.9; Description=K-box region
MHDELERYRSSNYGSQEIKTPLDGEINYQDYLKLKTRVEFLQTTQRNILGEDLGPLSMKELEQLENQIEISLKHIRTRKNQMLLDQLFDLKSKEQELQDLNKDLRKKLQETNAESVLHVSWEEGGHSGYLVG

SEQ ID NO: 77475 - protein, 204 aa, Setaria italica
  misc_feature (101)..(101): Xaa can be any naturally occurring amino acid
  Transcript Sequence Number=SeqID_11501
  Gene Ontology: Mol. function=sequence-specific DNA binding; Cellular component=nucleus; Biological process=regulation of transcription, DNA-dependent
  Homolog annotation: Hit_ID=Q10PZ9; Match level="QueryCoverage=82%, HitCoverage=67%, E-value=5e-74, Identity=84%"; Hit description=MADS -box transcription factor 1
  Pfam annotation: Domain name=K-box; Domain location=71-166; Score =138.4; E_value=2.2e-38; Accession=PF01486.9; Description=K-box region
  Pfam annotation: Domain name=SRF-TF; Domain location=9-57; Score =96.0; E_value=1.3e-25; Accession=PF00319.10; Description=SRF-type transcription factor (DNA-binding and dimerisation domain)
  Pfam module annotation: Pfam domain module=K-box::SRF-TF; Domain location=71-166::9-57
MGRGKVELKRIENKISRQVTFAKRRNGLLKKAYELSVLCDAEVALIIRPGRLFEFSSSSCNVKTLERYSNYGSQVKTPLDGVNYQDYLKLKTRVEFLQTTXRNILGEDLGPLSMKELEQLENQIEISLKHIRTRKNQMLLDQLFDLKSKEQELQDLNKDLRKKLQETNARRSSRLTIVYLGKSILLPRPTDRPTLRKFTYLTLP

SEQ ID NO: 77476 - protein, 62 aa, Setaria italica
  Transcript Sequence Number=SeqID_11502
CVEEGRKCVLLGRPCISLFQSSEHFKSIRIHRARLGPPCLRCSAGPCRLVGGTFAEDDHSLS

SEQ ID NO: 77477 - protein, 187 aa, Setaria italica
  Transcript Sequence Number=SeqID_11503
  Gene Ontology: Mol. function=sequence-specific DNA binding; Cellular component=nucleus; Biological process=regulation of transcription, DNA-dependent
  Homolog annotation: Hit_ID=Q6PL52; Match level="QueryCoverage=94%, HitCoverage=78%, E-value=2e-92, Identity=96%"; Hit description=Leafy hull sterile 1 (Fragment)
  Pfam annotation: Domain name=K-box; Domain location=18-115; Score =135.9; E_value=1.3e-37; Accession=PF01486.9; Description=K-box region
SSSSCMSKQLERYRSSNYGSTGIKTPLDGEINYQDYLKLKTRVEFLQTTQRNILGEDLGPLSMKELEQLENQIEISLKHIRTRKNQMLLDQLFDLKSKEQELQDLNKDLRKKCQLQETNAESVLHVSWEEGGHSGTSGNAIEPYQGFLQHPDNDPSLQIGYHQQAYMDQLNNEDMGDPNEHGGSGWI

SEQ ID NO: 77478 - protein, 182 aa, Setaria italica
  misc_feature (148)..(148): Xaa can be any naturally occurring amino acid
  Transcript Sequence Number=SeqID_11504
  Gene Ontology: Mol. function=sequence-specific DNA binding; Cellular component=nucleus; Biological process=regulation of transcription, DNA-dependent
  Homolog annotation: Hit_ID=Q6Q9H6; Match level="QueryCoverage=94%, HitCoverage=71%, E-value=1e-84, Identity=91%"; Hit description=MADS -box transcription factor 34
  Pfam annotation: Domain name=K-box; Domain location=75-175; Score =119.5; E_value=1.1e-32; Accession=PF01486.9; Description=K-box region
  Pfam annotation: Domain name=SRF-TF; Domain location=9-59; Score =105.2; E_value=2.2e-28; Accession=PF00319.10; Description=SRF-type transcription factor (DNA-binding and dimerisation domain)
  Pfam module annotation: Pfam domain module=K-box::SRF-TF; Domain location=75-175::9-59
MGRGKVVLQRIENKISRQVTFAKRRNGLLKKAYELSILCDAEVALVLFSHAGRLYQFSSSSNLLKTLERYQRYIYASADAAVPSSDELQNNYQEYVQLKSRVEILQHSQRNLLGEDLAPLSTSELEQLESQVDKTLKQIRSRKTQVLXLDELCDLKRKEQMLQDANRVLKRKDWNEGRRTRR

SEQ ID NO: 77479 - protein, 217 aa, Setaria italica
  Transcript Sequence Number=SeqID_11505
  Gene Ontology: Mol. function=sequence-specific DNA binding; Cellular component=nucleus; Biological process=regulation of transcription, DNA-dependent
  Homolog annotation: Hit_ID=Q84JE1; Match level="QueryCoverage=95%, HitCoverage=84%, E-value=8e-59, Identity=60%"; Hit description=AGLG1
  Pfam annotation: Domain name=K-box; Domain location=46-145; Score =139.7; E_value=9.3e-39; Accession=PF01486.9; Description=K-box region
AICSISLHDLICFSLYIYIHMAGSLIPRVSYDSLLKTLERYQRYIYASADAAVPSSDELQNNYQEYVQLKSRVEILQHSQRNLLGEDLAPLSTSELEQLESQVDKTLKQIRSRKTQVLLDELCDLKRKEQMLQDANRVLKRKLDEVEAEVAPPPQPQLPWQGGSGDAMLSDGPPQPEHFFQALESNPLSLQPTFHTMDMNQQPVPAPGSCYPPAWMA

SEQ ID NO: 77480 - protein, 757 aa, Setaria italica
  Transcript Sequence Number=SeqID_11506
  Gene Ontology: Mol. function=protein kinase activity; Cellular component=chloroplast; Biological process=protein amino acid phosphorylation
  Homolog annotation: Hit_ID=B9RWK9; Match level="QueryCoverage=94%, HitCoverage=88%, E-value=0.0, Identity=81%"; Hit description=Protein ABC1, mitochondrial, putative
  Pfam annotation: Domain name=ABC1; Domain location=218-337; Score =122.2; E_value=1.6e-33; Accession=PF03109.8; Description=ABC1 family
  Pfam annotation: Domain name=APH; Domain location=232-455; Score= -16.1; E_value=0.032; Accession=PF01636.15; Description =Phosphotransferase enzyme family
  Pfam module annotation: Pfam domain module=ABC1::APH; Domain location= 218-337::232-455
  Subcellular localization annotation: CTP_CleavageSite=20; ConfidenceScore=5.47e-01
HLPALPGRRRRRGQQLPRVRAVATEPKPSTSTSSSRPRTRNDLSNTRFGGVSKEIQRVRKQMEQDEQLATLMRGLRGQNLRDEQFADDNVRLRLVEVETAGNNEGLPLVYSPEIISAYWGKRPRAVATRVVQLLSVAGGFISHLISDLINKKLKENEVARAIELREIVTSLGPAYIKLGQALSIRPDILSPAAMTELQKLCDKVPSFPDDIAMALLEEELGQPWQAIYSELSPSPIAAASLGQVYKGRLKETGELVAVKVQRPFVLETVTIDLFIIRNLGLVLRRFPQVSIDVVGLVDEWAARFFEELDYVNEGENGAYFAEMMKEDLPQVVVPKTYDKYTSRKVLTTQWIEGEKLSQSTEDDVGSLVSVGVICYLKQLLDTGFFHADPHPGNMIRTPDGKLAILDFGLVTKLTDDQKYGMIEAIAHLIHRDYDAIVKDFVKLGFIPEGVNLDPILPVLAKVFDQALEGGGAKNINFQELAADLAQITFDYPFRIPPYFALIIRAIGVLEGIALVGDPEFAIVDEAYPYIAQRLLTDESPRLRSALRYTIYGKTGVFDAERFIDVMQAFENFIRAAKSGGGENLKGNMAELADIGAQPSTSLVPVFPMAIAQPEQPVKARAALAFLLSERGNFFREFILDEIVKAIDAVSREQLIQIAASFGIGNATPVFSMVPVRARALLPTITEEDRVILNNVEKVVKFLTSGTATPTVSGDVNMVSVVQELLPVLPGISSKILPDVLSRLSSRVFARLIREAFL

SEQ ID NO: 77481 - protein, 232 aa, Setaria italica
  Transcript Sequence Number=SeqID_11507
  Gene Ontology: Mol. function=zinc ion binding; Cellular component =plasma membrane
  Homolog annotation: Hit_ID=B6TL02; Match level="QueryCoverage=81%, HitCoverage=83%, E-value=1e-71, Identity=76%"; Hit description=PIT1
  Pfam annotation: Domain name=zf-C3HC4; Domain location=19-66; Score =55.5; E_value=2e-13; Accession=PF00097.17; Description=Zinc finger, C3HC4 type (RING finger)
MMEQEEACSSSSSLTLRQCRICHDEEDGRRSSMESPCACSGSLKYAHRGCVQRWCDEKGSTLCEICLQNFEPGYTVPPKKPADVAVTIRESLEVPRLNYEPEEQEVEDAAVVGAGDPEYAECARAAGRSASWCRSVAVTFTVVLLLRHLVTVATVGAANQFAFSLLTVYLLRASGILLPFYVVMRLISVIQHGQRQYRLQLLQEQRRQALRLVRRQGQGQGQQQQQHVVLVR

SEQ ID NO: 77482 - protein, 450 aa, Setaria italica
  Transcript Sequence Number=SeqID_11508
  Gene Ontology: Mol. function=nucleotide binding; Biological process =defense response
  Homolog annotation: Hit_ID=Q6Z574; Match level="QueryCoverage=97%, HitCoverage=35%, E-value=3e-43, Identity=35%"; Hit description =Putative disease resistance protein
CRVHDMVLDLIIYLAAQENFAMLSEGPDLKTSACKIRRLSLQGSELDTDKEDRKEGQTAMPATVDMSHVRSLIALGDAFQWMQPLSRFSVLRVLVLELSPSKNNDPKDIFRLHHLRYLELRGELATELLEHIGNLQSLRTLDLWGTSLEELPPSIVQLKQLERLITGTGVKFPDGIGNLVSLQQLAVLDVKKSPNTLAELVKLTELRGLAITGFDENEGLVKTFLQTLINLNNIVTLNFDGGRSCSLDCMPEQWRGPAHLQSFDGGDVTFSELPRWFSSLCELSCLSICVRVLRQVDIQLLGALPTLRFLLLQVDIGGTTEERLVIGSDKAFLSLAEFEFMHCSRCWLVFGQGVMPRLQRLKLYFKARKRVGGGFDVGMENLTSLKHVRVVVNCGGATTREVEDAELKIRDAVDGHPNHPTLVLSRIWESLMEEDENEDVRKGPEQQSSV

SEQ ID NO: 77483 - protein, 108 aa, Setaria italica
  Transcript Sequence Number=SeqID_11509
  Gene Ontology: Mol. function=serine-type peptidase activity; Cellular component=integral to membrane
  Homolog annotation: Hit_ID=Q01N45; Match level="QueryCoverage=79%, HitCoverage=41%, E-value=2e-43, Identity=96%"; Hit description =OSIGBa0123D13.4 protein
SSTESGRQTSCCSHKDAQEHTRQVFVGDVVLLKDPEKSDDLIIRRLAALEGYEMVSNDEKDEPFVLEKDQCWVLADNQALKPKEARDSRLFGPVPMTDILGRVIYSLR

SEQ ID NO: 77484 - protein, 206 aa, Setaria italica
  Transcript Sequence Number=SeqID_11510
  Gene Ontology: Mol. function=serine-type peptidase activity; Cellular component=integral to membrane
  Homolog annotation: Hit_ID=Q01N45; Match level="QueryCoverage=99%, HitCoverage=99%, E-value=1e-110, Identity=92%"; Hit description =OSIGBa0123D13.4 protein
MVSLSTWFRYAAHKFEYSISLSWKKYNVGQINSRELTDAIWKNFFQGKLTFTHWTKGGEAMTPIVSPTGGTLLVRKLANLSPTQVFVGDVVLLKDPEKSDDLIIRRLAALEGYEMVSNDEKDEPFVLEKDQCWVLADNQALKPKEARDSRLFGPVPMTDILGRVIYSLRTAVDHGPVENSGMAMNQDAPVLAVELDVEEMAKNNKT

SEQ ID NO: 77485 - protein, 98 aa, Setaria italica
  Transcript Sequence Number=SeqID_11511
RMQLRLLKMEATGNADETELALSSDDGVSASCKPLDEACQTSDTFWDADERDFAYVLDMLTCLGIKSDEQDFQLNACYLWEYPAGSDVYDSLEKKYGK

SEQ ID NO: 77486 - protein, 71 aa, Setaria italica
  Transcript Sequence Number=SeqID_11512
  Subcellular localization annotation: CTP_CleavageSite=32; ConfidenceScore=5.02e-01
IDSRRTPNQAIPCPALPLCVIQRLQQAINRVCSSQVLKMASPFGTCGLNKPAPAAFATNKHLLPSLRHQLF

SEQ ID NO: 77487 - protein, 105 aa, Setaria italica
  Transcript Sequence Number=SeqID_11513
  Gene Ontology: Mol. function=unfolded protein binding; Cellular component=chloroplast; Biological process=cellular protein metabolic process
  Homolog annotation: Hit_ID=Q6ZFJ9; Match level="QueryCoverage=100%, HitCoverage=17%, E-value=3e-52, Identity=96%"; Hit description=60 kDa chaperonin
VEEGIVVGGGCTLLRLASKVDAIIETLDNDEQKVGAEIVRKSLSYPLKLIAKNAGVNGSVVIEKVLANKNFRYGYNAATGNYEDLMAAGIIDPTKVVRCCLEHAA

SEQ ID NO: 77488 - protein, 599 aa, Setaria italica
  misc_feature (25)..(25): Xaa can be any naturally occurring amino acid
  Transcript Sequence Number=SeqID_11514
  Gene Ontology: Mol. function=unfolded protein binding; Cellular component=chloroplast; Biological process=cellular protein metabolic process
  Homolog annotation: Hit_ID=Q6ZFJ9; Match level="QueryCoverage=100%, HitCoverage=100%, E-value=0.0, Identity=88%"; Hit description=60 kDa chaperonin
  Pfam annotation: Domain name=Cpn60_TCP1; Domain location=76-580; Score=651.0; E_value=1.1e-192; Accession=PF00118.16; Description=TCP- 1cpn60 chaperonin family
  Subcellular localization annotation: CTP_CleavageSite=52; ConfidenceScore=5.48e-01
MASPFGTCGLNKPAPAAFATNKHLXPLPSPPVVSIPRKMKMRHQRKCRFTVNAAKEIHFNKDGSAIRKLQNGVNKLADLVGVTLGPKGRNVVLESKYGSPKIVNDGVTVAKEVELEDPVENIGAKLVRQAAAKTNDLAGDGTTTSVVLAQGMITEGVKIVAAGANPVQITRGIEKTAKALVNELQKMSKEVEDSELADVAAVSAGNNYEIGNIIAEAMAKVGRQGVVTLEEGKSAENNLYVVEGMQFDRGYISPYFVTDSEKMTVEYENCKLLLVDKKINNARDLITILEDAIRGGYPILIVAEDIEQEALATLVVNRLRGALKIAAIKAPGFGERKSQYLDDIATLTGGTVIRDEVGLSLDKADKEVLGTAAKVVVTKDSTTIVGDGTTQEEVNKRVMQIKNQIEATDQEYEKEKLNERIAKLSGGVAVIQVGAQTETELKEKKLRVEDALNATKAAVEEGIVVGGGCTLLRLASKVDAIIETLDNDEQKVGAEIVRKSLSYPLKLIAKNAGVNGSVVIEKVLANKNFRYGYNAATGNYEDLMAAGIIDPTKVVRCCLEHAASVAKTFITSDAVVVDIQVPEQAPAANPMGGGSGFGF

SEQ ID NO: 77489 - protein, 90 aa, Setaria italica
  Transcript Sequence Number=SeqID_11515
  Gene Ontology: Mol. function=unfolded protein binding; Cellular component=chloroplast; Biological process=cellular protein metabolic process
  Homolog annotation: Hit_ID=Q6ZFJ9; Match level="QueryCoverage=92%, HitCoverage=13%, E-value=7e-35, Identity=89%"; Hit description=60 kDa chaperonin
YGLFKLVSVVIEKVLANKNFRYGYNAATGNYEDLMAAGIIDPTKVVRCCLEHAASVAKTFITSDAVVVDIQVPEQAPAANPMGGGSGFGF

SEQ ID NO: 77490 - protein, 111 aa, Setaria italica
  Transcript Sequence Number=SeqID_11516
  Homolog annotation: Hit_ID=Q53KR7; Match level="QueryCoverage=27%, HitCoverage=17%, E-value=7e-10, Identity=93%"; Hit description =RNase3 domain containing protein, expressed
  Subcellular localization annotation: CTP_CleavageSite=69; ConfidenceScore=5.31e-01
MATAAATMTMATHHPRARPRLRVCAAWDMNPGAATVAMPKPSKAKAKPPATPTTPPRPPAPNHADLFARSSEGQGEKKSTYMGFEKWWLPPPPEVKKPRSLYSAASLAYLG

SEQ ID NO: 77491 - protein, 70 aa, Setaria italica
  Transcript Sequence Number=SeqID_11517
  Gene Ontology: Mol. function=ribonuclease III activity; Biological process=RNA processing
  Homolog annotation: Hit_ID=Q53KR7; Match level="QueryCoverage=85%, HitCoverage=34%, E-value=3e-27, Identity=100%"; Hit description =RNase3 domain containing protein, expressed
VTILIAFCRDILRWGRNIVSSKTRTRKRAGIAVYNRASSLETLIGYLYLTNFKRLEQLMFQLGFTSGAYL

SEQ ID NO: 77492 - protein, 196 aa, Setaria italica
  Transcript Sequence Number=SeqID_11518
  Gene Ontology: Mol. function=ribonuclease III activity; Biological process=RNA processing
  Homolog annotation: Hit_ID=Q53KR7; Match level="QueryCoverage=79%, HitCoverage=90%, E-value=5e-86, Identity=97%"; Hit description =RNase3 domain containing protein, expressed
  Pfam annotation: Domain name=Ribonuclease_3; Domain location=49-151; Score=-7.9; E_value=0.024; Accession=PF00636.18; Description=RNase3 domain
SPPAPNHADLFARSSEGQGEKKSTYMGFEKWWLPPPPEVKKPRSLYSAASLAYLGDCIYELYARRHFFFPPLSINEYNKRVMDVVKCESQDLLLNKLLGEDFLTQEERDILRWGRNIVSSKTRTRKRAGIAVYNRASSLETLIGYLYLTNFKRLEQLMFQLGFTSGASSQHIAEELRSSFQKTTPITTQAQQPATQ

SEQ ID NO: 77493 - protein, 254 aa, Setaria italica
  Transcript Sequence Number=SeqID_11519
  Gene Ontology: Mol. function=transferase activity, transferring glycosyl groups; Biological process=metabolic process
  Homolog annotation: Hit_ID=Q8LKT5; Match level="QueryCoverage=100%, HitCoverage=54%, E-value=1e-116, Identity=81%"; Hit description =Putative glucosyl transferase
VEHGIEVTFVNTEANHTLVLDAMAAANGAGCPSLDGIRLVGVPDGLADGDDRKDLGKLVDALSQHMPCYLEELVGRIEASGGTKISWLVADEGMGWAFEVAKKLGIRAACFWTGSAAFLASMLRIPQLIQDGVIDEKGWPKRQETFQFAPGMPPLHTSHLSWNNAGAPKDQPAIFQLVVRNNEAKDLAEVTVCNSFGDAEPAAFKLYPDILPVGPLFADVQFKKPVGQFLPEDARCLEWLDAWPDRSVVYVAFG

SEQ ID NO: 77494 - protein, 230 aa, Setaria italica
  misc_feature (33)..(33): Xaa can be any naturally occurring amino acid
  misc_feature (88)..(88): Xaa can be any naturally occurring amino acid
  Transcript Sequence Number=SeqID_11520
  Gene Ontology: Mol. function=metal ion binding; Cellular component =nucleus; Biological process=proteolysis
  Homolog annotation: Hit_ID=Q53PX0; Match level="QueryCoverage=84%, HitCoverage=10%, E-value=2e-79, Identity=73%"; Hit description=PHD -finger family protein, expressed
  Pfam annotation: Domain name=PHD; Domain location=6-51; Score=42.6; E_ value=1.5e-09; Accession=PF00628.21; Description=PHD-finger
DGNSDDCRICGMDGTLVCCDGCPWAYHSRCIGXNKAFLPQGEWFCPECVINKLGPTSSRIERGARGAQTFGIDMCGRLFLGTCDYLLXIGTSSAAESYSRYYNRYDVVKVLQRLALSDAYVDICSQIEEYWKHLVGIAQSERSKIGKEVGVSHTPQPGMLSFTPMKAGDGSIWTTLKDGGDSKTVALPQTYMQQKFVSNEEQKCMPSLVAAAEKNAEVCNQTLSAQYNIH

SEQ ID NO: 77495 - protein, 189 aa, Setaria italica
  misc_feature (157)..(157): Xaa can be any naturally occurring amino acid
  Transcript Sequence Number=SeqID_11521
  Gene Ontology: Mol. function=metal ion binding; Cellular component =nucleus; Biological process=proteolysis
  Homolog annotation: Hit_ID=Q53PX0; Match level="QueryCoverage=98%, HitCoverage=9%, E-value=8e-85, Identity=77%"; Hit description=PHD -finger family protein, expressed
  Pfam annotation: Domain name=PHD; Domain location=118-163; Score =27.8; E_value=2.4e-05; Accession=PF00628.21; Description=PHD-finger
CVKNLGGRSFGRSLLATEYYKLPVAMKLRVLQILCDHVIESDELKTELEDREGYNEEMEYEIDSSALLEAGSRAVSTRASKASAYKKMNDLQNVEITPNVTNSEGTVADTSQDGNSDDCRICGMDGTLVCCDGCPWAYHSRCIGQNKAFLPQGEWFXPECVINKLGPTSSRIERGARGAQTFGIDMCGS

SEQ ID NO: 77496 - protein, 68 aa, Setaria italica
  Transcript Sequence Number=SeqID_11522
KELRSRHRNRWKLRKRQTLALNLLHSTWVSDTSCKSEHPFRIPSTCSWPSHSSCVRHRAYHLSFSAKV

SEQ ID NO: 77497 - protein, 203 aa, Setaria italica
  Transcript Sequence Number=SeqID_11523
  Gene Ontology: Mol. function=metal ion binding; Cellular component =chloroplast; Biological process=metal ion transport
  Homolog annotation: Hit_ID=B6TXF1; Match level="QueryCoverage=94%, HitCoverage=95%, E-value=5e-77, Identity=81%"; Hit description=Metal ion binding protein
  Pfam annotation: Domain name=HMA; Domain location=130-190; Score =48.1; E_value=3.5e-11; Accession=PF00403.18; Description=Heavy-metal- associated domain
  Subcellular localization annotation: CTP_CleavageSite=13; ConfidenceScore=5.07e-01
MAPLLFRDMKGLSCSSPASTAICPSLERQPMVRSHKAIASASPLSQVPTEPRTHRHDGKKGQQHKAAAVSNGGGLVSPAGSSRYLLSGRFASATQEEIQEVETAPAVDAKREEASEAADAKNTQAQEQVVVLKVSLHCKACAGKVKKHLSKMEGVTSFDIDFAAKKVTVVGDVTPLGVLNSVSKVKNAQLWAAAPPPPTAIAV

SEQ ID NO: 77498 - protein, 225 aa, Setaria italica
  Transcript Sequence Number=SeqID_11524
  Gene Ontology: Mol. function=hydrolase activity, acting on glycosyl bonds; Cellular component=extracellular region; Biological process =cell wall organization and biogenesis
  Homolog annotation: Hit_ID=Q84ZP3; Match level="QueryCoverage=91%, HitCoverage=50%, E-value=7e-76, Identity=66%"; Hit description =Putative polygalacturonase
  Pfam annotation: Domain name=Glyco_hydro_28; Domain location=13-225; Score=116.3; E_value=1e-31; Accession=PF00295.9; Description =Glycosyl hydrolases family 28
  Subcellular localization annotation: CTP_CleavageSite=13; ConfidenceScore=5.00e-01
DTRALARAWRAACASRRPAVVLVPRGRRYLLKVITLHGPCRSSVAVAVKGTLVASPNRDDWSEKERRHWIVFRRVDRLTVDGGGAVDGNGETWWKHSCKINPDLPCKGAPTALSFHLCKNLRVEDLKIVNSQQIHVSVEDCTNVQLARLSITAPHSSPNTDGIHITRSKDVKVTNCKIRTGDDCVSIEDGTHNLHVSKVVCGPGHGISIGSLGDHNSWAQVSGIT

SEQ ID NO: 77499 - protein, 80 aa, Setaria italica
  Transcript Sequence Number=SeqID_11525
  Gene Ontology: Mol. function=serine-type endopeptidase activity; Cellular component=plastid stroma; Biological process=proteolysis
  Homolog annotation: Hit_ID=B4F9Z4; Match level="QueryCoverage=75%, HitCoverage=15%, E-value=4e-25, Identity=93%"; Hit description=ATP -dependent Clp protease proteolytic subunit
IYILLKKLKLLTLTLYIILLVLQRSKSKVYTINLSMAYGQAAMLLSLGFKGKRGVLPNSITKLHLPKVHKSGGAAIDMWI

SEQ ID NO: 77500 - protein, 352 aa, Setaria italica
  Transcript Sequence Number=SeqID_11526
  Gene Ontology: Mol. function=serine-type endopeptidase activity; Cellular component=plastid stroma; Biological process=proteolysis
  Homolog annotation: Hit_ID=B4F9Z4; Match level="QueryCoverage=99%, HitCoverage=89%, E-value=1e-138, Identity=73%"; Hit description=ATP -dependent Clp protease proteolytic subunit
  Pfam annotation: Domain name=CLP_protease; Domain location=162-350; Score=82.0; E_value=2.1e-21; Accession=PF00574.15; Description=Clp protease
  Subcellular localization annotation: CTP_CleavageSite=38; ConfidenceScore=5.39e-01
MALALRCPAATSSRSPFLPSSSPVPPARVPRRPPATFRCNYYYGDGGGFRKNYDHIPKQFREENLKDGLMDNYKNVPQFLYGLSPAQMEMFMNDDNPYNRQSQKVTEESVSAARSYEEFGMYTLSGMHEGPASYSMGMGMGGSMSMSMGMGRGGRGYRRMRSSAPDLPSLLLDSRIIFLGMPIVPAVTELIAAQFLWLDYDDRTKPIYLYINSTGTMDENNELVASETDAYAIADFINRSKSKVYTINLSMAYGQAAMLLSLGFKGKRGVLPNSITKLHLPKVHKSGGAAIDMWIKAKELDTNTDYYLDLLSKGVGKPKEELAEFLKGPRYFRAQEAIDYGLADTILCLLLF

SEQ ID NO: 77501 - protein, 151 aa, Setaria italica
  Transcript Sequence Number=SeqID_11527
  Gene Ontology: Mol. function=serine-type endopeptidase activity; Cellular component=plastid stroma; Biological process=proteolysis
  Homolog annotation: Hit_ID=B4F9Z4; Match level="QueryCoverage=90%, HitCoverage=35%, E-value=6e-62, Identity=86%"; Hit description=ATP -dependent Clp protease proteolytic subunit
  Pfam annotation: Domain name=CLP_protease; Domain location=2-111; Score=-59.8; E_value=0.00035; Accession=PF00574.15; Description=Clp protease
FSVSLFCYYCWYLRSKSTMLLSLGFKGKRGVLPNSITKLHLPKVHKSGGAAIDMWIKAKELDTNTDYYLDLLSKGVGKPKEELAEFLKGPRYFRAQEAIDYGLADTILHSLDGSFKPKDLTAQLAKAQAMRQSGKRAAAGAGRWSTPTAPR

SEQ ID NO: 77502 - protein, 625 aa, Setaria italica
  misc_feature (10)..(10): Xaa can be any naturally occurring amino acid
  Transcript Sequence Number=SeqID_11528
  Gene Ontology: Mol. function=1,3-beta-glucan synthase activity; Cellular component=1,3-beta-glucan synthase complex; Biological process=1,3-beta-glucan biosynthetic process
  Homolog annotation: Hit_ID=Q5Z5B8; Match level="QueryCoverage=99%, HitCoverage=31%, E-value=0.0, Identity=87%"; Hit description =Putative callose synthase 1 catalytic subunit
TFQWHEFFPXHGSNNIGVVIALWAPIILVYFMDTQIWYALFSTLIGGIYGAYRRLGEIRTLGMLRSRFESLPVAFNERLIPSDANKRKGLRAAFSRKPKASDDEKEEEKRAARFAQMWNLIITSFREEDLIDNREMDLLLVPYCKDRELNIFQWPPFLLASKIPIALDMAADSGGKDRDLTKRMGSDPYFSYAIRECYASFKNIINTLVFGQREKLVIKEIFDVVDKHIAEETLIRDLTMRSLPALSKKFIDLLELLQKNKEEDLGQVVILFQDMLEVVTRDIMEEEQLGGMLESIHGGHNRRHEGITPLDQQDQLFAKAIRFPMEESDAWTEKIKRLHLLLTVKESAMDVPTNLDARRRISFFANSLFMEMPNAPKVRNMLPFSVLTPYYKEDVLFSSQNLEEPNEDGVSILFYLQKIYPDEWKNFLERVDRKSEEELREDEELEEELRLWASYRGQTLTRTVRGMMYYRKALELQAFLDMAQDDDLMEGYRATELMSEDSQLMTQCKAIADMKFTYVVSCQQYGIQKRSGEPCAHDILRLMTTYPSLRVAYIDEVEAPSQDRNKKVEKVYYSALVKASVTKPNEPGQSLDQVIYKIKLPGNAILGEGKPENQNHAIIFTRGEC

SEQ ID NO: 77503 - protein, 88 aa, Setaria italica
  Transcript Sequence Number=SeqID_11529
PTCSCLSQMLTRPVAAWGIITLCSICASKGPCVLCSSIFYDLSFMCMSCVQSTGRCVGDLGSSGVPDPHQVFYGIPIRFLSLIFVIHI

SEQ ID NO: 77504 - protein, 196 aa, Setaria italica
  Transcript Sequence Number=SeqID_11530
  Gene Ontology: Mol. function=protein serine/threonine kinase activity; Biological process=protein amino acid phosphorylation
  Homolog annotation: Hit_ID=B9RSY9; Match level="QueryCoverage=98%, HitCoverage=16%, E-value=1e-24, Identity=37%"; Hit description=ATP binding protein, putative
  Subcellular localization annotation: CTP_CleavageSite=66; ConfidenceScore=5.06e-01
HNGLRKKDENSTKGFVTPVKNVQSGKRNSAKPKADGFKGVNILRMSRIAKLNLQREKDKENYRRPPAETSENETEVKIENNDMELDFGENPEGDAPDDTDGSDHPGPAAHEKPQATNGNEENCMANQVDMLTDEGLVKPDIMTKTEQNSCSDNLDVVATPPSICMRKAQRAKVTPCSATGSEPTNIFEAFWHPNSI

SEQ ID NO: 77505 - protein, 156 aa, Setaria italica
  Transcript Sequence Number=SeqID_11531
CKCTTTAYLEPSSLYWVFSCLYNYMYLGACKHTKLQAYNLIHPHTQLRTQTQLHSLQNLDKTRQQTRTRRKKSLMVPGLHAWDSICRLGWLVSLLEPRQRQATIEEQHQHQEVADGDQPHQPGVVPGQVRREGRVDGENGESRQPEPWRAIITSCS

SEQ ID NO: 77506 - protein, 130 aa, Setaria italica
  misc_feature (98)..(98): Xaa can be any naturally occurring amino acid
  Transcript Sequence Number=SeqID_11532
  Gene Ontology: Mol. function=receptor activity
  Homolog annotation: Hit_ID=A0EJF3; Match level="QueryCoverage=100%, HitCoverage=18%, E-value=3e-36, Identity=56%"; Hit description=Beta -glucan-binding protein 4
VVGDAWSLRADPVSPTWHSTRGVSEDGVAEVVAALRADVAGLASTPITTTSSYFYGKAIARAARLALIAEEVGCPDVIPAVQSFLKATVTPWLDGSFXGNGFFYDAKWGGLVTLQGLRDSGADFGFGIFN

SEQ ID NO: 77507 - protein, 80 aa, Setaria italica
  Transcript Sequence Number=SeqID_11533
PGISFSSCELVRTMHARYIGILSSLLLNPFLGCDLIFICMLKFFQHFSVQTCEFLLTSLCSCVFLVTMILISPFYDPQKK

SEQ ID NO: 77508 - protein, 76 aa, Setaria italica
  Transcript Sequence Number=SeqID_11534
  Pfam annotation: Domain name=DUF543; Domain location=1-63; Score =87.6; E_value=4.3e-23; Accession=PF04418.4; Description=Domain of unknown function (DUF543)
YLGTSKWDACLDLSIRRVAYSSLAGAFTGLLLFRSPTTRWASVALGAGVGIGAAYTECSYLFNGAPPKWSPKGEDK

SEQ ID NO: 77509 - protein, 295 aa, Setaria italica
  misc_feature (188)..(188): Xaa can be any naturally occurring amino acid
  Transcript Sequence Number=SeqID_11535
  Gene Ontology: Mol. function=histone-lysine N-methyltransferase activity; Cellular component=nucleus; Biological process=chromatin modification
  Homolog annotation: Hit_ID=Q8L820; Match level="QueryCoverage=96%, HitCoverage=32%, E-value=1e-155, Identity=91%"; Hit description=SET domain-containing protein SET104
  Pfam annotation: Domain name=Pre-SET; Domain location=11-108; Score =122.6; E_value=1.3e-33; Accession=PF05033.8; Description=Pre-SET motif
  Pfam annotation: Domain name=SET; Domain location=110-265; Score =151.1; E_value=3.4e-42; Accession=PF00856.20; Description=SET domain
  Pfam module annotation: Pfam domain module=Pre-SET::SET; Domain location=11-108::110-265
LDQNDSVIIKDLSRGLERVPVSVVNKISNECPMPYRYISRLQYPRNYRPTPPAGCGCVGGCSDSKKCACAVKNGGEIPFNDKGRIVEAKPLVYECGPSCKCPPTCRNRVGQHGLKFRLQVFKTKSMGWGVRTLDFIPSGSFVCEYIGEVLEDEEAQKRTTDEYLFAIGHNYYDESLWEGLSRSIPSLXQKGPGKDDEAGFAVDASEMGNFAKFINHSCTPNLYAQNVLYDHEDISVPHVMFFACDDIRPRQELAYHYNYKIDQVHDANGNIKKKKCLCGSVECDGWFCYLSFSIF

SEQ ID NO: 77510 - protein, 255 aa, Setaria italica
  misc_feature (245)..(245): Xaa can be any naturally occurring amino acid
  Transcript Sequence Number=SeqID_11536
  Gene Ontology: Mol. function=methyltransferase activity; Biological process=metabolic process
  Homolog annotation: Hit_ID=B6SM48; Match level="QueryCoverage=100%, HitCoverage=91%, E-value=1e-121, Identity=83%"; Hit description=S -adenosylmethionine-dependent methyltransferase
  Pfam annotation: Domain name=Methyltransf_11; Domain location=38-135; Score=40.4; E_value=6.9e-09; Accession=PF08241.4; Description =Methyltransferase domain
  Pfam annotation: Domain name=Methyltransf_12; Domain location=38-133; Score=40.3; E_value=7.6e-09; Accession=PF08242.4; Description =Methyltransferase domain
  Pfam module annotation: Pfam domain module=Methyltransf _11::Methyltransf_12; Domain location=38-135::38-133
MAGLYEKPSETYAKKRPRYPKEWFSMLAGLTAGHHRAWDAGCGSGQAAISMAEHYESVVATDVSEGQLRNAMAHPRVRYVHTPEHLSEDELVALVGGDGSLDLIVVATSIHWFDIPLFYAVANRALRKPGGVLAVWGYNYEIHPFEDALQGQLYAALRPYQDPRARLATEDRYRSLPFPFEPVGVGAEGAPADVDMEVEMTLEDLAGFVMTGSVVTTAREKGAGEEMEAVVRDVMRRVEEKWGGXAPTVPRKLAF

SEQ ID NO: 77511 - protein, 112 aa, Setaria italica
  Transcript Sequence Number=SeqID_11537
TKGNGNRLRRGAVAATKIKGKSIKEENNRNRRGSRSIVGDAKRGSSGRGDRRTLGRDFGSCCEEGGFESRRGRSPGYPRKRSRLWGRARREGCRRRRWSPGTPRRRSGEGRV

SEQ ID NO: 77512 - protein, 92 aa, Setaria italica
  Transcript Sequence Number=SeqID_11538
  Gene Ontology: Mol. function=nucleoside-triphosphatase activity
  Homolog annotation: Hit_ID=B6U9M1; Match level="QueryCoverage=100%, HitCoverage=32%, E-value=2e-17, Identity=58%"; Hit description =Cobalt import ATP-binding protein cbiO 2
  Subcellular localization annotation: CTP_CleavageSite=41; ConfidenceScore=5.46e-01
MAHGLAASVGGPLRCCPSASSSPTNVRPILEAPHRRSLRARASASPPPAAPAIEGRDVGLSVTTRRGRVLPVLKGCSLHVPPGQLWMLLGPN

SEQ ID NO: 77513 - protein, 79 aa, Setaria italica
  misc_feature (15)..(15): Xaa can be any naturally occurring amino acid
  Transcript Sequence Number=SeqID_11539
MSRCFPYPPSGVTLXNPVAVAEAETTAKKEREKAEKKKEKRSDKKALLHGETSKHSKHSHKKRKHEDVSTVGKETKRFP

SEQ ID NO: 77514 - protein, 64 aa, Setaria italica
  Transcript Sequence Number=SeqID_11540
AKNGNVVRILITFNLDAHNVTILSLARTGNVVRIKIKSNQDSQAAVLEKPRVPEPPLVQQMRSS

SEQ ID NO: 77515 - protein, 124 aa, Setaria italica
  Transcript Sequence Number=SeqID_11541
  Gene Ontology: Mol. function=protein serine/threonine kinase activity; Biological process=protein amino acid phosphorylation
  Homolog annotation: Hit_ID=UPI000034F553; Match level="QueryCoverage =92%, HitCoverage=14%, E-value=6e-15, Identity=43%"; Hit description =protein kinase family protein
MAVEHGEGVGRCILVGLHMDAVGRDLLRWALNKAARRGDRVVAVHIYRKSDLCRTNTLRLIRTLDDYLAEYESLCSQKEIVLVGRATPGSSIQKELVKEAKLCAAMVVVLGANKKYSFGGSTSL

SEQ ID NO: 77516 - protein, 117 aa, Setaria italica
  misc_feature (41)..(41): Xaa can be any naturally occurring amino acid
  Transcript Sequence Number=SeqID_11542
  Homolog annotation: Hit_ID=Q461D5; Match level="QueryCoverage=96%, HitCoverage=28%, E-value=4e-14, Identity=48%"; Hit description =Stress inducible protein coi6.1
  Subcellular localization annotation: CTP_CleavageSite=46; ConfidenceScore=5.34e-01
MQRVVQQPAVKITQPVDPQLSVKAAVGRSDLLPPKSSGIVXPLPARSVGRSDPQPVKMTQRVQHPPKEFRSPAVGLPEAPQLPLLQKPKDLSVLKQQQVPVASLPKEEPCTSGIRFR

SEQ ID NO: 77517 - protein, 129 aa, Setaria italica
  misc_feature (7)..(7): Xaa can be any naturally occurring amino acid
  misc_feature (83)..(83): Xaa can be any naturally occurring amino acid
  Transcript Sequence Number=SeqID_11543
  Gene Ontology: Mol. function=protein serine/threonine kinase activity; Cellular component=peroxisome; Biological process=protein amino acid phosphorylation
  Homolog annotation: Hit_ID=B9S2T6; Match level="QueryCoverage=100%, HitCoverage=12%, E-value=4e-27, Identity=48%"; Hit description=ATP binding protein, putative
EDNLHGXRSKPALSWENRYKAALGIAEALSYVHSGGSRPVIHRDVKSSNILLTEEFEPQVSANTDTPPHSHGIVAKVFVWTYXRSRTLNSPSRQLSDFGLAIWAPTNPTSLTHSDVVGTFGYLAPEYFM

SEQ ID NO: 77518 - protein, 65 aa, Setaria italica
  Transcript Sequence Number=SeqID_11544
RLLWSLKLQKEREKAEKKKEKRSDKKALLHGETSKHSKHSHKKRKHEDVSTVGKETKKVSSESVE

SEQ ID NO: 77519 - protein, 588 aa, Setaria italica
  Transcript Sequence Number=SeqID_11545
  Gene Ontology: Mol. function=protein serine/threonine kinase activity; Biological process=protein amino acid phosphorylation
  Homolog annotation: Hit_ID=B9T7D3; Match level="QueryCoverage=98%, HitCoverage=97%, E-value=1e-136, Identity=46%"; Hit description=ATP binding protein, putative
  Pfam annotation: Domain name=APH; Domain location=243-427; Score= -19.9; E_value=0.065; Accession=PF01636.15; Description =Phosphotransferase enzyme family
  Pfam annotation: Domain name=Pkinase; Domain location=242-514; Score =101.9; E_value=2.2e-27; Accession=PF00069.17; Description=Protein kinase domain
  Pfam annotation: Domain name=Pkinase_Tyr; Domain location=242-514; Score=73.9; E_value=5.9e-19; Accession=PF07714.9; Description =Protein tyrosine kinase
  Pfam module annotation: Pfam domain module=APH::Pkinase::Pkinase_Tyr; Domain location=243-427::242-514::242-514
LGSLCQIVLVGRATPGSSIQKELVKEAKLCAAMVVVLGANKKYSFGGSTSLAKYCAKKLPPTTTVVAIQNGKPVFVREAPKPPLGAEPKPVLRTVLHPSVGLEPKVIIPNPNRSARSMDFDAEGCGHAAAAAPATKSFDDATTASGGVTLEQRLGWPLLRREHAAAAAVAVPAPSAAKDHEPRKQSVVQWVMSLPRRTAPTESPGTHAGAGLASELKAMLDGGGARCRWFRYEELYDYTNHFSAENLIGNGGNSRVYRGSLACGQQVAIKLSKASAEASKDFLREVDIITKLQHHRIVPLIGVCVEGPNLISVYSYLPRGSLEDNLHGERSKPALSWENRYKAALGIAEALSYVHSGGSRPVIHRDVKSSNILLTEEFEPQLSDFGLAIWAPTNPTSLTHSDVVGTFGYLAPEYFMYGKVTDKVDVYAFGVVLLELLSGRKPISGDGSSPKGQESLVMWATPVLSSGDISDLLDPTLDVEHDEAEMRRMATAACLCIRRSARLRPPISQILSILRGESTASIADQGGAAELDCLDDEAYPAANVRSHLGLALLDVEDSESISSTEHSSGLSPLEEYLRERWSRSSSFD

SEQ ID NO: 77520 - protein, 460 aa, Setaria italica
  misc_feature (322)..(322): Xaa can be any naturally occurring amino acid
  Transcript Sequence Number=SeqID_11546
  Homolog annotation: Hit_ID=Q461D5; Match level="QueryCoverage=85%, HitCoverage=85%, E-value=1e-113, Identity=60%"; Hit description =Stress inducible protein coi6.1
TVACFLCTCKLPLLVRTKERLLWSLKLQKEREKAEKKKEKRSDKKALLHGETSKHSKHSHKKRKHEDVSTVGKETKKVSSESVEQLEKSGLSEELGAPCFIQTVRDSPESSQDSSKRRKVVLPSPSQAKNGNVVRIKIKSNQDSQAAVLEKPRVPEPPLVQQMRSSSLLSKQNSIQHHNKVNGRSAAAQQRINGDSQAVQKRSVTEPPAKVMQRVVQQPAVKITQPVDPQLSVKAAVGRSDLLPPKSSGIVDPLPARSVGRSDPQPVKMTQRVQHPPAKILQKDLQLPSEDIQRKSYAVSTKVAPKEFRSPAVGLPEAPQPXLLQKPKDLSVLKQQQVPVASLPKEEPCTSGRNAESAPVQEPKLSRSDRKKIRKAEKKEKKYRDLFVTWNPVSVEMGCSDLGEQDWLLGSTRNTDASMTCRASDCSVPFQSMEQQPSLQPRATLLPDLHIYQLPYVVPF

SEQ ID NO: 77521 - protein, 89 aa, Setaria italica
  Transcript Sequence Number=SeqID_11547
  Gene Ontology: Mol. function=lipid binding; Cellular component =cytoplasmic vesicle; Biological process=endocytosis
  Homolog annotation: Hit_ID=P92917; Match level="QueryCoverage=96%, HitCoverage=13%, E-value=7e-37, Identity=80%"; Hit description=Af10 -protein
  Pfam annotation: Domain name=ENTH; Domain location=25-86; Score=8.2; E_value=5.6e-06; Accession=PF01417.12; Description=ENTH domain
MDFMKVFDQTVREIKREVNLCKVVFPEIEQKALDATSDEPWGPHGSALSELAQATKKFAECQMVMNVLWSRLAERGANWRHVYKVIASS

SEQ ID NO: 77522 - protein, 92 aa, Setaria italica
  Transcript Sequence Number=SeqID_11548
NKISSIARWYCNYTDRQTAEGSHRIYTCCIATGRIIPTETGSEWGVVCLPTNAINIMPHKPDKYHARVTIQGKIGWHKMYSGEITKERTEGN

SEQ ID NO: 77523 - protein, 106 aa, Setaria italica
  Transcript Sequence Number=SeqID_11549
  Gene Ontology: Cellular component=integral to membrane
  Homolog annotation: Hit_ID=Q2F5V2; Match level="QueryCoverage=88%, HitCoverage=82%, E-value=1e-09, Identity=36%"; Hit description =Transmembrane protein
  Pfam annotation: Domain name=Tmemb_32; Domain location=7-97; Score =115.6; E_value=1.6e-31; Accession=PF10270.1; Description =Transmembrane protein precursor 32
MGIGYVVGVLGGAILAHAAYATIQYRTVLKITEEEFTRPPMDVMIELLLGLALCMWAGLAVPAKFCSVLPHSEENRIVSLPANLDFMIFNHRGRALPSDPDLKLKT

SEQ ID NO: 77524 - protein, 593 aa, Setaria italica
  Transcript Sequence Number=SeqID_11550
  Gene Ontology: Mol. function=lipid binding; Cellular component =cytoplasmic vesicle; Biological process=endocytosis
  Homolog annotation: Hit_ID=P92917; Match level="QueryCoverage=98%, HitCoverage=89%, E-value=0.0, Identity=70%"; Hit description=Af10 -protein
  Pfam annotation: Domain name=ENTH; Domain location=25-148; Score =229.4; E_value=9.1e-66; Accession=PF01417.12; Description=ENTH domain
MDFMKVFDQTVREIKREVNLKVLKVPEIEQKALDATSDEPWGPHGSALSELAQATKKFAECQMVMNVLWSRLAERGANWRHVYKALTIIEYLIANGSERAVDDILDHYSKISVLSSFEYVEPNGKDAGINVRKKVETIVGILNDKERIKAVRDKAASNRDKYVGLSSTGITYKSSSTAFGSNYSSGERYGSFSGTREGDSFGDSYRDKEPVKTSTSNTGSQKSGSKLRKDTKPDRRNEDYSSPSSLKPPSNTNNSEDDFDDFDPRGSNGKATAKSSEVDLFGPNLMDDFIDASPATDSAVEPQADLFADADFQTATASAETAANTDVQDNVDLFAEKTSFAAAFLPQTGFIPPPSSGISSEVNTSVSKKAAPEPFDPFGAIPLNSFDGSDPFGGFSSNAGSSTVPPPTHSSTGNVSTSSQNLQAASDFGTFVSNNEEAAKDPFDLSSTVNVGKTPLAAPKTDASDFGAFVSSTEESAKDPFDLSSSSNIGKTDQTPLAAPKPSAKKENFQVKSGIWADSLSRGLIDLNISAPKKVNLADIGIVGGLGDGSDEKAMPSWTMGTASGLGMSGIPSTQGGGIESLANYNKHQFGFK

SEQ ID NO: 77525 - protein, 67 aa, Setaria italica
  Transcript Sequence Number=SeqID_11551
  Gene Ontology: Cellular component=mitochondrion
MASGGKGLNATGEFFRRRDEWRRHPMVGNQLRHATPGLGIAIVAFGIYLVGEAAYNRLYRPSGDHHH

SEQ ID NO: 77526 - protein, 138 aa, Setaria italica
  Transcript Sequence Number=SeqID_11552
  Homolog annotation: Hit_ID=B9STM5; Match level="QueryCoverage=95%, HitCoverage=59%, E-value=2e-26, Identity=37%"; Hit description =Pentatricopeptide repeat-containing protein, putative
  Pfam annotation: Domain name=PPR; Domain location=20-54; Score=13.4; E_value=0.23; Accession=PF01535.12; Description=PPR repeat
  Pfam annotation: Domain name=PPR; Domain location=90-124; Score=16.6; E_value=0.098; Accession=PF01535.12; Description=PPR repeat
  Pfam module annotation: Pfam domain module=PPR::PPR; Domain location =20-54::90-124
ALADAERAFEALPERDRNAFAWAAVIGLWSRAGLHARALDGFAAMLGAGVPADNFVVPTVLKACAGLGLFRAGRAVHGYAWKAGIAECVYVMSSLVDFYGKCGQVEDARGVFDAMPERTVVSWNSMLMAYIHNSRIDE

SEQ ID NO: 77527 - protein, 110 aa, Setaria italica
  Transcript Sequence Number=SeqID_11553
  Gene Ontology: Mol. function=homoserine dehydrogenase activity; Biological process=branched chain family amino acid biosynthetic process
  Homolog annotation: Hit_ID=B6T9N8; Match level="QueryCoverage=90%, HitCoverage=26%, E-value=4e-47, Identity=92%"; Hit description =Homoserine dehydrogenase
GCGGVGRYLLRHIVSCRPLHANQGVAIRVVGVADSSSLLVADDVHSSGLDDALLTQLCAAKAAGSPLSALLGQGHCQLFQNPEARSKVIDAATTLGRTTGGFSKVGLQLP

SEQ ID NO: 77528 - protein, 157 aa, Setaria italica
  Transcript Sequence Number=SeqID_11554
  Gene Ontology: Mol. function=homoserine dehydrogenase activity; Biological process=branched chain family amino acid biosynthetic process
  Homolog annotation: Hit_ID=B6T9N8; Match level="QueryCoverage=74%, HitCoverage=30%, E-value=8e-43, Identity=75%"; Hit description =Homoserine dehydrogenase
MPAPVKSVLPVVLLGCGGVGRYLLRHIVSCRPLHANQGVAIRVVGVADSSSLLVADDVHSSGLDDALLTQLCAAKAAGSPLSALLGQGHCQLFQNPEARSKVIDAATTLGRTTGWFFCAQLHIHISSSSSTSSIFCSLPFMFQSVGTKKLYILLFYL

SEQ ID NO: 77529 - protein, 359 aa, Setaria italica
  Transcript Sequence Number=SeqID_11555
  Gene Ontology: Mol. function=homoserine dehydrogenase activity; Cellular component=chloroplast; Biological process=branched chain family amino acid biosynthetic process
  Homolog annotation: Hit_ID=B6T9N8; Match level="QueryCoverage=99%, HitCoverage=92%, E-value=1e-180, Identity=88%"; Hit description =Homoserine dehydrogenase
  Pfam annotation: Domain name=Homoserine_dh; Domain location=151-349; Score=205.4; E_value=1.5e-58; Accession=PF00742.11; Description =Homoserine dehydrogenase
LRCSCRPLHPNQGVAIRVVGVADSSSLLVADDVHSSGLDDALLTQLCAAKAAGSPLSALLGQGHCQLFQNPEARSKVIDAATMLGRTTGLVLVDCSATYDTVSLLKDAVDHGCCIVLANKKPLTGAYEDFQKLVSNFRQIRFESTVGAGLPVIASATRIIASGDPVSCIVGSLSGTLGYVMSELEDGKKFSEVVKKAKSLGYTEPDPRDDLGGMDVARKALILARLLGQQISMDNINVESLYPSELGPDAVSTEDFLESGLVQLDKSMEERVKAASSRGNVLRYVCEIGSTGCQVGLKEVPKDSALGRLRGSDNVVEIYSRCYESSPLVIQGAGAGNDTTAAGVLADIIDLQDLFRKTA

SEQ ID NO: 77530 - protein, 104 aa, Setaria italica
  misc_feature (75)..(75): Xaa can be any naturally occurring amino acid
  Transcript Sequence Number=SeqID_11556
  Gene Ontology: Cellular component=plasma membrane
  Homolog annotation: Hit_ID=P93561; Match level="QueryCoverage=74%, HitCoverage=16%, E-value=6e-26, Identity=76%"; Hit description=Amino acid transporter
MVMEKHEQAAGKVSAFNLAEAGYGDRPDLDDDGRERRTGTLVTASAHIITAVIGSGVLSLAWAIAQLGWVIGPVXLVAFSVITWFCSSLLADCYRATPTPSTAS

SEQ ID NO: 77531 - protein, 126 aa, Setaria italica
  Transcript Sequence Number=SeqID_11557
GIDSDLEDEAAKVQPSSETSPVVVNDGSAEEPSPARTDSVIEDSLEKEQAAEEQAAASEAVEDAGAKKLKEVENGAAAPELAPESSNEYNGADETKGATEVADHEEEAGDSDIIEAEAVADVEDGV

SEQ ID NO: 77532 - protein, 221 aa, Setaria italica
  Transcript Sequence Number=SeqID_11558
  Gene Ontology: Mol. function=binding; Cellular component=nucleus; Biological process=mitotic chromosome condensation
  Homolog annotation: Hit_ID=B9ST43; Match level="QueryCoverage=100%, HitCoverage=16%, E-value=1e-50, Identity=48%"; Hit description =Condensin, putative
MEALVDKLCNRFAGVNDVRQWEYISYCLSQLTFTEKGLKKLIDNFKMFEYALSEDSVMNHFRSVISKCKKFAKPELKVCIEEFEEKLSKVHQEKKEQEETTKNAEAHRQRIGSLDEVLASKEVGQSCGHSVEEETSEIVDPSVDGSTEDKENMPECSGNISTENCQTSTSTGSEDGGEEIQSKQPVRKGLSRSRAKKTRDPVVEDSADSAPVRRSTKRQGR

SEQ ID NO: 77533 - protein, 112 aa, Setaria italica
  Transcript Sequence Number=SeqID_11559
  Gene Ontology: Mol. function=peptidyl-prolyl cis-trans isomerase activity; Cellular component=cytoplasm; Biological process=protein folding
  Homolog annotation: Hit_ID=Q5XLE1; Match level="QueryCoverage=100%, HitCoverage=100%, E-value=2e-55, Identity=92%"; Hit description =Peptidyl-prolyl isomerase FKBP12
  Pfam annotation: Domain name=FKBP_C; Domain location=11-109; Score =129.0; E_value=1.6e-35; Accession=PF00254.20; Description=FKBP-type peptidyl-prolyl cis-trans isomer
MGFEKEILRDGTGPKPTKGQKVTVHCTGYGKDRDLSKKFWSTKDPGQQPFSFNIGLGSVIKGWDEGVMTMQVGEVARIQCTPDYAYGANGFSAWGIQPNSVLVFEIEVISAQ

SEQ ID NO: 77534 - protein, 185 aa, Setaria italica
  misc_feature (70)..(70): Xaa can be any naturally occurring amino acid
  Transcript Sequence Number=SeqID_11560
  Gene Ontology: Mol. function=binding
EGLCADGSCELSDFSREIKKAFDANPGDTLIDNIHTLFEFFRLKPTTDFGMLKATSAVLQVCDNNSEKSXSYICGLPVGVSFNISLWNISSHHRLWLRMSIGESVQHTFLDICSVEGNEEVKTCSMVVPLDSTPMAHSFVLRVCLLMECSYGSISTNQGGHGGPSDCVVQLSDELDVYFVRIGQR

SEQ ID NO: 77535 - protein, 57 aa, Setaria italica
  Transcript Sequence Number=SeqID_11561
  Homolog annotation: Hit_ID=B6SXU9; Match level="QueryCoverage=85%, HitCoverage=16%, E-value=2e-12, Identity=71%"; Hit description=Beta -carotene hydroxylase
LLLLCGCLQIHHMDKFQGVPYGLFLGPKELKEVGGTEELEKEIKKRIKRKGTLDAIQ

SEQ ID NO: 77536 - protein, 315 aa, Setaria italica
  misc_feature (110)..(110): Xaa can be any naturally occurring amino acid
  Transcript Sequence Number=SeqID_11562
  Gene Ontology: Biological process=protein localization
  Homolog annotation: Hit_ID=B9RUS0; Match level="QueryCoverage=99%, HitCoverage=7%, E-value=2e-74, Identity=49%"; Hit description =Vacuolar protein sorting-associated protein, putative
SNKFSVSVNLVELSLHSGSTRDSPLASVQASGAWLLYKSNTREESFLYATLKGFSVFDGREGTKDELRLAIGKSATVRDTSSVDGYDNHNELDSGEQRIQKDLGLEPIPXLLILDAIFRKSSSSLYLCVQRPKFLVALDFLLAIVEFFVPSARSLLSNDEDKDLLHMISPVILNDQIYYQEGSTFSLSPQKPLIVDSERFDHFIYDGKGGKLYLLDREGKLLSRPSSESFIHVLGCKRLQFRNVTIVNGEYLDSCVSLGDDCCYSASENDCVYFIREDDGLLSAPSKEIAEDTVKNASVDISTEFILELQAIGPV

SEQ ID NO: 77537 - protein, 198 aa, Setaria italica
  misc_feature (7)..(7): Xaa can be any naturally occurring amino acid
  misc_feature (20)..(20): Xaa can be any naturally occurring amino acid
  misc_feature (25)..(25): Xaa can be any naturally occurring amino acid
  Transcript Sequence Number=SeqID_11563
  Gene Ontology: Mol. function=transferase activity; Biological process= response to stress
  Homolog annotation: Hit_ID=Q9FQA3; Match level="QueryCoverage=98%, HitCoverage=87%, E-value=6e-48, Identity=48%"; Hit description =Glutathione S-transferase
  Pfam annotation: Domain name=GST_C; Domain location=71-169; Score =33.5; E_value=8.5e-07; Accession=PF00043.17; Description=Glutathione S-transferase, C-terminal domain
VEYDYIXEDLSNKSDQLLEXNPVHXKVPVLVYQGKPIAESEVIIQFIDEAWKDRGDPILPEDPYERAMARFWVRFLQDKLSPPIWKWFTTQGQQQEDAHGAAIDQLLVLEKELDGKRFFAGEKIGFVDLSLGPLSYVIPIYEEITGVKMITEEKLPSLSAWMGNFLSSPVVKDHLPPLDKLRLRLQAIREAFLNGKVK

SEQ ID NO: 77538 - protein, 29 aa, Setaria italica
  Transcript Sequence Number=SeqID_11564
FQVLNMLLQSRYYHGFPVPLIYLMRSYEQ

SEQ ID NO: 77539 - protein, 746 aa, Setaria italica
  misc_feature (282)..(282): Xaa can be any naturally occurring amino acid
  misc_feature (427)..(427): Xaa can be any naturally occurring amino acid
  Transcript Sequence Number=SeqID_11565
  Gene Ontology: Mol. function=nucleoside-triphosphatase activity; Cellular component=membrane; Biological process=transport
  Homolog annotation: Hit_ID=Q0JLC5; Match level="QueryCoverage=100%, HitCoverage=68%, E-value=0.0, Identity=67%"; Hit description =Pleiotropic drug resistance protein 3
  Pfam annotation: Domain name=ABC2_membrane; Domain location=94-307; Score=199.2; E_value=1.1e-56; Accession=PF01061.16; Description=ABC -2 type transporter
  Pfam annotation: Domain name=ABC_tran; Domain location=477-667; Score= 103.3; E_value=8.4e-28; Accession=PF00005.19; Description=ABC transporter
  Pfam annotation: Domain name=PDR_assoc; Domain location=312-378; Score=155.6; E_value=1.5e-43; Accession=PF08370.3; Description=Plant PDR ABC transporter associated
  Pfam module annotation: Pfam domain module=ABC2_membrane::ABC _tran::PDR_assoc; Domain location=94-307::477-667::312-378
EEVLEFFESLGFRCPERKGVADFLQEVTSKKDQKQYWARRDEPYRFVPVKEFATAFKSFHAGRAIANELAVPFDKSKSHPAALTTTRYGVSGKELLKANIDREILLMKRNSFVYMFRTFQLMLMSIIAMTLFFRTKMKHDTVTDGGLYMGALFFGVLMIMFNGFSELALTVFKLPVFFKQRDLLFFPAWSYTIPSWILKIPITFIEVGGYVFLTYYVIGFDPNVGRFFKQYLLLLAVNQMAAALFRFIGGAARNMIVANVFASFMLLVVMVLGGFILVREKXKKWWIWGYWISPMMYAQNAISVNEMLGHSWDKILNATASNETLGVQVLKSRGVFTEAKWYWIGFGAMVGFTILFNALFTLALTYLKPYGNSRPSVSEEELNEKHANMKGEVLDGNHLVSARSHRSTRANTETDSAIGEDDSSPAXRGMILPFVPLSLTFDNIRYSVDMPQEMKAQGVQEDRLELLKGVSGSFRPGVLTALMGVSGAGKTTLMDVLAGRKTGGYIEGDISISGYPKKQETFARISGYCEQNDIHSPQVTVYESLLFSAWLRLPKDVDSNTRKIFIQEVMELVELKPLRDSLVGLPGVNGLSTEQRKRLTIAVELVANPSIIFMDEPTSGLDARAAAIVMRTVRNTVDTGRTVVCTIHQPSIDIFEAFDELFLMKRGGEEIYAGPLGHHSSELIKYFEGIQGVSKIKDGYNPATWMLEVTTVSQEQILGVDFSEIYKNSELYQRNKALIKELSQPA

SEQ ID NO: 77540 - protein, 72 aa, Setaria italica
  misc_feature (72)..(72): Xaa can be any naturally occurring amino acid
  Transcript Sequence Number=SeqID_11566
  Gene Ontology: Mol. function=nucleic acid binding; Cellular component= nucleus; Biological process=mRNA processing
  Homolog annotation: Hit_ID=B9RZ56; Match level="QueryCoverage=91%, HitCoverage=11%, E-value=4e-25, Identity=81%"; Hit description =Splicing factor 3B subunit, putative
  Pfam annotation: Domain name=DUF382; Domain location=5-72; Score =36.6; E_value=6.4e-11; Accession=PF04037.5; Description=Domain of unknown function (DUF382)
SNRYATRPDVVEVWDATAADPKLLVYLKALRYTVPVPRHWSQKRKFLQGKRGIEKQPFQLPDFHCCNWNEKX

SEQ ID NO: 77541 - protein, 73 aa, Setaria italica
  Transcript Sequence Number=SeqID_11567
  Subcellular localization annotation: CTP_CleavageSite=43; ConfidenceScore=5.59e-01
DHATVNDSKVQHSRGEVHQPTQSIRSKRRTSVTWWQRMLTRGRGSKRRKASRRRRNSSFRLICVHLANQSHLT

SEQ ID NO: 77542 - protein, 583 aa, Setaria italica
  Transcript Sequence Number=SeqID_11568
  Gene Ontology: Mol. function=nucleic acid binding; Cellular component= nucleus; Biological process=mRNA processing
  Homolog annotation: Hit_ID=B9RZ56; Match level="QueryCoverage=86%, HitCoverage=83%, E-value=1e-180, Identity=65%"; Hit description =Splicing factor 3B subunit, putative
  Pfam annotation: Domain name=DUF382; Domain location=170-298; Score =328.8; E_value=1.1e-95; Accession=PF04037.5; Description=Domain of unknown function (DUF382)
  Pfam annotation: Domain name=PSP; Domain location=306-353; Score =91.0; E_value=4.2e-24; Accession=PF04046.8; Description=PSP
  Pfam module annotation: Pfam domain module=DUF382::PSP; Domain location=170-298::306-353
MAAAEVNPTPNPAPTSDPTDGNKAKSRETDRRRRRRKAKKNKAAAKDADADAKDTDEGASAKENDDPNSNPQVEVEVEYVPEKAELDDPLLDDFKAIFEKFTFKDAAAAAAEDDKGDEGAADAANKSSLDDDDDDDDDDQEAQKKKEGGLSNKKKKLERRMKIAELKQICNRPDVVEVWDATAADPKLLVYLKAYRNTVPVPRHWSQKRKFLQGKRGIEKQPFQLPDFIAATGIEKIRQAYIEKEDSKKLKQKQRERMQPKMGKMDIDYQVLHDAFFKYQTKPKLTSHGDLYYEGKEFEVKLREMKPGMLSRELKDALGMPDGAPPPWLINMQRYGPPPSYPQLKIPGLNAPIPLGASFGYRPGEWGKPPVDENGRPLYGDVFGVLQQDEPNYDDEPVDRSKHWGDLEEEEEEEEEEEEEEEEPMEDEEMEDGTESVDTISSTPTGVETPDVIDLRKLQRKEPEKQAERPLYQVLEQKEERIAPGTLYGSSHTYVLGTQDKSSAPKRVDLLKNQKSDKVDVTIQPEELEVMDDVLAAKYEEAREEEKLRNQKEDFSDMVAENAHKRKRKQEKEGKSKKKEFKF

SEQ ID NO: 77543 - protein, 496 aa, Setaria italica
  misc_feature (16)..(16): Xaa can be any naturally occurring amino acid
  misc_feature (138)..(138): Xaa can be any naturally occurring amino acid
  misc_feature (454)..(454): Xaa can be any naturally occurring amino acid
  Transcript Sequence Number=SeqID_11569
  Gene Ontology: Mol. function=nucleotide binding; Biological process =defense response
  Homolog annotation: Hit_ID=Q01JX4; Match level="QueryCoverage=98%, HitCoverage=36%, E-value=1e-133, Identity=50%"; Hit description =B0809H07.6 protein
  Pfam annotation: Domain name=NB-ARC; Domain location=1-284; Score =132.6; E_value=1.2e-36; Accession=PF00931.14; Description=NB-ARC domain
ESNVITVLPIVGIVGXGKTALAQLVYNDPTVISQFERIWIWVSDMFDKVRLTNEMLDVVALESHNRPPRNKESHEGQMSNYSKLQEILKEHMGHRSHRFFLVLDDVTDCMDSYQWNELLSPLKSSQKKGNVIVITTRXLSVARRLGTVEPIKLVALKNDAFWLLFKACAFGDDNYGRHPSLNIIGRQIAAKLKGNPLAAQTAGEVFKKHLTIDHWSTILNSEDQKSMLLNTGIMHALKLSYDKLPYHLQQCFLYCSIFPDNYKFLAEDLVRTWISQGFLRCKNSKKTPEETGRDYLHDLVDLCFFEEVEKEESSPTQGAEESTPPTGTCYVMCGIMYEFARVVSGSHFATICGLERNEILPTIRHVSIHSILNHKEFEEKLQTIVPLVRNLRTLILIGRCESFFFQSFQDIFQKACHLRLLQISATQANFYTSVLNLVNPTHLRYLKFGNNGMXISLSKFYHLQVLDAGHPTIVHGMNDLISMRYLFVTKGARFFY

SEQ ID NO: 77544 - protein, 220 aa, Setaria italica
  Transcript Sequence Number=SeqID_11570
  Gene Ontology: Mol. function=nucleotide binding; Biological process =defense response
  Homolog annotation: Hit_ID=Q01JX4; Match level="QueryCoverage=95%, HitCoverage=17%, E-value=1e-38, Identity=44%"; Hit description =B0809H07.6 protein
LIIVGFRVGNEILPTIRHVSIHSILNHKEFEEKLQTIVPLVRNLRTLILIGRCESFFFQSFQDIFQKACHLRLLQISATQANFYTSVLNLVNPTHLRYLKFGNNGSAISLSKFYHLQVLDAGHPTIVHGMNDLISMRYLFVTKGARSFIPRVGETSNSQDMQNSTDQNSSRFEITQLRSMNKLVQLGVFHLVNVSRSEADGAKLRDKQQLEKLILSWKDT

SEQ ID NO: 77545 - protein, 123 aa, Setaria italica
  misc_feature (112)..(112): Xaa can be any naturally occurring amino acid
  Transcript Sequence Number=SeqID_11571
  Gene Ontology: Mol. function=protein binding; Cellular component =membrane coat; Biological process=intracellular protein transport
  Homolog annotation: Hit_ID=B9S1S1; Match level="QueryCoverage=100%, HitCoverage=12%, E-value=1e-49, Identity=74%"; Hit description=AP-1 complex subunit gamma-2, putative
ASRCVELAEQFAPSNQWFIQTMNKVFEHAGDLVNIRVAHNLMRLIAEGFGEEDEGADSQLRSSAVDSYLRIVGEPKLPSSFLQIICWVLGEYGTADGKYSASYIIGKLCDVXEAHLTDDTVKA

SEQ ID NO: 77546 - protein, 486 aa, Setaria italica
  Transcript Sequence Number=SeqID_11572
  Gene Ontology: Mol. function=protein binding; Cellular component =membrane coat; Biological process=intracellular protein transport
  Homolog annotation: Hit_ID=B9S1S1; Match level="QueryCoverage=96%, HitCoverage=47%, E-value=0.0, Identity=75%"; Hit description=AP-1 complex subunit gamma-2, putative
  Pfam annotation: Domain name=Adaptin_N; Domain location=2-364; Score=- 180.0; E_value=0.05; Accession=PF01602.12; Description=Adaptin N terminal region
VSFVNILKQVAERRLPTSYDYHQMPAPFIQIKLLKILAVLGSGDKQASGHMYTVLGDIFRKGDTASNIGNAILYECICCISSIFPNPKMLEAAAETTSKFLKSDSHNLKYMGIDALGRLIKINPDIAEEHQLAVIDCLEDPDDTLKRKTFELLYKMTKSTNVEVIVDRMIEYMINITDHHYKTEIASRCVELAEQFAPSNQWFIQTMNKVFEHAGDLVNIRVAHNLMRLIAEGFGEEDEGADSQLRSSAVDSYLRIVGEPKLPSSFLQIICWVLGEYGTADGKYSASYIIGKLCDVAEAHLTDDTVKAYAISAILKIFAFEVTLGRKIDMLPECQTLVDELSASHSTDLQQRAYELQALLGLDKHAVESVMPADASCEDIEVDRNLSFLNSYVQQALENGAAPYIPESERSGAISVGSYRSQEQQETSAHTLRFEAYEMPKPSMALATSQASMSAPPTDLVPVPEPGYQKAGTLMFGGLPYSNLVL

SEQ ID NO: 77547 - protein, 379 aa, Setaria italica
  Transcript Sequence Number=SeqID_11573
  Gene Ontology: Mol. function=protein binding; Cellular component =membrane coat; Biological process=intracellular protein transport
  Homolog annotation: Hit_ID=B9S1S1; Match level="QueryCoverage=97%, HitCoverage=38%, E-value=7e-56, Identity=37%"; Hit description=AP-1 complex subunit gamma-2, putative
KTRIRKRQQRLCVIADASCEDIEVDRNLSFLNSYVQQALENGAAPYIPESERSGAISVGSYRSQEQQETSAHTLRFEAYEMPKPSMALATSQASMSAPPTDLVPVPEPGYYKEDHQTSRSQPSGDAISGEFGVKLRLDGVQKKWGRPTYSSSTPSSSASSQQATNGASHSDGGGATSSQARESTYGSKRQQGTEISAEKQRLAASLFGSAAAKADRKAQASRKTAKESASTEKASASSAASQPIKEQVIPAVPPPDLLDLGDEPVSSSPPIADPFSQLEGLLGPASATPVVSGTPAASTSNAPDLMSIFSDDVPTGATSGSADPAVGDANLMSSHKGATAAAAKKGPSLQDALQKDATARQVGVTPTGNNPNLFKDLLG

SEQ ID NO: 77548 - protein, 84 aa, Setaria italica
  Transcript Sequence Number=SeqID_11574
RSWALLHARLEVVIGPRLLHGLRRRSAEQSTCRNAWSSCHRRRLNKCTSDLHQHLPKNAHVSSHNNSCIIVVVSGVAKTEAPVH

SEQ ID NO: 77549 - protein, 263 aa, Setaria italica
  misc_feature (1)..(1): Xaa can be any naturally occurring amino acid
  Transcript Sequence Number=SeqID_11575
  Gene Ontology: Mol. function=protein serine/threonine kinase activity
  Homolog annotation: Hit_ID=Q84XZ4; Match level="QueryCoverage=88%, HitCoverage=31%, E-value=2e-26, Identity=45%"; Hit description =Mitogen-activated protein kinase
XDPSEIAAMIEQEINRLLPGREQQHEYSVSTANGDDDDDENEERPPPFYYLSSSPTSSQGSHCGVGPHAGGWSKDHWYTCLSDDDDTSSMHSGKYSALHYDASGHEEDEAQLPPQDGHVVGPSSCSKASGQQVKNTRFGPGESSSSRSPGRADTAQQQSLARQLQRQCSLSPHAGRPRRRDDDHRHHGRNNRMTRNRSMVDMRSQLLHRTLVEELNRRLFFNTVGAVEDIGFRAPAATTTSSSSSTRGRRSKDDKHHHQYVML

SEQ ID NO: 77550 - protein, 98 aa, Setaria italica
  Transcript Sequence Number=SeqID_11576
GGALTRWSTFGLHTSSLPHPREVREVCRGGRRAEPSLADLPRPLAGRCKDDDSCSWWTEQGMARLVHMQSSIYTVLLRFMGYSNLTLQRQSDRPTSST

SEQ ID NO: 77551 - protein, 162 aa, Setaria italica
  misc_feature (17)..(17): Xaa can be any naturally occurring amino acid
  Transcript Sequence Number=SeqID_11577
  Homolog annotation: Hit_ID=Q7XIH1; Match level="QueryCoverage=79%, HitCoverage=100%, E-value=4e-58, Identity=82%"; Hit description=Salt- inducible protein-like
  Pfam annotation: Domain name=PPR; Domain location=59-93; Score=14.6; E_value=0.17; Accession=PF01535.12; Description=PPR repeat
  Pfam annotation: Domain name=PPR; Domain location=94-128; Score=12.8; E_value=0.28; Accession=PF01535.12; Description=PPR repeat
  Pfam module annotation: Pfam domain module=PPR::PPR; Domain location =59-93::94-128
GSQPEMVLQLMEFMKQXQIPLNQKAYFEIIASCSMLREWKTASEIIEHLDSSLSSISVGTLNHLLNFLGKCGKTESMMKLFYKMVTSRSTVGLSTYTVLLRNLLVVGKWRKYIEVLHWMEDAGVHPTLYMYQSVLPYIWRDNSMDYVTLMQEKINALREKVT

SEQ ID NO: 77552 - protein, 143 aa, Setaria italica
  Transcript Sequence Number=SeqID_11578
  Gene Ontology: Biological process=cell wall catabolic process
  Homolog annotation: Hit_ID=Q10SU7; Match level="QueryCoverage=72%, HitCoverage=31%, E-value=1e-32, Identity=67%"; Hit description=LysM domain containing protein, expressed
  Pfam annotation: Domain name=LysM; Domain location=54-97; Score=23.5; E_value=0.00087; Accession=PF01476.12; Description=LysM domain
MGVKQVLVRPCGYRRRYDDDDRGSSTGSGAREEVVLDQSPSPPPMSSCGRYVLHRVCRFDTLAGVAIKYGVEVADVKRANGLTTDLQMFAHKTLRVPLHGRHPPAAATTSPPSSSPSHADRSREWTTRRPPKNGASWDPFLKP

SEQ ID NO: 77553 - protein, 107 aa, Setaria italica
  Transcript Sequence Number=SeqID_11579
VWTNVRFGDMRRALAACERLILLQHDPHELRDYAALLYHCGYYEECLHYLSSYQTAMVGQSPSNRLEILEDEAVNTLRARITLILAEDGWSSCRPAASYWTKNSEPW

SEQ ID NO: 77554 - protein, 352 aa, Setaria italica
  Transcript Sequence Number=SeqID_11580
ATAHAREAREGFAEQVGRLTRLNAGTSIAISRGADLARAALCVAAEDDSLVSHSSVPLPVDAFIARLDDLSTGFCAGGNFPPSHAPPEVFFDYLDRYLYVHKGFRRTNGISDVRAMYLHSVLTCRSGSALMLALIYSEILKTVRIYGLLDFDAEIFFPTDLDSLPRGYDKQKSKLGHQQHIMTSKSLLVEILRTLKATFWPFQSNQSSSLFLNAVTANHHGPGALNISAVEMAAAKAAQHRLMRGVWTNVRFGDMRRALAACERLILLQHDPHELRDYAALLYHCGYYEECLHYLSSYQTAMVGQSPSNRLEILEDEAVNTLRARITLILAEDGWSSCRPAASYWTKNSEPW

SEQ ID NO: 77555 - protein, 97 aa, Setaria italica
  Transcript Sequence Number=SeqID_11581
  Gene Ontology: Mol. function=transferase activity, transferring groups other than amino-acyl groups; Biological process=flavonoid biosynthetic process
  Homolog annotation: Hit_ID=B6SXY1; Match level="QueryCoverage=64%, HitCoverage=14%, E-value=4e-27, Identity=88%"; Hit description =Anthranilate N-benzoyltransferase protein 1
GGRGRGNPKHHLGWLRRGRWKEGEGVRGLWEEVEWVCLPIHDANFGWGRPVFMGPGGIAYEGLAFVLPSANGDGSLSIAISLQAEHMVKFRKLIYEL

SEQ ID NO: 77556 - protein, 81 aa, Setaria italica
  misc_feature (10)..(10): Xaa can be any naturally occurring amino acid
  Transcript Sequence Number=SeqID_11582
  Gene Ontology: Mol. function=transferase activity, transferring groups other than amino-acyl groups
  Homolog annotation: Hit_ID=B6SXY1; Match level="QueryCoverage=70%, HitCoverage=12%, E-value=6e-19, Identity=78%"; Hit description =Anthranilate N-benzoyltransferase protein 1
EIDCNGEGVXFVEADAPNAAIDDYGDFAPTMELKRLIPAVDYTDDISAFPLLVLQVSSVTSIQYPHLEVAYHSAIQALHGI

SEQ ID NO: 77557 - protein, 439 aa, Setaria italica
  Transcript Sequence Number=SeqID_11583
  Gene Ontology: Mol. function=transferase activity, transferring groups other than amino-acyl groups; Biological process=flavonoid biosynthetic process
  Homolog annotation: Hit_ID=B6SXY1; Match level="QueryCoverage=100%, HitCoverage=100%, E-value=0.0, Identity=81%"; Hit description =Anthranilate N-benzoyltransferase protein 1
  Pfam annotation: Domain name=Transferase; Domain location=1-439; Score=409.0; E_value=8e-120; Accession=PF02458.7; Description =Transferase family
MAITVRRSTMVRPARETPRQRLWNSNLDLVVPRFHTPSVYFYRRGGGPEAEGFFDGERMRRALAEALVPFYPMAGRLARDEDGRVEIDCNGEGVLFVEADAPNAAIDDYGDFAPTMELKRLIPAVDYTDDISAFPLLVLQVTYFKCGGVSLGVGMQHHVADGMSGLHFINSWSDLCRGAQISVMPFIDRTLLRARDPPTPSFQHIEYQPAPAMLSSTPQSLTSISKPPATAVDIFKLTRSDLGRLRSQLPTGEGAPRFNTYAVLAAHVWKCVSLARGLTPEQPTKLYCATDGRQRLQPPLPDGYFGNVIFTATPLAEAGKVTSGLAEGAAVIQGALDRMDNDYCRSALDYLELQPDLSALVRGAHTFRCPNLGLTSWVRLPIHDANFGWGRPVFMGPGGIAYEGLAFVLPSANGDGSLSIAISLQAEHMVKFRKLIYEL

SEQ ID NO: 77558 - protein, 299 aa, Setaria italica
  misc_feature (283)..(283): Xaa can be any naturally occurring amino acid
  misc_feature (291)..(291): Xaa can be any naturally occurring amino acid
  Transcript Sequence Number=SeqID_11584
  Gene Ontology: Mol. function=protein tyrosine kinase activity; Cellular component=integral to membrane; Biological process=protein amino acid phosphorylation
  Homolog annotation: Hit_ID=B6SVW1; Match level="QueryCoverage=88%, HitCoverage=51%, E-value=3e-88, Identity=66%"; Hit description=ATP binding protein
MERRRSPRLLLQVFFLLAASSPLGSAGIGGLGVGPESNGASVSPRNSRRLLQIGDGNEDSLFHLPHARTFSHKSRSRKRAPTPAAAPTSAPSPSPFISPPESSPSTSPHASGSMPRQSPSHHHPTAAPPHLDRSRPTTKPDEHDRSVETPVHSSHKHSWTTYGLVAAGIAVFILVSAASVLCFRAKKMGTVRPWATGLSGQLQKAFVTGVPSLQRSELETACDDFSNIIGSTSSCMLYKGTLSSGVEIAVASSLVTSAKDWSKENESQYRKKIKSLSKVSHKXFMNLLGYXCEEEHPFT

SEQ ID NO: 77559 - protein, 250 aa, Setaria italica
  Transcript Sequence Number=SeqID_11585
HGFLRLPSHRLRHHRPCRHGPFFHRHHLWWALHHGALGDAPMRRFHHHRHGEALSHLAALPLPAEEAREAAGEEVKAVAEPDPDRSLPGGDGEPAFGDADGAHEAETDHEDESAAVTALKKEMLRRWFHHRHGMRLHHRHHDEPEEEAAAEGLKRFHHHLHKEEEEKDMTRKRFRHAEHDDSDSDDEDEEVEEMVRRFRKAIMRRRFGHGRRFHHHHHGYGYRHAEETEKADAQDEGGVVAWIKGLINRF

SEQ ID NO: 77560 - protein, 101 aa, Setaria italica
  misc_feature (13)..(13): Xaa can be any naturally occurring amino acid
  Transcript Sequence Number=SeqID_11586
  Homolog annotation: Hit_ID=B9S3L3; Match level="QueryCoverage=52%, HitCoverage=9%, E-value=4e-10, Identity=60%"; Hit description =Cytosolic purine 5-nucleotidase, putative
HRQILSEPPEISXIKKSQVFRFLKMLREKGKKLFLLTNSPFYFVDGGMRYLLEVLPKFKSALMLCPCCLAFKSMILSQNISIQSMNNIYIFYVIFFLLSEI

SEQ ID NO: 77561 - protein, 349 aa, Setaria italica
  misc_feature (195)..(195): Xaa can be any naturally occurring amino acid
  misc_feature (211)..(211): Xaa can be any naturally occurring amino acid
  Transcript Sequence Number=SeqID_11587
  Gene Ontology: Mol. function=magnesium ion binding; Cellular component=cytosol
  Homolog annotation: Hit_ID=B9S3L3; Match level="QueryCoverage=100%, HitCoverage=64%, E-value=1e-163, Identity=75%"; Hit description =Cytosolic purine 5-nucleotidase, putative
  Pfam annotation: Domain name=5_nucleotid; Domain location=87-349; Score=297.1; E_value=3.9e-86; Accession=PF05761.6; Description=5' nucleotidase family
IKDMPKMNPQGIYVNKNVKLDDLQVYGFDYDYTLSHYSEHLQCLIYDLAKKHLVNELKYPESCLRYEYDRSFPIRGLYYDRLKGCLLKLDFFGSIEPEGCFFGRRKLSLSEIKELYGTRHIGRDQARQLVGLMDVFCFSEACLIADIVQHFIDAKLEFDASYVYEDVNQSIQHVHRSGLIHRQILSEPQKFLIKXSQVFRFLKMLREKGKXLFLLTNSPFYFVDGGMRYLLEDQHFDGNSWRELFDVVIAQANKPTFYNSDHPFRVYDTQKDTLAFTAVDKFLPDQVYYHGCLKSFLQITKWRGPEVIYFGDHLLSDLRGPSKAGWRTAAVIRELEDEIEIQNSENYRF

SEQ ID NO: 77562 - protein, 56 aa, Setaria italica
  Transcript Sequence Number=SeqID_11588
  Gene Ontology: Mol. function=protein binding; Cellular component =clathrin adaptor complex; Biological process=intracellular protein transport
  Homolog annotation: Hit_ID=B6TBI2; Match level="QueryCoverage=100%, HitCoverage=13%, E-value=6e-24, Identity=91%"; Hit description=AP-3 complex subunit mu-2
GLAQLHTLPTFQVKFKIMGVALSGLQIDKLDVKNTPSAPYKGFRAQSQAGKYEVRS

SEQ ID NO: 77563 - protein, 112 aa, Setaria italica
  Transcript Sequence Number=SeqID_11589
RLERHDTASRRPSLPPPPNPPQKSPYHFLGSFFPIHRRPAPADEEEQGRKEGFFLWAKGGGFGTFPAPSRLRWPAAPAFSEALCGGVLTERRCRRRWWNGRRATCSSVRTGP

SEQ ID NO: 77564 - protein, 69 aa, Setaria italica
  Transcript Sequence Number=SeqID_11590
SDGEFTHIIIQQLNNSRQYQGTHNVASLLDISSIYILTFLISSHLLTNHLRSTFHLSGVMKPTPHRQAL

SEQ ID NO: 77565 - protein, 219 aa, Setaria italica
  Transcript Sequence Number=SeqID_11591
  Gene Ontology: Mol. function=metal ion binding; Cellular component =nucleus; Biological process=regulation of transcription, DNA -dependent
  Homolog annotation: Hit_ID=Q2R3Y1; Match level="QueryCoverage=100%, HitCoverage=67%, E-value=5e-53, Identity=50%"; Hit description =Putative squamosa promoter-binding-like protein 19
  Pfam annotation: Domain name=SBP; Domain location=1-62; Score=118.2; E_value=2.6e-32; Accession=PF03110.6; Description=SBP domain
HRRHRVCEAHSKTPVVVVGGQEQRFCQQCSRFHMLSEFDEGKKSCRKRLDGHNRRRRKPQHDLTNLGGFIPYHQVNQFEIYPQTTPTVRENSDTMHLVHRQPPFSISFSRTPKQLPFPQDGGGMLSASHHGHFLVEDSNHTGSSACNNTLGPKCALSPLSSSLHHPSPAGQAQVASALSRIASASQQVATAAVTAAFASGGSHHVFVPDAVLEDPSQAL

SEQ ID NO: 77566 - protein, 261 aa, Setaria italica
  misc_feature (68)..(68): Xaa can be any naturally occurring amino acid
  misc_feature (82)..(82): Xaa can be any naturally occurring amino acid
  Transcript Sequence Number=SeqID_11592
  Gene Ontology: Mol. function=transcription factor activity; Cellular component=nucleus; Biological process=regulation of transcription
  Homolog annotation: Hit_ID=B9RGK2; Match level="QueryCoverage=88%, HitCoverage=25%, E-value=1e-30, Identity=36%"; Hit description=Gc -rich sequence DNA-binding factor, putative
  Pfam annotation: Domain name=GCFC; Domain location=98-261; Score= -230.2; E_value=0.00066; Accession=PF07842.4; Description=GC-rich sequence DNA-binding factor-li
GALSDGIREVEDNMDDDDDEEERRWEEEQFRKGLGRRVDDASAQRTANGAPASAQVQPQAFGYSVVPXHQPSLSGAVPAASXFASGSVEFLSIAQQADVANKALQENIRKLRETHKTTVSALVKTETHLNEALSEISSLDSGLKDAVSKFVYMQELRHYISVMCDFLNDKAFYIEELEEHMQKLHENRALAISERRAADLADESGVIEAAVDAAVSILSKGSSSAYLSAASNAAQAAAAAARESSNLPPELDEFGSSIILT

SEQ ID NO: 77567 - protein, 108 aa, Setaria italica
  Transcript Sequence Number=SeqID_11593
  Gene Ontology: Mol. function=carboxypeptidase activity; Biological process=proteolysis
  Homolog annotation: Hit_ID=B6SP44; Match level="QueryCoverage=47%, HitCoverage=7%, E-value=3e-10, Identity=72%"; Hit description =Glutamate carboxypeptidase 2
  Subcellular localization annotation: CTP_CleavageSite=34; ConfidenceScore=5.24e-01
MLSRLDAASLLAPSPPRGKPHHRGRFLYLLSSTLAVLGASLALLLFLALRRAPAHNPSPNYGALFLSLGSNDTAAAHLRSLTLHPHVAGTRANSRTARYVRDALPFPA

SEQ ID NO: 77568 - protein, 481 aa, Setaria italica
  misc_feature (24)..(24): Xaa can be any naturally occurring amino acid
  misc_feature (31)..(31): Xaa can be any naturally occurring amino acid
  misc_feature (41)..(41): Xaa can be any naturally occurring amino acid
  Transcript Sequence Number=SeqID_11594
  Gene Ontology: Mol. function=nucleic acid binding; Cellular component= nucleus; Biological process=nuclear mRNA splicing, via spliceosome
  Homolog annotation: Hit_ID=B9SM97; Match level="QueryCoverage=45%, HitCoverage=42%, E-value=5e-85, Identity=71%"; Hit description=mRNA splicing factor, putative
  Pfam annotation: Domain name=RRM_1; Domain location=1-69; Score=75.4; E_value=2.1e-19; Accession=PF00076.14; Description=RNA recognition motif. (a.k.a. RRM, RBD, o
GNIPYDATEEQLVQICEEVGPVVXFRLVIDXETGKPKGYGXFCEYKDEETALSARRNLQGYEINGRQLRVDFAENGRNTDRNREKGRGGPGMASGADSQKQSGGTSVVGDTSLHQPVGLPPAIHAASVMAGVLGGAQTAIVQNGLPVQYGLGNDPLTHYLARMSRHQLHEIMAELKALTTQNKELSRNLLQGVPQLPKALFQAQIMLGLVTPQMMQMAKNQQPSSSLAQSSSHLNEPFLQPDAMIPAVSRPLSLPANIPPNPTVLQEQTATLHNFPQYQHASQPPVKIFPHGHQSGLVTHPPMLSQPLGGSSSVPTQSLVASVGLMSQVQPPFMPQHSRPPVMPTSVQQGPLTHSQVAAAPETLPNEIRAADPASHLAEFAHPSKLRKLEDGTSVPGMVNISHHPAYTAPPQAVGPSGPSGSYSAGAVSFQQPGNEAQLTPDVESALLQQVLQLTPEQLSSLPPEQQQQVLELQKMLSAGK

SEQ ID NO: 77569 - protein, 202 aa, Setaria italica
  Transcript Sequence Number=SeqID_11595
  Gene Ontology: Mol. function=metal ion binding; Biological process =metal ion transport
  Homolog annotation: Hit_ID=B6TF33; Match level="QueryCoverage=35%, HitCoverage=29%, E-value=2e-10, Identity=45%"; Hit description =Circumsporozoite protein
MSTVVMRVDLECEKCYKKIRKVLCKVQDKVSIRTITYDEKSNTVTVSGPFDGEEVADRLTHNAGKIITDIHVAGVGAWGGGGGKQKHGAPAAAAAKAPKPGKGNDHGHGHGHGHGNAQGKGHGGHGGGGHGGHGGGGHGGGKAKPEKKHVKFDDDDDLDDDDFDDFDFDMGKPAGGGGHAHHGHGHGHGHGGGGKPKIITTN

SEQ ID NO: 77570 - protein, 102 aa, Setaria italica
  Transcript Sequence Number=SeqID_11596
  Gene Ontology: Cellular component=extracellular region
MAKLLALLLAALVVLSLLVSPIACTRKLSKAKPKPKPKPAIGHRPAAKPKPNPVGYKPAPAAAKPPRSNHTAKHSPSIVYGGAWLSGAGATYYGAPNGDGSD

SEQ ID NO: 77571 - protein, 101 aa, Setaria italica
  misc_feature (36)..(36): Xaa can be any naturally occurring amino acid
  Transcript Sequence Number=SeqID_11597
  Gene Ontology: Cellular component=extracellular region; Biological process=sexual reproduction
  Homolog annotation: Hit_ID=Q6QF96; Match level="QueryCoverage=94%, HitCoverage=32%, E-value=7e-32, Identity=69%"; Hit description =Expansin EXPB9
  Pfam annotation: Domain name=Pollen_allerg_1; Domain location=7-85; Score=66.4; E_value=1e-16; Accession=PF01357.13; Description=Pollen allergen
RQLQGRNQGDQPFYFDVLIEFEDDDGDLKAVETTIXKAGSTVWTSMAHNWGATWRLNNGRKLNAPFGLRLTSDSGRVLVANHAIPAKWKPGTTYRSLVNYP

SEQ ID NO: 77572 - protein, 255 aa, Setaria italica
  Transcript Sequence Number=SeqID_11598
  Gene Ontology: Cellular component=extracellular region; Biological process=sexual reproduction
  Homolog annotation: Hit_ID=Q6QF96; Match level="QueryCoverage=90%, HitCoverage=79%, E-value=4e-94, Identity=72%"; Hit description =Expansin EXPB9
  Pfam annotation: Domain name=DPBB_1; Domain location=64-146; Score =116.6; E_value=8.1e-32; Accession=PF03330.10; Description=Rare lipoprotein A (RlpA)-like double
  Pfam annotation: Domain name=Pollen_allerg_1; Domain location=158 -239; Score=106.3; E_value=1.1e-28; Accession=PF01357.13; Description= Pollen allergen
  Pfam module annotation: Pfam domain module=DPBB_1::Pollen_allerg_1; Domain location=64-146::158-239
RRPQPNPTGTTPLSPPSPSTVYGSGGWLSGAGATYYGAPNGDGGEGGACGYQTAVGKQPFSSMIAAGSTPLYRDGEGCGACYEVKCTTNAACSGQPVTIVITDRSPGDLFPGEVAHFDMSGTAMGAMARPGMADKLRAGGVLRILYRRVQCKYPGVNIAFKVDQGANPFYFDVLIEFEDDDGDLKAVELMEAGSTVWTSMAHNWGATWRLNNGRKLNAPFGLRLTSDSGRVLVANHAIPAKWKPGTTYRSLVNYP

SEQ ID NO: 77573 - protein, 297 aa, Setaria italica
  misc_feature (18)..(18): Xaa can be any naturally occurring amino acid
  Transcript Sequence Number=SeqID_11599
  Gene Ontology: Mol. function=DNA binding; Cellular component =ribosome; Biological process=RNA-dependent DNA replication
  Homolog annotation: Hit_ID=Q7XDX1; Match level="QueryCoverage=96%, HitCoverage=83%, E-value=8e-90, Identity=60%"; Hit description =Transposon protein, putative, Pong sub-class
NQPLTNPMTQHAALASKXKPAINIDDGDDVRTEKRLSWKPDEDLRLVQAWLNHSSDPDGKKNEQYWGDVLAFYNSTTSTKRKRKVKHLKDRFQKIKRWVGFFCWSLKKAASIEETRQSDDQLIEKALQIYLDDYKEGPFIVMHCWKVLRDEPKWHAVLEDLEKSNKRKLGDEGEVGNSTPTSEDTREKEYPTAVKEAKKQCNGKGKVRANNNGLDEDIKRYMDIQAASKKRHEEFVKVQLRVSDAKVEAARLKREAAMLKTYNSFMGMNTREMTDELKAEHAIGLKLLREKLFCNNS

SEQ ID NO: 77574 - protein, 195 aa, Setaria italica
  Transcript Sequence Number=SeqID_11600
RNHESRNSAPHPARIKTLGLPPLPAEREPVPQFPARWPWRGSHLRWRRTNRREIKEPRRERRRRPESSIEAAGLASQFDYRPNPRAMEHDPRPASSGELVPPGSPARTTARLAEPNRIRETAGIELTSEGGSNWDWRAEPGRGPAGDELRPPCSPAGGLLSPALLRARGEAAACCCCCFVGWDGLARVLVFRLPL

SEQ ID NO: 77575 - protein, 247 aa, Setaria italica
  Transcript Sequence Number=SeqID_11601
  Subcellular localization annotation: CTP_CleavageSite=37; ConfidenceScore=5.60e-01
APPLPSIPPPVPSSPSSLGYRPPAPEYFRTPNGNQLTQMTGNTSIQGIGNTANFVPGGPVNGQAAVNFVPSMSAEYGNNNVFMAPQTSSGNYQFRPTGVPFQQGNFSAFPSTQTPPVHSHPRIAHMNPMGQQAVPPPCNPYVVQSFPNSQSHYPSEERWRMASGNFSPDDQHNNWLAGGRALSCSEGSFVQDGYSRSNIDRSSMNPMNHQHTVRNHLPSGAPLPGHVVPQMLPARSDIHTLNCWRPS

SEQ ID NO: 77576 - protein, 49 aa, Setaria italica
  misc_feature (25)..(25): Xaa can be any naturally occurring amino acid
  Transcript Sequence Number=SeqID_11602
  Gene Ontology: Mol. function=dolichyl-diphosphooligosaccharide -protein glycotransferase activity; Cellular component=integral to membrane; Biological process=apoptosis
  Homolog annotation: Hit_ID=Q0JDK9; Match level="QueryCoverage=100%, HitCoverage=43%, E-value=4e-19, Identity=96%"; Hit description =Defender against cell death 1
  Pfam annotation: Domain name=DAD; Domain location=1-49; Score=7.6; E _value=5.2e-06; Accession=PF02109.8; Description=DAD family
CIGTAVLAVCLRIQVNKDNKEFKDXPERAFADFVLCNLVLHLVIMNFLG

SEQ ID NO: 77577 - protein, 114 aa, Setaria italica
  Transcript Sequence Number=SeqID_11603
  Gene Ontology: Mol. function=dolichyl-diphosphooligosaccharide -protein glycotransferase activity; Cellular component=integral to membrane; Biological process=apoptosis
  Homolog annotation: Hit_ID=Q0JDK9; Match level="QueryCoverage=100%, HitCoverage=100%, E-value=3e-56, Identity=94%"; Hit description =Defender against cell death 1
  Pfam annotation: Domain name=DAD; Domain location=3-114; Score=212.1; E_value=1.4e-60; Accession=PF02109.8; Description=DAD family
MPRATSDAKLLIQSLSNAYAATPTNLKIIDLYVICAVATALIQVAYMGLVGSFPFNSFLSGVLSCIGTAVLAVCLRIQVNKDNKEFKDLPPERAFADFVLCNLVLHLVIMNFLG

SEQ ID NO: 77578 - protein, 113 aa, Setaria italica
  misc_feature (8)..(8): Xaa can be any naturally occurring amino acid
  Transcript Sequence Number=SeqID_11604
  Gene Ontology: Mol. function=pyruvate kinase activity; Cellular component=chloroplast; Biological process=glycolysis
  Homolog annotation: Hit_ID=B4FEC3; Match level="QueryCoverage=52%, HitCoverage=15%, E-value=2e-17, Identity=57%"; Hit description =Pyruvate kinase
SVSLRIEXKWWREEKRHEALELQGVSSSFSDKISEEICNSAAKMVFAFTTSTSVRRRLNRQWGLIPFRLSLATDIFNCFAVSSSYYCPLSWLLTEHLDSIFLEAVSKQNQFHL

SEQ ID NO: 77579 - protein, 119 aa, Setaria italica
  misc_feature (23)..(23): Xaa can be any naturally occurring amino acid
  Transcript Sequence Number=SeqID_11605
  Gene Ontology: Mol. function=pyruvate kinase activity; Cellular component=chloroplast; Biological process=glycolysis
  Homolog annotation: Hit_ID=B4FEC3; Match level="QueryCoverage=91%, HitCoverage=19%, E-value=8e-56, Identity=96%"; Hit description =Pyruvate kinase
  Pfam annotation: Domain name=PK_C; Domain location=3-113; Score=36.5; E_value=3.6e-08; Accession=PF02887.8; Description=Pyruvate kinase, alphabeta domain
  Subcellular localization annotation: CTP_CleavageSite=88; ConfidenceScore=5.24e-01
KISEEICNSAAKMANGLGADAVXVFTKTGHMASLLSRCRPDCPVFAFTTSTSVRRRLNLQWGLIPFRLSFSDDMESNLNRTFSLLKARGMIQSGDLVIALSDMLQSIQLWVLLWAVMGL

SEQ ID NO: 77580 - protein, 92 aa, Setaria italica
  Transcript Sequence Number=SeqID_11606
  Gene Ontology: Mol. function=structural constituent of ribosome; Cellular component=intracellular; Biological process=translation
  Homolog annotation: Hit_ID=B6T3L6; Match level="QueryCoverage=100%, HitCoverage=22%, E-value=4e-34, Identity=75%"; Hit description=60S ribosomal protein L4
VKRREKRKNPLKNMAAVLKLNPYLGTARKMATLAKVAHIKARKEKLESKRTKLSPEEAAKVKAAGKAWHRTMISDSDYTEFENFSKWLGVTQ

SEQ ID NO: 77581 - protein, 37 aa, Setaria italica
  Transcript Sequence Number=SeqID_11607
EEAAKVKAAGKAWHRTMISDSDYTEFENFSKWLGVTQ

SEQ ID NO: 77582 - protein, 210 aa, Setaria italica
  misc_feature (155)..(155): Xaa can be any naturally occurring amino acid
  Transcript Sequence Number=SeqID_11608
  Gene Ontology: Mol. function=pyruvate kinase activity; Cellular component=chloroplast; Biological process=glycolysis
  Homolog annotation: Hit_ID=B4FEC3; Match level="QueryCoverage=85%, HitCoverage=31%, E-value=1e-95, Identity=96%"; Hit description =Pyruvate kinase
  Pfam annotation: Domain name=PK_C; Domain location=75-178; Score =27.0; E_value=1.9e-07; Accession=PF02887.8; Description=Pyruvate kinase, alphabeta domain
PTPTRAEVADVSEAVRQRADALMLSGESAMGRYPEKALSVLRSVSLRIEKWWREEKRHEALELQGVSSSFSDKISEEICNSAAKMANGLGADAVFVFTKTGHMASLLSRCCPDCPVFAFTTSTSVRRRLNLQWGLIPFRLSFSDDMESNLNRTFXLLKARGMIQSGDLVIALSDMLQSIQGEEEEPAEEHGCCAQAQPLPRHCPQDGYPR

SEQ ID NO: 77583 - protein, 348 aa, Setaria italica
  Transcript Sequence Number=SeqID_11609
  Homolog annotation: Hit_ID=A9UFY5; Match level="QueryCoverage=55%, HitCoverage=14%, E-value=7e-15, Identity=36%"; Hit description =Truncated eukaryotic initiation translation factor 4 G III
PARTGHDQTLGAAAPGAPRAARWEKKKEEIGGETQGFMSQRGDRGEGHRRPGRSSSFGGHRGGGVGGAGKGGGGSSGQPPLSSNRSFRKPGNGHGGHQRVVSQPDTTGFQPAPAPVPHQTPARPPVAPQNAPAHVPVPAPRPQHHDPQVSSSSPASEKPANAPLPKATHAAPRAPPKSSNPPIPQGASKGEPSKGFNFQFGSINMNGLPQFPARTSSAPPNLDEQKRNQALLEELKVTPPGPMQPAPKQQPLQKQQQQQPQQLLQQSQQVPQQPQQQQARKDAVSSSQPNTINPHVPSQLKRDVHASPSVPNVTSLRPPTVQPMPGVQMSIPFHHQPAPVPLQFGGRS

SEQ ID NO: 77584 - protein, 552 aa, Setaria italica
  misc_feature (102)..(102): Xaa can be any naturally occurring amino acid
  Transcript Sequence Number=SeqID_11610
  Gene Ontology: Mol. function=pyruvate kinase activity; Cellular component=chloroplast; Biological process=glycolysis
  Homolog annotation: Hit_ID=B4FEC3; Match level="QueryCoverage=93%, HitCoverage=91%, E-value=0.0, Identity=95%"; Hit description =Pyruvate kinase
  Pfam annotation: Domain name=PK; Domain location=71-425; Score=256.9; E_value=4.9e-74; Accession=PF00224.13; Description=Pyruvate kinase, barrel domain
  Pfam annotation: Domain name=PK_C; Domain location=442-548; Score =35.3; E_value=4.4e-08; Accession=PF02887.8; Description=Pyruvate kinase, alphabeta domain
  Pfam module annotation: Pfam domain module=PK::PK_C; Domain location =71-425::442-548
  Subcellular localization annotation: CTP_CleavageSite=56; ConfidenceScore=5.51e-01
ARPPPSPSPSPSPFLRLPAPARPRLPLRLRSTSPAAASDFTDFPNPNGILAPIDVDAATEAELRENGFRSTRRTKLVCTVGPATSSPEQLEALAVGGMNVAXRLNMCHGDREWHRGVIRAVRRLNEEKGYAVAVMMDTEGSEIHMGDLGGASSAKAEDGEVWTFSVRSFELPLPERTINVNYDGFAEDVRVGDELLVDGGMARFEVIEKLGPDVKCRCTDPGLLLPRANLTFWRDGSIVRERNAMLPTISSKDWLDIDFGIAEGVDFIAVSFVKSAEVIKHLKSYIAARSRGSDIAVIAKIESIDSLKNLEEIIRASDGAMVARGDMGAQVPLEQVPSIQLKIVQLCRQLNKPVIVASQLLESMVEYPTPTRAEVADVSEAVRQRADALMLSGESAMGRYPEKALSVLRSVSLRIEKWWREEKRHEALELQGVSSSFSDKISEEICNSAAKMANGLGADAVFVFTKTGHMASLLSRCRPDCPVFAFTTSTSVRRRLNLQWGLIPFRLSFSDDMESNLNRTFSLLKARGMIQSGDLVIALSDMLQSIQVMNVP

SEQ ID NO: 77585 - protein, 129 aa, Setaria italica
  misc_feature (9)..(9): Xaa can be any naturally occurring amino acid
  Transcript Sequence Number=SeqID_11611
  Gene Ontology: Mol. function=structural constituent of ribosome; Cellular component=intracellular; Biological process=translation
  Homolog annotation: Hit_ID=B6T3L6; Match level="QueryCoverage=100%, HitCoverage=31%, E-value=1e-64, Identity=92%"; Hit description=60S ribosomal protein L4
  Pfam annotation: Domain name=Ribosomal_L4; Domain location=24-129; Score=14.0; E_value=9e-07; Accession=PF00573.14; Description =Ribosomal protein L4L1 family
MAAAARPLXVSVKALEGDMATDSAGTALPDVLRAPIRPDIVRFVHKLQSCNSRQPYAVSRRAGHQTSAESWGTGRAVSRIPRVPGGGTHRAGQGAFGNMCRGGRMFAPTKIWRRWHRRVNVHLRRVAVA

SEQ ID NO: 77586 - protein, 521 aa, Setaria italica
  Transcript Sequence Number=SeqID_11612
  Gene Ontology: Mol. function=pyruvate kinase activity; Cellular component=chloroplast; Biological process=glycolysis
  Homolog annotation: Hit_ID=Q0D867; Match level="QueryCoverage=95%, HitCoverage=88%, E-value=0.0, Identity=89%"; Hit description =Pyruvate kinase (Fragment)
  Pfam annotation: Domain name=HpcH_HpaI; Domain location=191-353; Score=-78.7; E_value=0.019; Accession=PF03328.6; Description =HpcHHpaI aldolase family
  Pfam annotation: Domain name=PK; Domain location=41-394; Score=272.5; E_value=9.5e-79; Accession=PF00224.13; Description=Pyruvate kinase, barrel domain
  Pfam annotation: Domain name=PK_C; Domain location=411-517; Score =38.4; E_value=2.6e-08; Accession=PF02887.8; Description=Pyruvate kinase, alphabeta domain
  Pfam module annotation: Pfam domain module=HpcH_HpaI::PK::PK_C; Domain location=191-353::41-394::411-517
WFRFLLLYVFGSVRFPYPVRFLFVVDAATEAELRENGFRSTRRTKLICTVGPSTCGAAELEALAVGGMNVARVNMCHGDREWHRGVIRAVRRLNDEKGFAVAVMMDTEGSEIHMGDLGGAPSAKAEDGEVWTFSVRSSDTSLPDRIIHVNYDGFAEDVKAGDELFVDGGMARFEVIEKLGPDVKCRCTDPGLLLPRANLTIWRDGSVVRERNAMLPTISSKDWIDIDFGIAEGVDFIAVSFVKSAEVINHLKSYIAARSRGSDIGVIAKIESIDALKNLEEIIRASDGVMVARGDLGAQIPLEQVPSVQQKIVRMCRQLNKPVIVASQLLESMIEYPLPTRAEVADVSEAVRQRADALMLSGESAMGRYPEKALSVLRSVSLRIEKWWREEKRHEALELQDVSSSFSDKISEEICNSAAKIANNLGVDAVFVYTKDGHMASLLSRCRPDCPIFAFTSSTSVRRRLNLQWGLIPFRLSESDDMESNLSRTFSLLKARGMVQSGDLVIALSDMLQSIQVMNVP

SEQ ID NO: 77587 - protein, 206 aa, Setaria italica
  Transcript Sequence Number=SeqID_11613
  Homolog annotation: Hit_ID=B5RHT0; Match level="QueryCoverage=98%, HitCoverage=93%, E-value=3e-97, Identity=83%"; Hit description =Putative lysine decarboxylase
  Pfam annotation: Domain name=Lysine_decarbox; Domain location=53-186; Score=263.2; E_value=6.3e-76; Accession=PF03641.6; Description=Lysine decarboxylase family
MTMRQSRFKRICVFCGSSQGKKRSYHDAAIELGNELVARSVDLVYGGGSIGLMGLVSQAVYDGGRHVIGVIPKTLMTPEISGETVGEVRPVADMHQRKAEMARQSDAFIALPGGYGTLEELLEVITWAQLGIHHKPVGLLNVDGYYNSLLTFIDKAVEEGFINPSARRIIVLAPTAQELMDKLEEYVPYHDRVASTLNWEMGHLGY

SEQ ID NO: 77588 - protein, 404 aa, Setaria italica
  Transcript Sequence Number=SeqID_11614
  Gene Ontology: Mol. function=structural constituent of ribosome; Cellular component=intracellular; Biological process=translation
  Homolog annotation: Hit_ID=B6T3L6; Match level="QueryCoverage=100%, HitCoverage=100%, E-value=1e-177, Identity=74%"; Hit description=60S ribosomal protein L4
  Pfam annotation: Domain name=Ribosomal_L4; Domain location=23-267; Score=435.0; E_value=1.2e-127; Accession=PF00573.14; Description =Ribosomal protein L4L1 family
MVAFSRPLVSVKALEGDMATDATGLPYPAVFSAPIRPDVVTFTHKLLSCNKRQPYAVSRRAGHQTSAESWGTGRAVSRIPRVPGGGTHRAGQGAFGNMCRGGRMFAPTKIWRKWHRRVNVNLRRVAVASALAATAVPALVQARGHRIETVPELPLVISDSAESIEKTSQALKILKQVGAYADVEKAKDSVGIRPGKGKMRNRRYINRKGPLIVYGTEGSKIVKAFRNLPGVDVANVERLNLLDLAPGGHLGRFVIWTESAFKKLEEVYGTFDTPSQKKKGFVLPRPKMANADLGRIINSDEVQSVVKPLNKEVKRREKRKNPLKNMAAVLKLNPYLGTARKMATLAEAARVKARKEKLESKRTKLSPEEAAKVKAAGKAWHRTMISDSDYTEFENFSKWLGVTQ

SEQ ID NO: 77589 - protein, 422 aa, Setaria italica
  misc_feature (169)..(169): Xaa can be any naturally occurring amino acid
  misc_feature (228)..(228): Xaa can be any naturally occurring amino acid
  Transcript Sequence Number=SeqID_11615
  Gene Ontology: Mol. function=structural constituent of ribosome; Cellular component=intracellular; Biological process=translation
  Homolog annotation: Hit_ID=B6T3L6; Match level="QueryCoverage=94%, HitCoverage=98%, E-value=0.0, Identity=82%"; Hit description=60S ribosomal protein L4
  Pfam annotation: Domain name=Ribosomal_L4; Domain location=40-285; Score=418.3; E_value=1.3e-122; Accession=PF00573.14; Description =Ribosomal protein L4L1 family
MRPPRHMLPKAPSPPPQMAAAARPLVSVKALEGDMATDSAGTALPDVLRAPIRPDIVRFVHKLQSCNSRQPYAVSRRAGHQTSAESWGTGRAVSRIPRVPGGGTHRAGQGAFGNMCRGGRMFAPTKIWRRWHRRVNVHLRRVAVASALAATAVPSLVLARGHRVESVPXLPLVVSDSAESIEKTAQAIKILKQLGAYADAEKAKDSVGIRPGKGKMRNRRYINRKGPXLIVYGTEGSKIVKAFRNLPGVDVANVERLNLLDLAPGGHLGRFVIWTESAFKKLDEVYGTFETPSAKKKGFVLPRPKMANADLSRLINSDEVQSVVKPINKLVKRREARKNPLKNMAAVLKLNPYLGTARKMAALAEAARVKARKEKLDSKRTKLSPEEASKVKAAGKAWYKTMISDSDYTEFENFTKWLGVTQ

SEQ ID NO: 77590 - protein, 37 aa, Setaria italica
  Transcript Sequence Number=SeqID_11616
MIFPPAFLDSSSWNDNQQQQQQAHHQVAGGGGGGGGD

SEQ ID NO: 77591 - protein, 208 aa, Setaria italica
  Transcript Sequence Number=SeqID_11617
  Gene Ontology: Mol. function=exonuclease activity; Cellular component= intracellular
  Homolog annotation: Hit_ID=B6STX8; Match level="QueryCoverage=100%, HitCoverage=64%, E-value=5e-82, Identity=75%"; Hit description=ATP -dependent protease Clp ATPase subunit
  Pfam annotation: Domain name=TPR_2; Domain location=109-142; Score =10.3; E_value=1.8; Accession=PF07719.9; Description=Tetratricopeptide repeat
  Pfam annotation: Domain name=TPR_2; Domain location=71-104; Score =12.2; E_value=1; Accession=PF07719.9; Description=Tetratricopeptide repeat
  Pfam module annotation: Pfam domain module=TPR_2::TPR_2; Domain location=109-142::71-104
SEDEAQREWEAELNRRLKEAEEMEELERTAEQLQSQAAAEATEESEEEKRERVRRELQKVAQEQAERRATAKQMFELGQKAYGRGMYGRSIEFLEAALTIIRPSSLLGGEIQIWLAMAYEANRRHKDCIALYKELESSHPMINIRRQAAELRYILEAPKLKISNDEVVTIPQIGSSWDWYAGTWSDKIKEQEDKKRMMSAASNQVQPS

SEQ ID NO: 77592 - protein, 173 aa, Setaria italica
  Transcript Sequence Number=SeqID_11618
  Gene Ontology: Mol. function=exonuclease activity; Cellular component= intracellular
  Homolog annotation: Hit_ID=B6STX8; Match level="QueryCoverage=100%, HitCoverage=53%, E-value=2e-94, Identity=95%"; Hit description=ATP -dependent protease Clp ATPase subunit
FELGQKAYGRGMYGRSIEFLEAALTIIRPSSLLGGEIQIWLAMAYEANRRHKDCIALYKELESSHPMINIRRQAAELRYILEAPKLKISNDEVVTIPQIGSSWDWYAGTWSDKIKEQEDKKRMMSAASNQVQPSPNIFGDFSFLRRPSEWKKSAWVVITLWILLIGTAIYLQT

SEQ ID NO: 77593 - protein, 88 aa, Setaria italica
  misc_feature (23)..(23): Xaa can be any naturally occurring amino acid
  Transcript Sequence Number=SeqID_11619
  Gene Ontology: Mol. function=transferase activity, transferring glycosyl groups; Biological process=sucrose metabolic process
  Homolog annotation: Hit_ID=Q42906; Match level="QueryCoverage=68%, HitCoverage=11%, E-value=5e-19, Identity=80%"; Hit description =Sucrose-phosphate synthase (Fragment)
PSLLHSPIPSPRSRRDLLAGGGXAGNDNWINSYLDAILDAGKAAIGGDRPSLLLRERGHFSPARYFVEEVITGYDETDLYKTWLRANA

SEQ ID NO: 77594 - protein, 480 aa, Setaria italica
  misc_feature (26)..(26): Xaa can be any naturally occurring amino acid
  Transcript Sequence Number=SeqID_11620
  Gene Ontology: Mol. function=4 iron, 4 sulfur cluster binding; Biological process=RNA processing
  Homolog annotation: Hit_ID=Q6M9M7; Match level="QueryCoverage=90%, HitCoverage=95%, E-value=4e-65, Identity=34%"; Hit description =Uncharacterized RNA methyltransferase pc1998
  Subcellular localization annotation: CTP_CleavageSite=38; ConfidenceScore=5.55e-01
YTRVRLPPPPPPTTPPPPRLEPAAPXPTTASTPLPPSTASTASSSSTCLDCVHFGKCSGCTHEVDLDKPPVLQEVENFFKGHGVGDFTFSRGRLSQWRCRAKLAVRGTPENPLIGLYQEGTHVVTDIPECRAHHPSINAAVKLLRQGISELNIQPFDEDAGTGELRYVQMAVTTYNTSIPVDKRYEQGRVQISLVWNSRDERSQNAEKLALLIEFLWRNGGPKSSVHLIHSIWANFQTSTSNIIFGHKWRHLKGERDLWERYGGVDISLDPCSFGQANTLSFNSLLHKLNKYVPRGSTVVDLYSGAGVIGLSVAASRKCRSVKCVEINKQSKMSFEKSASRLPTNLGCTITWHNTDASVEPVHWLEGSSVVIVDPPRKGLHPSVIIALQKVALSERKAYKAKSSLAKVKDEKRPWILRAREAAVHVDNTTTEDSSETWPETLIYISCGWESFKKDCKSLISSKAWQLENAHAFNFFPGTD

SEQ ID NO: 77595 - protein, 77 aa, Setaria italica
  misc_feature (68)..(68): Xaa can be any naturally occurring amino acid
  Transcript Sequence Number=SeqID_11621
EDSSETWPETLIYISCGWESFKKDCKSLISSKAWQLENAHAFNFFPGTDSIEILAIFKRESEAGQKKXKKAKRKKAK

SEQ ID NO: 77596 - protein, 123 aa, Setaria italica
  Transcript Sequence Number=SeqID_11622
IALQKVALSERKAYKAKSSLAKVKDEKRPWILRAREAAVHVDNTTTEDSSETWPETLIYISCGWESFKKDCKSLISSKAWQLENAHAFNFFPGTDSIEILAIFKRESEAGQKKKKKAKRKKAK

SEQ ID NO: 77597 - protein, 162 aa, Setaria italica
  Transcript Sequence Number=SeqID_11623
  Gene Ontology: Mol. function=protein serine/threonine kinase activity; Biological process=protein amino acid phosphorylation
MDPDFQSWNLITCGSVSWLPYFVVMEEQNSWLRRTKFSHTVYTRVDPRRVPVAPVGKDVVVPFAPLGKDVERKLQKFVSMGKSVSMPVHRDDEGTGTALKHCDSLPLVRSSLQLDRDKSNKPKRATLEIPSSPPMNSENCRCPRARSLVKSPSSMMLLSYLN

SEQ ID NO: 77598 - protein, 87 aa, Setaria italica
  misc_feature (78)..(78): Xaa can be any naturally occurring amino acid
  Transcript Sequence Number=SeqID_11624
  Gene Ontology: Mol. function=substrate-specific transmembrane transporter activity; Cellular component=integral to membrane; Biological process=transmembrane transport
  Homolog annotation: Hit_ID=Q7XMZ1; Match level="QueryCoverage=91%, HitCoverage=22%, E-value=3e-10, Identity=46%"; Hit description =OSJNBa0027G07.4 protein
  Subcellular localization annotation: CTP_CleavageSite=70; ConfidenceScore=5.10e-01
YERLRGKGYRHYLVMVVAIPSFFDLTGVIAMSVFSPVLFRTVGFSSQKAILGSVILSLVNLASSSLSSVVVDRAGRRXFLFLTGGAA

SEQ ID NO: 77599 - protein, 50 aa, Setaria italica
  Transcript Sequence Number=SeqID_11625
  Gene Ontology: Mol. function=catalytic activity; Biological process =metabolic process
  Homolog annotation: Hit_ID=B6SS27; Match level="QueryCoverage=96%, HitCoverage=8%, E-value=4e-16, Identity=88%"; Hit description=AMP -binding protein
MSSWGSVSAAPERDIDDLPRNDANYTALTPLWFLERAALAQPGRASVVHR

SEQ ID NO: 77600 - protein, 60 aa, Setaria italica
  Transcript Sequence Number=SeqID_11626
  Gene Ontology: Mol. function=catalytic activity; Biological process =metabolic process
  Homolog annotation: Hit_ID=B6SS27; Match level="QueryCoverage=98%, HitCoverage=10%, E-value=8e-26, Identity=93%"; Hit description=AMP -binding protein
MAVERDIDDLPRNDANYTALTPLWFIERAALTHPARASVVHGPVRYTWADTYRRCRRLAS

SEQ ID NO: 77601 - protein, 120 aa, Setaria italica
  Transcript Sequence Number=SeqID_11627
  Gene Ontology: Mol. function=metal ion binding
  Homolog annotation: Hit_ID=Q2QSD0; Match level="QueryCoverage=96%, HitCoverage=8%, E-value=2e-28, Identity=56%"; Hit description=PHD -finger family protein, expressed
  Subcellular localization annotation: CTP_CleavageSite=15; ConfidenceScore=5.08e-01
RQGHSTQFCAVDKLRVSAVKPLSERNMKDASAKRNRTSETSTSEAAEKAASRSGNQSEQIIKCGTYQNPTYGPKDVLPASFGHVKKPSPLSARSNEQDMRYILSNPGSTASVDYNKIKVG

SEQ ID NO: 77602 - protein, 436 aa, Setaria italica
  misc_feature (15)..(15): Xaa can be any naturally occurring amino acid
  Transcript Sequence Number=SeqID_11628
  Gene Ontology: Mol. function=metal ion binding
  Homolog annotation: Hit_ID=Q2QSD0; Match level="QueryCoverage=94%, HitCoverage=34%, E-value=2e-83, Identity=44%"; Hit description=PHD -finger family protein, expressed
PTQFQENGPTIENSXYFYFFARDIQSYENHYSKLVENMLKNDLVLRGSVDAVELLIFPSNTLSKNFQRWNMFYFLWGVFRVSRKDCSNLSSDVPTSRLEPNFIEDPRGVDPSTSVLSSSLSFSKDRNSFAEQDSGLVKSANFLPSLESNHEVCLNGENSIHQPVNGRALDDHLDSTNSKGAMGPSAMATELKHKKSDVKTLDTFGGNVSERDFDVNTEAVACSVSSTHQEESGKESTIINLNDAEDLMDIEPVNTGEISTEALDPHASGGARKRNFEMANGAAEVDGVLEHKKIKLDTVVSTNSELSENTNNGRLSSKVHPLAAFSVDDGTSNKSMAGPSSSDRKCVFPLDLNAVDNAVSENIVNIPSSDDEESLEPVPSKVGEKQARGDNPSTDIAGALSLTLAFPSRKGQTSKPQSEPQRQFPERSNGNNTSSI

SEQ ID NO: 77603 - protein, 486 aa, Setaria italica
  Transcript Sequence Number=SeqID_11629
  Gene Ontology: Mol. function=metal ion binding
  Homolog annotation: Hit_ID=Q2QSD0; Match level="QueryCoverage=97%, HitCoverage=31%, E-value=1e-133, Identity=55%"; Hit description=PHD -finger family protein, expressed
  Pfam annotation: Domain name=zf-CCHC; Domain location=184-201; Score =8.4; E_value=0.028; Accession=PF00098.15; Description=Zinc knuckle
  Subcellular localization annotation: CTP_CleavageSite=56; ConfidenceScore=5.25e-01
VSRNRGLRPLKRKGPISMTTKSATFKKPKPCEPANKAKSSILSPAEEPRSVNQLVSQNATNDQCSSILGTPSTTAQMIAPVISKTDTTAQPFATGNNTADSNNLGTAHLQGGKSCIGNSELKKPLLAKVPGSTMPPNPERSLGGILGPGAQRKVIQNSDPSHRDAKIKDSTGLRQGASSSNRTIRCQRCNEAGHSTQFCAVDKLRVSAVKPLSERNMKDASAKRNRTSETSTSEAAEKAASRSGNQSEQIIKCGTYQNPTYGPKDVLPASFGHVKKPSPLSARSNEQDMRYILSNPGSTASVDYNKLKFKDDHPTLSATTGIPVDNSCTMPSDRRDESAQAFSAGDEPMASTVPELDWIWQGGFELRRTGRSPELCDGFQAHLSCSASQLVLEVAKKFPSKVQLEEVPRQNSWPTQFQENGPTYENVGLFFFARDIQSYENHYSKLVENMLKNDLVLRGSVDAVELLIFPSNTLSKNFQSKNSSTT

SEQ ID NO: 77604 - protein, 43 aa, Setaria italica
  Transcript Sequence Number=SeqID_11630
MGILNHLSHLCSFTDTKEALKLRKKRPLNVRYDSIRVCVSIEI

SEQ ID NO: 77605 - protein, 126 aa, Setaria italica
  misc_feature (7)..(7): Xaa can be any naturally occurring amino acid
  misc_feature (12)..(12): Xaa can be any naturally occurring amino acid
  Transcript Sequence Number=SeqID_11631
  Gene Ontology: Mol. function=catalytic activity; Cellular component =peroxisome; Biological process=metabolic process
  Homolog annotation: Hit_ID=B9RMJ5; Match level="QueryCoverage=100%, HitCoverage=22%, E-value=4e-43, Identity=63%"; Hit description=AMP dependent CoA ligase, putative
GDLCYIXQDGFXFVVDRLKELIKYKGYQVPPAELESLLQTHPNIDEAAVVPYPDDQAGELPVAFIVRSSGSNLYEAQIKEFVAKQVVHYKQIHHVFFVNTIPKNAAGKILRKDLAKLALQHIRSRL

SEQ ID NO: 77606 - protein, 51 aa, Setaria italica
  Transcript Sequence Number=SeqID_11632
QKSIFVPCSYLTDILSIINVIMWSTKDGCRVTIFRSKNQFIKCIKGNFPGS

SEQ ID NO: 77607 - protein, 97 aa, Setaria italica
  Transcript Sequence Number=SeqID_11633
  Subcellular localization annotation: CTP_CleavageSite=67; ConfidenceScore=5.65e-01
PPPTNHQNKITVRHRCPRPRFLPLSAAGQRPGAPPLRWTRRHSSPPRRSVAAPPLRARPTPLLPSVRTQGRRRWGPMEKVAGDWAAKRSSSMRLEEK

SEQ ID NO: 77608 - protein, 96 aa, Setaria italica
  misc_feature (42)..(42): Xaa can be any naturally occurring amino acid
  misc_feature (80)..(80): Xaa can be any naturally occurring amino acid
  Transcript Sequence Number=SeqID_11634
  Gene Ontology: Mol. function=nucleic acid binding; Cellular component= nucleus; Biological process=negative regulation of transcription
  Homolog annotation: Hit_ID=Q6H7U1; Match level="QueryCoverage=78%, HitCoverage=3%, E-value=1e-31, Identity=94%"; Hit description =Putative SNF2 domain-containing protein
LSPLKLVCSYLKYYTEGRYSLQFQATYGKPLLAAKDSKCSAXKDAEAGILAMEALHKQVMPFLLRRTKDEVLSDLPEKIXIQDRYCDLSLLQLKLY

SEQ ID NO: 77609 - protein, 556 aa, Setaria italica
  Transcript Sequence Number=SeqID_11635
  Gene Ontology: Mol. function=nucleic acid binding; Cellular component= nucleus; Biological process=negative regulation of transcription
  Homolog annotation: Hit_ID=Q6H7U1; Match level="QueryCoverage=99%, HitCoverage=26%, E-value=0.0, Identity=84%"; Hit description =Putative SNF2 domain-containing protein
  Pfam annotation: Domain name=Helicase_C; Domain location=360-438; Score=74.9; E_value=2.9e-19; Accession=PF00271.23; Description =Helicase conserved C-terminal domain
  Pfam annotation: Domain name=SNF2_N; Domain location=3-278; Score =252.2; E_value=1.2e-72; Accession=PF00176.15; Description=SNF2 family N-terminal domain
  Pfam module annotation: Pfam domain module=Helicase_C::SNF2_N; Domain location=360-438::3-278
STSAIVASDIAESRAQNDEKDPTSLIICPSTLVAHWEYEIEKYIDSSIMKPLQYVGSSQDRATLRSQFEKFNVIITSYDIIRKDIDFLGNIPWNYCVLDEGHIIKNSRSKITSAVKQLKAQHRLILSGTPIQNNVLELWSLFDFLMPGFLGTEKQFQATYGKPLLAAKDSKCSAKDAEAGILAMEALHKQVMPFLLRRTKDEVLSDLPEKIIQDRYCDLSLLQLKLYDKFSSSNAKEEVSTIVKANESEESAPQPKATRHVFQALQYLLKLCSHPLLITGENPPDHLVDLLKEIGVGSGGELHELHHSPKLVALQEILQECGIGSEISSPDASTAVGQHRVLIFAQHKAFLDIIEKDLFQSHMRSVTYLRLDGSVEPEKRFEIVKAFNSDPTIDVLLLTTHVGGLGLNLTSADTLVFMEHDWNPMKDLQAMDRAHRLGQRKVVNVHRLIMRGTLEEKVMSLQRFKVSVANAVINAENSSLKTMNTDQLLDLFTSTPASRKASVLPRGSSDGQSKDLKKKSGGKGLKSILNGLDELWDQSQYADEYDLNQFLAKLNG

SEQ ID NO: 77610 - protein, 66 aa, Setaria italica
  misc_feature (56)..(56): Xaa can be any naturally occurring amino acid
  Transcript Sequence Number=SeqID_11636
LRFFFLKVVIAKFQASYATVLKAHMHALKKRERKDRKKAADAEKVPETAPKKQKKXSSKKSSGSKS

SEQ ID NO: 77611 - protein, 416 aa, Setaria italica
  misc_feature (317)..(317): Xaa can be any naturally occurring amino acid
  Transcript Sequence Number=SeqID_11637
  Gene Ontology: Cellular component=mitochondrion
  Homolog annotation: Hit_ID=B9RXW7; Match level="QueryCoverage=82%, HitCoverage=91%, E-value=3e-66, Identity=38%"; Hit description =Pentatricopeptide repeat-containing protein, putative
  Pfam annotation: Domain name=PPR; Domain location=169-203; Score =30.5; E_value=6.9e-06; Accession=PF01535.12; Description=PPR repeat
  Pfam annotation: Domain name=PPR; Domain location=204-238; Score =43.5; E_value=8.4e-10; Accession=PF01535.12; Description=PPR repeat
  Pfam annotation: Domain name=PPR; Domain location=239-273; Score =27.6; E_value=5.1e-05; Accession=PF01535.12; Description=PPR repeat
  Pfam annotation: Domain name=PPR; Domain location=274-308; Score =42.2; E_value=2e-09; Accession=PF01535.12; Description=PPR repeat
  Pfam annotation: Domain name=PPR; Domain location=309-343; Score=4.9; E_value=2.3; Accession=PF01535.12; Description=PPR repeat
  Pfam module annotation: Pfam domain module=PPR::PPR::PPR::PPR::PPR; Domain location=169-203::204-238::239-273::274-308::309-343
RLHPAPAPKVAAGEAEAKPNAGRSHEKSLGRIVKAIFQERDPEKLVSKFIAASPSSQRFREKHRVYEVAVARLTSFGRHDAVAAILDSQKPFLEASTEGFATRLVRLYGRASMPSHAATTFHDLPPKHKSVMTFNAVLAAYLKARDFDALATAFQQIPASHPTIVPSVYSYNILISALCQKPDLSAALDVIPLMEKCGLTPNEVSFGILLNGFYRNGRFDDAEKVWEMMKDRNVEPNTKSYNAKLRGLVANGRIEDAVALIEAMQKDGPKPDSVSYNELIRGYCKEGRLGEAKKVYDDLVKNECAPNKGTFETLVPXFVEAGELDLALDCCHEIFSRKCRVKCSLLQGVVTALVAASRVEEATRIVKLGWKNNYPPRGLKMPELIEKDKAVEAETDCDNFLPYEEGSEEELESKTA

SEQ ID NO: 77612 - protein, 122 aa, Setaria italica
  Transcript Sequence Number=SeqID_11638
  Gene Ontology: Mol. function=nucleoside-triphosphatase activity
  Homolog annotation: Hit_ID=B9SDE3; Match level="QueryCoverage=92%, HitCoverage=11%, E-value=1e-27, Identity=52%"; Hit description=DNA -binding protein smubp-2, putative
CVPSTEEASICVGTLYQNGDPLGRNELGRCVVEWLRQGMRSMASKLAAAELEGDLAAAALALEWGSAEGRLGFVIQAQPYLSAIPMPQGLEALCLKACTHYPTLFDHFQRELRDVLLSYQNQ

SEQ ID NO: 77613 - protein, 148 aa, Setaria italica
  Transcript Sequence Number=SeqID_11639
  Homolog annotation: Hit_ID=Q108Z7; Match level="QueryCoverage=100%, HitCoverage=6%, E-value=5e-53, Identity=68%"; Hit description =Transcriptional regulator, putative, expressed
IFRYCLDKPYFSTSFCEALRAIPVSNGFLETLSNELELSAAERVGVGLALSDSENPDLSLEGRKFTITQIEELCSNHAHSVSNDRIQEIVVFLLQTEGLSKHMDSFTNIISLLNVKERPFYVPISLQEANCNQANSSRHTELCIGSLD

SEQ ID NO: 77614 - protein, 538 aa, Setaria italica
  misc_feature (484)..(484): Xaa can be any naturally occurring amino acid
  Transcript Sequence Number=SeqID_11640
  Gene Ontology: Mol. function=RNA binding
  Homolog annotation: Hit_ID=B6T5L0; Match level="QueryCoverage=99%, HitCoverage=100%, E-value=0.0, Identity=69%"; Hit description=KH domain containing protein
  Pfam annotation: Domain name=KH_1; Domain location=116-178; Score =41.0; E_value=4.6e-09; Accession=PF00013.21; Description=KH domain
  Pfam annotation: Domain name=KH_1; Domain location=208-273; Score =63.1; E_value=1e-15; Accession=PF00013.21; Description=KH domain
  Pfam annotation: Domain name=KH_1; Domain location=391-451; Score =54.9; E_value=3e-13; Accession=PF00013.21; Description=KH domain
  Pfam module annotation: Pfam domain module=KH_1::KH_1::KH_1; Domain location=116-178::208-273::391-451
MDVPVEDPVENNLTGTPPTLSVEEQANPRADVQEQLDAEPEKPYDEESKDPTPDELGNPEDANMNNEVVGDLNKEDQTTPKHQEPASVHGEEAGAKQQDNAVPDEQKWSGWPGESVFRILVPVSKVGAVIGRKGDFIKKMIEESKARIKVLEGPQGVPERAVMISAKDEPDAVLPPAVDGLLRVHKRITGGLDGETEQPQRGTVTAGPTRLLVPASQAGSLIGKQGGTIKSIQDASKCVLRILENVPPVALNDDRVVEIQGEPLDAHKAVELIASHLRKFLVDRSVLPLFESQMKAHNVHREQPMPPPQPWGPPPPSPWGHPPNLPPGGPGYAGNPQYMPPRPQDNYYPPPDMPPVEKQPHYGISSYGRDAPPTGPPSGNQHQAHGSSQVTQSMQVPLSYADAVIGAAGASISYIRRHSGATISIQEGAPGEMTVEITGSASQVQTAQQLIKNFMAEASPQGPPAPAPPAQPVDTGYSSYPPYXEHHTDLLQAAQLQARTMEEAMAPHHTRLAMDTSQKKNLVSDLGKGGAWVCLLVA

SEQ ID NO: 77615 - protein, 270 aa, Setaria italica
  misc_feature (166)..(166): Xaa can be any naturally occurring amino acid
  misc_feature (186)..(186): Xaa can be any naturally occurring amino acid
  Transcript Sequence Number=SeqID_11641
  Gene Ontology: Mol. function=DNA binding; Cellular component =ribosome; Biological process=RNA-dependent DNA replication
  Homolog annotation: Hit_ID=Q8SB40; Match level="QueryCoverage=54%, HitCoverage=16%, E-value=1e-38, Identity=53%"; Hit description =Putative ribosomal protein
FMRYFGNQPHNFHLVGTPSHNSHVNISIPETNGGSSPSVVEFLSEQLPILVNDENEMVRTEKRIMIMWTPQEDERLMSAWIENSTDSTTGADRKGEAYWGDVIKAYNKETPPQRNRNAKQAKDHWHKINRWCDLFESDYLKARRVFTSGYSDEMRMDTAKKFYLDXQAPFVIKNVWKICREVAKWXTYNEELKNARKRKSYHLEEDVENVDSEDEMPKRPMGQKAAKKSALAAKGKSKAMGDDGKSKESAIHVEKLDKLSISQKKLMQTA

SEQ ID NO: 77616 - protein, 190 aa, Setaria italica
  Transcript Sequence Number=SeqID_11642
  Subcellular localization annotation: CTP_CleavageSite=69; ConfidenceScore=5.46e-01
QHPFQVCRSKNFSIATEKAAKPAHPMHVALGPPFTARAPPVTQPATAVLVVSCFARAFSTTHSAAEKIRPMTAKVLALLILLLPICFAVYTICCLAVISSAIIGLSKAPKNSPISTPRPPPMTPLTTLRTAQLFQMSCPLISSTVGIRIGSTAAAWLADSPPAPAPAADGSGEAISRYLVPSPTSSRRRS

SEQ ID NO: 77617 - protein, 239 aa, Setaria italica
  Transcript Sequence Number=SeqID_11643
  Gene Ontology: Mol. function=iron-sulfur cluster binding
SPNKKVRLVKRNVASINKWMFMKLKEHMQGDVDAENEAYERYTQNVGLLEETFCPMEDAAAEPEPEATSSEEERMDLLVSEAKVRLKSDNENADSFKERIATILAQKLKKLHESQSTYEDDKPADQSQDDHTTPVKLSTKQKMEKAAKFNELLGKMMRARSEDDLKPCRDLIEQLFGKEDGSSMDKSNRMETEPSNQESAAATAQPYSFPKLCTRIEVDEDFAAKVDAEFSSLSEVVQL

SEQ ID NO: 77618 - protein, 100 aa, Setaria italica
  Transcript Sequence Number=SeqID_11644
  Gene Ontology: Mol. function=transporter activity; Cellular component= intracellular; Biological process=transport
  Homolog annotation: Hit_ID=B6TDP3; Match level="QueryCoverage=82%, HitCoverage=32%, E-value=6e-29, Identity=82%"; Hit description =Polyphosphoinositide binding protein Ssh2p
  Pfam annotation: Domain name=CRAL_TRIO_N; Domain location=6-80; Score= 13.6; E_value=0.0035; Accession=PF03765.7; Description=CRALTRIO, N -terminus
MDSQQTVKTNGHGRHNDGDAAEWKQVAELRAVTEAQDPACKEEDDYMLRRFLRARDHHIGKASAMLLKYLKWKPTAKPNGSISEAEVAHELSQGKLCLQG

SEQ ID NO: 77619 - protein, 151 aa, Setaria italica
  misc_feature (56)..(56): Xaa can be any naturally occurring amino acid
  Transcript Sequence Number=SeqID_11645
  Gene Ontology: Mol. function=transporter activity; Cellular component= intracellular; Biological process=transport
  Homolog annotation: Hit_ID=B6TDP3; Match level="QueryCoverage=85%, HitCoverage=52%, E-value=4e-44, Identity=72%"; Hit description =Polyphosphoinositide binding protein Ssh2p
MKNCMPTFTDLLTISDVNCILLNESYQEEDDYMLRLSSRPDHHIGKASAMLLKYLXKWKPTAKPNGSISEAEVAHELSQGKLCLQGQDRQGRPMIYGFGARHHPSNRDLDEFKRYVVYVLDATVARLPPGQEKFAAVADLKGWGYSNCDIR

SEQ ID NO: 77620 - protein, 141 aa, Setaria italica
  Transcript Sequence Number=SeqID_11646
  Gene Ontology: Mol. function=transporter activity; Cellular component= intracellular; Biological process=transport
  Homolog annotation: Hit_ID=B6TDP3; Match level="QueryCoverage=87%, HitCoverage=50%, E-value=2e-58, Identity=85%"; Hit description =Polyphosphoinositide binding protein Ssh2p
  Pfam annotation: Domain name=CRAL_TRIO; Domain location=6-139; Score =46.2; E_value=1.3e-10; Accession=PF00650.12; Description=CRALTRIO domain
DKKTDHPSNRDLDEFKRYVVYVLDATVARLPPGQEKFAAVADLKGWGYSNCDIRAYLAALDIMQNYYPERLGRVFLVHVPYVFMAAWKIVYPFIDDNTKKKFVFVSDKDLDRTLREAIDDAQLPEMYGGKLKLASPAPAAK

SEQ ID NO: 77621 - protein, 103 aa, Setaria italica
  Transcript Sequence Number=SeqID_11647
  Gene Ontology: Mol. function=protein serine/threonine kinase activity; Biological process=protein amino acid phosphorylation
  Homolog annotation: Hit_ID=B9A1H1; Match level="QueryCoverage=91%, HitCoverage=8%, E-value=1e-31, Identity=64%"; Hit description =Putative LRR-kinase protein
DFRALVFEYMANGSLDRWIHSNSESQNGQGKLSLSQMLDIAVDIVDALDYLHNDCQPPVIHCDLKPSNILLNQDMRARLGDFGIARVLDEATSKHHMDYSNYQ

SEQ ID NO: 77622 - protein, 116 aa, Setaria italica
  Transcript Sequence Number=SeqID_11648
SNCMSSNNQPSVALHHNSLMENFHPDPWRTSPYTFHLLSQLALPLSTDAMKFRSNHRHSRQPPQLQSPLSAGSTFSSQGEHCRCMCRPQTAHLRSGGGSVFWHLLTCYHYSRGRVF

SEQ ID NO: 77623 - protein, 434 aa, Setaria italica
  Transcript Sequence Number=SeqID_11649
  Gene Ontology: Mol. function=metal ion binding; Biological process =proteolysis
  Homolog annotation: Hit_ID=Q53PX0; Match level="QueryCoverage=98%, HitCoverage=22%, E-value=1e-148, Identity=60%"; Hit description=PHD -finger family protein, expressed
  Pfam annotation: Domain name=PHD; Domain location=90-140; Score=11.1; E_value=0.0016; Accession=PF00628.21; Description=PHD-finger
WNPRTLAKVEALPITNAATTNIISVPAQPKTKAKKSKSEKPKKPKKVQAITYFGLVWKKNKNDKDDGNEFRANDVILKSKDGIGSSIKPTCCLCNKTYSPEFLYVRCERCRNWFHGDALQLEDERIDELVAYRCCRCRRRAIPQCPHSDDYIKPEPECSEQTVATSSQSTMLSSEATFALVDQDPLLASYGIVEPTGEETVDADLSTNMVSFAPGSNKKLSIRRAQAKNCEYLDQARSANEYYIQNQSQGNGNINFSHMNEYSFSEADSVDASELLGWDFSQGTAYAAPPESTATHQANDTSCGNFAIDQYEPQTYFSFTELLEADDTQLDSAFGMSTNLQGNGNCTGNFDQQGAGFDEMYFMIEDGASNMNFPADDPSPDVVACHKCQNTEPPPDLKCAVCNLQIHRQCSPWDENVPPAASGDWTCGGCREWR

SEQ ID NO: 77624 - protein, 111 aa, Setaria italica
  misc_feature (85)..(111): Xaa can be any naturally occurring amino acid
  Transcript Sequence Number=SeqID_11650
YTPGSVAWAFVERLVLVVFCLLMWLCFWLHIVFPIALCCSYGFCQVCVNAVCKRCLFLPSVFNKRSRSLPPTLVISQEKKKKNKXXXXXXXXXXXXXXXXXXXXXXXXXXX

SEQ ID NO: 77625 - protein, 183 aa, Setaria italica
  Transcript Sequence Number=SeqID_11651
  Gene Ontology: Mol. function=structural molecule activity; Cellular component=chloroplast; Biological process=iron-sulfur cluster assembly
  Homolog annotation: Hit_ID=B6TC06; Match level="QueryCoverage=100%, HitCoverage=100%, E-value=2e-64, Identity=70%"; Hit description=Iron- sulfur assembly protein IscA
  Pfam annotation: Domain name=Fe-S_biosyn; Domain location=64-156; Score=136.7; E_value=7.3e-38; Accession=PF01521.12; Description=Iron- sulphur cluster biosynthesis
  Subcellular localization annotation: CTP_CleavageSite=51; ConfidenceScore=5.76e-01
MALASGTSSTLGRPAGTARPHLAVSSSAASSIRFPRRGGRAVSLRISSPPAAAAAASGSIAPAISLTEKALKHLNKMRAERNEDLCLRIGVRQGGCSGMSYTMEFENRANASPDDSIVEYDGFAIVCDPKSLLFMFGMELDYSDSLIGGGFSFQNPNATKTCGCGKSFATSKETESAATACNN

SEQ ID NO: 77626 - protein, 64 aa, Setaria italica
  Transcript Sequence Number=SeqID_11652
  Gene Ontology: Mol. function=2 iron, 2 sulfur cluster binding; Biological process=oxidation reduction
  Homolog annotation: Hit_ID=B6U301; Match level="QueryCoverage=96%, HitCoverage=22%, E-value=2e-19, Identity=77%"; Hit description =Rieske domain containing protein
MSVMMIVDEDVGGFGFTSDNELINGKAAIIGFLLLIDFELLTGKGLLKGTGFLDFIYAVSGAFN

SEQ ID NO: 77627 - protein, 279 aa, Setaria italica
  misc_feature (84)..(84): Xaa can be any naturally occurring amino acid
  misc_feature (182)..(182): Xaa can be any naturally occurring amino acid
  Transcript Sequence Number=SeqID_11653
  Gene Ontology: Mol. function=2 iron, 2 sulfur cluster binding; Cellular component=chloroplast envelope; Biological process =oxidation reduction
  Homolog annotation: Hit_ID=B6U301; Match level="QueryCoverage=94%, HitCoverage=94%, E-value=1e-90, Identity=68%"; Hit description =Rieske domain containing protein
  Pfam annotation: Domain name=Rieske; Domain location=71-180; Score= -2.0; E_value=0.0082; Accession=PF00355.18; Description=Rieske [2Fe -2S] domain
  Subcellular localization annotation: CTP_CleavageSite=10; ConfidenceScore=5.23e-01
MAAITTTATTAAASSSFLRRRPAGHPLVSLRAWHGHCHHRHSCRLACRAAEVSGAEPSAAPATAEAGGGAVWVPVVPLAALPRXGERRVIVQDGEEILLLWYKDQVFAIENRSPAEGAYTEGLLNAKLTQDGCIVCPSTESTFDLRTGEIKEWYPKNPVLRALTPALRKLFTYRVKTDNENXIYISISGADSAASAEIIFSGKAQPGVTASDVNVEEVRMIVDEDVGGFGFTSDNELINGKAAIIGFLLLIDFELLTGKGLLKGTGFLDFIYAVSGAFN

SEQ ID NO: 77628 - protein, 388 aa, Setaria italica
  Transcript Sequence Number=SeqID_11654
  Gene Ontology: Mol. function=nucleoside-triphosphatase activity; Cellular component=intracellular; Biological process=regulation of transcription, DNA-dependent
  Homolog annotation: Hit_ID=B9S5U3; Match level="QueryCoverage=93%, HitCoverage=7%, E-value=6e-27, Identity=27%"; Hit description=ATP binding protein, putative
NIFTGAHKNVPLATREMEELLPLATREMEEHFYENCQLVDSLREDMQVMRQQEISMRSVKEVLISRLEELLDKGKMAIENPREVEDDHKICSDILPELEGSYEGILKETFMLAVGVLGKLTDFEICNNGAEDSPVGTITSWKDVLQSYTVNLKLNHICDASEKLCITVKRLVDCKPEIRSNIEVHLMHLHAWLGVILSSAEGILSELLEAHRTTAEITHALGDLFIYLFVEGFGSTEDTTEAADDEQQQDAVETGTGLGDGDGGKSVSSKIEDPSEIEDKATDATHKPDQAPKNDNEAVEMKEDFDADLSDVSEDPEGKESGTEDEDEDMNLDSQMGDTGDSSEVVGKKSWDKDEDDDPKTSTEKYDSSSSVRAEKNDRELRAKDDGS

SEQ ID NO: 77629 - protein, 84 aa, Setaria italica
  Transcript Sequence Number=SeqID_11655
  Homolog annotation: Hit_ID=B6SV26; Match level="QueryCoverage=94%, HitCoverage=13%, E-value=4e-38, Identity=93%"; Hit description=Amino acid permease
QQQQQEDVRKSSHDLPPSRKASSLQRIPEDHRPIVGGHEVGPYRQCSYIQGVMNGVNVLCGVGILSTPYAVKQGGWLGLVILAV

SEQ ID NO: 77630 - protein, 197 aa, Setaria italica
  Transcript Sequence Number=SeqID_11656
  Gene Ontology: Mol. function=transferase activity, transferring glycosyl groups; Biological process=metabolic process
  Homolog annotation: Hit_ID=B6SXW3; Match level="QueryCoverage=97%, HitCoverage=39%, E-value=3e-76, Identity=70%"; Hit description =Cytokinin-O-glucosyltransferase 2
GMSKHMRLRDYPSFLRTTDPGDKMLEYGLHEMEHCKDAAAIIYNTFDELEQPALDALRADFTPAAYTVGPLSLLAEQLVPAGGPLDALGSSLWKEDSTCLEWLGGRSARSVVYVNYGSITVMTNQQLLEFAWGLAGSGYDFLWVIRPDLVAGDAAVLPPEFMEATRGKGLLASWCPQEAVLRHEAVGVFLTHKVGVR

SEQ ID NO: 77631 - protein, 38 aa, Setaria italica
  Transcript Sequence Number=SeqID_11657
PAAPGRPAPWRPRLDRIDESIGRASMRSASSRSACSDA

SEQ ID NO: 77632 - protein, 56 aa, Setaria italica
  Transcript Sequence Number=SeqID_11658
  Homolog annotation: Hit_ID=B9R865; Match level="QueryCoverage=89%, HitCoverage=5%, E-value=6e-09, Identity=51%"; Hit description=Auxin response factor, putative
AGETDWGSLVKRPMLRVPENIRGDLSYAPTLCSEPLMKMLLRPQMVNLPGNHLTAG

SEQ ID NO: 77633 - protein, 86 aa, Setaria italica
  Transcript Sequence Number=SeqID_11659
  Gene Ontology: Mol. function=calcium ion binding
  Homolog annotation: Hit_ID=B6T0R9; Match level="QueryCoverage=100%, HitCoverage=38%, E-value=5e-40, Identity=90%"; Hit description =Calcium binding EF-hand protein
  Pfam annotation: Domain name=Caleosin; Domain location=1-77; Score =6.1; E_value=1.3e-08; Accession=PF05042.5; Description=Caleosin related protein
FEEIFTKHAKVRPDALTSMEIEEMILANRDPLDPQSWGAPEGEWGLIYKLASDKQGFLHKDSARGIYDGSVFYMLEEQRTSSRSDM

SEQ ID NO: 77634 - protein, 93 aa, Setaria italica
  Transcript Sequence Number=SeqID_11660
  Gene Ontology: Mol. function=calcium ion binding
  Homolog annotation: Hit_ID=B6T0R9; Match level="QueryCoverage=67%, HitCoverage=31%, E-value=1e-14, Identity=56%"; Hit description =Calcium binding EF-hand protein
MECYTFCEVHSHSHTSGEEGISGGKLVMAGRQRLPAAAVSALLLLWIVSCDHVEASIDFANMTALEKHVEFFDRDKDGIITASEIFEGDWLKY

SEQ ID NO: 77635 - protein, 202 aa, Setaria italica
  misc_feature (51)..(51): Xaa can be any naturally occurring amino acid
  misc_feature (72)..(72): Xaa can be any naturally occurring amino acid
  misc_feature (151)..(151): Xaa can be any naturally occurring amino acid
  Transcript Sequence Number=SeqID_11661
  Gene Ontology: Mol. function=calcium ion binding
  Homolog annotation: Hit_ID=B6T0R9; Match level="QueryCoverage=79%, HitCoverage=75%, E-value=3e-60, Identity=68%"; Hit description =Calcium binding EF-hand protein
  Pfam annotation: Domain name=Caleosin; Domain location=56-198; Score =148.9; E_value=1.6e-41; Accession=PF05042.5; Description=Caleosin related protein
TLLVEGSNSHSHTSGEEGISGGKLVMAGRQRLPAAAVSALLLLWIFSCDHXVEASIDFANMTALEKHVEFFXRDKDGIITASEIFEGYVAIGCDAAFARASAASISAGVGPITSPVEAPLPHLSIYIEYIHRAMHGSDTGAYDAKGRFVPXKFEEIFTKHAKVRPDALTSMEIEEMILANRDPIKNPTSTIGVDNLERGNRG

SEQ ID NO: 77636 - protein, 212 aa, Setaria italica
  Transcript Sequence Number=SeqID_11662
  Gene Ontology: Mol. function=calcium ion binding
  Homolog annotation: Hit_ID=B6T0R9; Match level="QueryCoverage=97%, HitCoverage=93%, E-value=5e-93, Identity=78%"; Hit description =Calcium binding EF-hand protein
  Pfam annotation: Domain name=Caleosin; Domain location=30-203; Score =300.6; E_value=3.4e-87; Accession=PF05042.5; Description=Caleosin related protein
TGHLVAYPAAAVSALLLLWIFSCDHVEASIDFANMTALEKHVEFFDRDKDGIITASEIFEGYVAIGCDAAFARASAASISAGVGPITSPVEAPLPHLSIYIEYIHRAMHGSDTGAYDAKGRFVPEKFEEIFTKHAKVRPDALTSMEIEEMILANRDPLDPQSWGAPEGEWGLIYKLASDKQGFLHKDSARGIYDGSVFYMLEEQRTSSRSDM

SEQ ID NO: 77637 - protein, 41 aa, Setaria italica
  Transcript Sequence Number=SeqID_11663
SNRHKTCTIKRESRAIYIAFLWSMSCVDLNREQWTALDASD

SEQ ID NO: 77638 - protein, 126 aa, Setaria italica
  Transcript Sequence Number=SeqID_11664
  Gene Ontology: Mol. function=small conjugating protein ligase activity; Biological process=regulation of protein metabolic process
MKFTFGRHLSLVSIPTPMSMSKVALGSRLIIISAAEESRFQKYDAIVDSLFQHFEDLVGGHFRERGRAILAACKYYMEGHEVGSKVPEEEDKKESQDGEGSSSSSTALTQQNKPALRGNRSASFKS

SEQ ID NO: 77639 - protein, 424 aa, Setaria italica
  Transcript Sequence Number=SeqID_11665
  Gene Ontology: Mol. function=small conjugating protein ligase activity; Biological process=regulation of protein metabolic process
  Homolog annotation: Hit_ID=B9T0E4; Match level="QueryCoverage=56%, HitCoverage=37%, E-value=3e-86, Identity=62%"; Hit description =Ubiquitin conjugating enzyme, putative
  Pfam annotation: Domain name=UQ_con; Domain location=150-291; Score =95.0; E_value=2.6e-25; Accession=PF00179.18; Description=Ubiquitin -conjugating enzyme
CWHALQDSSSNDQVGSSTENKSLEASGPELKFEYGKNEEEDYYFEDDDDDCYDDDNDGSDYELDPADYNQLLADKFDNLDLPPGVEATVPWLQKVESRDVPGKFKSMSEIEEEIAKKYNFFKQFDTVEDFSDHHYAKNSVGKARKEWAKRIQHEWSLLEKDLPALIYVRVSENRMDLLRAVMIGPQGTPYHDGLFFFDAQFPASYPATPPVVYYHSGGLRLNPNLYACGKVCLSLLGTWQGSSCEKWNSAQSTMLQVLISIQALVLNEMPYFNEPGYERYANSPEGLRAALDYNDTTFQYSCRTMLYSLRRPPQHFEDLVGGHFRERGRAILAACKYYMEGHEVGSKVPEEEDKKESQDGEGSSSSSTALTQQNKPALRGNRSASFKSNLEVLFEELLMEFNVKGADTAKFREQKLLKNQQAAA

SEQ ID NO: 77640 - protein, 472 aa, Setaria italica
  Transcript Sequence Number=SeqID_11666
  Homolog annotation: Hit_ID=Q5W7D1; Match level="QueryCoverage=30%, HitCoverage=26%, E-value=5e-10, Identity=36%"; Hit description =Unknow protein
FNVVARLMGLDDNADLPKPLPSNRRTFPDGHLSATLARVNNQMSFEKRASSMEDVEYKDVYEVGYQPPRGECLSNESPRRPNEDHDKRRMDLVRQKFVEAKQLASHDNLLQSKEFHDALEVLNSNKDLFLKFLEEPNSLFAKQSGELHSAPTSPQRKRITVLKPSKSVDTRDDKAIKRQKNHAVDGNRVERSNSHKSDAAHVKVERLPKHTRIVVLKPTSAIASMEQFDQNYHADLDDSEAPAISRRLSDEIDWSVHGMCRRHNESNPMSAYRPYDQYAEEEGASLSDSDIGTPTSRHSWEYIYRFSNPYFGSSLSHASCSPESHVTKEAKKYTSDRWAIVPSSEITQGKVLVRRSLSTLGEMLAMPDMKKEEVADQASPDATSQLCSNEPTVGVSSNCAVGDGEGESSLRKISRSRSVPVSSSAFDSLRLDGGCSEAQHKESTASKDVKPKNGKSSLKGKISSFFSKRKKT

SEQ ID NO: 77641 - protein, 437 aa, Setaria italica
  Transcript Sequence Number=SeqID_11667
LDDQASPDATSQLCSNEPTVGVSSNCAVGDGEGESSLRKISRSRSVPVSSSAFDSLRLDGGCSEAQHKESTASKDVKPKNGKSSLKGKISSFFSKRKKTEKEKVNPSPLGTPNSQVPSASTVVIDKSDVPEHVCTNLQNGVAFGYLEERFENGPTVVPLDELEAPSTSKSPVSLEKALPFEIRNSHFDQPSPTSVLDAQFDDVNEKSPISSERAITVKQEPLSRSLPIGSIARTLSWDDASQEASLCCTKGDSHEQEQYEFVEKILTSVGFCNEKAQDIFVRWHSLDCPLDPVVLDQLLERKVEDAKCRERRSNQRLLIDSVNAALLDIGQRKLWGAYPCTARYSNAPRVATCDVLVTDEAWRLVKSWLFDDENDIAGLGDNAGLAADWVVDKEIHGKGWSEMLRSEVDEISKEICGDVLSELVGEAFSELADAECH

SEQ ID NO: 77642 - protein, 101 aa, Setaria italica
  Transcript Sequence Number=SeqID_11668
  Subcellular localization annotation: CTP_CleavageSite=74; ConfidenceScore=5.59e-01
RCRSRRRRGRLAPSSHPRPSPLAHRPYPPSPSPSSPRAPLPRHSAPSRPPTATPGSSRGGRTAPGVGTLGGRPRRRPGGGGARRRAWGTAGREDRRRKQRS

SEQ ID NO: 77643 - protein, 92 aa, Setaria italica
  Transcript Sequence Number=SeqID_11669
MESLGYQKEGARPSRSTGKAKDDVVKASNKDETGSTDNSKDEAGSEDKDSKDEVKSSDVDGSKTNGLSTKRKPKEKEDESSEEEEKGSAKIY

SEQ ID NO: 77644 - protein, 66 aa, Setaria italica
  Transcript Sequence Number=SeqID_11670
RIAASDKDTDEDISLKEMVSPTKMDKSKRPASSFCNFILALCCFFPDSPSAALVDKAWHHLYQPPL

SEQ ID NO: 77645 - protein, 261 aa, Setaria italica
  misc_feature (12)..(12): Xaa can be any naturally occurring amino acid
  misc_feature (17)..(17): Xaa can be any naturally occurring amino acid
  Transcript Sequence Number=SeqID_11671
  Gene Ontology: Mol. function=DNA binding; Cellular component=nucleus
  Homolog annotation: Hit_ID=B9RNW7; Match level="QueryCoverage=83%, HitCoverage=22%, E-value=1e-41, Identity=43%"; Hit description =Nucleic acid binding protein, putative
SDAETWLSRVDXQSPDXDMHNTLRPTMAILITNELLEHPDPNVKVAVTSCLTEVTRITAPEAPYDDDVMKDVFKRIVEAFAELDDMNSPSFQRRVSILDSVARVRCCVLMLDLDLDHLILDMFRHFFKTASMGHSEQVTNCMETIMVYVIQESDDVHAELASCLLQNLTKEAQETLPASFGIAERVLGLCKDKLKPVLLELLKGTPLDDYSNVVTLLFQDAGENNVDASGKDMAAEGKLSEKSVSDESPRETSKLEQEYLE

SEQ ID NO: 77646 - protein, 282 aa, Setaria italica
  Transcript Sequence Number=SeqID_11672
  Gene Ontology: Mol. function=DNA binding; Cellular component=nucleus
  Homolog annotation: Hit_ID=Q761Y0; Match level="QueryCoverage=49%, HitCoverage=28%, E-value=1e-13, Identity=47%"; Hit description=BRI1 -KD interacting protein 135 (Fragment)
SDYDESPQETSKLEQDVNCVGQDGTSPISTPATTISNVGAPVDNVKSPGGPASSKQNQEVPSGDEQIKISDQLISGDKEVPEPVTAENEKLSDISSKKSHKLGSSTGPEMTEQSKVVKDNESLVASEELSPETNDGDKKQLTETSNRAAADSSKPVDTKPAVVKPKRGRPPAAKSQEKKSFGKKQGSNIESAKVDAVSDSGGRATRRLNKDDAKSLSTKAAEGESGKKQHKASMKLQKEDAASDKDTDEDISLKEMVSPTKMDKSKGQQEDSWGSKRNICRK

SEQ ID NO: 77647 - protein, 339 aa, Setaria italica
  Transcript Sequence Number=SeqID_11673
  Gene Ontology: Mol. function=DNA binding; Cellular component=nucleus
  Homolog annotation: Hit_ID=Q761Y0; Match level="QueryCoverage=71%, HitCoverage=51%, E-value=3e-48, Identity=49%"; Hit description=BRI1 -KD interacting protein 135 (Fragment)
  Pfam annotation: Domain name=LBR_tudor; Domain location=94-147; Score= 8.8; E_value=0.095; Accession=PF09465.2; Description=Lamin-B receptor of TUDOR domain
VGRFLRRLNKDDAKSLSTKAAEGESGKKQHKASMKLQKEDAASDKDTDEDISLKEMVSPTKMDKSKGQQEDSGGSKRKHLQEAEEATPSKKNKMLDENLVGSRIKVWWPDDKMFYEGVVESFDASSKKHKVAYDDGDVEVLMLRKEKWECIVEEQDDPDAASNMPRGRRAKGSSGQQMKEVKTGTPQSGSDSKNPPKKRGRPKGVRSSNNTPNSDSPVTPSKLKGQGAEKDNQEAPKTGSNSKKEGARPSRSTGKAKDDVVKASNKDETGSTDNSKDEAGSEDKDSKDEVKSSDVDGSKTNGLSTKRKPKEKEDESSEEEEKGSAKTFIRKKRRRKSRN

SEQ ID NO: 77648 - protein, 86 aa, Setaria italica
  Transcript Sequence Number=SeqID_11674
  Gene Ontology: Mol. function=nucleoside-triphosphatase activity
  Homolog annotation: Hit_ID=B6THD1; Match level="QueryCoverage=100%, HitCoverage=16%, E-value=8e-27, Identity=70%"; Hit description=Cell Division Protein AAA ATPase family
MEMVLDWRSLGSLLATLMVFRTAMRDFLPPEAEMCLRRLLARVAAAFRPPSGTILIDEADGASGGANDLYDSAQLYLGERCLATAP

SEQ ID NO: 77649 - protein, 97 aa, Setaria italica
  misc_feature (59)..(59): Xaa can be any naturally occurring amino acid
  Transcript Sequence Number=SeqID_11675
FRLRYSPVSFPCTQTWSGGLYRSVSGKPAYSNDDLQGDGSDGAVTAEFFLSCSSVSAAXGALNVDAGKVFALNMQIMVAACLVLIYHFFSSCLYAIW

SEQ ID NO: 77650 - protein, 150 aa, Setaria italica
  misc_feature (26)..(26): Xaa can be any naturally occurring amino acid
  misc_feature (41)..(41): Xaa can be any naturally occurring amino acid
  Transcript Sequence Number=SeqID_11676
  Subcellular localization annotation: CTP_CleavageSite=14; ConfidenceScore=5.15e-01
GSSASGPVSQDDVLRMLVRSSRCSRXLALHLCSGASGFHVXSRRGWSRFRPVDGAVVVTIGDQLFVSIGGLYRSVSGKPAYSNDDLQGDGSDGAVTAEFFLSCSSVSAAKDALNVDAGKVFALNMQIMVAACLVLIYHFFSSCLYAVARQ

SEQ ID NO: 77651 - protein, 82 aa, Setaria italica
  Transcript Sequence Number=SeqID_11677
LAAVAEGGDPAYGHLLEAAAPAGWFLRNGDGDGDALVGAPEEQAAAGEEEVVGQQQERGGEDADDGHGQDHEAAAGHRRRLH

SEQ ID NO: 77652 - protein, 101 aa, Setaria italica
  Transcript Sequence Number=SeqID_11678
  Gene Ontology: Mol. function=protein binding; Cellular component =mitochondrial inner membrane; Biological process=intracellular protein transmembrane transport
  Homolog annotation: Hit_ID=B6TRD8; Match level="QueryCoverage=100%, HitCoverage=28%, E-value=3e-39, Identity=80%"; Hit description =Import inner membrane translocase subunit TIM50
DLSKLNRNPAQVIYISAHALESSLQPENSVQIKPWKLENDDTQLLDLIPFLEYVAMARPSDIRAVLASYQGSDIAAEFIERSSSQQRRMQEQKQSGRIWRR

SEQ ID NO: 77653 - protein, 337 aa, Setaria italica
  Transcript Sequence Number=SeqID_11679
  Gene Ontology: Mol. function=unfolded protein binding; Cellular component=mitochondrial inner membrane; Biological process =intracellular protein transmembrane transport
  Homolog annotation: Hit_ID=B6TRD8; Match level="QueryCoverage=91%, HitCoverage=87%, E-value=1e-143, Identity=82%"; Hit description =Import inner membrane translocase subunit TIM50
  Pfam annotation: Domain name=NIF; Domain location=143-304; Score =100.2; E_value=6.9e-27; Accession=PF03031.10; Description=NLI interacting factor-like phosphatase
  Subcellular localization annotation: CTP_CleavageSite=12; ConfidenceScore=5.61e-01
MAASSSSSPSTAAAAAAATAAASEASSTSGDPSSQPPPAARKLWGALKVAAFAAVSAAVGGTGYASYAYSLEELDQMTREFRKKSKHPIPEDASGFEKFQAMAYAAAMKVPVAAIEGYLDVRSQIEDQIRGFSEPVSDKLLPDRAPQEQHILTLVLDLNETLVYSDWKRERGWRTFKRPGVDAFLEHLGRFYEIVVYSDQLSMYVDPVVDRLDPKGNIRHRLSRVATKYEHGKHYRDLSKLNRNPAQVIYISAHALESSLQPENSVQIKPWKLENDDTQLLDLIPFLEYVAMARPSDIRAVLASYQGSDIAAEFIERSKEHQRRMQEQKQSGRIWRR

SEQ ID NO: 77654 - protein, 151 aa, Setaria italica
  Transcript Sequence Number=SeqID_11680
SGKKLPKLRSLEPFKVGGAEKNSPPQLHPRTWGHLTLLPTEQHGEAGEERGGSTMERGGVGRDSAEEPESGAARAHQPSQLTVQDSHAERPSESKLFSQSPIAQPQRRHHGVRQRRWGSWVSETHASILCGLHSPAAMHLIAFLNQSIHDV

SEQ ID NO: 77655 - protein, 294 aa, Setaria italica
  misc_feature (257)..(257): Xaa can be any naturally occurring amino acid
  misc_feature (281)..(281): Xaa can be any naturally occurring amino acid
  Transcript Sequence Number=SeqID_11681
  Gene Ontology: Mol. function=heat shock protein binding; Cellular component=intracellular; Biological process=response to stress
  Homolog annotation: Hit_ID=C3SA38; Match level="QueryCoverage=94%, HitCoverage=44%, E-value=1e-105, Identity=69%"; Hit description=Heat shock protein
  Pfam annotation: Domain name=DnaJ; Domain location=12-77; Score =100.8; E_value=4.6e-27; Accession=PF00226.23; Description=DnaJ domain
MASAAGGAPKRCYYEVLGLPRDCSPTDIKLAFRRLALSLHPDKQGPGADLAAATAAFQELQHAHSVLSDPQERAYYDSHRSQILFSDASAAGAKSASPVPDLFAFFSSSAFSGFSDTGRGFYKVYGDVFDRVFAQELAYARRMGVPEPAAPPVIGNLDSPYTQVTAFYNYWLGFGSVMDFGWAAEWDAARGENRRVRRLMEEDNKKAMRKARREYNDAVRGLAAFCKKRDKRVVDMALKKKAEEEKKKAEEKERKKXEEEKRKKERAMAYQEPDWARVEEXEGLYDDEEEEEMK

SEQ ID NO: 77656 - protein, 494 aa, Setaria italica
  misc_feature (462)..(462): Xaa can be any naturally occurring amino acid
  Transcript Sequence Number=SeqID_11682
  Gene Ontology: Mol. function=GTPase activator activity; Cellular component=intracellular; Biological process=biological_process
  Homolog annotation: Hit_ID=Q2HUD0; Match level="QueryCoverage=99%, HitCoverage=44%, E-value=0.0, Identity=71%"; Hit description=WD40 -like
  Pfam annotation: Domain name=RIC1; Domain location=350-493; Score =68.7; E_value=2.1e-17; Accession=PF07064.5; Description=RIC1
  Subcellular localization annotation: CTP_CleavageSite=31; ConfidenceScore=5.07e-01
FGWNFRGLTVWSVSGCRLMCTIRQTGSNSASSPMVKPSALKFEPLMGGTSHIQWDDNGYKLFAVEESLSERVLAFSFAKCCLNRGLSGTTYSHQVLYGDDRILLVQPDDADELKLLHLNVPVSYISQNWPVLHVVASNDGMYLAVAGSHGLVLYDLRNKRWRFFGDVTQEQKIQCKGLLWLGKIVIVCNYVESSNTYELLFFPRYHLDYSSLLYRKPLLGRPIAMDVFQNYILVTYSPFDVHIFHVVISGELSPASNPVLQLSTVRELSIMSPKSPPVSMRFIPDQNDKGALKQNASGSSDLLSEQPSRCLILRTNGELSVLDMDDGHEHALTNSVELFWVTCSQFEEKGSLIKEVSWLDYGHRGMQVWYPSHGADPFKQEDFLQLDPELEFDREVYPLGLLPNVGVVVGVSQRMSFSTAEFPCFEPSPQAQTILHCLLRHLLQRDKIEEALRLANLSAEKXPHFSHCLEWLLFTVFDADNNTKDQSRLTKETK

SEQ ID NO: 77657 - protein, 122 aa, Setaria italica
  Transcript Sequence Number=SeqID_11683
  Homolog annotation: Hit_ID=Q2HUD0; Match level="QueryCoverage=91%, HitCoverage=9%, E-value=1e-46, Identity=83%"; Hit description=WD40 -like
DLVEYLQRERLGSARLENFASALELIGQKLQMDTLQSRLDAEFLLAHMCSVKFKEWIVVLATLLRRAEVLVDLFRHDLRLWKAYSITLQSHDVFREYLDLLNMLEEQLSSVSGLTLQNGPLS

SEQ ID NO: 77658 - protein, 374 aa, Setaria italica
  misc_feature (27)..(27): Xaa can be any naturally occurring amino acid
  Transcript Sequence Number=SeqID_11684
  Gene Ontology: Mol. function=molecular_function; Cellular component =integral to membrane; Biological process=biological_process
  Homolog annotation: Hit_ID=Q2HUD0; Match level="QueryCoverage=95%, HitCoverage=32%, E-value=1e-166, Identity=82%"; Hit description=WD40- like
  Pfam annotation: Domain name=RIC1; Domain location=5-252; Score =308.0; E_value=2e-89; Accession=PF07064.5; Description=RIC1
FLSSSPIVLVLFCIVLGHELEFDREVXIPLLPVGVGQRISTAEFPCFEPSPQAQTILHCLLRHLLQRDKIEEALRLANLSAEKPHFSHCLEWLLFTVFDADISRPSASKNQVLQKVNSPKKSLLEKTCDLLRNFPEYMDVVVSVARKTDGRHWADLFSAAGRSTEMFEECFQRRWYRTAACYILVIAKLEGPAVSQYCALRLLQATLDESLYELAGELVRFLLRSGRDFENATSDSEKLSPRFLGYFLFRSPYKRQSSDLKSNSMKELSPHIASVMNILESHASYLMSGKELSKLVAFVKGTQFDLVEYLQRERLGSARLENFASALELIGQKLQMDTLQSRLDAEFLLAHMCSVKFKEWIVVLATLLRCKEFT

SEQ ID NO: 77659 - protein, 335 aa, Setaria italica
  misc_feature (111)..(111): Xaa can be any naturally occurring amino acid
  Transcript Sequence Number=SeqID_11685
  Gene Ontology: Cellular component=integral to membrane
  Homolog annotation: Hit_ID=Q2HUD0; Match level="QueryCoverage=98%, HitCoverage=27%, E-value=7e-87, Identity=51%"; Hit description=WD40 -like
LAFAITSNFVCDSKSMLLGLSNGHVQVVSWNAEFSDSFKLGCSVCSSEKPTAVIDALVFDPPSLRENSDARPAPCCTGNSSIVHVELSVLDMDDGHEHFVSALLCHFDQEXSALKQGGSLYSGCHIALCTVGKKGLKQPGSIRVERWLNTDDAMCTSVASEQQILAVGCSRGVVELYDLAENTRHIRTISLYDWGYSVEDTGPVACISWTPDNCAFAVGWKFRGLTVWSVSGCRLMCTIRQTGSNSASSPMVKPSALKFEPLMGGTSHIQWDDNGYKLFAVEESLSERVLAFSFAKCCLNRGLSGTTYSHQVLYGDDRILLVQPDDADELKLLHL

SEQ ID NO: 77660 - protein, 529 aa, Setaria italica
  Transcript Sequence Number=SeqID_11686
  Gene Ontology: Mol. function=methyltransferase activity; Cellular component=cytoplasm; Biological process=peptidyl-arginine methylation
  Homolog annotation: Hit_ID=Q5VS72; Match level="QueryCoverage=98%, HitCoverage=71%, E-value=0.0, Identity=75%"; Hit description=Protein arginine N-methyltransferase 7
SYFLQHAHDELLVKNPKTVPYRAITYGVLVESTFLWKMHDLHSSEANAEDGVWLTPSGIENILSVKPQQHAMQCDALADEIRLLSEPFKVFEFDFWKRPDSHRETKIEIKATADGHAHAIISWWVLQLDSAGSVFYSTAPRWVRQLSGVDLPQCVNGMKDWCDHWKQCVWFIQGTGAPAMKDQTLSLRASHDETSISYHLNMNDEVSSRSPKNDHLTLLPERIALYGDKAWRSALIGAVRNATSGRSSPTCIVADDSVLLALIVSSLLPSSTVITMFPGLRDKGFNYLRAVADANNLSMDRIKVIGKKASSLTTNDLKHEKVNLVVGEPFYLGSEGMLPWQNMRFWNERTLLDPLLSEDAFIMPCKGILRLCAMSLPDLWRSRCSLKTVEGFDHLVVNDTFGACGDLPREQQGPCLPYYVWQSGYTKKLSKVYSLMDFNFSEPIHSCFGKTKIKFAHDGICHGFAVWIDWVLDEENSTVISTGPESRYWKQGVQLLSRPVQVNPVSSVMHVEAHFDPDTAELVFNSMLS

SEQ ID NO: 77661 - protein, 73 aa, Setaria italica
  Transcript Sequence Number=SeqID_11687
LIWNFLVRIKGQLEAFLFYLKLILYFCVFVVTSFKESCFSDSRNERTLLDPLLSEDAFIMPCKGILRLCAMSL

SEQ ID NO: 77662 - protein, 112 aa, Setaria italica
  Transcript Sequence Number=SeqID_11688
ANHKDAKPQSTMICRVVALQIYTEIMFFTYLASMEASLFFFLNKLTIHCDAALLTWLKCFCSFLLLCCFVFFFFTLRTPFIPPCRSSLPMMEYAMVSQFGLTGYLIVGKISY

SEQ ID NO: 77663 - protein, 122 aa, Setaria italica
  Transcript Sequence Number=SeqID_11689
  Gene Ontology: Mol. function=tyrosine N-monooxygenase activity; Cellular component=endoplasmic reticulum membrane; Biological process=oxidation reduction
  Homolog annotation: Hit_ID=Q43135; Match level="QueryCoverage=99%, HitCoverage=21%, E-value=2e-50, Identity=75%"; Hit description =Tyrosine N-monooxygenase
RVLASEVVCPSRHRWLHDKRAAEADNLTRFVYNLAGGAGSGGAAVDVRHVARHYCGNVVRRLVFNRRYFGEPRPDGGQGPLEVQHVDAVFTSLGLLYSFSVSDYLPWLLGLDLDGHEKMVRG

SEQ ID NO: 77664 - protein, 46 aa, Setaria italica
  Transcript Sequence Number=SeqID_11690
  Gene Ontology: Mol. function=electron carrier activity; Biological process=oxidation reduction
  Homolog annotation: Hit_ID=Q8LGN4; Match level="QueryCoverage=100%, HitCoverage=8%, E-value=5e-18, Identity=93%"; Hit description =Cytochrome P450 monooxygenase CYP72A26
LLEAKLALCMILQRFEFELAPSYTHAPHTVITLHPMHGAQMKLRAI

SEQ ID NO: 77665 - protein, 89 aa, Setaria italica
  Transcript Sequence Number=SeqID_11691
  Subcellular localization annotation: CTP_CleavageSite=75; ConfidenceScore=5.30e-01
VIIKSFPCYDLHTRKHHISPNLNRKRSGLHRPKVSNSNYKTQSSWRKTTGLFGCDPERSNPDRRTQNQAPGCAACARQLSQDQKQTSPI

SEQ ID NO: 77666 - protein, 27 aa, Setaria italica
  Transcript Sequence Number=SeqID_11692
RENLWWGKKNVEQMTEKLGHLTSAEKT

SEQ ID NO: 77667 - protein, 93 aa, Setaria italica
  misc_feature (8)..(8): Xaa can be any naturally occurring amino acid
  Transcript Sequence Number=SeqID_11693
LHLDSMRXTRATLSVSDRPLFGLGMFLGAVAVRHGFDAGCKRAELLAINDTPLYHDKLIRFYTRMGFKAVHEVDGSSITDLAHMLVWGGRGTR

SEQ ID NO: 77668 - protein, 84 aa, Setaria italica
  Transcript Sequence Number=SeqID_11694
  Gene Ontology: Mol. function=enoyl-[acyl-carrier-protein] reductase (NADH) activity; Cellular component=chloroplast; Biological process =oxidation reduction
  Homolog annotation: Hit_ID=B6TFF6; Match level="QueryCoverage=64%, HitCoverage=14%, E-value=2e-13, Identity=68%"; Hit description=Enoyl- [acyl-carrier-protein] reductase [NADH]
SIDILVHSLANGPEVTKPLLETSRRGYLAAISASSYSYVSLLQHFLPIMNPGSAYLLCFAGTHTIILHATNNSASAACYLFFDF

SEQ ID NO: 77669 - protein, 84 aa, Setaria italica
  Transcript Sequence Number=SeqID_11695
  Homolog annotation: Hit_ID=B6TFF6; Match level="QueryCoverage=90%, HitCoverage=20%, E-value=4e-17, Identity=63%"; Hit description=Enoyl- [acyl-carrier-protein] reductase [NADH]
  Subcellular localization annotation: CTP_CleavageSite=67; ConfidenceScore=5.73e-01
LAVKKMSTSAAAGVKMVAARPCISASQGMLASRAAVSRIETTARFASCPKIFCSRPLSSKRTGFVVRAMSGESGPQALPIDSTK

SEQ ID NO: 77670 - protein, 360 aa, Setaria italica
  Transcript Sequence Number=SeqID_11696
  Gene Ontology: Mol. function=enoyl-[acyl-carrier-protein] reductase (NADH) activity; Cellular component=chloroplast; Biological process =fatty acid biosynthetic process
  Homolog annotation: Hit_ID=B6TFF6; Match level="QueryCoverage=98%, HitCoverage=96%, E-value=1e-166, Identity=83%"; Hit description =Enoyl-[acyl-carrier-protein] reductase [NADH]
  Subcellular localization annotation: CTP_CleavageSite=52; ConfidenceScore=5.39e-01
RWWLHPCISASQGMLASRAAVSRIETTARFASCPKIFCSRPLSSKRTGFVVRAMSGESGPQALPIDLRGKRAFIAGVADDNGYGWAIAKALAAAGAEILVGTWVPALNIFETSLRRGKFDESRKLPDGSLMDIVKVYPLDAVYDSPEDVPEDVKSNKRYAGSSNWTVKEVAESVKNDFGSIDILVHSLANGPEVTKPLLETSRRGYLAAISASSYSYVSLLQHFLPIMNPGGASISLTYIASERAIPGYGGGMSSAKAALESDTRVLAFEAGRKGKIRVNTISAGPLGSRAAKAIGFIEKMIEYSYVNAPLQKELLADEVGNTAAFLVSPLASAITGSTVYVDNGLNTMGLAVDSPTITS

SEQ ID NO: 77671 - protein, 112 aa, Setaria italica
  misc_feature (44)..(44): Xaa can be any naturally occurring amino acid
  Transcript Sequence Number=SeqID_11697
  Homolog annotation: Hit_ID=B6SI05; Match level="QueryCoverage=72%, HitCoverage=43%, E-value=2e-31, Identity=79%"; Hit description=Actin associated protein
PAAAPAVVFTPPPPPAPVKVAPPPVQVPPPQYEKASAGGKHDGXASDFFWDAVARVQEAHASLDEYVANWFGLDQSKYQWALNDYYEATGKEVDCVKGGKPKELTTTEVQKV

SEQ ID NO: 77672 - protein, 138 aa, Setaria italica
  Transcript Sequence Number=SeqID_11698
  Homolog annotation: Hit_ID=B6SI05; Match level="QueryCoverage=100%, HitCoverage=73%, E-value=2e-34, Identity=56%"; Hit description=Actin associated protein
  Subcellular localization annotation: CTP_CleavageSite=27; ConfidenceScore=5.44e-01
SDFSTPTPQRADYSPSSSPSPRKPAIPAAAPAVVFTPPPPPAPVKVAPPPVQVPPPQYEKASAGGKHDGSAFGFFWDAVARVQEAHASLDEYVANWFGLDQSKYQWALNDYYEATGKEVDCVKGGKPKELTTTEVQKV

SEQ ID NO: 77673 - protein, 61 aa, Setaria italica
  Transcript Sequence Number=SeqID_11699
VGSAGAAVEVVEIDAPMTEEEALSFSTARGWPSASYFVDGKSQHSKKESRKGANQTDDEES

SEQ ID NO: 77674 - protein, 65 aa, Setaria italica
  Transcript Sequence Number=SeqID_11700
GAFHEMDGPFSCIKARICGPDRESAPSLLFRHHQNGGALRLLASAGVPPHLSLLADAHGVLFNIK

SEQ ID NO: 77675 - protein, 118 aa, Setaria italica
  Transcript Sequence Number=SeqID_11701
KRFILVGTAPASNLEPAKMAICAGTYDFCDGGCLCRPPPKIFLEKKQPRTASSARSAPATAPLPAVQCSSSCTSVEAAESRDGLRNLHLELLLRGRSGAAAPSPPPRILSCQIFHTMR

SEQ ID NO: 77676 - protein, 59 aa, Setaria italica
  Transcript Sequence Number=SeqID_11702
  Gene Ontology: Mol. function=inorganic phosphate transmembrane transporter activity; Cellular component=integral to membrane; Biological process=phosphate transport
  Homolog annotation: Hit_ID=Q49B43; Match level="QueryCoverage=100%, HitCoverage=10%, E-value=1e-26, Identity=98%"; Hit description =Inorganic phosphate transporter 4
MARGGDNLQVLSALDAAKTQWYHFTAIIVAGMGFFTDAYDLFCISLVTKLLGRIYYTDT

SEQ ID NO: 77677 - protein, 239 aa, Setaria italica
  Transcript Sequence Number=SeqID_11703
  Gene Ontology: Mol. function=inorganic phosphate transmembrane transporter activity; Cellular component=integral to membrane; Biological process=phosphate transport
  Homolog annotation: Hit_ID=Q8GSD9; Match level="QueryCoverage=100%, HitCoverage=45%, E-value=1e-118, Identity=82%"; Hit description =Inorganic phosphate transporter 1-2
LSATIMSEYANKKTRGAFIAAVFAMQGFGILFGTIIALLVSAVFRKAYPAPSFADNPKASLVPEADYMWRIILMFGTIPAALTYYWRMKMPETARYTALIARNTKQAAADMTKVLQKEIQDEEEEVQRQVIAGDSWGLFSSQFLRRHGLHLLATTSTWFLLDIAFYSQNLFQKDIFTKVGWIPPAKTMNAIEEVFRISRAQALIALCGTIPGYWFTVALIDVMGRFWIQLMGFLMMTVF

SEQ ID NO: 77678 - protein, 110 aa, Setaria italica
  Transcript Sequence Number=SeqID_11704
  Gene Ontology: Mol. function=inorganic phosphate transmembrane transporter activity; Cellular component=integral to membrane; Biological process=phosphate transport
  Homolog annotation: Hit_ID=Q7YMD9; Match level="QueryCoverage=100%, HitCoverage=20%, E-value=1e-34, Identity=64%"; Hit description =Phosphate transporter 8
FGPNSTTFVVPAEIFPARLRSTCHGVSAAAGKAGAIVGAFGFLYAAQDPKKPDHGYTPGIGIRNTLFLLAGTNFLGMIMSLFVPESKGKSLEEISKENIGDDATDAPARV

SEQ ID NO: 77679 - protein, 539 aa, Setaria italica
  Transcript Sequence Number=SeqID_11705
  Gene Ontology: Mol. function=inorganic phosphate transmembrane transporter activity; Cellular component=integral to membrane; Biological process=phosphate transport
  Homolog annotation: Hit_ID=Q49B45; Match level="QueryCoverage=99%, HitCoverage=99%, E-value=0.0, Identity=79%"; Hit description =Inorganic phosphate transporter 2
  Pfam annotation: Domain name=MFS_1; Domain location=28-457; Score =82.4; E_value=1.7e-21; Accession=PF07690.8; Description=Major Facilitator Superfamily
  Pfam annotation: Domain name=Sugar_tr; Domain location=23-518; Score =86.1; E_value=1.2e-22; Accession=PF00083.16; Description=Sugar (and other) transporter
  Pfam module annotation: Pfam domain module=MFS_1::Sugar_tr; Domain location=28-457::23-518
MAGKQLNVLSALDAAKTQWYHFMAIVIAGMGFFTDAYDLFCISLVSKLLGRLYYTEPNSPDPGSLPPNVAAAVNGVAFCGTLAGQLFFGWLGDKLGRKSVYGMTLMLMVLCSIASGLSFGNTPTGVMATLCFFRFWLGFGIGGDYPLSATIMSEYANKRTRGAFIAAVFAMQGFGILAGGIVTLIISAAFRAGYPAPAYQDSPKDSTVSQADFVWRIILMLGAAPALLTYYWRMKMPETARYTALVAKNAKQAAADMSKVLQTEIVDEQEKLDTMVTSTGNSFGLFSREFARRHGLHLLGTASTWFLLDIAFYSQNLFQKDIFTSINWIPKARTMSALEEVFRISRAQTLIALCGTVPGYWFTVALIDVVGRFTIQLLGFFMMTVFMLGLAVPYHHWTTPGNHIGFVVMYGLTFFFANFGPNSTTFIVPAEIFPARLRSTCHGISAAAGKAGAIIGAFGFLYAAQNQDKSKVDHGYPAGIGVRNSLFVLAGVNMLGFILTFLVPESKGKSLEEMSGEADDGEEEAVGGRAVRPSQTQMV

SEQ ID NO: 77680 - protein, 161 aa, Setaria italica
  Transcript Sequence Number=SeqID_11706
  Gene Ontology: Mol. function=protein serine/threonine kinase activity
  Homolog annotation: Hit_ID=B9S7S8; Match level="QueryCoverage=95%, HitCoverage=24%, E-value=4e-29, Identity=45%"; Hit description =Kinase, putative
MLDDAFEAKLGDFGLVRQVHPGQGSLRGTAMVGSWEYMDPKCITTDSATTASDMYSFGVLLLEIATGKRPRVPRDDEELSLRNVLVDAIRESYGKGAVLEMADARLNGDFDENQMERVMLVGLLCVHRDRRKKLSICSRISSTRYLNLKLSLPEHSHPSRA

SEQ ID NO: 77681 - protein, 171 aa, Setaria italica
  misc_feature (39)..(39): Xaa can be any naturally occurring amino acid
  misc_feature (56)..(56): Xaa can be any naturally occurring amino acid
  Transcript Sequence Number=SeqID_11707
  Gene Ontology: Mol. function=adenosine deaminase activity; Biological process=RNA processing
  Homolog annotation: Hit_ID=Q259R1; Match level="QueryCoverage=100%, HitCoverage=53%, E-value=5e-65, Identity=71%"; Hit description =H0306F12.5 protein
  Pfam annotation: Domain name=A_deamin; Domain location=2-163; Score= -79.0; E_value=0.00063; Accession=PF02137.10; Description=Adenosine -deaminase (editase) domain
GQLPDGAPEGFSIENNIEKVLNARLSSLSSRLPASFKLXRPKFFEAPVPPKEFQQXSGDVPPLTCGYSICWNKSGLHEVVLGTTGRKQGTSSKAACFSSTESLLCKRRLAEAFMSLEHSLLTKFQSGDLSYRAMKDEAHEYQHTLELLKKAPFFSCWRAKPASLGSFAVVR

SEQ ID NO: 77682 - protein, 76 aa, Setaria italica
  Transcript Sequence Number=SeqID_11708
RQLFCTATAETKNTVPAECTTNKTQVTILELSKASCYYKLIESFCDPSVYCSIRYMLLPDHPNMKRIGRYQQILHI

SEQ ID NO: 77683 - protein, 63 aa, Setaria italica
  Transcript Sequence Number=SeqID_11709
LVRSNRSISSAEFEFLPHSIPGTSCIPSALCLISNLEMQQDTMRQQQILSSTKGQRKEMYLFD

SEQ ID NO: 77684 - protein, 122 aa, Setaria italica
  Transcript Sequence Number=SeqID_11710
  Gene Ontology: Mol. function=catalytic activity; Biological process =metabolic process
  Homolog annotation: Hit_ID=B9T5T3; Match level="QueryCoverage=54%, HitCoverage=12%, E-value=7e-16, Identity=59%"; Hit description =Phosphoglycerate mutase, putative (Fragment)
VRELGLLKNEGKERYGVLYKQWQKNAANFSIDGHYPVRELRDRAPVRELRDRARSCWERIPAHEGKSVLVSEGHWPGWNKLGDVIPGSIANLSMCMEYLSISSNMLPYCEAKVTYYEQTYNN

SEQ ID NO: 77685 - protein, 58 aa, Setaria italica
  Transcript Sequence Number=SeqID_11711
FFLFASLLFDEATNLVNYMLDLRVERRHPLSPVACEFEECGGHMKLADTLKVICDIYD

SEQ ID NO: 77686 - protein, 73 aa, Setaria italica
  Transcript Sequence Number=SeqID_11712
RKEKGKREEKKRPAAFAARGRGTRTASDNGTRRDSRARKKIGGGRHGYRDGENTGEISDFRELSGKKILKTVF

SEQ ID NO: 77687 - protein, 41 aa, Setaria italica
  Transcript Sequence Number=SeqID_11713
KNHSEDTENHRTEYFNRLMCLQAIDFKFIGRQMANVLPALK

SEQ ID NO: 77688 - protein, 79 aa, Setaria italica
  Transcript Sequence Number=SeqID_11714
IFNTCTVCFKQVFGKAFPLVTEILTGVDPTQRIQILLLSDSPSVIAHGTTAGHFRKSNTHARAHTRDHPCPSASYVTKP

SEQ ID NO: 77689 - protein, 95 aa, Setaria italica
  Transcript Sequence Number=SeqID_11715
  Subcellular localization annotation: CTP_CleavageSite=53; ConfidenceScore=5.39e-01
LNYLSNKCVISLLGLIFAPHLVSTFVGTLHGCTPLVSTSEARTPSPPTRSCHQAARVRGRCRYPCYGSDRGAWRSGGAATAAWRRRRVTWQKRKM

SEQ ID NO: 77690 - protein, 61 aa, Setaria italica
  Transcript Sequence Number=SeqID_11716
GDRAAVPYLWEKCTTSAELKPIRVAVSTALDELRLGHITSAWRWSIFMACVGFQKCLAVVP

SEQ ID NO: 77691 - protein, 71 aa, Setaria italica
  Transcript Sequence Number=SeqID_11717
SCGLFAVKLNIRHMQGFISKKFHENILVNDISSGVDPTQKIQVLSLPDSPSVVAHGTPAGHFQNSTYPHTQ

SEQ ID NO: 77692 - protein, 75 aa, Setaria italica
  Transcript Sequence Number=SeqID_11718
  Gene Ontology: Mol. function=transporter activity; Cellular component= integral to membrane; Biological process=transport
  Homolog annotation: Hit_ID=Q9FNL1; Match level="QueryCoverage=68%, HitCoverage=11%, E-value=9e-20, Identity=86%"; Hit description =Phosphate/triose-phosphate translocator
MLSQEVMIVDDVVSGSTTQPPETIFNILNKKIYNYFPYPYFVSAIHLLVGVVYCLISWSLGLPKRAPVNANLPKA

SEQ ID NO: 77693 - protein, 138 aa, Setaria italica
  Transcript Sequence Number=SeqID_11719
  Subcellular localization annotation: CTP_CleavageSite=44; ConfidenceScore=5.32e-01
WAAASLEPRIGLASSYSGASARSCVSDSAQRGRPVDPLRVLSVVASLRRINPKMFAEATGALFHSGAEKKRKGVWIEVDNYEDQSKRSSVVASEGSTVTAAASAGSTATSGRCRRPPRASGGGGGGGEKAPRRVEAIM

SEQ ID NO: 77694 - protein, 118 aa, Setaria italica
  Transcript Sequence Number=SeqID_11720
  Gene Ontology: Mol. function=protein serine/threonine kinase activity; Biological process=protein amino acid phosphorylation
  Homolog annotation: Hit_ID=Q7XVI0; Match level="QueryCoverage=98%, HitCoverage=25%, E-value=1e-25, Identity=47%"; Hit description =OSJNBa0016N04.14 protein
MTPLGTLGYLPPEFINNQIISREYDIYSLGVIIMQIITGVTGFSDFADMEPQEFIEHVHDNWKRSLEEIPEYASLEADCKQVKGCMEIAINCKKKKRHERPTIEDIISKLDETETVKN

SEQ ID NO: 77695 - protein, 59 aa, Setaria italica
  Transcript Sequence Number=SeqID_11721
NINKFKIEIDCKSLHWWRIILSVLLSMECMFLMYHCLLHFYTELVNYTYVHIIQLPWLP

SEQ ID NO: 77696 - protein, 151 aa, Setaria italica
  misc_feature (16)..(16): Xaa can be any naturally occurring amino acid
  misc_feature (44)..(44): Xaa can be any naturally occurring amino acid
  Transcript Sequence Number=SeqID_11722
LCVSDSARRGRPVDPXHVLFVVASLRRINPKMFAEATGALFHSXAEKKRKGVWIEVDNYEDKSERSNTVASEGSTVTAAASAGSTATSGRCCRPPRSSGGGGWGGECNIRRNHQLKSPVKIAFKIFLPLSSRKSEISPAISPPRYPCRPPP

SEQ ID NO: 77697 - protein, 102 aa, Setaria italica
  Transcript Sequence Number=SeqID_11723
  Gene Ontology: Cellular component=chloroplast; Biological process =thiamin biosynthetic process
  Homolog annotation: Hit_ID=B9SHY3; Match level="QueryCoverage=82%, HitCoverage=13%, E-value=1e-38, Identity=84%"; Hit description =Catalytic, putative
RLSRNSLPQTPPCVGAFALGLPKIRKEWIDRREKMGSPRYTQMYYAKHGIITEEMLYCAKRENLSPEFVRTEVARGRAIIPSNKRHLELEPMIVGRNFLVKV

SEQ ID NO: 77698 - protein, 67 aa, Setaria italica
  Transcript Sequence Number=SeqID_11724
LHLKPPHHNFCVLGPTGLLLQLSSLLVVELVQGEKVGSHVQHSGVILALSTSFQGPYPGQPNRPGND

SEQ ID NO: 77699 - protein, 61 aa, Setaria italica
  Transcript Sequence Number=SeqID_11725
VVLPETTSSTIMTSLFCFHLESFGQLFVPNLVLNNSALQDGKKSNLLLTIRTDYRGVSMNM

SEQ ID NO: 77700 - protein, 189 aa, Setaria italica
  Transcript Sequence Number=SeqID_11726
  Subcellular localization annotation: CTP_CleavageSite=38; ConfidenceScore=5.55e-01
YSGSSSSSSYSGASARSCVSDSAQRGRPVDPLRVLSVVASLRRINPKMFAEATGALFHSGAEKKRKGVWIEVDNYEDQSKRSSVVASEGSTVTAAASAGSTATSGRCRRPPRASGGGGGGGEKAPRRVEAIMQWFSRSQAGPATENDICVAVGDNSGMSKTIRWLLKQEGGLRRAGTGGLLDPYVYMKW

SEQ ID NO: 77701 - protein, 186 aa, Setaria italica
  Transcript Sequence Number=SeqID_11727
  Subcellular localization annotation: CTP_CleavageSite=59; ConfidenceScore=5.37e-01
KEVSSLVPLPRGIEIRRTPSGRLAPSSAPPSSRLARAASGPGSGLALPSSAPLPPLYTRLSRPPAHLELPHPQPPGSFPLRPLPGAHRLEFPICGRPDLPRHGSFRFQNTTVRNKNPTMLLCQRSRRRQRPLTGGVPSGVVSAARACMIWRGPLPLAQAHRSRHCGRRSGWCWCGTGRALVICSIC

SEQ ID NO: 77702 - protein, 221 aa, Setaria italica
  misc_feature (8)..(8): Xaa can be any naturally occurring amino acid
  Transcript Sequence Number=SeqID_11728
  Gene Ontology: Mol. function=metal ion binding
  Homolog annotation: Hit_ID=B6SWY2; Match level="QueryCoverage=74%, HitCoverage=40%, E-value=3e-41, Identity=58%"; Hit description =Protein binding protein
  Pfam annotation: Domain name=zf-C3HC4; Domain location=33-73; Score =48.4; E_value=2.7e-11; Accession=PF00097.17; Description=Zinc finger, C3HC4 type (RING finger)
GRQGTPPXAKKEAVEAMPTVEIAGSNGDDAASCPVCLEDYAPGERAREMPCRHKFHANCIVPWLEMHSSCPVCRFQLPADDNKSSCGGGGDGDSGGYVSVDAYNEGNDNGGGDGGAGSAGNAEPERISVAEAEERGRRLTAGVAEADESGRRLPASLQWLNSLFSTVPDGQDKQQLAALGGLSNGDDCCWLSPSVPMYIGGACRVGAVEIWSLFQCVSFVM

SEQ ID NO: 77703 - protein, 275 aa, Setaria italica
  misc_feature (271)..(271): Xaa can be any naturally occurring amino acid
  Transcript Sequence Number=SeqID_11729
  Gene Ontology: Mol. function=protein serine/threonine kinase activity; Biological process=protein amino acid phosphorylation
  Homolog annotation: Hit_ID=B9V0H3; Match level="QueryCoverage=98%, HitCoverage=39%, E-value=1e-75, Identity=52%"; Hit description =Protein kinase domain containing protein
  Pfam annotation: Domain name=Pkinase; Domain location=17-269; Score =142.3; E_value=1.5e-39; Accession=PF00069.17; Description=Protein kinase domain
  Pfam annotation: Domain name=Pkinase_Tyr; Domain location=15-273; Score=48.6; E_value=5.9e-17; Accession=PF07714.9; Description =Protein tyrosine kinase
  Pfam module annotation: Pfam domain module=Pkinase::Pkinase_Tyr; Domain location=17-269::15-273
DDHPRKLQYSLVKEITNNFADELGRGTFGRVFKGLLDDGEEVAVKLLRYFTPEISDQQFQNEFGNLKKLKHPNIVRLLGFCDEPEEEIIEHKGKLVLCDRIRRALCLEYVPNGSLRKFLSGGCLSKNWPIRYKIIKGICEGLQYLHKIPIFHLDLKPDNILLDEKMLPKIADFGLSRLIGEGNTKRTMTPLGTVGYLPPEFIDNQIISREYDIYSLGVIIMQIITGVTSFSDFADMEPQEFIEHVHDNWKRSLEEIPEYSSLEADCKQVKXCMEI

SEQ ID NO: 77704 - protein, 136 aa, Setaria italica
  Transcript Sequence Number=SeqID_11730
HRRCPQIHPRSGGDEAGWRGRPAMRRARHPIISPAPRGRRKSDLDQLRLLRRGGDGGPVLIFLARIVSFSTTSGREPGVRLPHPGIFSYLTTRRKGIRCSCSSLLWTRTTRGLDPPAPHRQHSGDFFYSDVPRGVY

SEQ ID NO: 77705 - protein, 199 aa, Setaria italica
  Transcript Sequence Number=SeqID_11731
  Gene Ontology: Mol. function=protein serine/threonine kinase activity; Biological process=protein amino acid phosphorylation
  Homolog annotation: Hit_ID=B9V0H3; Match level="QueryCoverage=94%, HitCoverage=28%, E-value=4e-52, Identity=53%"; Hit description =Protein kinase domain containing protein
  Pfam annotation: Domain name=Pkinase; Domain location=22-199; Score =19.0; E_value=1.3e-09; Accession=PF00069.17; Description=Protein kinase domain
  Pfam annotation: Domain name=Pkinase_Tyr; Domain location=20-199; Score=-37.9; E_value=3.3e-11; Accession=PF07714.9; Description =Protein tyrosine kinase
  Pfam module annotation: Pfam domain module=Pkinase::Pkinase_Tyr; Domain location=22-199::20-199
MKGWTDDHPRKLQYSLVKEITNNFADELGRGTFGRVFKGLLDDGEEVAVKLLRYFTPEISDQQFQNESGNLKKLKHPNIVRLLGFCDEPEEEIIEHKGKLVLCDRIHRALCLEYVPNGSLRKFLSGGCLSKNWPIRYKIIKGICEGLQYLHKIPIFHLDLKPDNILLDEKMLPKITDFGLSRLIGEGNTKRTMTPLGTL

SEQ ID NO: 77706 - protein, 263 aa, Setaria italica
  misc_feature (128)..(128): Xaa can be any naturally occurring amino acid
  Transcript Sequence Number=SeqID_11732
  Gene Ontology: Mol. function=transporter activity; Cellular component= integral to membrane; Biological process=transport
  Homolog annotation: Hit_ID=P49133; Match level="QueryCoverage=67%, HitCoverage=43%, E-value=4e-83, Identity=86%"; Hit description =Triose phosphate/phosphate translocator, chloroplastic
  Pfam annotation: Domain name=DUF6; Domain location=93-223; Score= -0.6; E_value=0.083; Accession=PF00892.12; Description=Integral membrane protein DUF6
GRRQPPAALVGFRNACRQPPAPLFGFRNADALGLSIAGGPCPAIPAAIVIAFVISIDADVATAVAVAAASAGEAKPAGFLSKYPALVTGFFFFMWYFLNVIFNILNKKIYNYFPYPYFVSAIHLLVGXVVYCLISWSLGLPKRAPVNANLLKLLFPVALCHALGHVTSNVSFAAVAVSFAHTIKALEPFFNAAATQFILGQQVPLSLWLSLAPVVIGVSMASLTELSFNWTGFINAMISNISFTYRSIYSKKAMVCASFVLIS

SEQ ID NO: 77707 - protein, 115 aa, Setaria italica
  Transcript Sequence Number=SeqID_11733
  Pfam annotation: Domain name=Med11; Domain location=5-73; Score=97.2; E_value=5.8e-26; Accession=PF10280.1; Description=Mediator complex protein
MIPQSQSSSLQRLHHVEKRIVRVLELAGAVMEELGNSQGPRTDAVGAHCREFMLAMKDIQTTLREEIKSACEYRPFEKCDYSARIANEICCKKLEYVIEKLDTMQQNLGQSPDDI

SEQ ID NO: 77708 - protein, 100 aa, Setaria italica
  Transcript Sequence Number=SeqID_11734
EVDCSSYHLAMRCCSTPGWEQTIDQMTQGETNKEVMIVDDVVSGSTTQPPETILTVFTSSRALLFPFLLFNLSLDVRVHGHTSYGNGCANTSLCRDSVAK

SEQ ID NO: 77709 - protein, 82 aa, Setaria italica
  Transcript Sequence Number=SeqID_11735
MWGRFSEKAPRRVEAIMQWFSRSQAGPATENDICAAVGDNSGTSKAIRWLLKQEGGLRRAGIGGLLDPYVYMEPLAFHQHFA

SEQ ID NO: 77710 - protein, 245 aa, Setaria italica
  Transcript Sequence Number=SeqID_11736
SFCILLDQIYVAPRPENNRLTMSNVTLEETDHCSEGRQFIKDECQKRQLLHHHYEGNNNYHPNMKRIGRYQQILHITRALPVPHQHHPLRLPQRRERRAWARGSGPLQIVHARATDTAPKGTPPASGHQRRRLRWREEEHGGIFVPDGRVLKSEAAMVGEIRAAADGELQSTSSGQRPQRRRSGRLRMGELQAGGRAARPGAARGMGADGGGASPLPGPEGAPANPLPGGAGPGAGRLDGVRRIS

SEQ ID NO: 77711 - protein, 117 aa, Setaria italica
  Transcript Sequence Number=SeqID_11737
  Gene Ontology: Mol. function=catalytic activity; Biological process =metabolic process
  Homolog annotation: Hit_ID=B9T5T3; Match level="QueryCoverage=59%, HitCoverage=13%, E-value=1e-17, Identity=58%"; Hit description =Phosphoglycerate mutase, putative (Fragment)
GTGACGNACVRRACDFDFQGLLKNEGKERYGVLYKQWQKNAANFSIDGHYPVRELRDRAPVRELRDRARSCWERIPAHEGKSVLVSEGHWPGWKQVGRCDSWLHRKPFDVYGVLEHK

SEQ ID NO: 77712 - protein, 216 aa, Setaria italica
  Transcript Sequence Number=SeqID_11738
  Subcellular localization annotation: CTP_CleavageSite=48; ConfidenceScore=5.20e-01
NWQHSSATACTEHRTSPSLHSSAVLGNQNHQLVAHRHFHKHQFPNSFRSSSSSCNYQVQLFDPPYNFSRIIYMPQTTVGIPGRWNHLHQVVFRNLFTSFDAYRSSALVLLHQAWQREFRVAIANNCANYLGRHGAGWRWTSGQPRRRLGERSLSCALLVSMRRALPVIRWAVAERWLHRKALPRRFPVVEDAAHARAAACSPAPGADGKRRCAGSG

SEQ ID NO: 77713 - protein, 685 aa, Setaria italica
  Transcript Sequence Number=SeqID_11739
  Gene Ontology: Mol. function=microtubule motor activity; Cellular component=microtubule associated complex; Biological process =microtubule-based movement
  Homolog annotation: Hit_ID=B6U113; Match level="QueryCoverage=100%, HitCoverage=82%, E-value=0.0, Identity=78%"; Hit description=Kinesin- 4
  Pfam annotation: Domain name=Kinesin; Domain location=58-376; Score =539.2; E_value=5e-159; Accession=PF00225.15; Description=Kinesin motor domain
YNSLMERYKHQVAKCADECTPRYEYDGLKKKYTDECAERRRLYNEIIELRGNIRVFCRCRPLSSDEVTRGCSSVIEIDPSQETELQFVPSEKRRKAFKFDRVFGPEDDQEAVFVETVPVVRSVMDGFNVCIFAYGQTGTGKTFTMEGVPENRGVNYRALEELFRMSEKRSTSVTYTFSVSILEVYNEKIRDLLDESNDQSKRLDIKQSADGMQEVSGLVEAPICNIDGVWEKLKFGARNRSVGTTNANELSSRSHSLVRVTVRSEHLVTGQRSRSHMWLVDLAGSERIAKTGVQGDRLKESQFINKSLSALGDVISALASKNSHIPYRNSKLTHLLQSSLGGDCKTLMFVQISPSSTDSGETLCSLNFASRVRAVEHGPARKQADPAESLKFKQMSEKLRHEEKENAQLNQSLQLMQLKYTSRENVFRTLNEKVKDAEQACRNYQQRIRELENELGNERKAARDSARSSRPPLVPMRQRQPQGRNNNYPPPSGPSRSRFSKAPAGQNKENIPVMTNKAHLGADNKAVGKARRVSLTPVIRQIPIQPKRRSSMAILPSLSEQLSVLNEKRAASRLSHVYVPRRSVAAFGSIPSTPLAGHGAVDATPDGAKLRRIDFGSSSKFTSPPPPFGMLNKLLTPQHKQGMAPAGGPGNTSRLCFSIQKKVAVSLNSPGRAKPSVPSGTGIFN

SEQ ID NO: 77714 - protein, 127 aa, Setaria italica
  Transcript Sequence Number=SeqID_11740
LDRCRNRLCRDSKFFTKFHGCIDGLSVMMRHTLLSMGTVTELVDEIMQKDHGMEPCYLRCKTQADPSTELFTCTDSWYLNFHQKADRFLKNKKKEMHTPFAGIILFRFKGTFSAHLTTVKAKKPSHC

SEQ ID NO: 77715 - protein, 642 aa, Setaria italica
  Transcript Sequence Number=SeqID_11741
  Gene Ontology: Cellular component=chloroplast; Biological process =thiamin biosynthetic process
  Homolog annotation: Hit_ID=B9SHY3; Match level="QueryCoverage=91%, HitCoverage=91%, E-value=0.0, Identity=86%"; Hit description =Catalytic, putative
  Pfam annotation: Domain name=ThiC; Domain location=164-587; Score =1120.8; E_value=0; Accession=PF01964.10; Description=ThiC family
  Subcellular localization annotation: CTP_CleavageSite=94; ConfidenceScore=5.25e-01
MAALQPSFSSTMALKSSCSGLKFPKTALLPCFGGISRQDIQDRNASLAYLIPKVASVTDQSTSEPSKPRQSKHTVDPTAPEFLPLPSFEECFPRSTKESSEIVHEESGHVLKVPFRRVHLTGDQKHFDTYDTSGPQNISPRIGLPKIRKEWIDRREKMGSPRYTQMYYAKHGIITEEMLYCAKRENLSPEFVRTEVARGRAIIPSNKRHLELEPMIVGRNFLVKVNANIGNSAVLSSIEDEVHKLQWATMWGADTVMDLSTGRHIHETREWIIRNSPVPIGTVPIYQALEKVNGIAENLSWEIFRDTLIEQAEQGVDYFTIHAGVLLRYIPLTAKRMTGIVSRGGSIHAKWCLTYHKENFAYEHWDEILDICNQYDVALSIGDGLRPGSIYDANDSAQFAELLTQGELTRRAWAKDVQVMNEGPGHIPMHKIPENMEKQLEWCNEAPFYTLGPLTTDIAPGYDHITSAIGAANIGALGTALLCYVTPKEHLGLPNRDDVKTGVISYKIAAHAADLAKGHPYAQAWDDALSKARFEFRWLDQFALSLDPVTAMAFHDETLPSEGAKVAHFCSMCGPKFCSMKITEDIRKYADEHGYGTVEEAVKEGMNAMSAEFLAARKTISGEQHGEAGGEIYVPESYAAQK

SEQ ID NO: 77716 - protein, 517 aa, Setaria italica
  misc_feature (199)..(199): Xaa can be any naturally occurring amino acid
  misc_feature (303)..(303): Xaa can be any naturally occurring amino acid
  misc_feature (424)..(424): Xaa can be any naturally occurring amino acid
  Transcript Sequence Number=SeqID_11742
  Gene Ontology: Mol. function=transporter activity; Cellular component= integral to membrane; Biological process=transport
  Homolog annotation: Hit_ID=P49133; Match level="QueryCoverage=94%, HitCoverage=86%, E-value=1e-151, Identity=80%"; Hit description =Triose phosphate/phosphate translocator, chloroplastic
  Pfam annotation: Domain name=DUF6; Domain location=367-502; Score =12.8; E_value=0.014; Accession=PF00892.12; Description=Integral membrane protein DUF6
  Pfam annotation: Domain name=TPT; Domain location=358-502; Score =177.5; E_value=3.7e-50; Accession=PF03151.8; Description=Triose -phosphate Transporter family
  Pfam annotation: Domain name=UAA; Domain location=211-508; Score= -151.9; E_value=0.0092; Accession=PF08449.3; Description=UAA transporter family
  Pfam module annotation: Pfam domain module=DUF6::TPT::UAA; Domain location=367-502::358-502::211-508
MLDIMALMKPVQLNDAIAKVGLQKFVTDLFLVGLFYHLYNQVATNTLERVAPLTHAVGNVLKRVFVIWFFNHCFWQPLLIPSQGSPPSSPPATPSHHFPASPPHHSKGLAMSALGALSGGAAGVAGLLSLRRRAAAPPPPSALASSSHLPPLKCAAVPDAGHLVWGRQLRPALALLPFPSQAARKQTPRPPAAASAGEXAKPAGFLSKYPALVTGFFFFMWYFLNVIFNILNKKIYNYFPYPYFVSAIHLLVGVVYCLISWSLGLPKRAPVNANLLKLLFPVALCHALGHVTSNVSFAAVAVXIFAHTIKALEPFFNAAATQFILGQQVPLSLWLSLAPVVIGVSMASLTELSFNWSGFINAMISNISFTYRSIYSKKAMTDMDSTNVYAYISIISLIVCIPPALMFEGPKLMQHGFNDAIAKXGLQKFVTDLFLVGLFYHLYNQVATNTLERVAPLTHAVGNVLKRVFVIGFSIIVFGNRITTQTGIGTSIAIAGVAMHSYIKAKIEEEKRKKKSA

SEQ ID NO: 77717 - protein, 97 aa, Setaria italica
  Transcript Sequence Number=SeqID_11743
  Gene Ontology: Mol. function=ATP:ADP antiporter activity; Cellular component=integral to membrane; Biological process=transport
TSLPLVGNYFLGCICFFAWLGAVRSLDSQFSPLAKQDLEREKMLKAKTVETTAQVVGTGNGSLQESLGSETSANGSAIKQSQETESTTPEKSGQQSQ

SEQ ID NO: 77718 - protein, 515 aa, Setaria italica
  Transcript Sequence Number=SeqID_11744
  Gene Ontology: Mol. function=ATP:ADP antiporter activity; Cellular component=integral to membrane; Biological process=transport
  Homolog annotation: Hit_ID=B6SVL2; Match level="QueryCoverage=86%, HitCoverage=69%, E-value=0.0, Identity=83%"; Hit description =Plastidic ATP/ADP-transporter
  Pfam annotation: Domain name=TLC; Domain location=24-501; Score =913.0; E_value=1.5e-271; Accession=PF03219.6; Description=TLC ATPADP transporter
DLISSSLLSIRRYFDAHAAPPWSPASSQATASAAAAAAPGDDAPKFLGVETKTLKKIVPLGLMFFCILFNYTILRDTKDVLVVTAKGSSAEIIPFLKTWVNLPMAVGFMLLYTKLADVLSKEALFYAVIFPFIAFFGAFAYVLYPMRDAIHPTALADRLLASLGPSFLGPVAILRVWSFCLFYVMAELWGSVVISVLFWGFANQITTVEEAKEFYPLFGLGANVALIFSGRTVKYFSNMRKNLGPGVDGWAISLKAMMSIVVVLGLVITGIYWGVNKFVIDKSSMPVVERKKKDKPKLSMGESMKVLLSSRYVRDLATLVVAYGISINLVEVTWKSKLKAQFPSPNEYSSFMGDFSTATGIATFTMMLLGRVILRKFGWGVAATITPAVLLLTGVGFFSLILFGEPLTPLMTQFGMTPLLAAVYVGAMQNIFSKSAKYSLFDPCKEMAYIPLDEDMKVKGKAAIDVVCNPLGKSGGALIQQFMILSFRQSLLSASFLSRDLALPGERTVSQGTLQ

SEQ ID NO: 77719 - protein, 96 aa, Setaria italica
  Transcript Sequence Number=SeqID_11745
  Gene Ontology: Mol. function=polyribonucleotide nucleotidyltransferase activity; Biological process=mRNA catabolic process
  Homolog annotation: Hit_ID=Q6KAI0; Match level="QueryCoverage=78%, HitCoverage=7%, E-value=5e-32, Identity=85%"; Hit description =Putative polyribonucleotide nucleotidyltransferase
RSRVLLAVGSGTSSDPLDLKQTPVNFQSGSMKLGDVVTAKVYQIRAFGLVLELSDGARGMHKFEANGQKEFEVGQELLVKCASFNAKGIPVFSLLD

SEQ ID NO: 77720 - protein, 68 aa, Setaria italica
  Transcript Sequence Number=SeqID_11746
LFGIITRHKGEEEGLSWAVCCGAGNGAEQASRTNKINSYCISLSHRNVHKVQQLDRSIFIFISHDSSS

SEQ ID NO: 77721 - protein, 91 aa, Setaria italica
  Transcript Sequence Number=SeqID_11747
  Subcellular localization annotation: CTP_CleavageSite=34; ConfidenceScore=5.57e-01
PPPPPPPPPPPAPAPRGRRPWSRRWPPPLTTSSRSAAHSSRVQWRRQPREEECGRGSKQDKKKEAWQRRGGRGAREEEHRYQERTKRRAHE

SEQ ID NO: 77722 - protein, 94 aa, Setaria italica
  Transcript Sequence Number=SeqID_11748
  Gene Ontology: Mol. function=strictosidine synthase activity; Cellular component=plasma membrane; Biological process=biosynthetic process
  Homolog annotation: Hit_ID=B6TK54; Match level="QueryCoverage=100%, HitCoverage=23%, E-value=2e-35, Identity=79%"; Hit description =Strictosidine synthase
MASPGVVAAALVVAAVAAFCGTDPLRMGSMVDFPGFEAHFVDLPDPAEMPPHADARERLRSAEVRFRGEVQGPESVAFDPRGRGPYTGVADGRV

SEQ ID NO: 77723 - protein, 76 aa, Setaria italica
  Transcript Sequence Number=SeqID_11749
  Subcellular localization annotation: CTP_CleavageSite=53; ConfidenceScore=5.39e-01
TPSLHPKSQTVSTKTTKIFLLNEPQTAKPGRNYKGTNNNQRISSKKGKGEGVRCVPSGGGRRGRDQPRTRSGRCRS

SEQ ID NO: 77724 - protein, 32 aa, Setaria italica
  Transcript Sequence Number=SeqID_11750
LILKITNYIPLFHLIISMYQNLSRSYLQMTKI

SEQ ID NO: 77725 - protein, 226 aa, Setaria italica
  misc_feature (170)..(170): Xaa can be any naturally occurring amino acid
  misc_feature (190)..(190): Xaa can be any naturally occurring amino acid
  Transcript Sequence Number=SeqID_11751
  Gene Ontology: Mol. function=nucleic acid binding
  Homolog annotation: Hit_ID=Q10CE1; Match level="QueryCoverage=82%, HitCoverage=48%, E-value=2e-61, Identity=63%"; Hit description=GRF zinc finger family protein, expressed
  Pfam annotation: Domain name=zf-CCHC; Domain location=40-57; Score =37.2; E_value=6.4e-08; Accession=PF00098.15; Description=Zinc knuckle
  Pfam annotation: Domain name=zf-GRF; Domain location=152-197; Score =53.6; E_value=7.5e-13; Accession=PF06839.4; Description=GRF zinc finger
  Pfam annotation: Domain name=zf-GRF; Domain location=86-130; Score =75.4; E_value=2.1e-19; Accession=PF06839.4; Description=GRF zinc finger
  Pfam module annotation: Pfam domain module=zf-CCHC::zf-GRF::zf-GRF; Domain location=40-57::152-197::86-130
  Subcellular localization annotation: CTP_CleavageSite=28; ConfidenceScore=5.15e-01
GSHSSAWQQQQQQALNYAHKRPDGSKTLAAGTSGTQVASGSCFKCGDPGHWARECPQSAPTAGGGGVIGGGAGGGYVNAGGEVEEKACPCGAGSCLVLTSNTPRNPGRKFYKCPLRDNGGCNFFEWCDAPSPGPANARSNTVFQSETSATDMLCPCGAGACLILTTKTGXNVGRQFYRCPGNQGIAVSGXFKWCDEQQPRVGAPLQASPQYQTDATSSIQNSNKRS

SEQ ID NO: 77726 - protein, 144 aa, Setaria italica
  misc_feature (113)..(113): Xaa can be any naturally occurring amino acid
  Transcript Sequence Number=SeqID_11752
  Gene Ontology: Mol. function=nucleic acid binding
  Homolog annotation: Hit_ID=Q287V7; Match level="QueryCoverage=66%, HitCoverage=25%, E-value=4e-11, Identity=37%"; Hit description=Zinc knuckle family protein
  Pfam annotation: Domain name=zf-CCHC; Domain location=58-75; Score =35.9; E_value=1.6e-07; Accession=PF00098.15; Description=Zinc knuckle
  Pfam annotation: Domain name=zf-CCHC; Domain location=96-113; Score =34.7; E_value=3.8e-07; Accession=PF00098.15; Description=Zinc knuckle
  Pfam module annotation: Pfam domain module=zf-CCHC::zf-CCHC; Domain location=58-75::96-113
MSLSGVRLGQITQGGGSCGFFKWCDEQQPRVGAPLQASPQYQTDATSSIQNSNKRSSSSCFKCGQENHWARDCPNQSSDPYPDKGGRTITSASSPDGCFKCGKAGHWSRECPXTSNSGGGGGGGTGASRAKSSSALGSWNSQRY

SEQ ID NO: 77727 - protein, 63 aa, Setaria italica
  Transcript Sequence Number=SeqID_11753
  Gene Ontology: Mol. function=hydrolase activity, hydrolyzing O -glycosyl compounds; Biological process=carbohydrate metabolic process
  Homolog annotation: Hit_ID=B6VCJ8; Match level="QueryCoverage=82%, HitCoverage=13%, E-value=3e-18, Identity=80%"; Hit description =Putative alpha-galactosidase/hydrolase (Fragment)
SLIFSANAGVTSDTGAGRAFLRSLYRQYADWDVDFVKVDCIFGTDYSPEEIITISEELKLLQH

SEQ ID NO: 77728 - protein, 135 aa, Setaria italica
  Transcript Sequence Number=SeqID_11754
  Gene Ontology: Mol. function=hydrolase activity, hydrolyzing O -glycosyl compounds; Biological process=carbohydrate metabolic process
  Homolog annotation: Hit_ID=B6VCJ8; Match level="QueryCoverage=93%, HitCoverage=33%, E-value=2e-47, Identity=71%"; Hit description =Putative alpha-galactosidase/hydrolase (Fragment)
LSDSPCPSSPGTEVTPALAENISDHVNMYRITGDDWDHWNDVSSHFSVASSFAAAKKIGATGLRGRSWPDLDMLPFGWLTDPSVNQGPHRKCNLTLDEQKTQMALWSMAKSPLMYGGDLTHLDDGTLSIIPILLY

SEQ ID NO: 77729 - protein, 336 aa, Setaria italica
  Transcript Sequence Number=SeqID_11755
  Gene Ontology: Mol. function=hydrolase activity, hydrolyzing O -glycosyl compounds; Biological process=carbohydrate metabolic process
  Homolog annotation: Hit_ID=B6VCJ8; Match level="QueryCoverage=69%, HitCoverage=61%, E-value=3e-92, Identity=69%"; Hit description =Putative alpha-galactosidase/hydrolase (Fragment)
ICSCIRNRPFSSVSAVGLTDPSVNQGPHRKCNLTLDEQKTQMALWSMAKSPLMYGGDLTHLDDGTLSIITNPTLLKINHYSKNNMEFRYVYSGRTSKEEHSGRFRSPYHVHLTKNDGMFVGLTACSDDTANGWYVFSQDGKPDHICRNYEIQNDKSTSFCLGKTKPLLASDIIIMDSIEHQSKFHLSVRNTGDTCLDASAGRRRSASDIRFPMFSACRWHAKQMWELNANGNLVSSYSGLCATVESRDEGGTIGARAWVATGSKGEIYLAFFNLDSTSRKMAARISDLGKVLRRAFLRKDLCRCTEVWSGKNFSLTKEVISAVVNPHGSMVFEIVC

SEQ ID NO: 77730 - protein, 107 aa, Setaria italica
  Transcript Sequence Number=SeqID_11756
  Gene Ontology: Mol. function=glutathione transferase activity; Biological process=response to stress
  Homolog annotation: Hit_ID=Q06398; Match level="QueryCoverage=88%, HitCoverage=40%, E-value=2e-25, Identity=62%"; Hit description =Probable glutathione S-transferase GSTU6
ERAEAVARAAEALQTLEGAFEECSKGKPFFGGDGIGFVDVVLGGYLGWFGAIDRIIGRKLIDPARTPLLAAWEERFRTTEVAKGIVPDDVDKVLAFLQTLLAIGSMK

SEQ ID NO: 77731 - protein, 198 aa, Setaria italica
  Transcript Sequence Number=SeqID_11757
  Gene Ontology: Mol. function=DNA-directed DNA polymerase activity; Biological process=DNA replication
  Homolog annotation: Hit_ID=B6T490; Match level="QueryCoverage=100%, HitCoverage=47%, E-value=1e-68, Identity=64%"; Hit description =Protein trpH
  Pfam annotation: Domain name=PHP; Domain location=3-184; Score=48.2; E_value=3.2e-11; Accession=PF02811.11; Description=PHP domain
VAVELHAHSARSDGSLSPAELVERAHRNGVKVFALTDHDTMAGVPEAMEAAKRDPIRIIPGVEISAVHSPSDESGSEDPVHILAYYGTWGPARPQELERFLAGIREGRYARANEMLLKLRSLNMPMKLEDVCKIAGNGVAPGRLHVARAMVDAGYVENLRQAFSRYLYDGGPAYATGSEPTGESVVQLVCQTGGVASF

SEQ ID NO: 77732 - protein, 269 aa, Setaria italica
  Transcript Sequence Number=SeqID_11758
  Gene Ontology: Mol. function=phosphoribosylanthranilate isomerase activity; Biological process=aromatic amino acid family biosynthetic process
  Homolog annotation: Hit_ID=B4FHC1; Match level="QueryCoverage=97%, HitCoverage=97%, E-value=1e-127, Identity=84%"; Hit description=N -(5'-phosphoribosyl)anthranilate isomerase
  Pfam annotation: Domain name=PRAI; Domain location=61-261; Score =127.0; E_value=6.1e-35; Accession=PF00697.14; Description=N -(5'phosphoribosyl)anthranilate (PRA) isomerase
MASPISARRYQQFPLVHNNGLPRFSRVKMACLGIKQTRYHSDTIVSSSASHGDAGKLHPVVKMCGITSARDAEMAVEAGAKLIGMILWPNSKRSVSLSEAKEISRVAQSYGAESVGVFVDDDEETILRVSDSCDLNFIQLHGDESRALVHNLSKNNRIVYVLNADEDGKLIKLPPVLEYALDWFLVDSAKGGSGKGFNWQKFQMPSVKSKNGWLLAGGLHADNVCEAFSSLKPNGVDVSSGICGPDGIQKDPNRISSFISNVKSLSCRS

SEQ ID NO: 77733 - protein, 92 aa, Setaria italica
  Transcript Sequence Number=SeqID_11759
  Gene Ontology: Mol. function=electron carrier activity; Cellular component=integral to membrane; Biological process=oxidation reduction
  Homolog annotation: Hit_ID=C0KHL9; Match level="QueryCoverage=98%, HitCoverage=17%, E-value=3e-22, Identity=63%"; Hit description =Putative ferulate 5-hydroxylase
MLVAGTDTSYSLLEWAMAELINHPTQMRKLQDEIRAAVAGGVTEDDLPRLPYLKAVIKETLRLHPPGPLLLPRETLEDTELQSYHVPARTRS

SEQ ID NO: 77734 - protein, 281 aa, Setaria italica
  Transcript Sequence Number=SeqID_11760
  Gene Ontology: Mol. function=electron carrier activity; Cellular component=integral to membrane; Biological process=oxidation reduction
  Homolog annotation: Hit_ID=C0KHL9; Match level="QueryCoverage=100%, HitCoverage=53%, E-value=5e-74, Identity=59%"; Hit description =Putative ferulate 5-hydroxylase
  Pfam annotation: Domain name=p450; Domain location=1-281; Score= -12.5; E_value=4.7e-11; Accession=PF00067.14; Description=Cytochrome P450
GGTKLRKVFGEFEELLGTVPMAEVVPWLWPVDVATGLERKARRTSEEIDRLLERVIADHRRRRRGARRVVGDGEDDRRDFVDVLLDLSETEEEVGGVQLDTVTIKATVVDMLVAGTDTSYSLLEWAMAELINHPTQMRKLQDEIRAAVAGGVTEDDLPRLPYLKAVIKETLRLHPPGPLLLPRETLEDTELQSYHVPARTRVVINAWAIGRDPATWGENAEDFMPERFAADGEAEYQKMGLDFRFLPFGAGRRGCPGVGFAVPANELALASLLYHFDWEVP

SEQ ID NO: 77735 - protein, 179 aa, Setaria italica
  Transcript Sequence Number=SeqID_11761
  Gene Ontology: Mol. function=electron carrier activity; Biological process=oxidation reduction
  Homolog annotation: Hit_ID=C0KHL9; Match level="QueryCoverage=64%, HitCoverage=21%, E-value=3e-15, Identity=45%"; Hit description =Putative ferulate 5-hydroxylase
DVLCFRAAREQEVAALLGRVRAAAAADGAAVVNLSELLITYSNAVISRATFGDGSYGLDGDDGGGGTKLRKVFGEFEELLGTVPMAEVVPWLWPVDVATGLERKARRTSEEIDRLLERVIADHRRRRRGARRVVGDGEDDRRDFVDVLLDLSETEEEVGESSSTRSTIKDQPYVGNRPN

SEQ ID NO: 77736 - protein, 139 aa, Setaria italica
  misc_feature (74)..(74): Xaa can be any naturally occurring amino acid
  Transcript Sequence Number=SeqID_11762
  Gene Ontology: Mol. function=protein serine/threonine kinase activity; Biological process=protein amino acid phosphorylation
  Homolog annotation: Hit_ID=C4P7T7; Match level="QueryCoverage=81%, HitCoverage=24%, E-value=6e-50, Identity=90%"; Hit description=CBL -interacting protein kinase 22
  Pfam annotation: Domain name=Pkinase; Domain location=17-133; Score= -91.4; E_value=0.0047; Accession=PF00069.17; Description=Protein kinase domain
  Pfam annotation: Domain name=Pkinase_Tyr; Domain location=17-138; Score=-151.3; E_value=0.0011; Accession=PF07714.9; Description =Protein tyrosine kinase
  Pfam module annotation: Pfam domain module=Pkinase::Pkinase_Tyr; Domain location=17-133::17-138
WVRGTGDVRRRVLQGRYELGRVLGHGNFGRVHTARDLRTGRSVAVKVLSKDKVVRAGMMEQIKREIAVMKRVSXPNIVELHEVMATRSRIYLALELVRGGELFARIVRAGRVREDVARRITYKDKTTYYRPFVLSCPTS

SEQ ID NO: 77737 - protein, 43 aa, Setaria italica
  Transcript Sequence Number=SeqID_11763
  Gene Ontology: Mol. function=protein serine/threonine kinase activity; Biological process=protein amino acid phosphorylation
  Homolog annotation: Hit_ID=C4P7T7; Match level="QueryCoverage=69%, HitCoverage=6%, E-value=1e-09, Identity=96%"; Hit description=CBL -interacting protein kinase 22
VDVKKDGGDTLEYRSFCSDELRPALKDIVWAAADPAPAAAAVV

SEQ ID NO: 77738 - protein, 56 aa, Setaria italica
  Transcript Sequence Number=SeqID_11764
  Gene Ontology: Mol. function=protein serine/threonine kinase activity; Biological process=protein amino acid phosphorylation
  Homolog annotation: Hit_ID=C4P7T7; Match level="QueryCoverage=98%, HitCoverage=12%, E-value=2e-22, Identity=94%"; Hit description=CBL -interacting protein kinase 22
HPNIVELHEVMATRSRIYLALELVRGGELFARIVRAGRVREDVARRYFRQLVSAVV

SEQ ID NO: 77739 - protein, 390 aa, Setaria italica
  Transcript Sequence Number=SeqID_11765
  Gene Ontology: Mol. function=protein serine/threonine kinase activity; Cellular component=plasma membrane; Biological process =protein amino acid phosphorylation
  Homolog annotation: Hit_ID=C4P7T7; Match level="QueryCoverage=98%, HitCoverage=85%, E-value=0.0, Identity=87%"; Hit description=CBL -interacting protein kinase 22
  Pfam annotation: Domain name=APH; Domain location=20-190; Score= -17.0; E_value=0.038; Accession=PF01636.15; Description =Phosphotransferase enzyme family
  Pfam annotation: Domain name=NAF; Domain location=306-373; Score =75.9; E_value=1.4e-19; Accession=PF03822.6; Description=NAF domain
  Pfam annotation: Domain name=Pkinase; Domain location=18-273; Score =342.4; E_value=9e-100; Accession=PF00069.17; Description=Protein kinase domain
  Pfam annotation: Domain name=Pkinase_Tyr; Domain location=18-271; Score=29.9; E_value=1e-15; Accession=PF07714.9; Description=Protein tyrosine kinase
  Pfam module annotation: Pfam domain module=APH::NAF::Pkinase::Pkinase_ Tyr; Domain location=20-190::306-373::18-273::18-271
MGEGDGDVKAGGVLQGRYELGRVLGHGNFGRVHTARDLRTGRSVAVKVLSKDKVVRAGMMEQIKREIAVMKRVSHPNIVELHEVMATRSRIYLALELVRGGELFARIVRAGRVREDVARRYFRQLVSAVDFCHARGVFHRDLKPENLLIDEAGNLKVVDFGLSALADHTRSDGLLHTLCGTPGYVAPEVFRNKGYDGAKADIWSCGVILYVLLAGSLPFPEDNIASMFKKMSRGDYRCPPWLSTEARRLIPRLLDPNPDTRITIAQMVETPWFKKSSSVPRPVNAAAEPPAEPACAGKDGGDKDEPPETLNAFHLISLSAGFDLSPLFDVEGGSARGHREGGMRFATRESASGVVSRLEEVAARGGGRMRVTKSGARGVWFEGAEQRYGT

SEQ ID NO: 77740 - protein, 60 aa, Setaria italica
  Transcript Sequence Number=SeqID_11766
KFDRLKVLNAVNRSAFSLFKPCIHIFPTLIFIFSPHLLSTTCAHPCYNQRCSEEAAMKFL

SEQ ID NO: 77741 - protein, 338 aa, Setaria italica
  misc_feature (48)..(48): Xaa can be any naturally occurring amino acid
  misc_feature (64)..(64): Xaa can be any naturally occurring amino acid
  misc_feature (81)..(81): Xaa can be any naturally occurring amino acid
  misc_feature (125)..(125): Xaa can be any naturally occurring amino acid
  misc_feature (170)..(170): Xaa can be any naturally occurring amino acid
  Transcript Sequence Number=SeqID_11767
  Gene Ontology: Mol. function=aspartic-type endopeptidase activity; Cellular component=chromatin; Biological process=chromatin assembly or disassembly
  Homolog annotation: Hit_ID=Q8SA91; Match level="QueryCoverage=99%, HitCoverage=13%, E-value=3e-70, Identity=43%"; Hit description =Putative gag-pol polyprotein
  Pfam annotation: Domain name=Retrotrans_gag; Domain location=122-216; Score=37.6; E_value=4.8e-08; Accession=PF03732.9; Description =Retrotransposon gag protein
MDPSLIPNPKSAFERPPATDPSADGPHGHRVESIHRDEGFGSMYTHTXSPVKGACPLPNPTFPXISFSLLWGHQDNSLVTXGKLPKLQFPIFEGENPKLWLSRCEDYFEMYRVDPTIWVKVSIMXFDVSSPAARWALSVDRQLKRSSWSEFSSMLIDRFGRDQQELLIRXMFHIKQFRTVFDYVAKFTELIDQLIAYGYTTDPLYYTTRFIDGMRDDICSIVLVQRPSTLDIACTLALLQEEVADPSRCRDWRRLDAGFPPRPPPRGPLPLPTPPCIDKAVAPSTVAADVSPSKDFNKSQVDKFASLCAYRRARGLCDKCTKKWHHGHKCSPTVQLNA

SEQ ID NO: 77742 - protein, 206 aa, Setaria italica
  Transcript Sequence Number=SeqID_11768
  Gene Ontology: Mol. function=inositol or phosphatidylinositol phosphatase activity
  Homolog annotation: Hit_ID=B6SWI5; Match level="QueryCoverage=100%, HitCoverage=33%, E-value=2e-33, Identity=49%"; Hit description=Type I inositol-1,4,5-trisphosphate 5-phosphatase CVP2
RPAQAWESVIRGALRRAQPSRPKYKCYSHPPSPSRFDPPPAAADELLPGTDTETDTDDDAPFGFPARPEQHVAATPRKLSRLNHFSVVDDDPAELNGDEPDELDQEPQQPGRMLLRSLSRADRVGLVWPEQPLDLLPARAMNAASSASFKASKSFRAYKSFRGSSRVADAAAADELPMIPDLDLDLDGALRKKKSRSPFVRIVSKQ

SEQ ID NO: 77743 - protein, 126 aa, Setaria italica
  Transcript Sequence Number=SeqID_11769
  Homolog annotation: Hit_ID=Q7XGU7; Match level="QueryCoverage=72%, HitCoverage=28%, E-value=8e-32, Identity=76%"; Hit description =Thaumatin-like protein 1, putative, expressed
EAFGSAEYCCSGDHGNPSTCKPSAYSQFFKNACPRAYSYAYDDATSTFTCAGGDTTYAITFCPSTTSVKADGASPQAAGDLPLMNDTMVYLGADQLIAATATARPPSSLLHAVLAVAAIVLAGALC

SEQ ID NO: 77744 - protein, 154 aa, Setaria italica
  Transcript Sequence Number=SeqID_11770
  Homolog annotation: Hit_ID=Q7XGU7; Match level="QueryCoverage=71%, HitCoverage=32%, E-value=1e-38, Identity=73%"; Hit description =Thaumatin-like protein 1, putative, expressed
  Pfam annotation: Domain name=Thaumatin; Domain location=1-109; Score=- 16.6; E_value=6.9e-07; Accession=PF00314.9; Description=Thaumatin family
PHGAAGGGNCAPTGCMLDLNRACPADLRVASTSSPGGGGVACKSACEAFGSAEYCCSGDHGNPSTCKPSAYSQFFKNACPRAYSYAYDDATSTFTCAGGDTTYAITFCPSTTRYEHTSCVTCYLTRTCSYRTFLVADYCDQNELIVLGCVCKQA

SEQ ID NO: 77745 - protein, 151 aa, Setaria italica
  misc_feature (23)..(23): Xaa can be any naturally occurring amino acid
  Transcript Sequence Number=SeqID_11771
  Gene Ontology: Mol. function=protein serine/threonine kinase activity; Biological process=protein amino acid phosphorylation
  Homolog annotation: Hit_ID=Q7XKV8; Match level="QueryCoverage=100%, HitCoverage=21%, E-value=6e-53, Identity=66%"; Hit description =OSJNBa0073E02.11 protein
VLNQISTYCYNHSSGQMEANRWXSNIRGTPFRFSDVHNKFTVIGCNTLAYIYDNAGTGYLSGCVSTCQNLSDLADGTCSGIGCCQTAIPRNMGYYEVLFDRGFNTSKVWRFNRCSYAVLMEAEAFNFSTKYISTTMFNDTRIGRAPVVMDW

SEQ ID NO: 77746 - protein, 298 aa, Setaria italica
  Transcript Sequence Number=SeqID_11772
  Gene Ontology: Mol. function=protein serine/threonine kinase activity; Biological process=protein amino acid phosphorylation
  Homolog annotation: Hit_ID=Q653D1; Match level="QueryCoverage=92%, HitCoverage=36%, E-value=5e-62, Identity=48%"; Hit description =Putative wall-associated kinase 4
  Pfam annotation: Domain name=EGF_CA; Domain location=104-145; Score =10.8; E_value=0.015; Accession=PF07645.7; Description=Calcium binding EGF domain
WQDPTPFSTNFTTCRYVFLVETAWFSYSDAAFFSRTDDFAVPVVLDWAVRNVGNCTAARRNATDYACRSAHSDCVDSIGNGDGYRCNCSKGYEGNPYLDGGCRDIDECNRKHEYSCYGDCTNKPGTYICECPPGTTGDHSRQNGCRPKDKFTLALKVVTGVSVGVFLSVFMCFWLYLGLQKRKLIRTKQRFFEQNGGVILQQQMRSYSSAGAGAGGFKIFSEEELEKATNNFADDRVLGRGGHGVVYRGVLEDKTVVAIKKSKMMEEAQTKEFAREMFILSQINHRNVGNCTTARRNT

SEQ ID NO: 77747 - protein, 96 aa, Setaria italica
  Transcript Sequence Number=SeqID_11773
  Homolog annotation: Hit_ID=Q69JJ7; Match level="QueryCoverage=97%, HitCoverage=15%, E-value=5e-28, Identity=62%"; Hit description =Putative pentatricopeptide (PPR) repeat-containing protein
  Pfam annotation: Domain name=PPR; Domain location=14-48; Score=26.0; E_value=0.00015; Accession=PF01535.12; Description=PPR repeat
VCDFFARMPFRDSISWNTVLSWCVANGEYDEAIAVFREMLASQECQPDRVTLVSVVSAIAYLGALALGLWAHAYVIRKGVEVEEKLSSALINMYSK

SEQ ID NO: 77748 - protein, 100 aa, Setaria italica
  Transcript Sequence Number=SeqID_11774
  Gene Ontology: Mol. function=inorganic anion exchanger activity; Cellular component=integral to membrane; Biological process=anion transport
  Homolog annotation: Hit_ID=B6SV45; Match level="QueryCoverage=95%, HitCoverage=14%, E-value=4e-35, Identity=77%"; Hit description=Boron transporter-like protein 2
MPVIRIINEFSVPEDADSSSPIYQFQWLYVNGLLGVIFSIGLLFTALRTRRARSWLYGVGWLRSFIADYGVPLMVIVWTALSYTLPSKVPSGVPRRLFSP

SEQ ID NO: 77749 - protein, 94 aa, Setaria italica
  Transcript Sequence Number=SeqID_11775
  Homolog annotation: Hit_ID=A8JFN5; Match level="QueryCoverage=86%, HitCoverage=25%, E-value=7e-11, Identity=34%"; Hit description=SOUL heme-binding protein
VTLATNFGSLLEKSNMELTKWEDLEDKSIGHWRFSCVMSFPWRPILSATGYTEYYFDAESGKVCRHVENWNVPKMALLRQIFRPSRWIWEKRAG

SEQ ID NO: 77750 - protein, 292 aa, Setaria italica
  Transcript Sequence Number=SeqID_11776
  Gene Ontology: Mol. function=protein serine/threonine kinase activity; Cellular component=centrosome; Biological process=protein amino acid phosphorylation
  Homolog annotation: Hit_ID=B6T743; Match level="QueryCoverage=99%, HitCoverage=98%, E-value=1e-166, Identity=95%"; Hit description =Serine/threonine-protein kinase Eg2-like
  Pfam annotation: Domain name=Pkinase; Domain location=29-280; Score =302.6; E_value=8.3e-88; Accession=PF00069.17; Description=Protein kinase domain
  Pfam annotation: Domain name=Pkinase_Tyr; Domain location=29-275; Score=49.9; E_value=4.8e-17; Accession=PF07714.9; Description =Protein tyrosine kinase
  Pfam module annotation: Pfam domain module=Pkinase::Pkinase_Tyr; Domain location=29-280::29-275
MAIATESRGSEDKASAHANEEKRWVLSDFEVGKPLGRGKFGHVYLAREKRSNQIVALKVLFKSQLKQSQVEHQLRREVEIQSHLRHPNILRLYGYFYDQTRVYLILEYAAKGELYKELTRCKHFSERRSATYIASLARALIYLHGKHVIHRDIKPENLLIGVQGELKIADFGWSVHTFNRRRTMCGTLDYLPPEMVEKTEHDYHVDIWSLGILCYEFLYGVPPFEAKEHSETYRRIVKVDLKFPLKPFVSPAAKDLISQMLVKNSAHRLPLHKVLEHPWIVQNADPSGVYRG

SEQ ID NO: 77751 - protein, 53 aa, Setaria italica
  Transcript Sequence Number=SeqID_11777
MEEGTTESGSFSRSSSFGGFEEWVALVRKRNGKTSSCGRLAIRSSASSEVLEL

SEQ ID NO: 77752 - protein, 92 aa, Setaria italica
  Transcript Sequence Number=SeqID_11778
CDANPHQINESKMKQESSYLKDQEQHVILQPPHSWRSKRRTKARVIRRQLRGKDETDAFCFALLAFLSSSTTPPRVEETKEEERKQPFFPIT

SEQ ID NO: 77753 - protein, 333 aa, Setaria italica
  Transcript Sequence Number=SeqID_11779
  Gene Ontology: Mol. function=hydrolase activity; Biological process =metabolic process
  Homolog annotation: Hit_ID=B6T7L7; Match level="QueryCoverage=98%, HitCoverage=92%, E-value=1e-75, Identity=45%"; Hit description =Gibberellin receptor GID1L2
  Pfam annotation: Domain name=Abhydrolase_3; Domain location=89-311; Score=172.6; E_value=1.1e-48; Accession=PF07859.5; Description =alphabeta hydrolase fold
MAMDSGSVEVVFECDCFRLYSDGHVERTGGMETVPAGFDAATGVTSKDVVIDASTGVATRLYLPAIQTAAPLLPSESDDDSAATKLPVLVIFHGGFFIVGSSGGPDFHRYVNSLVARSRVVAVSVDYRLAPEHPLPAAYDDSWAALNWAVSGADPWLSDHGDLGRVFVAGGSAGANIAHNMAVATGTSVLHAATPALAARIGGVILLHPSFCGEQKLEDEAEEFLQANKKRWEVIFPSARDGTDDPRINPMAAGAAPGLAKLAGKRLFVATASEDPRAPRGRAYCEAVRTSGWMGKVEWFESKGKGHAFFVSDHGSHEAVALMDRVVAFVAAH

SEQ ID NO: 77754 - protein, 90 aa, Setaria italica
  Transcript Sequence Number=SeqID_11780
  Gene Ontology: Mol. function=cyclin-dependent protein kinase activity
  Homolog annotation: Hit_ID=Q7XUF4; Match level="QueryCoverage=95%, HitCoverage=12%, E-value=1e-20, Identity=64%"; Hit description =Cyclin-dependent kinase G-2
GVSSPSKKRKFSPIIWDRDSPKPTNNSDASRGKKVVESVPAELPPPPPLPPKDHVPVRLAVEKSPIDVEPTVGTESAEQLPEHENRVAEE

SEQ ID NO: 77755 - protein, 91 aa, Setaria italica
  misc_feature (25)..(25): Xaa can be any naturally occurring amino acid
  Transcript Sequence Number=SeqID_11781
  Gene Ontology: Mol. function=cyclin-dependent protein kinase activity
  Homolog annotation: Hit_ID=Q7XUF4; Match level="QueryCoverage=92%, HitCoverage=12%, E-value=8e-20, Identity=63%"; Hit description =Cyclin-dependent kinase G-2
KVLRTPSKKRKFSPIIWDRDSPKPXNNSDASRGKKVVESVPAELPPPPPLPPKDHVPVRLAVEKSPIDVEPTVGTESAEQLPEHENRVAEE

SEQ ID NO: 77756 - protein, 67 aa, Setaria italica
  Transcript Sequence Number=SeqID_11782
  Gene Ontology: Mol. function=cyclin-dependent protein kinase activity; Biological process=protein amino acid phosphorylation
  Homolog annotation: Hit_ID=Q7XUF4; Match level="QueryCoverage=91%, HitCoverage=8%, E-value=9e-27, Identity=91%"; Hit description=Cyclin- dependent kinase G-2
NIPDWYVVKHKWFSEVPLPKSKDFMPTFPALNELDRRTKRYLKSPDPLEEQRLKELQGNIGNRGLFG

SEQ ID NO: 77757 - protein, 200 aa, Setaria italica
  misc_feature (61)..(61): Xaa can be any naturally occurring amino acid
  misc_feature (185)..(185): Xaa can be any naturally occurring amino acid
  Transcript Sequence Number=SeqID_11783
  Gene Ontology: Mol. function=cyclin-dependent protein kinase activity; Cellular component=cytoplasm; Biological process=protein amino acid phosphorylation
  Homolog annotation: Hit_ID=Q7XUF4; Match level="QueryCoverage=100%, HitCoverage=28%, E-value=1e-111, Identity=95%"; Hit description =Cyclin-dependent kinase G-2
  Pfam annotation: Domain name=Pkinase; Domain location=1-179; Score =80.1; E_value=8.2e-21; Accession=PF00069.17; Description=Protein kinase domain
  Pfam annotation: Domain name=Pkinase_Tyr; Domain location=1-197; Score=-122.4; E_value=1.4e-05; Accession=PF07714.9; Description =Protein tyrosine kinase
  Pfam module annotation: Pfam domain module=Pkinase::Pkinase_Tyr; Domain location=1-179::1-197
DSIFMVMEYMEHDLKGVMETMKQPYTQSEVKCLMIQLLEGVKYLHDNWVLHRDLKTSNLLXLNNRGELKICDFGLSRQYGSPLKPYTQLVVTLWYRAPELLLGTKEYSTAIDMWSVGCIMAELLAKEPLFNGKTEFEQLDKIFRTLGTPNEKIWPGYAKLPGVKVNFVKQPYNRLRDKFPAASFXGRPILSEAGFVFLSS

SEQ ID NO: 77758 - protein, 76 aa, Setaria italica
  Transcript Sequence Number=SeqID_11784
  Gene Ontology: Mol. function=cyclin-dependent protein kinase activity; Biological process=protein amino acid phosphorylation
  Homolog annotation: Hit_ID=Q7XUF4; Match level="QueryCoverage=98%, HitCoverage=10%, E-value=4e-34, Identity=90%"; Hit description =Cyclin-dependent kinase G-2
VLLTYDPDKRISADDALKHKWFSEVPLPQSKDFMPTFPALNELDRRTKRYLKSPDPLEEQRLKELQGNIGNRGLFG

SEQ ID NO: 77759 - protein, 278 aa, Setaria italica
  misc_feature (11)..(11): Xaa can be any naturally occurring amino acid
  misc_feature (261)..(261): Xaa can be any naturally occurring amino acid
  Transcript Sequence Number=SeqID_11785
  Gene Ontology: Mol. function=cyclin-dependent protein kinase activity; Cellular component=cytoplasm; Biological process=protein amino acid phosphorylation
  Homolog annotation: Hit_ID=Q7XUF4; Match level="QueryCoverage=99%, HitCoverage=38%, E-value=1e-158, Identity=96%"; Hit description =Cyclin-dependent kinase G-2
  Pfam annotation: Domain name=Pkinase; Domain location=5-260; Score =252.3; E_value=1.1e-72; Accession=PF00069.17; Description=Protein kinase domain
  Pfam annotation: Domain name=Pkinase_Tyr; Domain location=5-260; Score=8.4; E_value=2.8e-14; Accession=PF07714.9; Description=Protein tyrosine kinase
  Pfam module annotation: Pfam domain module=Pkinase::Pkinase_Tyr; Domain location=5-260::5-260
EFDEFERLNKXNEGTYGVVYRARDKKTNEIVALKKVKMEKEREGFPLTSLREINILLSFHHPSIVDVKEVVVGSSLDSIFMVMEYMEHDLKGVMETMKQPYTQSEVKCLMIQLLEGVKYLHDNWVLHRDLKTSNLLLNNRGELKICDFGLSRQYGSPLKPYTQLVVTLWYRAPELLLGTKEYSTAIDMWSVGCIMAELLAKEPLFNGKTEFEQLDKIFRTLGTPNEKIWPGYAKLPGVKVNFVKQPYNRLRDKFPAASFFXVPILSEAGFDLLNSLLT

SEQ ID NO: 77760 - protein, 365 aa, Setaria italica
  Transcript Sequence Number=SeqID_11786
  Gene Ontology: Mol. function=cAMP-dependent protein kinase regulator activity; Cellular component=protein serine/threonine phosphatase complex; Biological process=regulation of protein amino acid phosphorylation
  Homolog annotation: Hit_ID=B8PY97; Match level="QueryCoverage=83%, HitCoverage=28%, E-value=1e-145, Identity=78%"; Hit description =Putative cyclic nucleotide-dependent hybrid protein phosphatase 2C/protein kinase isoform A variant 1
  Pfam annotation: Domain name=PP2C; Domain location=92-365; Score =73.1; E_value=1e-18; Accession=PF00481.13; Description=Protein phosphatase 2C
MGCSASKCCSQLKCSLCSSGCLGQTPDSPRESRGKLSRGRGKGIGGSDDSSDDLGEDDDSLNQMNTRESTVGISRLSRVSSQFLPPDGSRKVQVPLGNYDLRYSFLSQRGYYPESLDKPNQDSYCIHTPFGASPDDHFFGVFDGHGEYGAQCSQFVKRRLCENLLRDNRFRTDAVLALHSAFVATNSQLHDDNLDDSMSGTTAITILVRGKTIYVANTGDSRAVIAEKRGDNIVAVDLSIDQTPYRFDELERVKECGARVLTLDQIEGLKNPDVQCWGTEESDDGDPPRLWVQNGMYPGTAFTRSIGDSVAESIGVIADPEIFGLDLNSKNPIFVLASDGVFEFLSSQTVVDMISKYKDPRDACA

SEQ ID NO: 77761 - protein, 150 aa, Setaria italica
  Transcript Sequence Number=SeqID_11787
  Gene Ontology: Mol. function=hydrolase activity; Biological process =metabolic process
  Homolog annotation: Hit_ID=B9SNK0; Match level="QueryCoverage=97%, HitCoverage=43%, E-value=1e-41, Identity=57%"; Hit description =Gibberellin receptor GID1, putative
  Pfam annotation: Domain name=Abhydrolase_3; Domain location=1-124; Score=24.7; E_value=5.1e-09; Accession=PF07859.5; Description =alphabeta hydrolase fold
GAPRLAPAAVAIRGYVQLMPFFGGVQRTRSEAECPDDAFLNRPLNDRYWRLSLPEGATADHPVANPFGPGAPPLEGVELAPTLVVVGGRDILHDRAVDYAARLRAMGKPVEVRDFEGQQHGFFTIDPWSDASAELMRVIKRFVDSDGRFD

SEQ ID NO: 77762 - protein, 264 aa, Setaria italica
  misc_feature (13)..(13): Xaa can be any naturally occurring amino acid
  Transcript Sequence Number=SeqID_11788
  Gene Ontology: Mol. function=zinc ion binding; Cellular component =peroxisomal membrane; Biological process=peroxisome organization and biogenesis
  Homolog annotation: Hit_ID=Q9AV73; Match level="QueryCoverage=100%, HitCoverage=64%, E-value=1e-106, Identity=71%"; Hit description =Putative peroxin
  Pfam annotation: Domain name=Pex2_Pex12; Domain location=1-175; Score= 9.4; E_value=8.5e-05; Accession=PF04757.6; Description=Pex2  Pex12 amino terminal region
KNIYNKEREARLXQATLWGQDDVRFDEAGFVLDQEQTSQAQNDPTTDEVSNLTRFKKNFASLIGVCYPWIHATNEGFSFAYQLLYLLDATAFYSPALHVLGLHVCRATGQELMDSSSRISRIRNRELERLRGPPWLKAVQRVFLSCMYTTLDYAQTGLIAAVFFFKMMEWWYQSAEERMSAPTVYPPPPPPPTPKVAKDGIPLPSDKTLCPLCCQKRANPSVLSVSGFVFCYSCIFKSVSQHKRCPVTLMPATVEQIRRLFHDL

SEQ ID NO: 77763 - protein, 673 aa, Setaria italica
  misc_feature (244)..(244): Xaa can be any naturally occurring amino acid
  misc_feature (394)..(394): Xaa can be any naturally occurring amino acid
  Transcript Sequence Number=SeqID_11789
  Gene Ontology: Biological process=protein localization
  Homolog annotation: Hit_ID=Q6K796; Match level="QueryCoverage=96%, HitCoverage=14%, E-value=0.0, Identity=77%"; Hit description =Vacuolar protein sorting 13C protein-like
  Pfam annotation: Domain name=DUF1162; Domain location=168-524; Score=- 59.7; E_value=0.00035; Accession=PF06650.4; Description=Protein of unknown function (DUF1162)
SLPKLQQQQSSLSRTSTLKQSAVPSRDSFLKLAELEKKDVLSYCHPPVGNERYFWFSVGIDASVVHTDLNVPVYDWRISFNSILRLENKLPYQAEYAIWEVSTKGNMVERQHGMVASGGSVFIYSADIRKPIYLTLFLQNGWILEKDAVLIMDLLSLEHVSSFWMVQKQSQRRLRVSVEHDLGASDAAPKTLRLFVPYWIKNHSSIPLSYRIVEGETTESSDADSLRPDSLSRVAKSSKFSLQXTSSKSLVRRGTMSRNMQVLEVIEDCSTNYVMLSPQDYLNRSSGMRSESRDNNFSPARVAISVAVGSCTQYSIGVSLFELENKEHVDLKAFASDGSYYWFSAQLKMTSDRTKVVNFLPRALLINRIGRSIFLSEYHDETEELLQPYEPPKXFQWRSEFGSELLKLRLEGYKWSTPFSINANGVMCVLMNSVTGNDQAFVRVNVRSGAKSSRYEVIFQLDCWSSPYRVENRSMFLPIRFRQVGGDDYSWRSLPPNSSASFFWEDLSRRRLLEVLVDGTDPINSMTYDIDVVMDHQPLTNSSALKKALRVTVLKEGKLHVAQISDWLPDNRNRGQITERILSPIFQPSEVDYGQSSPDLDSEFHVTLELTELGISVIDHMPEEVLYLSVQQLLLAYSSGMGSGVNRLKMRMHWIQVDNQLPFVPMPVLFCPQ

SEQ ID NO: 77764 - protein, 56 aa, Setaria italica
  Transcript Sequence Number=SeqID_11790
  Gene Ontology: Mol. function=microtubule motor activity; Cellular component=microtubule associated complex; Biological process =microtubule-based process
  Homolog annotation: Hit_ID=B6TQL2; Match level="QueryCoverage=100%, HitCoverage=28%, E-value=1e-26, Identity=96%"; Hit description =Microtubule motor
  Pfam annotation: Domain name=Dynein_light; Domain location=1-48; Score=16.0; E_value=3.3e-05; Accession=PF01221.10; Description =Dynein light chain type 1
LKKEFDTAYGPAWHCIVGTSFGSYVTHSLGGFLYFSVDKAYILLFRTAVEPLGHPR

SEQ ID NO: 77765 - protein, 37 aa, Setaria italica
  Transcript Sequence Number=SeqID_11791
DKEIVTLQVVSISKAIKSEHDRSYHSYFSVLSHKLRT

SEQ ID NO: 77766 - protein, 392 aa, Setaria italica
  Transcript Sequence Number=SeqID_11792
  Gene Ontology: Mol. function=heat shock protein binding; Biological process=protein folding
  Homolog annotation: Hit_ID=B6TAW2; Match level="QueryCoverage=100%, HitCoverage=100%, E-value=0.0, Identity=83%"; Hit description =Chaperone protein dnaJ 10
  Pfam annotation: Domain name=DnaJ; Domain location=6-68; Score=127.5; E_value=4.4e-35; Accession=PF00226.23; Description=DnaJ domain
MVKDTDYYDVLGVDPSATESEIKKAYYIKARQVHPDKNPNDPDAAANFQALGEAYQVLSDPTQRQAYDLHGKSGISTEGIIDPAAIFAMLFGSELFEDYIGQLAMASMASLDNFGEDEHIDPRKLQERMQTVQKEREEKLAEILKNRLHIYVQGNKEEFIQLAEAEVSKLSNAAYGVVMLNTIGYVYSRQAAKELGKKAIFLGVPFVAEWFRDKGHFIKSQVTAATGAIALMQLQEDLRKYMSAEGLYTEEELEMYMENHKKVMVDSLWKLNVADIEATLSRVCQMVLQDSSARKEELRLRAKGLKTLGKIFQRVKLNPSEGEASQVRNIDNMDEDNGSSPDSSPNREPQFTPNQPHIPSPYVEAPQVNGTYCSFNFPMPTAPPGAQRDPRP

SEQ ID NO: 77767 - protein, 104 aa, Setaria italica
  Transcript Sequence Number=SeqID_11793
  Homolog annotation: Hit_ID=B9RI62; Match level="QueryCoverage=100%, HitCoverage=44%, E-value=2e-25, Identity=56%"; Hit description =Catalytic, putative
TGDGAKLSVRVFRPPASGEEPEAAGDVAVGCLVHPYTILGGVQGLLRGMAEGVARRGYTAVTFDMRGAGRSTGRASLTGSTEVGDVAAVCRWVTENIRPRGILL

SEQ ID NO: 77768 - protein, 134 aa, Setaria italica
  Transcript Sequence Number=SeqID_11794
  Gene Ontology: Mol. function=RNA binding
  Homolog annotation: Hit_ID=B9S7G5; Match level="QueryCoverage=58%, HitCoverage=11%, E-value=4e-12, Identity=51%"; Hit description =Nucleic acid binding protein, putative
  Subcellular localization annotation: CTP_CleavageSite=50; ConfidenceScore=5.33e-01
AAPPPPPPPPPPPSAAAGPPGAASNTTSFRILCPECKAYGFPSGFIAKVRDDSGALVTVHPPFAGDYVRIIETVDGVRREADGRPPMYSPAQEALLMVHRRILETEAEDGDEDGEYGPRGKDPRDRGKTTTRLI

SEQ ID NO: 77769 - protein, 380 aa, Setaria italica
  Transcript Sequence Number=SeqID_11795
  Gene Ontology: Mol. function=ubiquitin-protein ligase activity; Cellular component=ubiquitin ligase complex; Biological process =ubiquitin-dependent protein catabolic process
  Homolog annotation: Hit_ID=Q7F1X9; Match level="QueryCoverage=98%, HitCoverage=47%, E-value=0.0, Identity=84%"; Hit description =B1065G12.5 protein
  Pfam annotation: Domain name=U-box; Domain location=295-367; Score =79.5; E_value=1.2e-20; Accession=PF04564.7; Description=U-box domain
MDVMEAEEGPFLANDAKLHAGICRAFHPAVSKLSTIFPFIEASRPRSKSGIQALCSLHVALDKAKGLLQHCADSSRLYLAITSETVLLKFEKSRSQLQESLRRVESIVTEDISCKITEIVSELEGIVFSLDRSEKEAGDDVINLLQRNNKTNGSSDSGELDVFHMAALKLGITSSRAALTERRALKKLIEKARSDEDKRKELVVSYLYNLMRKYSKFFRSEAGDDTDSQGSSPCSPTVLGMDDMYGPYGNGRAFSRQLLSVQSFNSRFGSFNSRLGSFNCRRGGGPRSENMSIPPEELRCPISLQLMYDPVIISSGQTYERVCIEKWFNDGHSTCPKTQQQLAHLSLTPNYCVKALIASWCEQNDFPVPDGPTGVLLMLK

SEQ ID NO: 77770 - protein, 47 aa, Setaria italica
  Transcript Sequence Number=SeqID_11796
WDINKGVHALTYYQELLCTCPLRINKLLPAYYNQETASLYARIKLLL

SEQ ID NO: 77771 - protein, 399 aa, Setaria italica
  Transcript Sequence Number=SeqID_11797
  Gene Ontology: Mol. function=protein binding; Biological process =ubiquitin-dependent protein catabolic process
  Homolog annotation: Hit_ID=Q6YUN4; Match level="QueryCoverage=94%, HitCoverage=71%, E-value=1e-168, Identity=80%"; Hit description =Putative Avr9/Cf-9 rapidly elicited protein
LVADRLGPGLRRLKLRSLRAVTDDGVAALAAAAANLRKLSVGSCAFGAKGIEAVLRCCLQLEELSIKRLRGLADSEPIAVSGPRLQSLSLKDLYNGQCFSCLITQSPNLKTLKIIRCSGDWDLVLQDVPKDSILSELHLEKLQVSDRGVAALYGLEVLYLAKAPEVTDVGLAALAAKSPRLRKLHVDGWKANRIGDRGLAAVAQKCASLQELVLIGVNLTYSSLELIAANCPTLERLALCGSDTFGDAEISCVAAKCAALRKLCIKACPVSDVGMDKLAEGCPRLVKVKVKKCRRVTSECAERLRASRNGALAVNFDTPGGAGELQDARSIDESGVLDNAGSDVPPEDLDDRIGPDISSGSSGRPSRWKARMGALMPRSLSVSIFRRQSHGASYTSHES

SEQ ID NO: 77772 - protein, 59 aa, Setaria italica
  Transcript Sequence Number=SeqID_11798
HTCESTTPTFNSILIWLQLAHILILLPLRRHKRAWVSKGKYGYVHKGYKNFFPSKLLFN

SEQ ID NO: 77773 - protein, 150 aa, Setaria italica
  misc_feature (28)..(28): Xaa can be any naturally occurring amino acid
  Transcript Sequence Number=SeqID_11799
  Gene Ontology: Mol. function=protein binding
  Homolog annotation: Hit_ID=B6VCR0; Match level="QueryCoverage=82%, HitCoverage=38%, E-value=1e-35, Identity=59%"; Hit description =Putative BTB/POZ domain containing protein (Fragment)
VLPKLSSQTLHALLTSDELWVPNEEKRXTMFELQVSGSETSSSNADHSMRKGKTPMDEPGEEQLIESELQNLKLHDNLGNEIAHNIIAISDTNGEASKRMGNDCSTGGPSGESTSYQFNENIWLSSEQTKNYFSRTSSSGVVPTEWGRPK

SEQ ID NO: 77774 - protein, 109 aa, Setaria italica
  misc_feature (98)..(98): Xaa can be any naturally occurring amino acid
  Transcript Sequence Number=SeqID_11800
  Gene Ontology: Mol. function=protein binding
  Homolog annotation: Hit_ID=UPI0001A7B0D1; Match level="QueryCoverage =57%, HitCoverage=7%, E-value=2e-24, Identity=77%"; Hit description =protein binding
RLANKCSAIYLLSSLGSKGLQLDVHIDSLFLAWLDQLIAVHRVEFEDVHRLADGQVKHSTEVFYAGSLWKVSVQAFNDEDPHGRTTLGLFLHRRKAEXLDPLRKVSDLL

SEQ ID NO: 77775 - protein, 138 aa, Setaria italica
  Transcript Sequence Number=SeqID_11801
  Gene Ontology: Mol. function=protein binding
  Homolog annotation: Hit_ID=B6VCQ8; Match level="QueryCoverage=100%, HitCoverage=30%, E-value=2e-46, Identity=64%"; Hit description =Putative BTB/POZ domain containing protein (Fragment)
HDNLGNEIAHNIIAISDTNGEASKRMGNDCSTGGPSGESTSYQFNENIWLSSEQTKNYFSRTSSSGVVPTEWGRPNAPLWGGRVVGRRQVRCIRGGSCLSSDEYNAFMNIFERGSLLYCNMSFDALLSVRKQLEEFGF

SEQ ID NO: 77776 - protein, 658 aa, Setaria italica
  Transcript Sequence Number=SeqID_11802
  Gene Ontology: Mol. function=protein binding
  Homolog annotation: Hit_ID=B6VCQ8; Match level="QueryCoverage=71%, HitCoverage=100%, E-value=0.0, Identity=77%"; Hit description =Putative BTB/POZ domain containing protein (Fragment)
  Pfam annotation: Domain name=MATH; Domain location=525-657; Score= -1.9; E_value=0.07; Accession=PF00917.18; Description=MATH domain
VLAAASFLDLQDLCTICTDFIISELWTSNFLQYQLFAESQDYGSHGERVRNACWGYLCQSATLELREVLPKLSSQTLHALLTSDELWVPNEEKRFELALFTLLAKVTMFELQVSGNETSSSNADHSMRKGKTPMDEPGEEQLIESELQNLKLHDNLGNEIAHNIIAISDTNGEASKRMGNDCSTGGPSGESTSYQFNENIWLSSEQTKNYFSRTSSSGVVPTEWGRPNAPLWGGRVVGRRQVRCIRGGSCLSSDEYNAFMNIFERGSLLYCNMSFDALLSVRKQLEEFGFPCKAVNDGLWLQMLLCHRVQAIVADTCRNCCLTSSSCACKQAYVSSHTHYRQENDRSSASGTIGNIYLADAQGDGNGGLGPVRVNVRGAVDGLAGIGRGNSNVPGAAWAPTRYVFSRVPYGLGSRNGQQFANDESEPRIDRNGDISADGLTALVNLSQESNVVHQQAESIFETSVQTRYRSVASVSTPGGSSVQMQESKEHELGSDWETAEDATISLDMKTPLSHFPPFRFGVEFEDVHRLADGQVKHSTEVFYAGSLWKVSVQAFNDEDPHGRRTLGLFLHRRKAEFLDPLRKVHMYVDPREKVTARYQLICPSKREVMIFGSLKQAGTLLPKAPKGWGWRTAILFDELADLLQAGALRIAAVVQLV

SEQ ID NO: 77777 - protein, 173 aa, Setaria italica
  misc_feature (21)..(21): Xaa can be any naturally occurring amino acid
  Transcript Sequence Number=SeqID_11803
  Gene Ontology: Mol. function=protein dimerization activity; Cellular component=nucleus; Biological process=regulation of transcription, DNA-dependent
  Homolog annotation: Hit_ID=B6TJZ2; Match level="QueryCoverage=100%, HitCoverage=51%, E-value=3e-58, Identity=64%"; Hit description=IAA6 -auxin-responsive Aux/IAA family member
  Pfam annotation: Domain name=AUX_IAA; Domain location=1-165; Score= -8.3; E_value=8.6e-09; Accession=PF02309.8; Description=AUXIAA family
SDVEVLQLPVVGWPPIGSFRXNLANGSSSKQSTGSQKGEASMEEKLTCIKNHLVKINMDGIPIGRKVNLAAYDSYERLSLAVKELFQGFLAAQKNLSSAENAQLGADEKIFSQLLNGSGEYTLVYEDNEGDKMLVGDVPWNVFVSTAKRLRVLRSSELSHGLIGVAPRRVPNC

SEQ ID NO: 77778 - protein, 86 aa, Setaria italica
  Transcript Sequence Number=SeqID_11804
PRLVPARHRGASRARRHGVWRNRGILCSDGCCHGARAVSRGGENLCGAGNSQAIYEPVRSSVVGKKLVAACLLFGGWACLVGRAVN

SEQ ID NO: 77779 - protein, 183 aa, Setaria italica
  misc_feature (72)..(72): Xaa can be any naturally occurring amino acid
  Transcript Sequence Number=SeqID_11805
  Gene Ontology: Mol. function=protein binding; Cellular component =nucleus; Biological process=cell division
  Homolog annotation: Hit_ID=Q67V81; Match level="QueryCoverage=89%, HitCoverage=45%, E-value=2e-46, Identity=62%"; Hit description =Cyclin-D1-1
  Pfam annotation: Domain name=Cyclin_C; Domain location=58-179; Score =13.0; E_value=0.0036; Accession=PF02984.11; Description=Cyclin, C -terminal domain
VWLLSVACLSLAAKMEEISVPPLLELQIESTRCIFEPRTVQRMELFVLVKLDWRLRSLTPFAFIDLFACKAXRSGRCTRNLVLRACQITLDAIHEAEFLNHCPASMAAAAVLSAVTEIPGMPCISISPETAASWCTGLTEEEIRSCYQLLQQLVPMATTTRRKIPASELLRSTPSSFIQTKKE

SEQ ID NO: 77780 - protein, 100 aa, Setaria italica
  Transcript Sequence Number=SeqID_11806
  Subcellular localization annotation: CTP_CleavageSite=30; ConfidenceScore=5.40e-01
PAAGPCWRASCNQPRPSSSSSTEQVAVGVRSREPGGSAGLCGLPFLVRLYSGNRAGWSFWRGSLRRFRPSRTSSLGAVWRRRVRSGQVSVSRAVMGCRDR

SEQ ID NO: 77781 - protein, 336 aa, Setaria italica
  misc_feature (24)..(24): Xaa can be any naturally occurring amino acid
  Transcript Sequence Number=SeqID_11807
  Gene Ontology: Mol. function=aldehyde dehydrogenase [NAD(P)+] activity; Cellular component=chloroplast; Biological process =cellular aldehyde metabolic process
  Homolog annotation: Hit_ID=Q2QWY3; Match level="QueryCoverage=99%, HitCoverage=69%, E-value=1e-156, Identity=78%"; Hit description =Aldehyde dehydrogenase family protein, expressed
  Pfam annotation: Domain name=Aldedh; Domain location=1-290; Score= -117.3; E_value=1.2e-12; Accession=PF00171.14; Description=Aldehyde dehydrogenase family
PATSSLLADLLPQYVDSSCIKVVXGGVAETTALLEQKWDKIFYTGNSKVGRIVMSFAAKHLTPVVLELGGKCPVVVDSNIDLHVTAKRIAAGKWGCNNGQACISPDYIITTKSFAPKLLDSLSKVLEKFYGKDPLRSADLSRIVNSNHFNRLKALMDEEMVYDKIVFGGQSDEQQLKIAPTLLLDPPLDSAIMKEEVFGPLLPIITVDKIHESFALINSMSKPLAAYLFSKDSKLKHQFERNVSAGGMVFNDTSIHLTNQHLPFGGVGESGVGSYHGTFSFDAFAHKKAVLDRSFLGEAKARYPPYTPGKLKILKGVLKGNPLAMVQAAVGCTGGA

SEQ ID NO: 77782 - protein, 78 aa, Setaria italica
  Transcript Sequence Number=SeqID_11808
  Subcellular localization annotation: CTP_CleavageSite=38; ConfidenceScore=5.03e-01
RCEHAQQFTYKKVSAAASYFLISTSLSQPLKALTCSKNWQAKWHNPMSKMYPMTWLIVWGTQNTKNSKGVLVRFGFML

SEQ ID NO: 77783 - protein, 194 aa, Setaria italica
  misc_feature (23)..(23): Xaa can be any naturally occurring amino acid
  misc_feature (92)..(92): Xaa can be any naturally occurring amino acid
  Transcript Sequence Number=SeqID_11809
  Gene Ontology: Mol. function=cysteine-type peptidase activity; Cellular component=cellular_component; Biological process=cellular amino acid and derivative metabolic process
  Homolog annotation: Hit_ID=A5YBN2; Match level="QueryCoverage=92%, HitCoverage=66%, E-value=4e-69, Identity=66%"; Hit description =Otubain-like cysteine protease
  Pfam annotation: Domain name=Peptidase_C65; Domain location=1-188; Score=168.0; E_value=2.7e-47; Accession=PF10275.1; Description =Peptidase C65 Otubain
EKIKLLGEQYDALRRTRGDGNCXYRSFMFSYLEHILETQDKAEVDRIMIKIAECKKTLLSLGYIEFTFEDFFSIFVDLLESVLQGHEAPIGXMFFRFVTSGEIQRRSEFFEPFISGLTNSTVAQFCKASVEPMGEESDHVHIIALSDALGVPIRVMYLDRSSCCILGNLSVNHHDFIPSTNAEGPDAATTSTPA

SEQ ID NO: 77784 - protein, 322 aa, Setaria italica
  Transcript Sequence Number=SeqID_11810
  Gene Ontology: Mol. function=cysteine-type peptidase activity; Cellular component=cellular_component; Biological process=cellular amino acid and derivative metabolic process
  Homolog annotation: Hit_ID=A5YBN2; Match level="QueryCoverage=80%, HitCoverage=86%, E-value=1e-100, Identity=68%"; Hit description =Otubain-like cysteine protease
  Pfam annotation: Domain name=Peptidase_C65; Domain location=62-321; Score=386.5; E_value=4.5e-113; Accession=PF10275.1; Description =Peptidase C65 Otubain
MGDVPQAPHAADGGAEGEGPPAVPDPNPSPSLGGCSDPVSVELSMGGDYYRACCGEPDLDIPEGPKLPCVGDKEPLSSLAAEFQSGSPILQEKIKLLGEQYDALRRTRGDGNCFYRSFMFSYLEHILETQDKAEVDRIMIKIAECKKTLLSLGYIEFTFEDFFSIFVDLLESVLQGHEAPIGPEELLERTRDSQVSDYVVMFFRFVTSGEIQRRSEFFEPFISGLTNSTVAQFCKASVEPMGEESDHVHIIALSDALGVPIRVMYLDRSSCDTGNLSVNHHDFIPSTNAEGPDAATTSTPATEKPYITLLYRPGHYDILYPK

SEQ ID NO: 77785 - protein, 124 aa, Setaria italica
  Transcript Sequence Number=SeqID_11811
  Subcellular localization annotation: CTP_CleavageSite=21; ConfidenceScore=5.05e-01
FFSKSVNFTYMHAFAGDEHPPGMLAPSLPFLLCYFFLVSGSDPNTSKQSTPNPNVSYLYSGRHIGAPLHPPVSSQLTSCTRLVPVTLFLVFIYRRRYFLLFMVPYDLLFLFVLLLSGYDDSPSH

SEQ ID NO: 77786 - protein, 89 aa, Setaria italica
  misc_feature (82)..(82): Xaa can be any naturally occurring amino acid
  Transcript Sequence Number=SeqID_11812
NFTCTGYFDHESRQKTHLLSHKLFCISSHSISYPDPSRTAHPNATKVERMRSGRARNIQSKAEQSADHRFTAQHTEATAGKXDHRCGGR

SEQ ID NO: 77787 - protein, 91 aa, Setaria italica
  Transcript Sequence Number=SeqID_11813
LHGVIQIQQKESKLVNRLDIKHKATTYSTKNRSHKILWVAVKHLSGLSFAFAPSYNCIPHLLLPPYKPVLKEELSWLSPMKNGMTIQGQSH

SEQ ID NO: 77788 - protein, 175 aa, Setaria italica
  Transcript Sequence Number=SeqID_11814
  Gene Ontology: Mol. function=serine-type endopeptidase activity; Cellular component=cytoplasm; Biological process=proteolysis
  Homolog annotation: Hit_ID=B6U134; Match level="QueryCoverage=100%, HitCoverage=24%, E-value=4e-94, Identity=94%"; Hit description =Prolyl endopeptidase
  Pfam annotation: Domain name=Peptidase_S9_N; Domain location=13-174; Score=-117.6; E_value=1.2e-05; Accession=PF02897.7; Description =Prolyl oligopeptidase, N-terminal beta-propeller domain
MGSVAGDAARLAYPPARRDDSVVDEYHGVKIPDPYRWLEDPDSEETKEFVAKQAELAETVLAGCPDRENLRREVTRLFDHPRHAAPFRRGNKYFHFHNSGLQAQSVLYMQDDLDGKAEVLLDPNTLSNDGTVALSTYSISEDGNYIAYGLSESGSDWVSIHVMSVSNKQSMPDKL

SEQ ID NO: 77789 - protein, 218 aa, Setaria italica
  Transcript Sequence Number=SeqID_11815
  Gene Ontology: Mol. function=protein binding; Cellular component =endoplasmic reticulum membrane; Biological process=vesicle-mediated transport
  Homolog annotation: Hit_ID=Q94AU2; Match level="QueryCoverage=100%, HitCoverage=100%, E-value=1e-109, Identity=85%"; Hit description =25.3 kDa vesicle transport protein
  Pfam annotation: Domain name=Synaptobrevin; Domain location=132-218; Score=80.3; E_value=7e-21; Accession=PF00957.13; Description =Synaptobrevin
MVKLTMIARVTDGLPLAEGLDDGRDQKDADFYKQQAKLIFKNLSKGHHEASRMSIETGTYYFHYIIEGRVCYLIMCDRSYPKKLAFQYLEDLKNEFERVNGNQIETAARPYAFIKFDTFIQKTKKLYLDTRTQRNIAKLNDELYEVHQIMTRNVQEVLGVGEKLDQVSEMSRRLTSDTIVYANKAKDLNRQALIRKYAPVAIVIGVVFILFWLKNKIW

SEQ ID NO: 77790 - protein, 69 aa, Setaria italica
  Transcript Sequence Number=SeqID_11816
PRTSFLISMEIRKVVCILHFILQEQSKRELTVYVGIAFGCFPFSNHIKQRPKQENEETGKGEDLLIQLH

SEQ ID NO: 77791 - protein, 462 aa, Setaria italica
  Transcript Sequence Number=SeqID_11817
  Gene Ontology: Mol. function=cysteine desulfurase activity; Cellular component=chloroplast; Biological process=cysteine metabolic process
  Homolog annotation: Hit_ID=Q2QTQ1; Match level="QueryCoverage=81%, HitCoverage=100%, E-value=0.0, Identity=85%"; Hit description =Cysteine desulfurase, putative, expressed
  Pfam annotation: Domain name=Aminotran_5; Domain location=73-447; Score=643.5; E_value=2e-190; Accession=PF00266.11; Description =Aminotransferase class-V
  Subcellular localization annotation: CTP_CleavageSite=39; ConfidenceScore=5.63e-01
MAAAAAAAAALRCCFPGSAIGSSFVRPSSCRRGRHAAAVASSSREAEPAASLGHLTRVDFPILHQEFDGAKLVYFDNGATSQKPFSVMKTLDEYYRSYNSNVHRGIHALSAKATDAYEGARRKVANFVNAADSREIIFTRNATEAINLVAYSWGLSNIKQGDEILLTVAEHHSSIVPWQIVSQKTGATLKYVGLTKEEVPDIEQLKGLLSNKTKMVVVHHVSNVLGSMLPIEEIVTWSKRVGAKVLVDACQSVPHMPVDVQKLGADFLVASSHKMCGPTGVGFMHGTFEMLSSMEPFLGGGEMIADVFYEKSTYAEPPSRFEAGTPAIGEAIGFGAAIDYLSCIGMDQIHEYEKELAMYLYESLLSVPNVRIYGPAPSQTDHRAPLCSFNVENVHPTDIAGILDLQHNVAIRSGHHCAQILHRTLGIDASARASLHFYNTKEEVDIFIHALKDTIDLLTSQH

SEQ ID NO: 77792 - protein, 92 aa, Setaria italica
  Transcript Sequence Number=SeqID_11818
  Subcellular localization annotation: CTP_CleavageSite=73; ConfidenceScore=5.98e-01
FLFCFFVFFCFFFVFFFVFFFCFFFFVFFFLFFFFLFFFFLFFFFCFFFFFFRSRMSSIQGKAIQAKERCCCSASYSMPAVSSLSYNNNKHT

SEQ ID NO: 77793 - protein, 166 aa, Setaria italica
  Transcript Sequence Number=SeqID_11819
  Gene Ontology: Mol. function=hydrolase activity, hydrolyzing N -glycosyl compounds; Biological process=nucleotide-excision repair
  Homolog annotation: Hit_ID=B9RVA4; Match level="QueryCoverage=74%, HitCoverage=30%, E-value=2e-49, Identity=75%"; Hit description =Formamidopyrimidine-DNA glycosylase, putative
  Pfam annotation: Domain name=H2TH; Domain location=1-64; Score=43.5; E_value=6.6e-10; Accession=PF06831.6; Description=Formamidopyrimidine -DNA glycosylase H2TH dom
LLDQSFISGIGNWIADEVLYQARIHPMQTASKISKDKCATLLLCIKEVIDKSLEVGADSSQFPENWIFHSREKKPGKAFVDGKKIDFITVGGRTSAYVPELQKLDGADAATSRSKRSEDKDIDDDQKSRKGINGSKNQDQKGEEVERVGKRSGQGKAANASDDGDE

SEQ ID NO: 77794 - protein, 213 aa, Setaria italica
  Transcript Sequence Number=SeqID_11820
  Gene Ontology: Mol. function=sequence-specific DNA binding; Cellular component=nucleus; Biological process=regulation of transcription, DNA-dependent
  Homolog annotation: Hit_ID=Q5QMZ9; Match level="QueryCoverage=100%, HitCoverage=26%, E-value=3e-90, Identity=75%"; Hit description =Homeobox-leucine zipper protein HOX29
  Pfam annotation: Domain name=Homeobox; Domain location=1-36; Score= -5.1; E_value=0.038; Accession=PF00046.21; Description=Homeobox domain
  Pfam annotation: Domain name=bZIP_1; Domain location=16-76; Score =9.4; E_value=0.034; Accession=PF00170.13; Description=bZIP transcription factor
  Pfam module annotation: Pfam domain module=Homeobox::bZIP_1; Domain location=1-36::16-76
SSLRRQQLVRDCPVLANVDPKQIKVWFQNRRCREKQRKESSRLQALNRKLTAMNKLLMEENDRLQKQVSQLVYENGYYRQQTQSAGLATTDTSCESVVTSGGQQNVAAAAAQPQAQPRDASPAGLMSIAEETLTEFLSKATGTAVEWIQMPGMKPGPDSIGIIAISHGCAGVAARACGLVGMEPAKVAEILKDLPLWLRDCRSMEVVNVLPAG

SEQ ID NO: 77795 - protein, 337 aa, Setaria italica
  Transcript Sequence Number=SeqID_11821
  Gene Ontology: Mol. function=sequence-specific DNA binding; Cellular component=nucleus; Biological process=regulation of transcription, DNA-dependent
  Homolog annotation: Hit_ID=A2WLR5; Match level="QueryCoverage=99%, HitCoverage=39%, E-value=1e-141, Identity=74%"; Hit description =Homeobox-leucine zipper protein HOX29
  Pfam annotation: Domain name=MEKHLA; Domain location=186-334; Score =296.7; E_value=4.9e-86; Accession=PF08670.3; Description=MEKHLA domain
LPLAHTFDPEEFLEVIKLGNASTYQDALMHRDLFLLQMYNGVDENTVGTCSELIFAPIDASFSDDSPLLPSGFRIIPIDSPLDTSSPNCTLDLASTLEVGTPRSRMPVGGSGNAACAGSKAVMTIAFQFAFESHLQESVATMARQYMRSIIASVQRIALALSSSRLVPQVGVGVGHAPAAAATASPEAATLSRWICQSYRFHFGAELIKSADAGGCEAGLKALWNHASAILCCSLKAMPVFTFANQSGLDMLETTLVALQDITLEKVFDDQGRKNLCAELPGVMEQGFACIPGGLCVSGLGRPVSYDKALAWKVLDDDSGAHCICFMFVNWSFVSSM

SEQ ID NO: 77796 - protein, 343 aa, Setaria italica
  Transcript Sequence Number=SeqID_11822
  Gene Ontology: Mol. function=translation initiation factor activity; Cellular component=eukaryotic translation initiation factor 3 complex; Biological process=translation
  Homolog annotation: Hit_ID=A2Q5B8; Match level="QueryCoverage=98%, HitCoverage=99%, E-value=1e-158, Identity=78%"; Hit description =Mov34-1
  Pfam annotation: Domain name=Mov34; Domain location=26-134; Score =56.1; E_value=1.4e-13; Accession=PF01398.13; Description=Mov34MPNPAD- 1 family
MANPAAPGGMKSFLQAVSKVTEEAPTPLRVVQMEGLAVLKIIKHCEEFAPALVTGQLLGLDVGSVLEVTNCFPFPIREDDDEADADGANYQLEMMRCLREVNVDNNTIGWYQSCLLGSFQTVELIETFMNYQESIRRCVCIVYDPSRSSQGVLALKALKLTDSFMDLYRNNGLTGEKLREKKLSWVDIFEEIPIKVSNSALVSAFMKELEPESPVTQCDFDRLKLSTAPFMERNLEFLIGCMDDLSSEQNKFQYYYRNVSRQQSQQAAWLQKRRQENMARKAAGEEPLPEEDPSNPIFKPVPEPSRLEGYLVTNQISSYCNHINGVAGQNFNRLYLMKALHED

SEQ ID NO: 77797 - protein, 46 aa, Setaria italica
  misc_feature (12)..(12): Xaa can be any naturally occurring amino acid
  Transcript Sequence Number=SeqID_11823
  Gene Ontology: Mol. function=transcription regulator activity; Cellular component=nucleus; Biological process=regulation of transcription
GAEVVSASFSVXGKIFYTVHSQALSPRIGLDAARVSERLQDLLLLV

SEQ ID NO: 77798 - protein, 226 aa, Setaria italica
  Transcript Sequence Number=SeqID_11824
  Gene Ontology: Mol. function=nucleic acid binding; Cellular component= intracellular; Biological process=transcription from RNA polymerase II promoter
  Homolog annotation: Hit_ID=Q6BDA0; Match level="QueryCoverage=88%, HitCoverage=14%, E-value=4e-71, Identity=63%"; Hit description=Early flowering 6
  Pfam annotation: Domain name=JmjC; Domain location=1-97; Score=91.5; E_value=2.9e-24; Accession=PF02373.14; Description=JmjC domain
NFLHTGAPKTWYAVPGDRASELEEVIRVHGYGGNPDRLASLAVLGEKTTLMSPDVLVARGVPCCRLVQYPGEFVVTFPRAYHIGFSHGFNCGEAANFATPQWLKFAKDAAVRRAVMNYLPMLSHQQLLYLLAVSFITRTPSVLSGIRTSRLRDRRKEERELLVKQEFLQDMINENKLLCSFLKKKSIDNVVLWEPDLLPSSTVLNSCSSGSKAPEKKSEDGCRIEF

SEQ ID NO: 77799 - protein, 102 aa, Setaria italica
  Transcript Sequence Number=SeqID_11825
  Gene Ontology: Mol. function=transporter activity; Cellular component= membrane; Biological process=transport
  Homolog annotation: Hit_ID=B9R7I7; Match level="QueryCoverage=82%, HitCoverage=15%, E-value=7e-27, Identity=70%"; Hit description =Purine permease, putative
LFWVLMGAVLVAAFESTGAHFATARLAGATPPPGHVLSRSVGLQGIGMFLEGIFGAPAGSSVSVGNIGLLGLTKVGSRRVIQISTGFMIFFSIFGKFGAFFA

SEQ ID NO: 77800 - protein, 184 aa, Setaria italica
  Transcript Sequence Number=SeqID_11826
  Gene Ontology: Mol. function=transporter activity; Cellular component= membrane; Biological process=transport
  Homolog annotation: Hit_ID=B9R7I7; Match level="QueryCoverage=96%, HitCoverage=31%, E-value=2e-55, Identity=61%"; Hit description =Purine permease, putative
FRVTYPLGLTKVGSRRVIQISTGFMIFFSIFGKFGAFFASIPLPIFAAIYCILFGIVAAVGVSFMQFANKNSMRNIYIIGLSLFLGISVPQYFNEYTSSAGRGPARTNAGWFNDILNTVFASGPTVALIVASVLDNTLEARGFDGDRGLPWFMPFLRRHKGYSDPRNEEFYSFPIRVHDLIPSP

SEQ ID NO: 77801 - protein, 557 aa, Setaria italica
  Transcript Sequence Number=SeqID_11827
  Gene Ontology: Mol. function=transporter activity; Cellular component= membrane; Biological process=transport
  Homolog annotation: Hit_ID=B9R7I7; Match level="QueryCoverage=94%, HitCoverage=94%, E-value=0.0, Identity=61%"; Hit description=Purine permease, putative
  Pfam annotation: Domain name=Xan_ur_permease; Domain location=55-466; Score=203.7; E_value=5.1e-58; Accession=PF00860.12; Description =Permease family
MGETNQPPPPPVAAPPPMMPMQPMMAPAVGTGAIHPPHEQFHHLAYCVHSNPSWVQVAALAFLHYLVMLGSTVMLASTIVPAMGGNAGDKARVIQSFLFMSGINTLLQTLVGTRLPTIMNASFAFVVPVLSIAREMDPNDFTNNHLRFVHTMRTTQGALIVASILNMILGFSTVWGAYAKKFSPVIMTPVVCVVGLGLFELGFPQVGKCVEIGLPMLILAVIVQQYVPHYFSHIHERITFLFERYSLLLCIGIVWAFAAILTAAGAYNHVSLKTQLHCRTDKSFLMSSAPWIKIPYPFQWGTPIFTAGHSFGMMGAVLVAAFESTGAHFATARLAGATPPPGHVLSRSVGLQGIGMFLEGIFGAPAGSSVSVGNIGLLGLTKVGSRRVIQISTGFMIFFSIFGKFGAFFASIPLPIFAAIYCILFGIVAAVGVSFMQFANKNSMRNIYIIGLSLFLGISVPQYFNEYTSSAGRGPARTNAGWFNDILNTVFASGPTVALIVASVLDNTLEARGFDGDRGLPWFMPFLRRHKGYSDPRNEEFYSFPIRVHDLIPSRFL

SEQ ID NO: 77802 - protein, 88 aa, Setaria italica
  Transcript Sequence Number=SeqID_11828
HASGGPTCHSVTINSLRRPLLADSARACTRAHGATPPPPSSGGRLLALVDVPPLEVLDSGEVVRVRAGDDEEVEQLVAVPDEVEPPGR

SEQ ID NO: 77803 - protein, 90 aa, Setaria italica
  Transcript Sequence Number=SeqID_11829
  Gene Ontology: Mol. function=cyclin-dependent protein kinase regulator activity; Cellular component=nucleoplasm; Biological process=DNA integration
  Homolog annotation: Hit_ID=Q6PS57; Match level="QueryCoverage=100%, HitCoverage=100%, E-value=8e-37, Identity=84%"; Hit description =Cyclin-dependent kinases regulatory subunit 1
  Pfam annotation: Domain name=CKS; Domain location=1-72; Score=184.4; E_value=3.2e-52; Accession=PF01111.11; Description=Cyclin-dependent kinase regulatory subunit
MGQIQYSEKYFDDTYEYRHVVLPPEVAKLLPKNRLLSENEWRAIGVQQSRGWVHYAIHRPEPHIMLFRRPLNYQQQQEAAAAAAAQMLPK

SEQ ID NO: 77804 - protein, 209 aa, Setaria italica
  misc_feature (196)..(196): Xaa can be any naturally occurring amino acid
  Transcript Sequence Number=SeqID_11830
  Homolog annotation: Hit_ID=B6TT75; Match level="QueryCoverage=100%, HitCoverage=52%, E-value=3e-66, Identity=67%"; Hit description=F-box domain containing protein
VRLPPIAFFKRWLDVTTVVLSADPAAAAEWAAVAVGFPTTCLAYYSSTTGAWARLDFRAQGYAGVEHYNGRFYVAFRSQICVCEVVGGDATAVIPLERADGADDGDGSDDEKLLPPCGRRVVETHLVDCGGQLLLVSVHDDVVYNSDDDMAGLAVDDEGISYAGDARAVEVHRVEWLGDGAVRLVRVADLGWNALXSVGRNRAFALSPA

SEQ ID NO: 77805 - protein, 129 aa, Setaria italica
  Transcript Sequence Number=SeqID_11831
  Gene Ontology: Mol. function=transcription regulator activity; Cellular component=nucleus; Biological process=regulation of transcription, DNA-dependent
  Homolog annotation: Hit_ID=Q652L2; Match level="QueryCoverage=67%, HitCoverage=8%, E-value=7e-41, Identity=91%"; Hit description =Protein HIRA
LLSYIRFLAREADESRLREVCESFLGPPMGMLGSASSTDPKNPVWDPDVLGMKKHKLLREDILPSMASNRKVQRLLNEFMDLLSEYEAAEARADPMDVAAAAEAKADPMDVAAEAKADPMDVAPTPQPA

SEQ ID NO: 77806 - protein, 444 aa, Setaria italica
  Transcript Sequence Number=SeqID_11832
  Gene Ontology: Mol. function=transcription regulator activity; Cellular component=nucleus; Biological process=regulation of transcription, DNA-dependent
  Homolog annotation: Hit_ID=Q652L2; Match level="QueryCoverage=86%, HitCoverage=39%, E-value=0.0, Identity=84%"; Hit description=Protein HIRA
  Pfam annotation: Domain name=Hira; Domain location=110-309; Score =219.5; E_value=8.5e-63; Accession=PF07569.3; Description=TUP1-like enhancer of split
NDGRLRVEHTGSVVPGSLTCSVLSIHVSNKKDNEDLLPVCLEAKPVERAAADMIGVGGAFSTKETEIRCTRGTETLWSDRISGKVTVLAGNANFWAVGCEDGCLQVYTKCGRRAMPAMMMGSAAVFIDCDDCWKLLLVTRRGLMYIWDLYNRNCILQDSLASLVASPDEPSGNHSGAVKVISAKFSRCGSPLVVLASRHAFLYDMGLKCWLRIADDCFPASNFASSFGSTQGGELGKLQIDIGKFMARKPIWSRVTDDGLQTRAHLETQLAASLALKSAQEYRQCLLSYVRFLAREADESRLREVCESFLGPPVGMVGSVSSRDPKNLVWDPDILGMKKHKLLREDILPSMASNRKVQRLLNEFMDLLSEYEAAETKADPMDVTPTPHCTTEASNKVIQPTIEASDKVMQPAAEASDKVMQPAAQARDKVMQPAAQANDEVMTS

SEQ ID NO: 77807 - protein, 638 aa, Setaria italica
  Transcript Sequence Number=SeqID_11833
  Gene Ontology: Mol. function=transcription regulator activity; Cellular component=nucleus; Biological process=regulation of transcription, DNA-dependent
  Homolog annotation: Hit_ID=Q652L2; Match level="QueryCoverage=98%, HitCoverage=64%, E-value=0.0, Identity=81%"; Hit description=Protein HIRA
  Pfam annotation: Domain name=WD40; Domain location=115-153; Score =53.1; E_value=1.1e-12; Accession=PF00400.24; Description=WD domain, G-beta repeat
  Pfam annotation: Domain name=WD40; Domain location=157-195; Score =39.8; E_value=1.1e-08; Accession=PF00400.24; Description=WD domain, G-beta repeat
  Pfam annotation: Domain name=WD40; Domain location=251-322; Score =28.6; E_value=2.6e-05; Accession=PF00400.24; Description=WD domain, G-beta repeat
  Pfam annotation: Domain name=WD40; Domain location=3-41; Score=15.3; E_value=0.26; Accession=PF00400.24; Description=WD domain, G-beta repeat
  Pfam annotation: Domain name=WD40; Domain location=327-365; Score =7.2; E_value=5.6; Accession=PF00400.24; Description=WD domain, G -beta repeat
  Pfam annotation: Domain name=WD40; Domain location=56-94; Score=33.9; E_value=6.4e-07; Accession=PF00400.24; Description=WD domain, G-beta repeat
  Pfam module annotation: Pfam domain module=WD40::WD40::WD40::WD40::WD4 0::WD40; Domain location=115-153::157-195::251-322::3-41::327-365::56- 94
MITEKPSWIRHEGLQIFSIDIQAGGLRFATGGGDQKVRIWSMKSVEKNNANNDSSQSLLATMRDHFGSVNCVRWARHGRYLASGSDDQVILIHERKAGSGTAEFGSGEPADVENWKVVMTLRGHTADVVDLSWSPDDSTLASGSLDNTVHIWNMTNGMCTAVLRGHSSLVKGVTWDPIGSFIASQSDDKTVIIWRTSDWSLAHKTEGHWAKSLGSTFFRRLAWSPCGHFITTTHGFQKPRHSAPVLERGEWSATFDFLGHNAPVVVVKFNNSTFRKNFSNGQDTKAAPVGWANGASKTSTKEQQPYNVIAIGSQDRTITVWTTVSARPLFVAKHFFSQSVVDLSWSPDGYSLFACSLDGSVANFHFEAKELGYRLSDSELDELKRSRYGDVRGRQSNLAESPAQLLLEEASAKQSAGKKGSSVAQPFQAPSKVSADVPNPAPVVQSQKAPEASPEDGKKTSGPAAGDINKVARLSSPVKQREYRRPDGRKRIIPEAVGFPSNQDKIPSSSQNQVVDFSSLDQRMNGIRPSYGGSGNCNSCGVKDRSGVTARANITESLVIQKASTGAGNDGRLRVEHTGSVVPGSLTCSVLSIHVSNKKDNEDLLPVCLEAKPVERAAADMIGVGGVQKAEIAKDKYG

SEQ ID NO: 77808 - protein, 520 aa, Setaria italica
  Transcript Sequence Number=SeqID_11834
  Gene Ontology: Mol. function=nucleotide binding; Cellular component =intracellular; Biological process=translation
  Homolog annotation: Hit_ID=Q9FX10; Match level="QueryCoverage=78%, HitCoverage=77%, E-value=6e-65, Identity=37%"; Hit description =F12G12.20 protein
  Pfam annotation: Domain name=RRM_2; Domain location=23-122; Score =12.9; E_value=0.0045; Accession=PF04059.4; Description=RNA recognition motif 2
  Pfam annotation: Domain name=Smg4_UPF3; Domain location=17-186; Score= 220.6; E_value=4.1e-63; Accession=PF03467.7; Description=Smg-4UPF3 family
  Pfam module annotation: Pfam domain module=RRM_2::Smg4_UPF3; Domain location=23-122::17-186
RGRGRGAVVTTAARAHMKDPAHRTKVVLRRLPPAIAQQAVVDQVDARFAGRYDWACFRPGNASQKNHRYSRLYLNFKRPEDVVEFAEVFNGHVFVNEKGVQFKALVEYAPSQQVPRSNIKKDGREGTIMKDPEYLEFLELISKPTEHLPSAEIQLERKEAERAAAGKEAPVVTALMMFVRQQRAAKSMAQRPGSRVSRKVAGVVTSSSSPSKRSSEKRRSSAYVVRDSAKEKPTYIMVPKREEHTQREKAVAGSSDATSGGTSGSGQAVEAKRDKIVILKGRGRVDSNIPDGTTQQSSTPVKNVPPSSSRQDQRLEGSGRIIKTILSNKEARSSNPSQHEQEGHMLNTERDKRPPRVLNPRTIVKDQIAENAERSHFDEKPNHLHGSAPVGEKIERHARNRDRPDRGVWAPRRYDKSTSGGGSNALSSEFPQMPSNSGDNFSQIADGHGDRKTDTRSHGGSRGGPVENGHRHANRRGPPRGPKETETSASTPDGKNSKRGSASYGAHERQVWVQKSSSGS

SEQ ID NO: 77809 - protein, 281 aa, Setaria italica
  Transcript Sequence Number=SeqID_11835
  Gene Ontology: Mol. function=hydrolase activity; Biological process =lipid catabolic process
  Homolog annotation: Hit_ID=B9SQ95; Match level="QueryCoverage=88%, HitCoverage=60%, E-value=1e-51, Identity=44%"; Hit description =Patatin B2, putative
VAFRRVFGDATLRDTVAPLLVPCYDLATAAPFVFSRADAVEGDAFDFRLRDVCSATCAAGGEPVAVRSVDGTTAIAAASAGVAAMGNPAAAAITHVLHNKQEFPLAAGVEDLLVLSIGSGASVPTSDGSRTPMPTRSPSPREVARVTAEGVADMVDESVAMAFGHACGSNYVRIKASKAPMALQAETAAAAAGAMLAQRNVESVLFRGRRLSERTNAEKVDALAAELVKEQERRRCSPLPNVAIKQVATPRLSSATTASSGTATARTASTMPSPASWDSRR

SEQ ID NO: 77810 - protein, 264 aa, Setaria italica
  Transcript Sequence Number=SeqID_11836
DDELNRANGEVPAEEMLSDDYYEQDGEEQIESLHRGGMKQSSCSTSGGATKSASRKKKKTTKYNAYADDDDDDEYNDDNADDDGADEDDPDDVDFEPDSETDKAADKDKFMDSENSDGEDDDELELSEDEDDDFAENRRQPKRLKVVATKTSKGRKLPMQAQRRRGMSHTDEEYSSGKESDVPSDTDFDHRSKKPDRVHQKPVARSEVAPINSHNELRTSGRRRTVKKISYAESEESDDSEEKSTKQQKQEPEEEDGKTQLERV

SEQ ID NO: 77811 - protein, 72 aa, Setaria italica
  Transcript Sequence Number=SeqID_11837
  Gene Ontology: Mol. function=transferase activity; Biological process= glutamine metabolic process
  Homolog annotation: Hit_ID=B9SQW3; Match level="QueryCoverage=88%, HitCoverage=24%, E-value=4e-16, Identity=68%"; Hit description=GMP synthase [glutamine-hydrolyzing] subunit A, putative
MTAAAKPVRRYALLLALWDSDYAKKVYGGYYNVFVAAFGGDGGGERWDCFRVIAGEFPAAEDLGSYDGFVVS

SEQ ID NO: 77812 - protein, 74 aa, Setaria italica
  Transcript Sequence Number=SeqID_11838
  Gene Ontology: Mol. function=aspartic-type endopeptidase activity; Biological process=DNA integration
MAATVHCARAFVLMSFECGASSSSRKTISCHKCCALVKPTLSQKELRKSRQIIQYRELVLPKSSLKGLACEQLA

SEQ ID NO: 77813 - protein, 71 aa, Setaria italica
  Transcript Sequence Number=SeqID_11839
IQRGTEIYTTHICYLVELHKNGTTTLHDNTPSNCNGKEETIYPKNGQSKSETKRPTRPAKQKKSIQKDGMD

SEQ ID NO: 77814 - protein, 234 aa, Setaria italica
  Transcript Sequence Number=SeqID_11840
  Gene Ontology: Cellular component=anchored to membrane
  Homolog annotation: Hit_ID=Q06I88; Match level="QueryCoverage=62%, HitCoverage=55%, E-value=9e-63, Identity=81%"; Hit description =Fasciclin-like protein FLA18
  Pfam annotation: Domain name=Fasciclin; Domain location=30-165; Score= 108.6; E_value=2.1e-29; Accession=PF02469.14; Description=Fasciclin domain
  Subcellular localization annotation: CTP_CleavageSite=80; ConfidenceScore=5.58e-01
PATPTPATPAAPAPVAGTTNITSILAKGGQFNTFIRLLKSTGMASQIDNQLQNNGNGLTVFAPTDNAFTSLPSGTLNSLSDQEKNALVQYHVVSTAIPKSQFDTVSNPLRTQAGSASPGEYPLNITSDGNQQANISTGVVNATVDNDLYSGDNLVVYQVNKVLLPAKLFGPAVAPAPAPLAPAKKKGKTPASVADSPEAAEASPDATASLAAARVTRGGLAAALLALAGVWWGL

SEQ ID NO: 77815 - protein, 230 aa, Setaria italica
  Transcript Sequence Number=SeqID_11841
  Gene Ontology: Mol. function=peptidyl-prolyl cis-trans isomerase activity; Cellular component=chloroplast; Biological process=protein folding
  Homolog annotation: Hit_ID=B6SRR2; Match level="QueryCoverage=63%, HitCoverage=64%, E-value=9e-69, Identity=86%"; Hit description=FKBP -type peptidyl-prolyl cis-trans isomerase 4
  Pfam annotation: Domain name=FKBP_C; Domain location=122-226; Score =117.7; E_value=3.8e-32; Accession=PF00254.20; Description=FKBP-type peptidyl-prolyl cis-trans isomer
  Subcellular localization annotation: CTP_CleavageSite=61; ConfidenceScore=5.97e-01
MAPPVSSLSLSPMASSTIPSPQLPKPSTVRALSVAPCNSAASSSSPSTSSSPPCHAAAPQVASAGRRGMLALGAGFLASAALLCPAGDAGATRIEYYATVGDKLCDLNLVKSGLAYCDVEVGTGAQPPRGELINVHYTARFPDGTVFDSTYKRGRPLTMRIGAGKILRGLEQGISGGGGVPPMLVGGKRKLMIPATLAYGPEPAGCFSGDCNIPGNSTILYDLFLVGIYK

SEQ ID NO: 77816 - protein, 164 aa, Setaria italica
  Transcript Sequence Number=SeqID_11842
  Homolog annotation: Hit_ID=Q2QMA3; Match level="QueryCoverage=92%, HitCoverage=44%, E-value=5e-57, Identity=70%"; Hit description=VTC2, putative, expressed
MLVLIPKLLFASSGVKTHLYCFSVEHGNDNLKSFVCSEQCGPSLLDTILLSQWDNFAWKGHLDYDVTACQLKVIEGGRNFVGQLNSKWNSFSPKEYDKFFESFRCLKPNSMKSYEGLLLCIAQGEKDRPEVAPSASPPKDGLLLIANEYPVEYGHIFLVPTAVN

SEQ ID NO: 77817 - protein, 131 aa, Setaria italica
  Transcript Sequence Number=SeqID_11843
  Homolog annotation: Hit_ID=Q2QMA3; Match level="QueryCoverage=65%, HitCoverage=25%, E-value=3e-26, Identity=63%"; Hit description=VTC2, putative, expressed
SIISMVSASKVEGEYSLLRKNSPLDQPEGVKTHLYCFSVEHGNDNLKSFVCSEQCGPSLLDTILLSQWDNFAWKGHLDYDVTACQLKVIQIKALFISSIVKSSGNSLNGVCLFTSVCSMQHCVAFLTCSDS

SEQ ID NO: 77818 - protein, 360 aa, Setaria italica
  Transcript Sequence Number=SeqID_11844
  Gene Ontology: Mol. function=protein binding
  Homolog annotation: Hit_ID=Q2QMA3; Match level="QueryCoverage=95%, HitCoverage=92%, E-value=1e-129, Identity=66%"; Hit description=VTC2, putative, expressed
YNILLVLIPQIDYSPAGVKTHLYCFSVEHGNDNLKSFVCSEQCGPSLLDTILLSQWDNFAWKGHLDYDVTACQLKVIEGGRNFVGQLNSKWNSFSPKEYDKFFESFRCLKPNSMKSYEGLLLCIAQGEKDRPEVAPSASPPKDGLLLIANEYPVEYGHIFLVPTAVNQLSCYWDKRMFGLATKIASEVNNAAFRVFFDSGTSVMSDRMFFQACYFANPLPVESASTVAVHDGKARSDIIVSETVDYPLKALVFTSNNLKALVNVVSEICFSLHDNTAAYSLLISNNGTKVFLFPQVKNLVAGCSLPAWECGGYFVYHTRSEFDNASETEISNRMASASLQDGAFEDLKHLCCAIADDLIK

SEQ ID NO: 77819 - protein, 59 aa, Setaria italica
  Transcript Sequence Number=SeqID_11845
THSSAETINPHDRGTKEDTLRIDLWMNNQWPSPSSMLSSEKIVIYTGREMLDHCGQPLD

SEQ ID NO: 77820 - protein, 110 aa, Setaria italica
  misc_feature (94)..(94): Xaa can be any naturally occurring amino acid
  Transcript Sequence Number=SeqID_11846
  Gene Ontology: Mol. function=magnesium ion binding; Cellular component=integral to membrane; Biological process=photosynthesis, light harvesting
  Homolog annotation: Hit_ID=C1K5B8; Match level="QueryCoverage=80%, HitCoverage=29%, E-value=2e-37, Identity=83%"; Hit description =Chlorophyll a-b binding protein
  Pfam annotation: Domain name=Chloroa_b-bind; Domain location=7-110; Score=2.5; E_value=1.6e-05; Accession=PF00504.13; Description =Chlorophyll A-B binding protein
LFYVLTPFLGFTFTFLTVSGTENFERFKESEVYHCRWAMLAVPGILVPEALGLGNWVKAQEWAAVPGGQATYLGNPVPWGTLPTILVMNTKLRXAIAFAEHQRTMEKDPE

SEQ ID NO: 77821 - protein, 506 aa, Setaria italica
  Transcript Sequence Number=SeqID_11847
  Gene Ontology: Mol. function=electron carrier activity; Cellular component=chloroplast envelope; Biological process=oxidation reduction
  Homolog annotation: Hit_ID=Q6TBX7; Match level="QueryCoverage=95%, HitCoverage=89%, E-value=0.0, Identity=76%"; Hit description =Chloroplast carotenoid epsilon-ring hydroxylase
  Pfam annotation: Domain name=p450; Domain location=44-492; Score =240.7; E_value=3.7e-69; Accession=PF00067.14; Description=Cytochrome P450
GADEPTTATPWVSPDWLTSLSRAVGRAGADDSGIPVASAKLDDVQDLLGGALFLPLFKWFREEGPVYRLAAGPRDFVIVSDPAVAKHVLRGYGSRYEKGLVAEVSEFLFGSGFATAEGALWTVRRRAVVPSLHKRFLSIMVEKVFCKCTERLIQKLEPYALSGEPVNMEARFSQLTLDVIGLSLFNYNFDSLTTDSPVIDAVYTALKEAELRSTDLLPYWKIDFLCKIIPRQIKAENAVKTIRNTVEELIMKCKEIVEAENEQIEGEEYVNEGDPSILRFLLASRDEVSSVQLRDDLLSMLVAGHETTGSVLTWTIYLLSKDLTALRRAQDEVDRVLQGRLPRYEDVKELKYLMRCINESMRLYPHPPVLLRRAIVDDVLPGNYKVKAGQDIMISVYNIHRSPEVWDRADEFIPERFDLEGPVPNESNTDFRFIPFSGGPRKCVGDQFALLEAIVALAIVLQKMDIQLVPDQKINMTTGATIHTTNGLYMNVSLRKVQQEAELALR

SEQ ID NO: 77822 - protein, 179 aa, Setaria italica
  misc_feature (174)..(174): Xaa can be any naturally occurring amino acid
  Transcript Sequence Number=SeqID_11848
  Gene Ontology: Mol. function=calcium ion binding; Biological process =guanosine tetraphosphate metabolic process
  Homolog annotation: Hit_ID=Q9AYT4; Match level="QueryCoverage=100%, HitCoverage=30%, E-value=5e-71, Identity=77%"; Hit description =Chloroplast RelA homologue 2
  Pfam annotation: Domain name=efhand; Domain location=107-135; Score =18.3; E_value=0.032; Accession=PF00036.24; Description=EF hand
  Pfam annotation: Domain name=efhand; Domain location=73-101; Score =26.1; E_value=0.00014; Accession=PF00036.24; Description=EF hand
  Pfam module annotation: Pfam domain module=efhand::efhand; Domain location=107-135::73-101
EPGKMRPLMEIQIRTKEMHRFAVGGDASHSLYKGGLTDPGEAKRLKAIMLAAAELAALRLRDLPDSDRGVGNCKNPAFRQLDKNGDGRISIEELTEVMEDLGAGGEDATELMHLLDANSDGSLSSDEFESFQRQIELMRSLEDEDDHYRKILKEKLHTIDSAGLIHVYRKELGXKLLVS

SEQ ID NO: 77823 - protein, 208 aa, Setaria italica
  Transcript Sequence Number=SeqID_11849
  Gene Ontology: Mol. function=transferase activity, transferring glycosyl groups; Biological process=metabolic process
  Homolog annotation: Hit_ID=C4MF46; Match level="QueryCoverage=99%, HitCoverage=41%, E-value=2e-66, Identity=62%"; Hit description=UDP -glycosyltransferase
PDGSVVYVSFGTLARVTAAELREAARGLQQSGRNFFGMSESDTEGSQWIPEGFAELIDTEERGIIFRGWAPQMLILNHSAVGGFVTHCGWNSVLEAVSAGVPLVTWPRHADQFYNEMLILDVLRIGVGVGAGCYASKLDVRGEVISGEKIAESINKVMGDDEEARMIRKKAIELCGKARSATEKGGSSYNDVEQLIKELMARRSSVNV

SEQ ID NO: 77824 - protein, 39 aa, Setaria italica
  Transcript Sequence Number=SeqID_11850
DSGFAKYNVRDLLEQMLTDIMVTGVHEYPFLHARAFSIV

SEQ ID NO: 77825 - protein, 208 aa, Setaria italica
  Transcript Sequence Number=SeqID_11851
  Gene Ontology: Mol. function=binding; Cellular component=nuclear pore; Biological process=protein import into nucleus, docking
  Homolog annotation: Hit_ID=Q5VN12; Match level="QueryCoverage=100%, HitCoverage=19%, E-value=2e-90, Identity=73%"; Hit description =Putative Importin 9
EEIVTAFEDYGINSIFGSFKMRFHESQELKQAGSADWWRLHEASLFALGSLSEQLCEAQDSGFAKYNVRDLLEQMLTDIMVTGVHEYPFLHARAFSIVAKFSSVISKEVSEQYLCYAARAIASDVPPPVKVGACRALAQLLPESNQDLIQPNVMGILSSLVDLLRQASDETLHLVLETLQSAIKSGGEQSTLIEPIISPIILDVWAQH

SEQ ID NO: 77826 - protein, 146 aa, Setaria italica
  Transcript Sequence Number=SeqID_11852
  Gene Ontology: Mol. function=DNA binding; Cellular component=nucleus; Biological process=regulation of transcription
  Homolog annotation: Hit_ID=C3PU45; Match level="QueryCoverage=63%, HitCoverage=30%, E-value=1e-24, Identity=56%"; Hit description=NAC -like protein 13
  Pfam annotation: Domain name=NAM; Domain location=1-44; Score=-42.2; E_value=0.0017; Accession=PF02365.7; Description=No apical meristem (NAM) protein
DRVIRNPKAAGRAVVGMRKTLVFYRGRAPNGIKTSWVMHEFRMENPHTPPKEDWVLCRVFYKKKADAMDYAMDNERDVAMPHGADHPGYSPPFPALGSGHYHLPPPSSDHHGGGGGGAGAGSLNDFPAMALLHHQHSSIFDLHGQP

SEQ ID NO: 77827 - protein, 461 aa, Setaria italica
  Transcript Sequence Number=SeqID_11853
  Gene Ontology: Mol. function=nucleoside-triphosphatase activity; Cellular component=myosin complex; Biological process=signal transduction
  Homolog annotation: Hit_ID=Q948A2; Match level="QueryCoverage=95%, HitCoverage=27%, E-value=0.0, Identity=83%"; Hit description =Putative myosin heavy chain
  Pfam annotation: Domain name=IQ; Domain location=244-264; Score=13.3; E_value=0.95; Accession=PF00612.19; Description=IQ calmodulin-binding motif
  Pfam annotation: Domain name=IQ; Domain location=267-287; Score=22.0; E_value=0.0025; Accession=PF00612.19; Description=IQ calmodulin -binding motif
  Pfam annotation: Domain name=IQ; Domain location=292-312; Score=22.8; E_value=0.0014; Accession=PF00612.19; Description=IQ calmodulin -binding motif
  Pfam annotation: Domain name=IQ; Domain location=315-335; Score=19.1; E_value=0.018; Accession=PF00612.19; Description=IQ calmodulin -binding motif
  Pfam annotation: Domain name=IQ; Domain location=340-360; Score=20.3; E_value=0.0083; Accession=PF00612.19; Description=IQ calmodulin -binding motif
  Pfam annotation: Domain name=IQ; Domain location=363-383; Score=21.3; E_value=0.0041; Accession=PF00612.19; Description=IQ calmodulin -binding motif
  Pfam annotation: Domain name=Myosin_head; Domain location=1-228; Score=-305.5; E_value=8.2e-05; Accession=PF00063.13; Description =Myosin head (motor domain)
  Pfam module annotation: Pfam domain module=IQ::IQ::IQ::IQ::IQ::IQ::Myo sin_head; Domain location=244-264::267-287::292-312::315-335::340 -360::363-383::1-228
MPLKQKPIGIIALLDEACMFPKSTHETFATKMFRSFSSHPRLDKTKFSETDFTISHYAGKVTYQTDSFLEKNRDYIVAEHCNLLSSSRCQFVSGLFTSLPEESIRSSYKFSSVASRFKLQLQALMETLNSTEPHYVRCVKPNSANRPQLFENQSVLHQLRCGGVLEAVRISLAGYPTRRTYAEFVDRFAVLVPELMIGSYDERTLTKGILEKMKLDNFQLGRTKVFLRAGQIAILDMRRAEVLDNAARHIQGRFRTFITRKEFVKTREASISVQAYCRGCLARKMYAIRRETAAAVIVQKYVRRWLLRRAHLQSCLAALLIQSYVRGFIARRYFSAIREHKAATVIQSTWRRRKVVMLFQHYRQATVAIQCAWRQKLARRELRRLKMAANEAGALREAKNKLEKKMDDLALRLTLERRLRAASEESKSSEILKRDKIIESLSAECAAAKSDAQKRTWQKIC

SEQ ID NO: 77828 - protein, 66 aa, Setaria italica
  Transcript Sequence Number=SeqID_11854
MDQAGRRKSSLRSQGSGKSSSRPGSGALEEVVVKIDGNGNGQAPFSFHGADGGGVGGRGKGGECRP

SEQ ID NO: 77829 - protein, 122 aa, Setaria italica
  misc_feature (111)..(111): Xaa can be any naturally occurring amino acid
  Transcript Sequence Number=SeqID_11855
  Gene Ontology: Mol. function=heat shock protein binding
  Homolog annotation: Hit_ID=B4FW76; Match level="QueryCoverage=100%, HitCoverage=16%, E-value=1e-57, Identity=91%"; Hit description =Division protein
VLQEAGEAPLVLATGEQLLQDRPPKRFKQDVVLAMALAYVDLSRDAMAASPPDVIHCCEVLERALKLLQEDGASNLAPDLLSQIDETLEEITPRCVLELLALPIDEKHKNXRQEGLQGAKKL

SEQ ID NO: 77830 - protein, 307 aa, Setaria italica
  Transcript Sequence Number=SeqID_11856
  Homolog annotation: Hit_ID=Q9FXF8; Match level="QueryCoverage=99%, HitCoverage=57%, E-value=1e-125, Identity=70%"; Hit description =F1N18.13 protein
KWVPIGWTRIAELVQRVQSDSSWENELTEISDSEDDYTVADLAAPYWQRPVGPTWWCHVTAGHPFIDAWLNSAHWMHPAIRTALRDESKLISDRMKYLLYEVPVRVAGGLLFELLGQSVGDPNHEEEDIPIVLRSWQAQNFLVTAMHVKGPSSNINVLGVTEVQELLLAGGSQTPRSVHEVIAHLVSRLSRWDDRLFRKYIFGEADEIELKFVNRRNREDLNLLSIILDQEIRRLATQVIRVKWSLHAREEILHELVRHLRGNTTRVILDSVRKCTRNMLEEQEAVRGRLFTIQDVMQSTVRAWLQD

SEQ ID NO: 77831 - protein, 409 aa, Setaria italica
  misc_feature (350)..(350): Xaa can be any naturally occurring amino acid
  Transcript Sequence Number=SeqID_11857
  Gene Ontology: Mol. function=DNA binding; Cellular component=ribosome
  Homolog annotation: Hit_ID=Q69KD4; Match level="QueryCoverage=33%, HitCoverage=35%, E-value=1e-16, Identity=37%"; Hit description =Ribosomal protein-like
  Pfam annotation: Domain name=Myb_DNA-binding; Domain location=26-87; Score=17.2; E_value=0.054; Accession=PF00249.23; Description=Myb -like DNA-binding domain
VTVPDVQDTVSVDNDENAEPERTARRLNWSEVEDLRLIHAWLNTCKPNGSKKNDAHWGNVAKLYNSSTPKDRRRARNQLKLHWHKINKKTSHFYDCWCRVEEKYSSLQSGKLKQMDKTWSKYDEEARAMYLEEAKHRFTLSHLWKAVWDQPKWKNYISSLYSKGTKLSESGDGTSSSEDASDTSEKEMDEQESMPAKKKWEGECKVASPPLELQQDIRSSVDPQNMFEKNPLMADTSRIHEFQHGKEKLMPDTSRFNEFHKENAVRDNMPEKERHPQGCNASTVRNSAPEKETRQQGSKMAKSKRKRKGNASIPSSEVQEDIKRAMDLQNMLQKDREKMSEVQLRLSKEXLELARLKQQEAKDKKETTLYEKYTELLMADTQRFNDFQNEEHKKAVKRMGEMLFGKDGM

SEQ ID NO: 77832 - protein, 75 aa, Setaria italica
  Transcript Sequence Number=SeqID_11858
PPYYYYSPPPPATYPGSYCPPPPGAYIQIGSTPPGKGPLYPQDPGFMPSAAPSRAVPLAVVGALAALAGVWAAFS

SEQ ID NO: 77833 - protein, 154 aa, Setaria italica
  Transcript Sequence Number=SeqID_11859
  Gene Ontology: Mol. function=electron carrier activity; Biological process=oxidation reduction
  Homolog annotation: Hit_ID=B6T7V0; Match level="QueryCoverage=99%, HitCoverage=24%, E-value=8e-71, Identity=84%"; Hit description=NADPH reductase TAH18
LLSMWKSLNETNPALLPRVSDINDPNLSTLGDPKVHVIYYSSNEVPQDSILSEPNKIINSARSMSPALQFHDDGGPPYMLQMVTNQRLTKEGSDRDVRHFELEDPSSAISYKTGDALEILPSQNPSAVDAFIERCNLDPDCYITIQAKSGDKIS

SEQ ID NO: 77834 - protein, 88 aa, Setaria italica
  misc_feature (11)..(11): Xaa can be any naturally occurring amino acid
  Transcript Sequence Number=SeqID_11860
  Gene Ontology: Mol. function=electron carrier activity; Cellular component=extracellular region; Biological process=response to oxidative stress
  Homolog annotation: Hit_ID=Q5U1S9; Match level="QueryCoverage=80%, HitCoverage=19%, E-value=1e-09, Identity=52%"; Hit description=Class III peroxidase 14
ADTLALAARDXIYPTKGPFIPLPTGRRDGNRSVAADVALNSPPPGATIADIIALFANKFNLTAKDVAVLSGTLYSFFFFFFQQYRTQS

SEQ ID NO: 77835 - protein, 367 aa, Setaria italica
  Transcript Sequence Number=SeqID_11861
  Gene Ontology: Mol. function=electron carrier activity; Cellular component=extracellular region; Biological process=response to oxidative stress
  Homolog annotation: Hit_ID=Q7XN76; Match level="QueryCoverage=82%, HitCoverage=91%, E-value=1e-74, Identity=48%"; Hit description =OSJNBa0089N06.6 protein
  Pfam annotation: Domain name=peroxidase; Domain location=49-296; Score=362.5; E_value=7.7e-106; Accession=PF00141.15; Description =Peroxidase
MAAAAAAARSPLLFLMVMLIAAMMPPPAAEAHVQIGAYNKTCPQAEEVVLKEMTAIVAKSPELAGAVLRLFSVDCFVGGCEASILLDSTANNTAEKDAPLNRGVRGYEVVDAIKAKLDAACPGVVSCADTLALAARDSIRLTKGPFIPLPTGRRDGNRSVAADVALNSPPPGATIADIIALFANKFNLTAKDVAVLSGAHTIGKARCSTVSPRLYNFGGQNGSSDPTLDANYTDILRGQCKPGDIATLVDLDPTTPAVFDADYYTLVAGKRGLLSTDAALLLDPTTSAYVAGQANATSSDQFFADFATSFVAMSKLGALTHHKGEIRQVCSKVNPPSSPSSNAAARSYHLTATAGLAIATLAVALVL

SEQ ID NO: 77836 - protein, 135 aa, Setaria italica
  misc_feature (123)..(123): Xaa can be any naturally occurring amino acid
  Transcript Sequence Number=SeqID_11862
TVGGDGEDGDDDETVEAQLMRLGSVVGPTRLLFTIKEETREDLESDDGYSRSRSLGELLHCSETPPFLTPRASPSPVLDNSYNPLFESPATSPGPAPAVVSPPPKFQFLKDAEEKLYRRALAXEAMRARRSPPPQ

SEQ ID NO: 77837 - protein, 162 aa, Setaria italica
  Transcript Sequence Number=SeqID_11863
  Homolog annotation: Hit_ID=B6TIQ8; Match level="QueryCoverage=100%, HitCoverage=46%, E-value=1e-64, Identity=74%"; Hit description =ATP/GTP binding protein
IFTLGCTQRRSALKHLKTERVKKFDYCMPYYMPLQPVEDEDDTVINFLYPQEPPIVDDFDWEMDEYEDFADQKVKDEVLPEDEKEKFKEFLKEKVRERKRELKQAKEARKKAIDDMDPKEKEAFENIKFYKFYPVKNPDTPDVDNVKSKYINRYYRHTHYLM

SEQ ID NO: 77838 - protein, 35 aa, Setaria italica
  Transcript Sequence Number=SeqID_11864
LHYLEQPQKRYFKTWTFALHLCEARESTRIAINKR

SEQ ID NO: 77839 - protein, 216 aa, Setaria italica
  Transcript Sequence Number=SeqID_11865
  Gene Ontology: Mol. function=hydrolase activity; Biological process =metabolic process
  Homolog annotation: Hit_ID=B6TXN5; Match level="QueryCoverage=99%, HitCoverage=63%, E-value=4e-74, Identity=65%"; Hit description =Gibberellin receptor GID1L2
  Pfam annotation: Domain name=Abhydrolase_3; Domain location=1-203; Score=176.4; E_value=8.4e-50; Accession=PF07859.5; Description =alphabeta hydrolase fold
ALCRRLCSELRAVVVSVNYRLAPEQRFPAAYDDGVAALQYLDANALPADVVTVPVDLSSCFLAGDSAGGNITHHVAQRWASMSAASPPARLCVAGAVMIQPFFGGEERTDAEVELDRVSALGVAGTDHYWREFLPEGATRDHPAARVCGDGVELAEAFPPAMVVVGGFDLLKDWQARYVDALRRKGKAVRVVEYPDAVHGFHVFPELADSGKLVEE

SEQ ID NO: 77840 - protein, 116 aa, Setaria italica
  misc_feature (73)..(73): Xaa can be any naturally occurring amino acid
  Transcript Sequence Number=SeqID_11866
  Gene Ontology: Mol. function=protein transporter activity; Cellular component=membrane coat; Biological process=intracellular protein transport
  Homolog annotation: Hit_ID=B4FA26; Match level="QueryCoverage=99%, HitCoverage=69%, E-value=1e-57, Identity=93%"; Hit description=AP-3 complex subunit sigma-2
  Pfam annotation: Domain name=Clat_adaptor_s; Domain location=1-115; Score=100.7; E_value=5e-27; Accession=PF01217.12; Description =Clathrin adaptor complex small chain
MIQAVMVISTQAKPRLLKFYNFQPPEKHQDLVRGVFQLLSARPDSVSNFVEVDAIFGPGTKMVYKHLATLYFXFVFDSSENELAMLDLVQVFVETLDRCFKNVCELDIVFNFNKVP

SEQ ID NO: 77841 - protein, 72 aa, Setaria italica
  Transcript Sequence Number=SeqID_11867
  Gene Ontology: Mol. function=protein transporter activity; Cellular component=membrane coat; Biological process=intracellular protein transport
  Homolog annotation: Hit_ID=B4FA26; Match level="QueryCoverage=98%, HitCoverage=42%, E-value=9e-29, Identity=91%"; Hit description=AP-3 complex subunit sigma-2
  Pfam annotation: Domain name=Clat_adaptor_s; Domain location=2-63; Score=-20.9; E_value=1.9e-05; Accession=PF01217.12; Description =Clathrin adaptor complex small chain
PLVLCTVFVETLDRCFKNVCELDIVFNFNKLHTILDEMILGGQVIETSSEQIMKSVEEIARLEKQSSTTSLI

SEQ ID NO: 77842 - protein, 118 aa, Setaria italica
  Transcript Sequence Number=SeqID_11868
ANNEVCGRDCKAGETIKHNQPHTQVDFRTFQPLSFHSLPGLNIYCVSRTAKDIRLALKITFSLLQFSKDLIVWTFVLSSSHCRRAELYACSLNGMFSLILSSYTDCLNVLSELQTSCL

SEQ ID NO: 77843 - protein, 166 aa, Setaria italica
  misc_feature (75)..(75): Xaa can be any naturally occurring amino acid
  Transcript Sequence Number=SeqID_11869
  Gene Ontology: Mol. function=protein transporter activity; Cellular component=membrane coat; Biological process=intracellular protein transport
  Homolog annotation: Hit_ID=B4FA26; Match level="QueryCoverage=100%, HitCoverage=100%, E-value=5e-85, Identity=92%"; Hit description=AP-3 complex subunit sigma-2
  Pfam annotation: Domain name=Clat_adaptor_s; Domain location=1-147; Score=201.5; E_value=2.3e-57; Accession=PF01217.12; Description =Clathrin adaptor complex small chain
MIQAVMVISTQAKPRLLKFYNFQPPEKHQDLVRGVFQLLSARPDSVSNFVEVDAIFGPGTKMVYKHLATLYFVLXFDSSENELAMLDLVQVFVETLDRCFKNVCELDIVFNFNKLHTILDEMILGGQVIETSSEQIMKSVEEIARLEKQSSTTSLIPKSISERFSR

SEQ ID NO: 77844 - protein, 120 aa, Setaria italica
  Transcript Sequence Number=SeqID_11870
  Gene Ontology: Mol. function=catalytic activity; Cellular component =integral to membrane; Biological process=metabolic process
  Homolog annotation: Hit_ID=Q75LD5; Match level="QueryCoverage=100%, HitCoverage=13%, E-value=2e-35, Identity=71%"; Hit description =Probable ion channel DMI1-like, chloroplastic
RSLKNFSLLISLSVLYAPLVILKYIDLVSKIRSSPDSEEVPINKRFAYRVDIFLSLQPYAKPLVLLVATLLLIALGGLALFGVTDDSLSDCLWLSWTFVADSGNHANAVGFGPKLVSVSI

SEQ ID NO: 77845 - protein, 54 aa, Setaria italica
  Transcript Sequence Number=SeqID_11871
MDDAAGAEAAANGGIEGSADPCSSGAAAGHRLSVHQIAGGGKAADIILWRRGRV

SEQ ID NO: 77846 - protein, 294 aa, Setaria italica
  misc_feature (120)..(120): Xaa can be any naturally occurring amino acid
  Transcript Sequence Number=SeqID_11872
  Gene Ontology: Mol. function=metal ion binding; Cellular component =integral to membrane; Biological process=metal ion transport
  Homolog annotation: Hit_ID=B6SQM7; Match level="QueryCoverage=97%, HitCoverage=80%, E-value=1e-115, Identity=78%"; Hit description =Nickel ion transporter
  Pfam annotation: Domain name=NicO; Domain location=66-294; Score =96.2; E_value=1.1e-25; Accession=PF03824.8; Description=High -affinity nickel-transport protein
  Subcellular localization annotation: CTP_CleavageSite=2; ConfidenceScore=5.15e-01
PRAAAAAAVGHPWKLLGSLLPKASTAALFLLTTLITGTLHSTIPHSAYASMQPVAKTGGGLLTTEILSSGWAGFLAGCLHTLSGPDHLVALAPLSIGRSSLESGLVGALWGCGHDAGQVXFGLLFLLLKDRLHIEVFRAWGTRVVGLTLLIIGAMGIREASEVQESTQLVLEGVDASMSSSDPLQAPSAPRKKKVGFATFATGIVHGLQPDALLMVLPALALPSRFAGAAFLGMFLVGTVFSMGSYTAFVGSCSEALKEKVPRITEKLTWAASLVAIGMGLALLVGQFFGFSLY

SEQ ID NO: 77847 - protein, 122 aa, Setaria italica
  Transcript Sequence Number=SeqID_11873
  Gene Ontology: Mol. function=serine-type endopeptidase inhibitor activity; Cellular component=extracellular region; Biological process=defense response
  Homolog annotation: Hit_ID=B6SJS2; Match level="QueryCoverage=100%, HitCoverage=30%, E-value=3e-49, Identity=76%"; Hit description =Protein Z
GNALYFKGAASAGLWKELHQDSEFHLLDGSSVQAPFMSSTDDQYIAAYDTFKVLKLPYQQGGDTRQFSMYIILPELQDGIWSLADKLSSEPEFLEKHIPMRTIPVGQFKVPKFKISFGFEAS

SEQ ID NO: 77848 - protein, 274 aa, Setaria italica
  Transcript Sequence Number=SeqID_11874
  Gene Ontology: Biological process=protein transport
  Homolog annotation: Hit_ID=B9RN30; Match level="QueryCoverage=98%, HitCoverage=62%, E-value=4e-62, Identity=46%"; Hit description =Protein CHMP7, putative
  Pfam annotation: Domain name=Snf7; Domain location=85-251; Score=7.0; E_value=7.8e-06; Accession=PF03357.13; Description=Snf7
KSLVEERAADIARQLSDSHWTSTCVVTISRFNSFFSDQEDAHAALCFLTQSGKARYLVARKQDHIEGVKFALNSAQVPAVSKLDHDTLHLLWTEERLQQQLDVLDRRWEISRRRALAFFKSRDKQAAYRYARQSKVFSQSRSRCMQLLERVEEVISLIASAESTKKVYEAIQIGIQAMKENNVSIEEVNVHLKEVDELVAAQREVDAALESAPLQSIDDEGDIEEEFRKLEAELQDEIPHIQVQEPVAHSNEESPDEVIESLSNNLSSIKLEAI

SEQ ID NO: 77849 - protein, 208 aa, Setaria italica
  misc_feature (17)..(17): Xaa can be any naturally occurring amino acid
  Transcript Sequence Number=SeqID_11875
  Gene Ontology: Mol. function=N-acetyltransferase activity; Cellular component=intracellular; Biological process=metabolic process
  Homolog annotation: Hit_ID=Q2HRG1; Match level="QueryCoverage=44%, HitCoverage=14%, E-value=5e-28, Identity=58%"; Hit description=GCN5 -related N-acetyltransferase; BRCT
  Pfam annotation: Domain name=BRCT; Domain location=106-182; Score =20.8; E_value=0.0056; Accession=PF00533.18; Description=BRCA1 C Terminus (BRCT) domain
RTFKRRKVRKTANVARXELTLIVVKFSLSEQEPKKRIYEMSSSSLKSKRIIKVNDGGNGQDMNQSDAHDNYFCSSPGNSVPLIPKENRAPSLGVHFENKMSGEEKAVVHSYGNPTIMLMNIADEQKKARLTKVVETLGGFVTCEGHACTHIVTGKVRRTMNFCIALSSGAWIVSPNWLKESFRQGQFVGEAQYVLEDEEFRMQYKSVL

SEQ ID NO: 77850 - protein, 75 aa, Setaria italica
  Transcript Sequence Number=SeqID_11876
  Subcellular localization annotation: CTP_CleavageSite=43; ConfidenceScore=5.40e-01
VAAPHPPPTATAPPPPACSSWGWWAPRPAPPPPFPPTGAWQTRCSAVLAIIKQFHQRAKIRQAIASLLTGQTKPD

SEQ ID NO: 77851 - protein, 163 aa, Setaria italica
  Transcript Sequence Number=SeqID_11877
VADPLLRCTSNNKTISSESKNPTSNRLASDWLAVIWFREAFGWASLLQGRRERRRRAAAVQPKMARPPILSVALPSDTGRVLSIQSHTVQVRHLPCLPHPHVGRLAACSPQSPDGFRTSSPMSMPTCVGILLWPRVHMAGMNGGWIWEASYGFVDATATCRLG

SEQ ID NO: 77852 - protein, 91 aa, Setaria italica
  Transcript Sequence Number=SeqID_11878
FILVSCGLLHSINVTYCTTLHLAFVWWIAELRVLMQPQFSRRTQGSPQLCGFVCCSSSYYSSCQNRILIAMERANLGENHTPSNRQQSEEF

SEQ ID NO: 77853 - protein, 126 aa, Setaria italica
  Transcript Sequence Number=SeqID_11879
  Gene Ontology: Mol. function=hydrolase activity, hydrolyzing O -glycosyl compounds; Biological process=carbohydrate metabolic process
  Homolog annotation: Hit_ID=Q8L6H7; Match level="QueryCoverage=100%, HitCoverage=19%, E-value=2e-60, Identity=86%"; Hit description =Glycosyl hydrolase family 1 protein, putative, expressed
LVAVDRANNLARKPRPSYYLFTKVVTTGKITRQDRACAWRELQQAAFQKKTRPFFRAVDKYGRMYAGGLDRPIQRPFILRDWRFGHYEMEGLQDPLSCFIRSIFSPISHKKKIHYIEDEDVSYSIS

SEQ ID NO: 77854 - protein, 77 aa, Setaria italica
  Transcript Sequence Number=SeqID_11880
LACYFPPSFSLECSSKTSRISALLWPNTSVLLPPCRCTYVLQNILTDLENHVGWRSIGAVLLADICINFVKKNLKIT

SEQ ID NO: 77855 - protein, 262 aa, Setaria italica
  Transcript Sequence Number=SeqID_11881
  Gene Ontology: Mol. function=sequence-specific DNA binding; Cellular component=nucleus; Biological process=regulation of transcription, DNA-dependent
  Homolog annotation: Hit_ID=B6U8Z0; Match level="QueryCoverage=88%, HitCoverage=81%, E-value=2e-63, Identity=59%"; Hit description =WRKY14-superfamily of TFs having WRKY and zinc finger domains
  Pfam annotation: Domain name=WRKY; Domain location=41-101; Score =122.1; E_value=1.8e-33; Accession=PF03106.7; Description=WRKY DNA -binding domain
  Subcellular localization annotation: CTP_CleavageSite=6; ConfidenceScore=5.03e-01
PSTAAPAASRRRRSANKRVVTLPLADVSGPRPKGVGEGNTPTDSWAWRKYGQKPIKGSPFPRAYYRCSSNKGCPARKQVERDRAKPDTVIVTYSFEHNHSDAVPRAQQNRQQAPKPKPQPAPPEPSESPSSGSHDVAATACAGALVTTEGGAAAVEVHDDFRWLYDGVSVTSSTSPSDVDVAEEMLYGTMFFGATVGAPLPDEFGDVGGLFDGEGGGEEDAMFAGLGELPECAMVFRRHAGDGLPMAGGEKVEQPAESTAMS

SEQ ID NO: 77856 - protein, 227 aa, Setaria italica
  Transcript Sequence Number=SeqID_11882
  Gene Ontology: Mol. function=protein binding
  Homolog annotation: Hit_ID=Q9ZWC6; Match level="QueryCoverage=95%, HitCoverage=36%, E-value=1e-48, Identity=49%"; Hit description=F-box protein At-B
LCLEDGPVTQPNLPEDLTNIGLQALGLCHNLRHLSLTRRYCDFRRVNDFGILMLADGCKQLRTIRFGGFSKVSDAGYAALLHSGKDLKKFEVSNGSCLSDLACLDLDKAAPNITEVRLLNCALLTSDTAISLAPCTNLKVLDLSGCKSIADSGLVSISQLSRLTLLDLSGADITDAGLSALGNGRCLISSLCLRGCRRIGSNGIASLLCGTGTINKTLVSTLYYLGN

SEQ ID NO: 77857 - protein, 75 aa, Setaria italica
  Transcript Sequence Number=SeqID_11883
  Gene Ontology: Mol. function=nucleotide binding; Cellular component =chloroplast
IVGEELGVLPGMDSICSVLALQKLLNFFSAGRSSSQPEFDVVVYDCNNTDEILRLIGATDRARYLFYFIHDSDFA

SEQ ID NO: 77858 - protein, 215 aa, Setaria italica
  misc_feature (16)..(16): Xaa can be any naturally occurring amino acid
  Transcript Sequence Number=SeqID_11884
  Gene Ontology: Mol. function=nucleotide binding; Cellular component =chloroplast
TPKPELKKVDAQVNFXLQGVLEGIVGEELGVLPGMDSICSVLALQKLLNFFSAGRSSSQPEFDVVVYDCNNTDEILRLIGATDRARSYLRYVRDLAEKTDMGRLASPSLLKLIYDAAKPNGKTSEGRLSTEIWNEIEQLLERVLVWFADPSNLACFLIMDPRRSISVSSALRYWGCTTQAGGQICGAFGYTEDPSEMHQEVARKFLPLSFSFLFL

SEQ ID NO: 77859 - protein, 148 aa, Setaria italica
  Transcript Sequence Number=SeqID_11885
  Gene Ontology: Mol. function=metal ion binding; Cellular component =plasma membrane
  Homolog annotation: Hit_ID=B9SJF7; Match level="QueryCoverage=52%, HitCoverage=7%, E-value=1e-22, Identity=65%"; Hit description=Ran GTPase binding protein, putative
  Pfam annotation: Domain name=DZC; Domain location=95-130; Score=89.1; E_value=1.5e-23; Accession=PF08381.3; Description=Disease resistancezinc fingerchromosome co
GSISENSEVSAHSHRVSGPPDAEKLNRRGHISSDEMLSASSRADDSSSQDGRSLFNGEDGYKSRSVVSIPSNQVQAEWIEQYEPGVYITLTTLRDGTRDLKRVRFSRRRFGEHQAESWWNENRDKVYEKYNVRSSERVSSASSIRSAR

SEQ ID NO: 77860 - protein, 162 aa, Setaria italica
  misc_feature (45)..(45): Xaa can be any naturally occurring amino acid
  Transcript Sequence Number=SeqID_11886
  Homolog annotation: Hit_ID=Q01K95; Match level="QueryCoverage=95%, HitCoverage=5%, E-value=4e-52, Identity=66%"; Hit description =OSIGBa0148A10.3 protein
  Subcellular localization annotation: CTP_CleavageSite=21; ConfidenceScore=5.60e-01
SLSSAWASNFGLLLPNFYMVRALSKFVSPVKLLDLANWMFTNWRXCSSSCSPAFVPAALMCLYITDVAMEMLCRCLQKTGQRSESYLLWNLEIHVTTIQQAYHIVLHFATKWNLEFADHCLLKMLGRIHHTERYAGWSTDYIAFHMILSTLVINTPIDVLHH

SEQ ID NO: 77861 - protein, 154 aa, Setaria italica
  misc_feature (29)..(29): Xaa can be any naturally occurring amino acid
  Transcript Sequence Number=SeqID_11887
MYPQMVYHADVRAREMELAAERQMGCSCXPPLGRMISRVITKCNGRQGRVRYDEKMDYAMAYAPAQTCYVRPTARNVTLAPSNHHPAHAHAIQPEPPRADATTLPGTPFPSTGAPPQGGARKPKKKKKKKQVRFTPSGPVPMDAPPPHAQHHTV

SEQ ID NO: 77862 - protein, 117 aa, Setaria italica
  misc_feature (30)..(30): Xaa can be any naturally occurring amino acid
  misc_feature (102)..(102): Xaa can be any naturally occurring amino acid
  Transcript Sequence Number=SeqID_11888
  Gene Ontology: Mol. function=sulfotransferase activity; Cellular component=integral to membrane
  Homolog annotation: Hit_ID=B6STJ6; Match level="QueryCoverage=100%, HitCoverage=34%, E-value=5e-46, Identity=76%"; Hit description =Flavonol 4-sulfotransferase
GDLVAALPRRQQSILELRLYQGFWLPEHWXPGTVVFQRRFSPRPDDVVLASYPKCGTTWLKALAFAAAARGAYPPAAPGHPLRRLNPHDCVPFIDEIFAGGXEAKLDVAPSPRLMNT

SEQ ID NO: 77863 - protein, 458 aa, Setaria italica
  Transcript Sequence Number=SeqID_11889
  Gene Ontology: Mol. function=transferase activity
  Homolog annotation: Hit_ID=B6TY42; Match level="QueryCoverage=99%, HitCoverage=100%, E-value=0.0, Identity=80%"; Hit description =Glycosyltransferase
  Pfam annotation: Domain name=DUF563; Domain location=79-323; Score =320.5; E_value=3.4e-93; Accession=PF04577.6; Description=Protein of unknown function (DUF563)
MMKQPRGRQEPRRMGNAAMVVTMLVSLCVLTYIKARYCSNPFPKAAEELEVVEVDEDYDSTRYKLSGPIGEEDFDPSRPTCYNTSKRSERCAAVGDIRVDGNHSKIYISPLDREWRTKPYARLHDPVAMDDVREYTLVPFGGANDTAVPPLCTRNHTAPAFLFSNGGFAGNLYHDYTDVLVPLFTSTNHFGGEVQFLLSGMKDWWNDKFTPLFRQLSKYEVIDVDNDREVHCFPRIVIGATFHRAMGIDPSRSPGGVTVADFKRLLRRAFRLERAVASRSGAPRRTRPRLLIISRKSSRRFLNERAMAHAAAAARFDVRIAEPDNHTDMPNFARLVNSADVMMGVHGAGLTNMVFLPSRAVLIQVVPFGGLEWLTRVTFKDPARDMDVNYMEYNVSLEESSLRDLYPEDHFYLKHPYDVHKKGWDAIKTVYLDKQNVRLNLTRFVKTLEQARELLPTP

SEQ ID NO: 77864 - protein, 201 aa, Setaria italica
  misc_feature (11)..(11): Xaa can be any naturally occurring amino acid
  misc_feature (69)..(69): Xaa can be any naturally occurring amino acid
  Transcript Sequence Number=SeqID_11890
  Gene Ontology: Mol. function=GTPase activity
  Homolog annotation: Hit_ID=Q7XVB6; Match level="QueryCoverage=86%, HitCoverage=46%, E-value=1e-78, Identity=83%"; Hit description =OSJNBa0072D21.6 protein
  Pfam annotation: Domain name=DUF258; Domain location=1-120; Score= -58.3; E_value=1.2e-09; Accession=PF03193.8; Description=Protein of unknown function, DUF258
ISEEDPIHKLXEQNSKWFGEQRVGTVSKKSGKGKHTTRHVSLLPIPGQGFLADTPGFNQPSLMKVTKKXSLAETFPEIRKMLKENEPSKCLFNDCVHLGERGCVVKGDWERYPYYLQMLDEIKIREEIQLRTFGTKREGDVRYKTGVMGVKQAEPRLELKKHRRVSRKKINQSILDEIEDDIDDRDDDYQFDDVKQRSRKR

SEQ ID NO: 77865 - protein, 154 aa, Setaria italica
  misc_feature (43)..(43): Xaa can be any naturally occurring amino acid
  Transcript Sequence Number=SeqID_11891
  Homolog annotation: Hit_ID=B9SSJ8; Match level="QueryCoverage=65%, HitCoverage=20%, E-value=8e-24, Identity=50%"; Hit description =Triacylglycerol lipase 2, putative
SVLTAWAGYSLRHVQQSRIDRRLEAIESSLKDNHKVEHEVIKXIVTSSNISTPACVATAMTTMVVGYALGWRGGAWYARRAFRREQQKLMMGHMKSQGRWHWRPFNRLKNRLRRASKNKSEDAHRSLAQSTDAPSSSGASANISNTAQPAAGNA

SEQ ID NO: 77866 - protein, 83 aa, Setaria italica
  Transcript Sequence Number=SeqID_11892
LERSVSCGGGERFEWHATGLGVGWVKQGELTPSGRRRRDGGNPIRGRWEWRRQRRIKQVQSAAVGGSALRCVLCSSAQHVLSS

SEQ ID NO: 77867 - protein, 101 aa, Setaria italica
  Transcript Sequence Number=SeqID_11893
NSVAHRICSACSPDMLSTAAAHKLTALSLACSPGVVVLHQTEISEEQLNKTQPIECELMNKRSACPDSRAERGGRAIKMLAGAPDSACCMPLSAEQAPVHK

SEQ ID NO: 77868 - protein, 131 aa, Setaria italica
  Transcript Sequence Number=SeqID_11894
TDGNKWETGPNHQTEISEEQLNKTQPIECELMNKRSACPDSRAERGGRAIKMLAGAPDSDCCMPLSAEQAPVHKKLSIISGQKTDSPIAPVSPQSALLGSKAADRLPRSERQIAGAGTPSLRFISFMQLKL

SEQ ID NO: 77869 - protein, 222 aa, Setaria italica
  Transcript Sequence Number=SeqID_11895
  Gene Ontology: Mol. function=transcription regulator activity; Cellular component=nucleus; Biological process=regulation of transcription
  Homolog annotation: Hit_ID=A2Q3E9; Match level="QueryCoverage=70%, HitCoverage=43%, E-value=6e-41, Identity=58%"; Hit description=Helix- loop-helix DNA-binding
  Pfam annotation: Domain name=HLH; Domain location=50-100; Score=36.0; E_value=1.5e-07; Accession=PF00010.18; Description=Helix-loop-helix DNA-binding domain
GKRKADQPADRASKGKSAKKGKTAEEKPAGGDGEDEKPAYVHVRARRGQATDSHSLAERARREKINARMELLKELVPGCSKVSGTALVLDEIINHVQSLQRQVEYLSMRLAAVNPRVDFGGLDSFLTTECGRIAGLNCKNGIDLEQVTWPEMGVHGARHLMQLQQQFWHGDLAHPHQAPSQWEKRGDGHPPVFSSSSPSLFGYDLTSSGAQQPPASKLKTEL

SEQ ID NO: 77870 - protein, 76 aa, Setaria italica
  Transcript Sequence Number=SeqID_11896
HRVDGTCVCLCSCQSCHLSRMKTVALVDSTVQWIEKDSRTLPIFFTFRVCTLPAKYCMKNCEQSQTILFLPLHGCR

SEQ ID NO: 77871 - protein, 60 aa, Setaria italica
  Transcript Sequence Number=SeqID_11897
  Gene Ontology: Mol. function=DNA binding; Cellular component=nucleus
  Homolog annotation: Hit_ID=O48794; Match level="QueryCoverage=100%, HitCoverage=6%, E-value=4e-24, Identity=83%"; Hit description=F24O1.3
LGEAVFIPAGCPHQVRNLKSCTKIALDFVSPENIQQCLSLTEDFRRLPKNHRAKEDKLEV

SEQ ID NO: 77872 - protein, 478 aa, Setaria italica
  Transcript Sequence Number=SeqID_11898
  Gene Ontology: Mol. function=DNA binding; Cellular component=nucleus
  Homolog annotation: Hit_ID=O65384; Match level="QueryCoverage=96%, HitCoverage=54%, E-value=1e-144, Identity=55%"; Hit description =F12F1.18 protein
  Pfam annotation: Domain name=JmjC; Domain location=301-417; Score =31.3; E_value=1.3e-06; Accession=PF02373.14; Description=JmjC domain
RNQSLPPSELGGCGNHVLELRQFFEKDRLSKLEMAALQMSKQLQPDIISTDTCECSCSANHESSRKAATREKSADNCIYCPISDGGKPDDLKHFQKHWVKGEPVIVQGVLKKMSHFSWEPPAMWSEIHGTNSSSEMKKVKATDCLSCCEVEICTKDFFEGYYEGRMYRNLWPEMLKLKDWPTSNHFENILPSHGRKYINSLPFQPYTNLKSGLLNISALLPGDILKLDMGPKSYIAYGCAQELSRGDSVTKLHCDLSDAVNVLMHTFKVEPSEEQKREIRNLKIRHTEQDKKEKVATDGNDTSMEHADTSPIYCADDGGGALWDIFRREDVGKLKEYLTKHSKEFRHMYCSPVEKTFNPVHDETFYLTNKHKRKLKEEYGIEPWTFVQRLGEAVFIPAGCPHQVRNLKSCTKIALDFVSPENIQQCLSLTEDFRRLPKNHRAKEDKLEVKKMIVYAVERALQILEEPCPSPERKPEAD

SEQ ID NO: 77873 - protein, 308 aa, Setaria italica
  misc_feature (244)..(244): Xaa can be any naturally occurring amino acid
  misc_feature (274)..(274): Xaa can be any naturally occurring amino acid
  Transcript Sequence Number=SeqID_11899
  Gene Ontology: Mol. function=ATPase activity, coupled to transmembrane movement of substances; Cellular component=integral to membrane; Biological process=peptide transport
  Homolog annotation: Hit_ID=B9SPK8; Match level="QueryCoverage=77%, HitCoverage=34%, E-value=1e-100, Identity=70%"; Hit description=Abc transporter, putative
  Pfam annotation: Domain name=ABC_tran; Domain location=34-221; Score =202.1; E_value=1.5e-57; Accession=PF00005.19; Description=ABC transporter
  Pfam annotation: Domain name=SMC_N; Domain location=23-225; Score= -131.0; E_value=0.058; Accession=PF02463.11; Description=RecFRecNSMC N terminal domain
  Pfam module annotation: Pfam domain module=ABC_tran::SMC_N; Domain location=34-221::23-225
KGEGRIQYADVSFSYPSRPTVPILGRLNLTLNPNEVVAIVGLSGSGKSTIVNLLLRLYEPTNGQILVDGVPLTELDIRWFRERIGFVGQEPRLFRMDISSNIKYGCPREVSHEEVVWAAKQAYAHDFIMSLPDGYNTIVDDALLSGGQKQRVAIARALLRDPSILLLDEATSALDAESEHYVKSVITKVSRDSKAKRTVVIIAHRLSTIQTADRIIVMENGNIVEDGKHSELVEKNGLYSRLAXDKMMISSSLKSQKVVYSTPVFFFSGMTGSXDSSVVGIFFTRTDMDRGARINLYSFPHGPKAFYN

SEQ ID NO: 77874 - protein, 147 aa, Setaria italica
  Transcript Sequence Number=SeqID_11900
  Gene Ontology: Mol. function=sequence-specific DNA binding; Cellular component=nucleus; Biological process=regulation of transcription, DNA-dependent
  Homolog annotation: Hit_ID=B9T3B9; Match level="QueryCoverage=76%, HitCoverage=34%, E-value=5e-56, Identity=91%"; Hit description =Transcriptional activator, putative
  Pfam annotation: Domain name=FHA; Domain location=48-123; Score=49.4; E_value=1.4e-11; Accession=PF00498.18; Description=FHA domain
MPHVKAVPATLGAGGMPGGSSGADGEVDAGFAKLQGEDFEYYMQTYSIMLGRNSKKSTVDVDLSSLGGGMNISRHHARIFYDFQRRRFALDVIGKNGCLVEGVLHLPGNPPVKLDSQDLLQIGDKKFYFLLPTRSIFASAAAARHAP

SEQ ID NO: 77875 - protein, 244 aa, Setaria italica
  Transcript Sequence Number=SeqID_11901
  Homolog annotation: Hit_ID=B6TG74; Match level="QueryCoverage=88%, HitCoverage=85%, E-value=1e-115, Identity=94%"; Hit description =Carboxy-lyase
  Pfam annotation: Domain name=Lysine_decarbox; Domain location=79-212; Score=243.5; E_value=5.3e-70; Accession=PF03641.6; Description=Lysine decarboxylase family
MAMEAALVVKSGGGAGAAGVAAQAGSGGERRSRFQRICVYCGSAKGRKPSYQDAAVELGKELVERGIDLVYGGGSIGLMGLVSHAVHDGGRHVIGVIPRSLMPREVTGEPVGEVRAVSGMHERKAEMARFADAFIALPGGYGTLEELLEVITWAQLGIHKKPVGLLNVDGFYDPLLSFIDMAVNEGFIKEDARRIIISAPTAKELVLKLEEYVPEYEVGLVWEDQMPSAAHSFAPELEPGIASS

SEQ ID NO: 77876 - protein, 313 aa, Setaria italica
  Transcript Sequence Number=SeqID_11902
  Gene Ontology: Mol. function=molecular_function; Cellular component =spliceosome; Biological process=nervous system development
  Homolog annotation: Hit_ID=B6TU58; Match level="QueryCoverage=98%, HitCoverage=62%, E-value=1e-129, Identity=77%"; Hit description =DGCR14 protein
  Pfam annotation: Domain name=Es2; Domain location=2-311; Score=237.1; E_value=4.5e-68; Accession=PF09751.1; Description=Nuclear protein Es2
RTNLPTALRSPSFLTTPAGSVAGGAGAPEEEEDDDVAAALSLDGFFNRFTSEDNESFSRILEKVNHRRHERYAHLLEPAEAANKPLLEDAKRDRITDGYGSSGQPPSTLEGAKFTAKNLLMYYPADRGEAPLTEEERAERIKGMTKEIDKSNTRLHGRAMADDARPKEEEAAILYAPVAGTTPGGMAYHDPDKAKKYDLEDLRKTPNPFYLESDKKANNGYTFVRTPSPAPGVDESPFMTWGEIDGTPLRLDPDETPGGSGGSETVHFKIPPPPARDVKAHLLSRDAARKIKERSKIFHKPPLPSPVRGGSAS

SEQ ID NO: 77877 - protein, 138 aa, Setaria italica
  Transcript Sequence Number=SeqID_11903
  Homolog annotation: Hit_ID=B6SKI6; Match level="QueryCoverage=100%, HitCoverage=83%, E-value=3e-30, Identity=33%"; Hit description=ATP binding protein
  Pfam annotation: Domain name=PPR; Domain location=42-76; Score=35.5; E_value=2.1e-07; Accession=PF01535.12; Description=PPR repeat
  Pfam annotation: Domain name=PPR; Domain location=77-111; Score=41.5; E_value=3.2e-09; Accession=PF01535.12; Description=PPR repeat
  Pfam module annotation: Pfam domain module=PPR::PPR; Domain location =42-76::77-111
HKYKCTPNIVIYSSLINGLSEQDRVEDALDLLRSMPCEPDTICYSAALKGLCRAKRWDDARELIAEMFRKQCPPDEATFSMLIGSLCQNGLVDLATEVFEQMSEYGCSPNSTIRSSLVNSYSEQGRVDEALKLSSSMP

SEQ ID NO: 77878 - protein, 159 aa, Setaria italica
  Transcript Sequence Number=SeqID_11904
  Gene Ontology: Mol. function=transcription regulator activity; Cellular component=nucleus; Biological process=regulation of transcription
  Homolog annotation: Hit_ID=A2Q2N8; Match level="QueryCoverage=61%, HitCoverage=15%, E-value=4e-35, Identity=72%"; Hit description=Helix- loop-helix DNA-binding (Fragment)
ISKDSSAVLNDNSSGVVLKDDPSAGINGGATWAYEVAGQTMVCPIIVEDLAPPGQMLVEMLCEERGFFLEIADTIRGFGLTILKGLMELRDGKIMARFLVEANKNVTRMDIFLSLVQLLQQNSLNRSSDQLTKVINNGVPSFAEHQQSPISIPVGLAGR

SEQ ID NO: 77879 - protein, 319 aa, Setaria italica
  misc_feature (8)..(8): Xaa can be any naturally occurring amino acid
  Transcript Sequence Number=SeqID_11905
  Gene Ontology: Mol. function=transcription regulator activity; Cellular component=nucleus; Biological process=regulation of transcription
  Homolog annotation: Hit_ID=B9RYR7; Match level="QueryCoverage=94%, HitCoverage=39%, E-value=2e-56, Identity=44%"; Hit description=Bhlh transcription factor, putative
NGLLEGTXLSPVMHYGWDDTALLAGNTSHFGATGMNSIAEQASSGPSSVEERGLFSETIFEELLGFDSNISPVMASTDPLAGSVSGCRLPRYNLQDSFSVCNAQEPALKLPSISCTSENVPIGASKATPVSLQNLSTDDCVSLNTANSKVSQVNNPEGVKVVKKRARPGESTRPRPKDRQQIQERVKELREIVPNSAKCSIDALLDRTIKHMLFLQSVTKYAEKIKQADEPKMISKDSSAVLNDNSSGVVLKDDPSAGINGGATWAYEVAGQTMVCPIIVEDLAPPGQMLVEMLCEERGFFLEIADTIRGFGPRTNNLK

SEQ ID NO: 77880 - protein, 396 aa, Setaria italica
  misc_feature (135)..(135): Xaa can be any naturally occurring amino acid
  misc_feature (362)..(362): Xaa can be any naturally occurring amino acid
  Transcript Sequence Number=SeqID_11906
  Gene Ontology: Mol. function=chlorophyll binding; Cellular component =integral to membrane; Biological process=photosynthetic electron transport chain
  Homolog annotation: Hit_ID=P0C364; Match level="QueryCoverage=100%, HitCoverage=77%, E-value=0.0, Identity=95%"; Hit description =Photosystem II CP47 chlorophyll apoprotein
  Pfam annotation: Domain name=PSII; Domain location=1-396; Score =771.8; E_value=4.7e-229; Accession=PF00421.11; Description =Photosystem II protein
MGLPWYRVHTVVLNDPGRLLSVHIMHTALVSGWAGSMALYELAVFDPSDPVLDPMWRQGMFVIPFMTRLGITNSWGGWSISGGTVTNPGIWSYEGVAGAHIVFSGLCFLAAIWHWVYWDLEIFCDERTGKPSLDXLPKIFGIHLFLAGVACFGFGAFHVTGLYGPGIWVSDPYGLTGKVQAVNPAWGAEGFDPFVPGGIASHHIAAGTLGILAGLFHLSVRPPQRLYKGLRMGNIETVLSSSIAAVFFAAFVVAGTMWYGSATTPIELFGPTRYQWDQGYFQQEIYRRVSDGLAENLSLSEAWSKIPEKLAFYDYIGNNPAKGGLFRAGSMDNGDGIAVGWLGHPVFRDKEGRELFVRRMPXTFFETFPVVLVDEEGIVRADVPFRRAESKSSATQ

SEQ ID NO: 77881 - protein, 236 aa, Setaria italica
  misc_feature (12)..(12): Xaa can be any naturally occurring amino acid
  Transcript Sequence Number=SeqID_11907
  Gene Ontology: Mol. function=UDP-glucuronate decarboxylase activity; Biological process=cellular metabolic process
  Homolog annotation: Hit_ID=Q5QMG6; Match level="QueryCoverage=97%, HitCoverage=56%, E-value=1e-125, Identity=92%"; Hit description=UDP -glucuronic acid decarboxylase
  Pfam annotation: Domain name=3Beta_HSD; Domain location=1-224; Score=- 128.5; E_value=0.029; Accession=PF01073.11; Description=3-beta hydroxysteroid dehydrogenaseisomerase family
  Pfam annotation: Domain name=Epimerase; Domain location=1-225; Score =148.1; E_value=2.6e-41; Accession=PF01370.13; Description=NAD dependent epimerasedehydratase family
  Pfam annotation: Domain name=NAD_binding_4; Domain location=1-207; Score=-63.5; E_value=5.9e-05; Accession=PF07993.4; Description=Male sterility protein
  Pfam module annotation: Pfam domain module=3Beta_HSD::Epimerase::NAD _binding_4; Domain location=1-224::1-225::1-207
VGSHLVDKLLAXGDSVIVVDNFFTGRKDNVAHHLGNPRFELIRHDVVEPILLEVDQIYHLACPASPVHYKFNPIKTIKTNVMGTLNMLGLAKRVGARFLLTSTSEVYGDPLEHPQKESYWGHVNPIGVRSCYDEGKRTAETLTMDYHRGAGVEVRIARIFNTYGPRMCLDDGRVVSNFVAQALRKQPMTVYGDGIQTRSFQYVSDLVDGLVTLMESDHIGPFNLGNPGEFNQPSRT

SEQ ID NO: 77882 - protein, 163 aa, Setaria italica
  misc_feature (85)..(85): Xaa can be any naturally occurring amino acid
  Transcript Sequence Number=SeqID_11908
  Gene Ontology: Mol. function=hydrolase activity, acting on glycosyl bonds; Cellular component=extracellular region; Biological process =metabolic process
  Homolog annotation: Hit_ID=Q0DCM5; Match level="QueryCoverage=96%, HitCoverage=35%, E-value=2e-72, Identity=81%"; Hit description =Mannan endo-1,4-beta-mannosidase 6
PFLLLHPTIRGYYKEYVKVILTRRNSYSGIKYCDEPAIFAWELMNEPRCVSNSSGPHIQAWIEEMAAYVKSLDTKHLVTVGIEGXYGPGRSERLGVNPGDWAASLCSDFIQNSAVKDIDFASVHAYPDSWLPKASMEEKVKYLSNWVDSHFRDSEYYVNKQIT

SEQ ID NO: 77883 - protein, 117 aa, Setaria italica
  Transcript Sequence Number=SeqID_11909
RTILMWMLLVELLRKKVEAILVSVGAQSYSSTIDRASRIAWLGYLVFYNLSSTGKKAIYGTLWVLAAAKLLQRVAINELLKRSFAYGKNAEQLSWYMAQIEKQDHQLQEVGDDGAEL

SEQ ID NO: 77884 - protein, 125 aa, Setaria italica
  misc_feature (59)..(59): Xaa can be any naturally occurring amino acid
  Transcript Sequence Number=SeqID_11910
  Homolog annotation: Hit_ID=Q8S3U9; Match level="QueryCoverage=93%, HitCoverage=10%, E-value=2e-38, Identity=64%"; Hit description =Exocyst complex component 2
LDNIYYLISVMDNKSLRLITDASVSSPISREKSQGLDPSMREKVIYSSPNFDPKVFLRXVHKDTSAADLESGALTLKTDLKGRTQQKKQLVKENFDCFVSCKTTIDDIESKLRQIEEDPEGAGTA

SEQ ID NO: 77885 - protein, 85 aa, Setaria italica
  Transcript Sequence Number=SeqID_11911
LRLDTVRFGDIEIDDLSAWYFVHRGSTLYVIPSSPECNHYVVDVERKSYRLCKSKRSKLFFSAVFRAGQYVVALCDTLQYVYILR

SEQ ID NO: 77886 - protein, 116 aa, Setaria italica
  Transcript Sequence Number=SeqID_11912
RRGQAAAVVAYAGDCEAAVAPQEAAKHHQQQQPQGLQPELFFKMSHDIYNYGEGLIGKVAADHSHKWVFKEPQENEINLISSWSNPADSHPRTWEAQFQSGIQNHRPDRCQGGVVQ

SEQ ID NO: 77887 - protein, 70 aa, Setaria italica
  Transcript Sequence Number=SeqID_11913
EVAADHSHKWVFKEPQENEINLISSWSNPADSHPRTWEAQFQSGIQVHTFRPCKSQSSPSRSESEAAAGS

SEQ ID NO: 77888 - protein, 55 aa, Setaria italica
  misc_feature (11)..(11): Xaa can be any naturally occurring amino acid
  Transcript Sequence Number=SeqID_11914
  Gene Ontology: Mol. function=metal ion binding; Cellular component =peroxisomal membrane; Biological process=peroxisome organization and biogenesis
  Homolog annotation: Hit_ID=B4FCL8; Match level="QueryCoverage=98%, HitCoverage=16%, E-value=4e-20, Identity=85%"; Hit description =Peroxisome assembly factor 1
  Pfam annotation: Domain name=zf-C3HC4; Domain location=2-42; Score =31.3; E_value=4e-06; Accession=PF00097.17; Description=Zinc finger, C3HC4 type (RING finger)
DCPICRSSPSXPFIALPCQHRYCYYCLHTRCSATSSYRCPRCNEVVVAIQRQGSV

SEQ ID NO: 77889 - protein, 165 aa, Setaria italica
  misc_feature (80)..(80): Xaa can be any naturally occurring amino acid
  Transcript Sequence Number=SeqID_11915
  Gene Ontology: Mol. function=metal ion binding; Cellular component =peroxisomal membrane; Biological process=peroxisome organization and biogenesis
  Homolog annotation: Hit_ID=B4FCL8; Match level="QueryCoverage=84%, HitCoverage=41%, E-value=2e-69, Identity=89%"; Hit description =Peroxisome assembly factor 1
  Pfam annotation: Domain name=Pex2_Pex12; Domain location=8-165; Score= 71.2; E_value=3.8e-18; Accession=PF04757.6; Description=Pex2  Pex12 amino terminal region
TRQGTKNSTKMSAMLKEQLVKVFSLMKPGLLFQYEPELDAFLEFLIWRFSIWVDKPTPGNALMNLRYRDERLVPITGKEXRTGLEGPGLSVSQKIFYCISFVGGQYIWSRLQSFSAFRRWGDLEQRPLARRAWGLVQNAEGLYQAASFFNLLLFLYGGRYLLVHA

SEQ ID NO: 77890 - protein, 115 aa, Setaria italica
  misc_feature (48)..(48): Xaa can be any naturally occurring amino acid
  Transcript Sequence Number=SeqID_11916
  Gene Ontology: Mol. function=metal ion binding; Cellular component =peroxisomal membrane; Biological process=peroxisome organization and biogenesis
  Homolog annotation: Hit_ID=B4FCL8; Match level="QueryCoverage=100%, HitCoverage=33%, E-value=6e-49, Identity=86%"; Hit description =Peroxisome assembly factor 1
MSLVESASASDGPPPQDAWHAEFQRLLPLWQSLRDSSKVIIPISISRXVNQFDAAGLDVEMSAMLKEQLVKVFSLMKPGLLFQYEPELDAFLEFLIWRFSIWVDKPTPGNALMNL

SEQ ID NO: 77891 - protein, 132 aa, Setaria italica
  Transcript Sequence Number=SeqID_11917
  Gene Ontology: Mol. function=metal ion binding; Cellular component =peroxisomal membrane; Biological process=peroxisome organization and biogenesis
  Homolog annotation: Hit_ID=B4FCL8; Match level="QueryCoverage=96%, HitCoverage=37%, E-value=8e-59, Identity=87%"; Hit description =Peroxisome assembly factor 1
MSLVESTSASEGPPPQDAWHAEFQRLLPLWESLRDSSKVIIPISISRVNQFDAARLDVEMSAMLKEQLVKVFSLMKPGLLFQYEPELDAFLEFLIWRFSIWVDKPTPGNALMNLRYRDERVVPIIGKEGIFL

SEQ ID NO: 77892 - protein, 224 aa, Setaria italica
  Transcript Sequence Number=SeqID_11918
  Gene Ontology: Mol. function=metal ion binding; Cellular component =peroxisomal membrane; Biological process=peroxisome organization and biogenesis
  Homolog annotation: Hit_ID=B4FCL8; Match level="QueryCoverage=92%, HitCoverage=61%, E-value=1e-104, Identity=87%"; Hit description =Peroxisome assembly factor 1
  Pfam annotation: Domain name=Pex2_Pex12; Domain location=3-159; Score= 66.2; E_value=1.2e-16; Accession=PF04757.6; Description=Pex2  Pex12 amino terminal region
  Pfam annotation: Domain name=zf-C3HC4; Domain location=171-211; Score= 31.0; E_value=4.7e-06; Accession=PF00097.17; Description=Zinc finger, C3HC4 type (RING finger)
  Pfam module annotation: Pfam domain module=Pex2_Pex12::zf-C3HC4; Domain location=3-159::171-211
MNVSEQHLMDSLCFSVRTGLEGPGLSVSQKIFYCISFVGGQYIWSRLQSFSAFRRWGDLEQRPLARRAWGLVQNAEGLYQAASFFNLLLFLYGGRYKTIVERILKARLVYGSPNMNRAVSFEYMNRQLVWNEFSEMLLLLLPLLNSSSVKKFLLPFSKDKSAGSFGDEADCPICRSSPSIPFIALPCQHRYCYYCLHTRCSATSSYRCPRCNEVVVAIQRQGSV

SEQ ID NO: 77893 - protein, 141 aa, Setaria italica
  Transcript Sequence Number=SeqID_11919
  Gene Ontology: Mol. function=metal ion binding; Cellular component =peroxisomal membrane; Biological process=peroxisome organization and biogenesis
  Homolog annotation: Hit_ID=B4FCL8; Match level="QueryCoverage=97%, HitCoverage=40%, E-value=4e-65, Identity=86%"; Hit description =Peroxisome assembly factor 1
  Pfam annotation: Domain name=zf-C3HC4; Domain location=88-128; Score =36.0; E_value=1.5e-07; Accession=PF00097.17; Description=Zinc finger, C3HC4 type (RING finger)
MTHLLLFLYGGRYKTIVERILKARLVYGSPNMNRAVSFEYMNRQLVWNEFSEMLLLLLPLLNSSSVKKFLLPFSKDKSAGSFGDEANCPICRSSPSIPFIALPCQHRYCYYCLRTRCSATSSYRCPRCNEVVVAIQRQGSV

SEQ ID NO: 77894 - protein, 313 aa, Setaria italica
  Transcript Sequence Number=SeqID_11920
  Gene Ontology: Mol. function=metal ion binding; Cellular component =peroxisomal membrane; Biological process=peroxisome organization and biogenesis
  Homolog annotation: Hit_ID=B4FCL8; Match level="QueryCoverage=95%, HitCoverage=87%, E-value=1e-149, Identity=87%"; Hit description =Peroxisome assembly factor 1
  Pfam annotation: Domain name=Pex2_Pex12; Domain location=47-266; Score=218.9; E_value=1.3e-62; Accession=PF04757.6; Description=Pex2 Pex12 amino terminal region
HCLILQAPPQDAWHAEFQRLLPLWESLRDSSKVIIPISISRVNQFDAAGLDVEMSAMLKEQLVKVFSLMKPGLLFQYEPELDAFLEFLIWRFSIWVDKPTPGNALMNLRYRDERLVPITGKEVRTGLEGPGLSVSQKIFYCISFVGGQYIWSRLQSFSAFRRWGDLEQRPLARRAWGLVQNAEGLYQAASFFNLLLFLYGGRYKTIVERILKARLVYGSPNMNRAVSFEYMNRQLVWNEFSEMLLLLLPLLNSSSVKKFLLPFSKDKSAGSFGDEANCPICRSSPSIPFIALPCQHRFFVCFQVLLLLPNIFL

SEQ ID NO: 77895 - protein, 78 aa, Setaria italica
  misc_feature (34)..(34): Xaa can be any naturally occurring amino acid
  misc_feature (53)..(53): Xaa can be any naturally occurring amino acid
  Transcript Sequence Number=SeqID_11921
  Subcellular localization annotation: CTP_CleavageSite=45; ConfidenceScore=5.28e-01
LPPAAGLPLQLPSLLSFLSFADIAIAGACRRRSXHRGRSSSPDPQAAAESLTXPQHPQRATGRREASRLDASLRGRLP

SEQ ID NO: 77896 - protein, 473 aa, Setaria italica
  misc_feature (272)..(272): Xaa can be any naturally occurring amino acid
  misc_feature (463)..(463): Xaa can be any naturally occurring amino acid
  Transcript Sequence Number=SeqID_11922
  Gene Ontology: Mol. function=transferase activity; Cellular component= endoplasmic reticulum membrane; Biological process=GPI anchor biosynthetic process
  Homolog annotation: Hit_ID=B9RUF2; Match level="QueryCoverage=100%, HitCoverage=48%, E-value=1e-156, Identity=60%"; Hit description=GPI ethanolamine phosphate transferase, putative
  Pfam annotation: Domain name=PigN; Domain location=1-440; Score =264.4; E_value=2.6e-76; Accession=PF04987.6; Description =Phosphatidylinositolglycan class N (PIG-N)
HVLQSYTSFPAILLKKALLHPKNTSMKVYVGGCFFMGLSSIILLLEKSPLLYHAYVFMTIFLWTRIVQNFEFLKAVWREFSNMPFKYTLNLLISSGIALFVLEFLVMSFFDRKIYTWCFLVLGILGSTYVAFFIQASPALAIYIWLACWFLSVFTLMPAEIPENNNLVILSGALIILIAVASRWANSNCTSFWLYLTRANKRDSQSSKLYFVQVILVAISSIMVWLSTSHRSQNRELHSLHQLINWSVAGVAMVLPLFSPPSVLSRLTSIFXGFAPPFLLLSIGYEAVFYSAFSMVLIGWIFVESANLYCSEESGSARRRNLVDGSVFGYEERHLQLSDLRIPLLFVILFNVAFFGTGNFASIASFEISSVYRFITVFSPFLMAGLLIFKLFIPFMLVICTFSAITKIVRIPRLGCYFLVILLSDVMTIHFFFLVRNTGSWMEIGNSISHFGIVSAQVVFVCXFALTNIYTRD

SEQ ID NO: 77897 - protein, 78 aa, Setaria italica
  Transcript Sequence Number=SeqID_11923
APRWWRRPRRRATRPLLLHPVGLSPLTLCGGLVVTSHSSEVPHAGWEQWTLDTSNGLCRVLKWSVGILHTSTCWGRLA

SEQ ID NO: 77898 - protein, 277 aa, Setaria italica
  Transcript Sequence Number=SeqID_11924
  Gene Ontology: Mol. function=transferase activity, transferring groups other than amino-acyl groups; Cellular component=membrane; Biological process=fatty acid biosynthetic process
  Homolog annotation: Hit_ID=O65677; Match level="QueryCoverage=77%, HitCoverage=44%, E-value=4e-46, Identity=41%"; Hit description =Probable 3-ketoacyl-CoA synthase 2
  Pfam annotation: Domain name=ACP_syn_III; Domain location=188-263; Score=-19.2; E_value=0.073; Accession=PF08545.2; Description=3 -Oxoacyl-[acyl-carrier-protein (ACP)]
  Pfam annotation: Domain name=FAE1_CUT1_RppA; Domain location=50-277; Score=314.1; E_value=3e-91; Accession=PF08392.4; Description =FAE1Type III polyketide synthase-like
  Pfam module annotation: Pfam domain module=ACP_syn_III::FAE1_CUT1 _RppA; Domain location=188-263::50-277
  Subcellular localization annotation: CTP_CleavageSite=53; ConfidenceScore=5.77e-01
RASSVVMSSSTSSTAAAAAAAMASLCTLPLPLLVALVVSGLAFLSRTSRRVLRRQRPVYLLNYSCHLPDVDRQVNLEVCEYFGLKCRRYSDDIADFMRLIYSKSGLGQETFAPPFIFSGKFEKTLAFAVQEAEEGLFAVVGQLLAKADVTPADISVLVVACSMFSPMPSLASMIAHRFKMRPDVKAYSVAGMGCSAGTVGIDTAARSLRCQRRPGYALVVVTENTSLNWYFGENKHMLVTNCIFRVGTAAALVTDVPSRRADAKYELVRTLRTHHGA

SEQ ID NO: 77899 - protein, 292 aa, Setaria italica
  misc_feature (17)..(17): Xaa can be any naturally occurring amino acid
  Transcript Sequence Number=SeqID_11925
  Gene Ontology: Mol. function=heat shock protein binding; Biological process=protein folding
  Homolog annotation: Hit_ID=B9RS94; Match level="QueryCoverage=97%, HitCoverage=96%, E-value=5e-83, Identity=57%"; Hit description =Protein psi1, putative
  Pfam annotation: Domain name=DnaJ_C; Domain location=165-287; Score =66.1; E_value=1.3e-16; Accession=PF01556.10; Description=DnaJ C terminal region
SPRRYEVLSDPQKRAIXYDQYGEEGLKASADGGGSSSMNGSANQRFNPRNAEDVFAEFFGSSKPFENMGRAKSMRFQTEGAGTFGGFGGNENKFRSHKDSVGTSSNQARKPPPVETKLPCTLEELYAGSTRKMKISRNVVKPNGQIGTESEILTIDIKPGWKKGTKITFPDKGNEHPNQLPADLVFVIDEKPHDLYTREGNDLLVHRKISLVDALAGTTVNLKTLDGRDLVIKLTDVVTPGYELVIAKEGMPIVKENGRRGNLRIKFDVDFPKRLSSEQRHNIRKVLGGQPQ

SEQ ID NO: 77900 - protein, 88 aa, Setaria italica
  misc_feature (17)..(17): Xaa can be any naturally occurring amino acid
  Transcript Sequence Number=SeqID_11926
  Gene Ontology: Mol. function=protein serine/threonine kinase activity; Biological process=protein amino acid phosphorylation
  Homolog annotation: Hit_ID=C5IYF1; Match level="QueryCoverage=97%, HitCoverage=16%, E-value=7e-10, Identity=42%"; Hit description =Putative serine-threonine protein kinase
  Pfam annotation: Domain name=LRR_1; Domain location=15-37; Score=7.4; E_value=12; Accession=PF00560.25; Description=Leucine Rich Repeat
  Pfam annotation: Domain name=LRR_1; Domain location=39-58; Score=6.3; E_value=19; Accession=PF00560.25; Description=Leucine Rich Repeat
  Pfam annotation: Domain name=LRR_1; Domain location=61-83; Score=9.5; E_value=4.6; Accession=PF00560.25; Description=Leucine Rich Repeat
  Pfam module annotation: Pfam domain module=LRR_1::LRR_1::LRR_1; Domain location=15-37::39-58::61-83
  Subcellular localization annotation: CTP_CleavageSite=82; ConfidenceScore=5.24e-01
QLSGDIPASLTTCSSLXTILLPNNKFTGRFPPGIWLLPKLTIVKVHDNAFTGSLPSGLGPSVATIDISNNRFSGRLPATGTNLSYFKH

SEQ ID NO: 77901 - protein, 108 aa, Setaria italica
  Transcript Sequence Number=SeqID_11927
  Gene Ontology: Mol. function=acid phosphatase activity; Cellular component=chloroplast
  Homolog annotation: Hit_ID=B9RAG4; Match level="QueryCoverage=100%, HitCoverage=17%, E-value=3e-43, Identity=75%"; Hit description =Hydrolase, putative
RTCPIYQSQCMTGEKSHYSGTMNGTIFVVAGGGGSHLSDYTTAVPKWSIFRDRDFGFVKLTAFNHSSLLFEYKKSSDGKVYDSFTIDRDYRDVLSCVHDSCFPTTLAT

SEQ ID NO: 77902 - protein, 42 aa, Setaria italica
  Transcript Sequence Number=SeqID_11928
  Gene Ontology: Mol. function=glutathione peroxidase activity; Cellular component=cytoplasm; Biological process=response to oxidative stress
  Homolog annotation: Hit_ID=Q7XPV2; Match level="QueryCoverage=100%, HitCoverage=26%, E-value=5e-14, Identity=85%"; Hit description =Glutathione peroxidase
GERIKWNFTKFLADKDGHVVARYAPTSSPLSIENDIQKLLEA

SEQ ID NO: 77903 - protein, 243 aa, Setaria italica
  Transcript Sequence Number=SeqID_11929
  Gene Ontology: Mol. function=nucleic acid binding
  Homolog annotation: Hit_ID=Q9AVV5; Match level="QueryCoverage=98%, HitCoverage=86%, E-value=4e-59, Identity=58%"; Hit description=MCB2 protein
  Pfam annotation: Domain name=Myb_DNA-binding; Domain location=66-113; Score=49.8; E_value=1.1e-11; Accession=PF00249.23; Description=Myb -like DNA-binding domain
  Subcellular localization annotation: CTP_CleavageSite=44; ConfidenceScore=5.15e-01
AAASMKKSYSMDCLQLAAPGCSIVSPSSSSSSSLLLSIEEGLERAAATNGYLSDGNARVVAERKKGVPWSEEEHRQFLAGLEKLGKGDWRGISRNYVTTRTPTQVASHAQKFFLRQSSMGKKKRRSSLFDMVPICENSSSISDPPSSEGASTSLSLNVSRHEQSSERTTAFDLNSTEEDDGRADVSSASGAGTRPFPAAAAAPPPTELQPPHGHGHGHGHGHHHCSPLELELGMSLSTPFIGT

SEQ ID NO: 77904 - protein, 83 aa, Setaria italica
  Transcript Sequence Number=SeqID_11930
  Gene Ontology: Mol. function=actin binding; Cellular component =intracellular
  Homolog annotation: Hit_ID=Q9AY76; Match level="QueryCoverage=59%, HitCoverage=33%, E-value=3e-19, Identity=89%"; Hit description=Actin- depolymerizing factor 2
  Pfam annotation: Domain name=Cofilin_ADF; Domain location=1-83; Score= -22.9; E_value=0.044; Accession=PF00241.12; Description =Cofilintropomyosin-type actin-binding pr
  Subcellular localization annotation: CTP_CleavageSite=42; ConfidenceScore=5.05e-01
SFFLIGFYCSNCINSGLSVDSTSPDINPVHNHSRSPSTSRIRAKMLYATSKDRMKHELDGFHYEIQATDPTEMDIEVLRERAH

SEQ ID NO: 77905 - protein, 55 aa, Setaria italica
  Transcript Sequence Number=SeqID_11931
  Gene Ontology: Mol. function=actin binding; Cellular component =intracellular
  Homolog annotation: Hit_ID=Q9AY76; Match level="QueryCoverage=100%, HitCoverage=37%, E-value=1e-25, Identity=100%"; Hit description =Actin-depolymerizing factor 2
EKQKQVVVEKTGATTESYDDFLASLPENDCRYALYDFDFVTGENVQKSKIFFIAW

SEQ ID NO: 77906 - protein, 70 aa, Setaria italica
  Transcript Sequence Number=SeqID_11932
  Gene Ontology: Mol. function=actin binding; Cellular component =intracellular
  Homolog annotation: Hit_ID=Q9AY76; Match level="QueryCoverage=100%, HitCoverage=47%, E-value=2e-17, Identity=61%"; Hit description=Actin- depolymerizing factor 2
ELDAVLGGGVQHLRTNAGCRWGPGNEKDLAKMLYATSKDRMKHELDGFHYEIQATDPTEMDIEVLRERAH

SEQ ID NO: 77907 - protein, 55 aa, Setaria italica
  misc_feature (21)..(21): Xaa can be any naturally occurring amino acid
  Transcript Sequence Number=SeqID_11933
  Gene Ontology: Mol. function=actin binding; Cellular component =intracellular
  Homolog annotation: Hit_ID=Q9AY76; Match level="QueryCoverage=100%, HitCoverage=37%, E-value=1e-23, Identity=98%"; Hit description=Actin- depolymerizing factor 2
KQKQVVVEKTGATTESYDDFXLASLPENDCRYALYDFDFVTGENVQKSKIFFIAW

SEQ ID NO: 77908 - protein, 145 aa, Setaria italica
  Transcript Sequence Number=SeqID_11934
  Gene Ontology: Mol. function=actin binding; Cellular component =intracellular
  Homolog annotation: Hit_ID=Q9AY76; Match level="QueryCoverage=100%, HitCoverage=100%, E-value=4e-78, Identity=94%"; Hit description =Actin-depolymerizing factor 2
  Pfam annotation: Domain name=Cofilin_ADF; Domain location=18-145; Score=172.6; E_value=1.2e-48; Accession=PF00241.12; Description =Cofilintropomyosin-type actin-binding pr
MAFMRSHSNASSGMGVAPNIRETFVELQMKKAFRYVIFKIEEKQKQVVVEKTGATTESYDDFLASLPENDCRYALYDFDFVTGENVQKSKIFFIAWSPSTSRIRAKMLYATSKDRMKHELDGFHYEIQATDPTEMDIEVLRERAH

SEQ ID NO: 77909 - protein, 62 aa, Setaria italica
  Transcript Sequence Number=SeqID_11935
  Gene Ontology: Mol. function=small protein activating enzyme activity; Biological process=ubiquitin-dependent protein catabolic process
  Homolog annotation: Hit_ID=B9F7T7; Match level="QueryCoverage=85%, HitCoverage=4%, E-value=6e-22, Identity=84%"; Hit description =Ubiquitin-activating enzyme E1
SHHTVIILTLSDFQVAVFTDISLDKAFQFDDYCRSHQPPISFIKTEVCGLFGSVFCDFGPEF

SEQ ID NO: 77910 - protein, 99 aa, Setaria italica
  misc_feature (70)..(70): Xaa can be any naturally occurring amino acid
  misc_feature (91)..(91): Xaa can be any naturally occurring amino acid
  Transcript Sequence Number=SeqID_11936
  Gene Ontology: Mol. function=small protein activating enzyme activity; Biological process=ubiquitin-dependent protein catabolic process
  Homolog annotation: Hit_ID=P31252; Match level="QueryCoverage=58%, HitCoverage=5%, E-value=4e-16, Identity=72%"; Hit description =Ubiquitin-activating enzyme E1 3
MAAEELESAAAELESRRRSSLWHRDAVRRCLRRPVRARKQASEPCSRRRSVAVFTDISLDKAFQFDDYCXSHQPPISFIKTEVCGLFGSVXFCDFGPEF

SEQ ID NO: 77911 - protein, 127 aa, Setaria italica
  Transcript Sequence Number=SeqID_11937
  Gene Ontology: Mol. function=aspartic-type endopeptidase activity; Cellular component=endoplasmic reticulum membrane; Biological process=DNA integration
  Homolog annotation: Hit_ID=Q7XM06; Match level="QueryCoverage=100%, HitCoverage=8%, E-value=1e-48, Identity=72%"; Hit description =OSJNBa0086O06.3 protein
  Pfam annotation: Domain name=RVT_2; Domain location=1-107; Score= -30.1; E_value=4e-15; Accession=PF07727.6; Description=Reverse transcriptase (RNA-dependent DNA pol
KKKGFRQSNHEAAIYRRGSGNSLLLVGVYVDDLIITGAKEQDVEGFKAEMKATFEMSDLGLLSFYLGIEVQQSANGITLRQTHYAKRILELGGMVDCNPAATPMEERLRLSKKSTAKEVDPTQYRQL

SEQ ID NO: 77912 - protein, 76 aa, Setaria italica
  Transcript Sequence Number=SeqID_11938
VIDHRAPFKVPGLLVLHCVKICYFLLCCLHSYPVIGSTIIVEKLFYLRSHFEVYDIIDVFRLIPGVDSNRLIHPGL

SEQ ID NO: 77913 - protein, 132 aa, Setaria italica
  Transcript Sequence Number=SeqID_11939
  Gene Ontology: Mol. function=aspartic-type endopeptidase activity; Biological process=DNA integration
  Homolog annotation: Hit_ID=Q25AF6; Match level="QueryCoverage=61%, HitCoverage=5%, E-value=1e-26, Identity=65%"; Hit description =H0512B01.8 protein
KLEVVELRVDNKSAIALAKNPVFHDRSKHIRIKQHFIRDCVEEGSIKTEFVATNDQLADILTKALGKAKFEDMRSKIGIMKIKDGEAGLRGRTVEVKPCSQLSLRYLCLIMSLLLRSWAAQVTVQVPRQLAV

SEQ ID NO: 77914 - protein, 112 aa, Setaria italica
  Transcript Sequence Number=SeqID_11940
  Subcellular localization annotation: CTP_CleavageSite=70; ConfidenceScore=5.26e-01
LCNMDKNNEMSIVLSYPFYFIFRFSLFFPYFSPLSAASCPPFPVARLLLDPPPRRRPLLMKIKDSLPGLRAPSVEVKPCSQLSLRYLCLIMSLLLRSWAAQVTVQVPRQLAV

SEQ ID NO: 77915 - protein, 189 aa, Setaria italica
  misc_feature (188)..(188): Xaa can be any naturally occurring amino acid
  Transcript Sequence Number=SeqID_11941
  Gene Ontology: Mol. function=aspartic-type endopeptidase activity; Cellular component=chromatin; Biological process=DNA integration
  Homolog annotation: Hit_ID=Q25AF6; Match level="QueryCoverage=80%, HitCoverage=10%, E-value=2e-63, Identity=76%"; Hit description =H0512B01.8 protein
FLFFNFFFFWFLVFFWVRLIGWYCNPAATPMEERLRLSKKSTAKEVDPTQYRQLVGSLRYLVHTRPDLAFAVGFKSRFLERPTIEHQQAVKRILRYVAGSLEYGLHFTKASSEARFIGYCDSDLAGDIDSSKSTTGCLFFLGNNLVSWQSIKQRVVALSSCEAEYVAMTTAATQALWLSRLLAELLGXK

SEQ ID NO: 77916 - protein, 700 aa, Setaria italica
  Transcript Sequence Number=SeqID_11942
  Gene Ontology: Mol. function=small protein activating enzyme activity; Biological process=ubiquitin-dependent protein catabolic process
  Homolog annotation: Hit_ID=B9F7T7; Match level="QueryCoverage=100%, HitCoverage=59%, E-value=0.0, Identity=78%"; Hit description =Ubiquitin-activating enzyme E1
  Pfam annotation: Domain name=ThiF; Domain location=111-255; Score =152.0; E_value=1.9e-42; Accession=PF00899.13; Description=ThiF family
  Pfam annotation: Domain name=UBACT; Domain location=398-459; Score =36.4; E_value=1.1e-07; Accession=PF02134.13; Description=Repeat in ubiquitin-activating (UBA) protein
  Pfam annotation: Domain name=UBACT; Domain location=499-567; Score =120.4; E_value=6e-33; Accession=PF02134.13; Description=Repeat in ubiquitin-activating (UBA) protein
  Pfam annotation: Domain name=UBA_e1_C; Domain location=573-695; Score= 193.4; E_value=6e-55; Accession=PF09358.2; Description=Ubiquitin -activating enzyme e1 C-term
  Pfam annotation: Domain name=UBA_e1_thiolCys; Domain location=257 -305; Score=125.8; E_value=1.4e-34; Accession=PF10585.1; Description =Ubiquitin-activating enzyme active si
  Pfam module annotation: Pfam domain module=ThiF::UBACT::UBACT::UBA_e1_ C::UBA_e1_thiolCys; Domain location=111-255::398-459::499-567::573 -695::257-305
GQRIVEFTASFNEATIDYKIEGKLDEKLLRLFASGSRAVLNPMAAIFGGIVGQEVVKACSGKFQPLYQFFYLDSVESLPTHQLDPKDLKPLNSRYDAQISVFGSRLQKKLRDANVFVVGSGALGCEFLKNLALMGVSCSRKGKLTITDDDVIEKSNLSSQFLFRDWNIGQAKSTVAATAASAINSCLHIDALQNRACPETEHVFHDAFWEGLDVVINALDNVNARMYMDMRCLYFQKPLLESGTLGTKCNTQMVIPHLTENYGASQDPPEKQAPMCTVHSFPHNIDHCVTWARSEFEGLLDKTPNEVNSFLSNPTQYAAAMKKAGDAQARELLERVRECLEKERCERFEDCITWARLKFEDYFSNRVKQLTFTFPEDAATSTGAPFWSAPKRFPRPLEFSTTDLSHVQFIMAASILRAVSFGITVPDWAKSTTNLIDAISKVYVPEFKPKSGVKIETDEKANNISSASVDDAAVIEDLLAKLEASAKKLPPGFRLKPIHFEKDDDTNFHMDLIAGLANMRARNYGIQEVDRLKAKFIAGRIIPAIATSTAMATGLVCLELYKVLAGGHPVEDYHNTFSNLALPMLTKSEPLPPTVIKHKGMRWTVWDRWSIKGDITVAELLKWLSDKGLSAYSVSCGTSLLYNTMFPRHKDRLSRKIADVAKEVAKVDVPEYRKHLDVVVACEDDKGKDIDIPLISIYFR

SEQ ID NO: 77917 - protein, 490 aa, Setaria italica
  misc_feature (61)..(61): Xaa can be any naturally occurring amino acid
  misc_feature (334)..(334): Xaa can be any naturally occurring amino acid
  misc_feature (372)..(372): Xaa can be any naturally occurring amino acid
  Transcript Sequence Number=SeqID_11943
  Gene Ontology: Mol. function=small protein activating enzyme activity; Cellular component=cytoplasm; Biological process=ubiquitin- dependent protein catabolic process
  Homolog annotation: Hit_ID=B9F7T7; Match level="QueryCoverage=87%, HitCoverage=36%, E-value=1e-171, Identity=71%"; Hit description =Ubiquitin-activating enzyme E1
  Pfam annotation: Domain name=ThiF; Domain location=114-244; Score =29.7; E_value=9.8e-09; Accession=PF00899.13; Description=ThiF family
PPSRRKRRPAALEPRGRDRRANPSRRSDRPHPVKPSFHYMLPTKRAEGVEDSSDGVVKKAXAGESAVGAGAMVAGEEAGGGGGSGNMSGVAEIDEDLHSRQLAVYGRETMRRLFASNVLISGLNGLGAEIAKNLALAGVKSVTLHDAGNVEMWDLSGNFFLSEDDIGKNRAVACAAKLQELNNAVDISALTEELTTEHLSKFQVAVFTDISLDKAFQFDDYCRSHQPPISFIKTEVRGLFGSVFCDFGPEFAVHDLDGEDPHTGIIAFISNDNPATVYCIDGERLDFQEGDLVVFSEVQGMNELNDGKPRKIIRSRPYSFCIEEDTSNFGIYTXDGSVTQVKEQMVVEFKSLRDSIREPGKFPLSACLKFDXPPLLHFAFLALDKFRKEFGRFPAVGCAQDGQRIVEFTASFNESTIDYKIEGKLDEKLRRRFASGSRAVLNPMAAIFGGIVDQEVVKACSGKFQPLYQQNGSRWHPHTATALMTAWMTR

SEQ ID NO: 77918 - protein, 232 aa, Setaria italica
  Transcript Sequence Number=SeqID_11944
  Gene Ontology: Mol. function=protein binding; Cellular component =membrane; Biological process=vesicle-mediated transport
  Homolog annotation: Hit_ID=Q946Y7; Match level="QueryCoverage=90%, HitCoverage=91%, E-value=3e-73, Identity=58%"; Hit description =Syntaxin-61
  Pfam annotation: Domain name=SNARE; Domain location=145-207; Score =51.9; E_value=2.5e-12; Accession=PF05739.11; Description=SNARE domain
  Pfam annotation: Domain name=Syntaxin-6_N; Domain location=6-99; Score=160.1; E_value=6.4e-45; Accession=PF09177.3; Description =Syntaxin 6, N-terminal
  Pfam module annotation: Pfam domain module=SNARE::Syntaxin-6_N; Domain location=145-207::6-99
MSSAQDPFYIVREEIQDSIDKLQSTFHRWEQTASNTGEYVHLTKDLLTSCESIEWQVDELEKTISVASRDPAYYGLDEVELSRRRNWTGSARNQVGTVRRAIEKGKSNSATSRYQDTSRTNLYSAQDNDDFISSESDRQQLLMRQQDEELDELSASVQRIGGVGLTIHEELSGQERILNDLSLEMETTSNRLDFVQKRVAMVMKKAGIKGQIMLIAFLVVLFIILFVLVFLT

SEQ ID NO: 77919 - protein, 109 aa, Setaria italica
  misc_feature (78)..(78): Xaa can be any naturally occurring amino acid
  Transcript Sequence Number=SeqID_11945
  Homolog annotation: Hit_ID=B4FKS4; Match level="QueryCoverage=55%, HitCoverage=25%, E-value=3e-25, Identity=86%"; Hit description=EREBP- 4 like protein
EEQLNHLIVKNCNHFTADACQRLTGKPVPGWVNRLARLGSFFNCVLPESIKVSAVTNANGHPDFSGTLPTPRFIISHXSHGWNWTLQHICHLVKDCYSNVLAAPANCIA

SEQ ID NO: 77920 - protein, 234 aa, Setaria italica
  Transcript Sequence Number=SeqID_11946
  Homolog annotation: Hit_ID=B4FKS4; Match level="QueryCoverage=85%, HitCoverage=86%, E-value=1e-100, Identity=90%"; Hit description =EREBP-4 like protein
  Pfam annotation: Domain name=DUF862; Domain location=37-174; Score =242.4; E_value=1.1e-69; Accession=PF05903.6; Description=Eukaryotic protein of unknown function (DUF862)
MRVLPASWSSSSAKATTTSSNTTEGEEPPRPPTVGAAAVYLNIYDISPLNHYLYWFGLGIFHSGIEVHGMEYGFGAHEYPTSGVFQVEPKSCPGFIFRRSVCVGTTDLSRSQVRTCIEDLAEDYHGDTYHLIVKNCNHFTADACQRLTGKPVPGWVNRLARLGSFFNCVLPESIKVSAVTNANGHPDFSDDGLGSNASIVEGSDEDDLDQLLRTPNSDVVSSRDKTLTPGRDSF

SEQ ID NO: 77921 - protein, 70 aa, Setaria italica
  Transcript Sequence Number=SeqID_11947
  Gene Ontology: Mol. function=oxidized purine base lesion DNA N -glycosylase activity; Cellular component=intracellular; Biological process=protein amino acid phosphorylation
  Homolog annotation: Hit_ID=Q6ZI28; Match level="QueryCoverage=98%, HitCoverage=17%, E-value=7e-28, Identity=86%"; Hit description =Putative 8-oxoguanine DNA glycosylase isoform 1a; 8-hydroxyguanine DNA glycosylase
  Pfam annotation: Domain name=HHH; Domain location=17-46; Score=19.1; E_value=0.019; Accession=PF00633.15; Description=Helix-hairpin-helix motif
KELQAKPGGGEKWLASLREKELPEVIEALCTLPGVGPKVAACIALFSLDQNHAIPVDTHVWKVYYILLLC

SEQ ID NO: 77922 - protein, 159 aa, Setaria italica
  Transcript Sequence Number=SeqID_11948
  Gene Ontology: Mol. function=oxidized purine base lesion DNA N -glycosylase activity; Cellular component=intracellular; Biological process=protein amino acid phosphorylation
  Homolog annotation: Hit_ID=Q6ZI28; Match level="QueryCoverage=77%, HitCoverage=30%, E-value=1e-49, Identity=77%"; Hit description =Putative 8-oxoguanine DNA glycosylase isoform 1a; 8-hydroxyguanine DNA glycosylase
  Pfam annotation: Domain name=HHH; Domain location=6-35; Score=19.1; E_ value=0.019; Accession=PF00633.15; Description=Helix-hairpin-helix motif
IGLASLREKELPEVIEALCTLPGVGPKVAACIALFSLDQNHAIPVDTHVWKVATQYLLPELAGKSLTPKLSIVVADAFVTRFGSYAGWAQNVLFIGQLPAQKVVIAKVTTDGGTTKSNQKEACGEPKPGKLRTCNHGRAWKPVIARFAISSVLFSFSSQ

SEQ ID NO: 77923 - protein, 156 aa, Setaria italica
  Transcript Sequence Number=SeqID_11949
LATGLGSVLELHSALVSSALDILLKPMSWGISIELGQKFPFPHAICLIQHSDLLAILTGPLSCKAFLDLVSCIDSLVHLDNTRTRCSSPKNSQLQPLKGLVKYNSAWYMIINFPVWFNFATALLFHRAGSQDYLSETISKETFADSISDVNLAQRA

SEQ ID NO: 77924 - protein, 1269 aa, Setaria italica
  misc_feature (472)..(472): Xaa can be any naturally occurring amino acid
  misc_feature (491)..(491): Xaa can be any naturally occurring amino acid
  Transcript Sequence Number=SeqID_11950
  Gene Ontology: Mol. function=nucleic acid binding; Cellular component= spliceosome; Biological process=embryonic development ending in birth or egg hatching
  Homolog annotation: Hit_ID=B9SMB4; Match level="QueryCoverage=86%, HitCoverage=86%, E-value=0.0, Identity=75%"; Hit description=ATP -dependent RNA helicase, putative
  Pfam annotation: Domain name=DEAD; Domain location=578-735; Score= -19.4; E_value=0.0011; Accession=PF00270.21; Description=DEADDEAH box helicase
  Pfam annotation: Domain name=DUF1605; Domain location=1091-1193; Score=104.9; E_value=2.7e-28; Accession=PF07717.8; Description =Domain of unknown function (DUF1605)
  Pfam annotation: Domain name=HA2; Domain location=967-1057; Score =102.7; E_value=1.3e-27; Accession=PF04408.15; Description=Helicase associated domain (HA2)
  Pfam annotation: Domain name=Helicase_C; Domain location=812-906; Score=57.5; E_value=5.1e-14; Accession=PF00271.23; Description =Helicase conserved C-terminal domain
  Pfam module annotation: Pfam domain module=DEAD::DUF1605::HA2::Helicas e_C; Domain location=578-735::1091-1193::967-1057::812-906
ATMTTLGPEDNTAQGLILPSKVMYRPQTGKSVLGLDDLARRKRGSEGSNVFKPPPPKVAVAADSVDEDEKPAPGENDTTSLSTAGRSNSSRRYRGSGSDDKTSSNVADEDERIPTPSRRDEARRQEAHISRSSQGSRAHDTPRSYDYYDDRGSRDNRGDRERSASIGYSSSGRRRYHDDRESHTRRDERERSTSIDYANKRSRHGHGSRSSRTPARSDWDDGRWEWEDTPRRDYRDDRPGSRRQHPTRSPMLAAASPDARLVSPWLGGNTPRSAASPWDNVSPSPAPIRASGSSKGSSYSGSGGRSHQLTFSSTTGSNVIDADRSPSNPDRNHELTEEMMQEMDYNADRAWYDCEEHTTMFDGDNAMYHDDSSYKKKEAEMPKKLTRRDGSLMTLAQSKKMSQMTADNAQWEDRQLLRSGAVKGTEVQTEFDDEDERKVILLVHDTKPPFLDGRVVFTKQAEPVMPLKDPTXSDMAIISRKGSTLVREIRXEKQSMNKSRQRFWELAGSKLGNILGVEKTAEQVDADTAVVGDQGEINFKEEAKFSQHMKEKVEAVSDFAKSKSLAQQRQYLPIFTVRDDLLQVVRENQVVVVVGETGSGKTTQLTQYLHEDGYTTTGVVGCTQPRRVAAMSVAKRVSEEMETELGDKVGYAIRFEDVTGPNTIIKYMTDGVLLRETLKDADLDKYRVIVMDEAHERSLNTDVLFGILKKVVARRRDFKLIVTSATLNADKFSKFFGGVPVFHIPGRTFPVNIMFSKTPCEDYVEGAVKQAMTIHITSGPGDILIFMTGQEEIEATCYALAERMEQLISSSTKTVPKLEILPIYSQLPADLQAKIFQKAEEGARKCIVATNIAETSLTVDGIFYVIDTGYGKMKVYNPRMGMDALQVFPVSRAAADQRAGRAGRTGPGTCYRLFTESAYQNEMLPNPVPEIQRTNLGNVVLLLKSLRVENLLDFDFMDPPPQENILNSMYQLWVLGALNNVGGLTEIGWKMVEFPLDPTLAKMLLMGEQLGCLDEVLTIVSMLSVPSVFFRPKDRAEESDAAREKFFVPESDHLTLLNVYLQWKSNQYRGDWCNDHFLHVKGLRKAREVRSQLLDILKTLKIPLTSCHMEWDVVRKAICSAYFHNSARLKGVGEYVNCRNGMPCHLHPSSALYGLGYTPDYVVYHELVLTTKEYMQCVTAVDPQWLAEMGPMFFSVKETDTSLLDHKKRQKEEKTAMEEEMEKLRQEQAEAARIEKEKEREKRAKQQQQVAMPGLKKGATYLRPRKMGL

SEQ ID NO: 77925 - protein, 279 aa, Setaria italica
  Transcript Sequence Number=SeqID_11951
  Homolog annotation: Hit_ID=B9FES2; Match level="QueryCoverage=99%, HitCoverage=55%, E-value=4e-86, Identity=64%"; Hit description=ER lumen protein retaining receptor
RVNADATKFVWDCLNQDDDELLGLLGNQTPLRDCRDFFADIPDISCKETLDPEESRESKRRRTLEYPSESSQSEVGTHETGSPFVASEATEVSLLCTDEPRSLNCDMQYSSNNLDTINSLSNGAPYWQEDNQLERCSYGTPPVYVEPDQMPCTQESVVYVDDQAGISGSSEIAPVTENLIMQETRKLSTLKVSKGGSSSLVKAKQNITTTVAYPFTLIKPSWEETDVTLQDINQRIRAPPKKPPEILGTSAFSGKPVIGKTRIRTDGGKGSITILRTKG

SEQ ID NO: 77926 - protein, 96 aa, Setaria italica
  Transcript Sequence Number=SeqID_11952
  Subcellular localization annotation: CTP_CleavageSite=56; ConfidenceScore=5.80e-01
TLATPPPAPQAPGTSSSLRPGSPELRPLPPLPRVGPPSGEFASRSSASDPSTVPPAAAADASSSSLFPSSPSASSPTLGSSPVHFRPPSIPQPRGR

SEQ ID NO: 77927 - protein, 77 aa, Setaria italica
  misc_feature (51)..(51): Xaa can be any naturally occurring amino acid
  Transcript Sequence Number=SeqID_11953
  Gene Ontology: Mol. function=nucleic acid binding
  Homolog annotation: Hit_ID=B6TVM8; Match level="QueryCoverage=97%, HitCoverage=23%, E-value=2e-20, Identity=74%"; Hit description=Zinc finger C-x8-C-x5-C-x3-H type family protein
  Pfam annotation: Domain name=zf-CCCH; Domain location=35-62; Score =15.6; E_value=0.013; Accession=PF00642.16; Description=Zinc finger C- x8-C-x5-C-x3-H type (and similar)
MDAAGRKRAAPEGANGAGGPKRAREGETTQMGVGSKSKPCTKFFSTAGCPXFGASCHFLHNFPGGYQAVAKMTNLGR

SEQ ID NO: 77928 - protein, 148 aa, Setaria italica
  misc_feature (49)..(49): Xaa can be any naturally occurring amino acid
  Transcript Sequence Number=SeqID_11954
  Gene Ontology: Mol. function=nucleic acid binding
  Homolog annotation: Hit_ID=Q7F8R0; Match level="QueryCoverage=56%, HitCoverage=27%, E-value=2e-28, Identity=68%"; Hit description=Zinc finger CCCH domain-containing protein 14
  Pfam annotation: Domain name=zf-CCCH; Domain location=122-148; Score =25.2; E_value=0.00026; Accession=PF00642.16; Description=Zinc finger C-x8-C-x5-C-x3-H type (and similar)
  Pfam annotation: Domain name=zf-CCCH; Domain location=60-82; Score =11.8; E_value=0.042; Accession=PF00642.16; Description=Zinc finger C- x8-C-x5-C-x3-H type (and similar)
  Pfam module annotation: Pfam domain module=zf-CCCH::zf-CCCH; Domain location=122-148::60-82
SNIYLSFHSLDINVRNHLVYLHYSACDIISFISIGCICGSSIHIVVLRXSNIFAYSVAYMVFSLCSTAGCPFGASCHFLHNFPGGYQAVAKMTNLGGPPVPAPPARMPMGHGAPDGPPSPAVKTRMCNKYNTAEGCKWGSKCHFAHGE

SEQ ID NO: 77929 - protein, 262 aa, Setaria italica
  Transcript Sequence Number=SeqID_11955
  Gene Ontology: Cellular component=cell wall
LPSVHLGVEEIGEVSTEIGNLIKWRKHFGDIVLIVHCTEPVDRTALEWRLLYGRIFRAVVILSEQSNSDLAVEFSNLAQAYKYLPKVFDRFAGAQGFLFLQDHVVLNYWNLLNANKAKLWITNQVKESWSDVPLQGNKIERFVNQGDMVKKAVSNFPPHYQTNYRRSVGEHKIIHCSSEIFYIPQRHIGDFSYLVKAIGTLDIHHSFAVPMIFLAMDSPSNFESKALTKLVYRADLPSNTTSASTYSAEAHAVYPLKVRNEM

SEQ ID NO: 77930 - protein, 81 aa, Setaria italica
  Transcript Sequence Number=SeqID_11956
  Homolog annotation: Hit_ID=B6UHB5; Match level="QueryCoverage=93%, HitCoverage=26%, E-value=2e-18, Identity=60%"; Hit description=C2 domain containing protein
RQDKKQQMAVKPNNKVADDGSDEEGDEEEERGMGGMMFCGPCVLPFPRKIHTSPSDENLQVFAGIFSGGLRHCRTEPSFPK

SEQ ID NO: 77931 - protein, 125 aa, Setaria italica
  Transcript Sequence Number=SeqID_11957
  Gene Ontology: Mol. function=catalytic activity
  Homolog annotation: Hit_ID=B9S4N3; Match level="QueryCoverage=94%, HitCoverage=11%, E-value=2e-22, Identity=51%"; Hit description =Protein phosphatase 2c, putative
FDGHNGAEASEMASKLFLEYFLLHVYFLLDGIYSMMFRKSTGKLTYKEVAILNNIFNLYKDDQSNHREGSCWISPAILDRSFHMEILKESLTRAVHDIDLTFSKEGLMFQLHNSNFVTQLHTSEK

SEQ ID NO: 77932 - protein, 220 aa, Setaria italica
  misc_feature (211)..(211): Xaa can be any naturally occurring amino acid
  Transcript Sequence Number=SeqID_11958
  Gene Ontology: Mol. function=catalytic activity; Cellular component =protein serine/threonine phosphatase complex; Biological process =protein amino acid dephosphorylation
  Homolog annotation: Hit_ID=B9S4N3; Match level="QueryCoverage=87%, HitCoverage=19%, E-value=3e-59, Identity=57%"; Hit description =Protein phosphatase 2c, putative
  Pfam annotation: Domain name=PP2C; Domain location=1-220; Score=51.0; E_value=4.6e-12; Accession=PF00481.13; Description=Protein phosphatase 2C
GIIRPRLILDRSFHMEILKESLTRAVHDIDLTFSKEASQKHFESGSTATVVLIADGQIIAANVGDSKAFLCSEGHDLHRRNRKRRRKRNSIDHEEFALANYDGPLYHARELTKDHHPDREDERSRVEAAGGYVIEWSGVYRVNGELALSRAIGDLPFKRYGVISTPELTGWQFLSDNDTFLVASSDGIFEKMTMQDVCDLMLHAKFHVNQXFGSSAITQH

SEQ ID NO: 77933 - protein, 100 aa, Setaria italica
  Transcript Sequence Number=SeqID_11959
  Gene Ontology: Mol. function=hydrolase activity; Biological process =metabolic process
  Homolog annotation: Hit_ID=Q53KT2; Match level="QueryCoverage=66%, HitCoverage=17%, E-value=3e-11, Identity=53%"; Hit description=PrMC3, putative, expressed
VPAAIRRDADGGEGRWRAFPPTLVCVGGWDVHQDRQRAYAEALHAAGAVEVTVAEYPDAIHAFYMFEELADSKKLVADVAEFVNQRTEQLKKRELDRAKH

SEQ ID NO: 77934 - protein, 142 aa, Setaria italica
  Transcript Sequence Number=SeqID_11960
  Subcellular localization annotation: CTP_CleavageSite=8; ConfidenceScore=5.13e-01
KKECGNLCCAAPPSRPSDPLAAPCLTKKATTPVAPGAGRPWGGSGRPPQAHRGSAAGGRASSSAASSAPSNVVGRASPSTVRSRRSGANLAGERVHGRPEPGPLDRLSLRGRGRGQRTALLFLEAGSQAGPALLCMRSTLRT

SEQ ID NO: 77935 - protein, 201 aa, Setaria italica
  misc_feature (32)..(32): Xaa can be any naturally occurring amino acid
  Transcript Sequence Number=SeqID_11961
  Subcellular localization annotation: CTP_CleavageSite=49; ConfidenceScore=5.30e-01
RRHNASFHHVLFTSYSSAPKPYPGAAPNPIPXRSPFFLAVHNETAPPKPASLRGNELRLLDLTRRDAAAIIHLLALLSSAHVLAILGYIAVHSAALGAVFASVARRHVHGRRRGFLLAGVARGARRLTGFAFLRWATRDAVVQMLCLWFFADVHDQAQLFRLFVVAKLMPFSASVNPWLAAAVAGPELDGFFVAWAVLDAV

SEQ ID NO: 77936 - protein, 95 aa, Setaria italica
  misc_feature (57)..(57): Xaa can be any naturally occurring amino acid
  Transcript Sequence Number=SeqID_11962
  Gene Ontology: Mol. function=hydrolase activity, hydrolyzing O -glycosyl compounds; Cellular component=cell wall; Biological process= carbohydrate metabolic process
  Homolog annotation: Hit_ID=B6TWP1; Match level="QueryCoverage=72%, HitCoverage=22%, E-value=2e-24, Identity=78%"; Hit description =Xyloglucan endotransglucosylase/hydrolase protein 26
MVMGKQGAALLALILASALVGLAAGGNFYEECDATWEPQNCWAYDDGNRLSLALVSXSSGSMIRSKKQFVYGTVSTMIQLVPGDSAGTVTTYYMS

SEQ ID NO: 77937 - protein, 262 aa, Setaria italica
  Transcript Sequence Number=SeqID_11963
MPGSIQISATQPPAITPLFLQVAVGKREYSGNIEQDGLSIPVTSLRESMVIMLYNADRELISKSELKTKTIVESGTMNAVFTLASGGEIILQVQFLLNDDDRKRIQEMRNSAMKRKQQELLGDGYELNFPDSPLSKQLIEKIPNIRSKGDERPKLRKSVSLDDLQERKVFSGISVDPRMKASRDLLLQRGVRNTWFEDPSGSQKGNGKVESKSSSSVKKMISAFEGTSPQGVASEIDASLTDSGNSSTQTGKAIVPFGDNKG

SEQ ID NO: 77938 - protein, 78 aa, Setaria italica
  Transcript Sequence Number=SeqID_11964
  Subcellular localization annotation: CTP_CleavageSite=63; ConfidenceScore=5.12e-01
MPPRSDHAAGSAAAAAAAAAAQTHGSDFDSIDPLFHLLRVLPFSFLRPPRTRLRLPSNLALPSPMTVFSLILLTYFAV

SEQ ID NO: 77939 - protein, 67 aa, Setaria italica
  Transcript Sequence Number=SeqID_11965
  Subcellular localization annotation: CTP_CleavageSite=33; ConfidenceScore=5.25e-01
MSSPMHVRKAIHFAALRARFAQGKGGLALRLLLAAALAGFLLVFAARSLSSPSPSTSRRQEAAECGG

SEQ ID NO: 77940 - protein, 78 aa, Setaria italica
  Transcript Sequence Number=SeqID_11966
  Gene Ontology: Mol. function=catalytic activity; Biological process =cellular metabolic process
  Homolog annotation: Hit_ID=B4F8E5; Match level="QueryCoverage=100%, HitCoverage=24%, E-value=1e-27, Identity=75%"; Hit description =Nucleoside-diphosphate-sugar epimerase
  Subcellular localization annotation: CTP_CleavageSite=56; ConfidenceScore=5.08e-01
MIPGITPKPAAPQPRHMFVFGAGFVGRYVSERLLAQGWQVSGTCTSPAKKRELEMLGMNASVFDAIESNFSLENVHSL

SEQ ID NO: 77941 - protein, 69 aa, Setaria italica
  Transcript Sequence Number=SeqID_11967
  Gene Ontology: Mol. function=nucleic acid binding
  Homolog annotation: Hit_ID=B6TP11; Match level="QueryCoverage=100%, HitCoverage=25%, E-value=2e-17, Identity=66%"; Hit description=Actin depolymerizing factor
MANKRQREARKRFREANPDLFPPQPAPSADGSKKKSKKNKKKSMFKKVKKGGTGRSKHPMRVPGMRPGE

SEQ ID NO: 77942 - protein, 72 aa, Setaria italica
  Transcript Sequence Number=SeqID_11968
QLFLLHICHVQFIVMIVIHLCVQYLLVFSFCFDSVSSRQSVSLVSTDLIFRFLGSFGWTVLLIYSFCNPNHD

SEQ ID NO: 77943 - protein, 137 aa, Setaria italica
  Transcript Sequence Number=SeqID_11969
  Gene Ontology: Mol. function=identical protein binding; Cellular component=cytoplasm
  Homolog annotation: Hit_ID=B6SRV4; Match level="QueryCoverage=81%, HitCoverage=81%, E-value=4e-55, Identity=94%"; Hit description=MazG nucleotide pyrophosphohydrolase domain protein
  Pfam annotation: Domain name=MazG; Domain location=50-132; Score =16.3; E_value=5.9e-05; Accession=PF03819.9; Description=MazG nucleotide pyrophosphohydrolase domain
MESEIEKKAAAMAEEEVAGKKVAADGDVSLKELSKKLNDFAKERDWEQYHSPRNLLLAMIAEVGELSELFMWKGEVRKGLADWDEAEKEHLGEELSDVLLYLVRLSDICGVDLGDAATRKIVKNAVKYPAPSKEGGA

SEQ ID NO: 77944 - protein, 503 aa, Setaria italica
  Transcript Sequence Number=SeqID_11970
  Gene Ontology: Mol. function=translation initiation factor activity; Cellular component=intracellular; Biological process=translational initiation
  Homolog annotation: Hit_ID=Q69IM0; Match level="QueryCoverage=100%, HitCoverage=70%, E-value=0.0, Identity=85%"; Hit description =Translation initiation factor IF-2
  Pfam annotation: Domain name=GTP_EFTU; Domain location=1-148; Score =140.6; E_value=5e-39; Accession=PF00009.19; Description=Elongation factor Tu GTP binding domain
  Pfam annotation: Domain name=GTP_EFTU_D2; Domain location=173-236; Score=30.1; E_value=9e-06; Accession=PF03144.17; Description =Elongation factor Tu domain 2
  Pfam annotation: Domain name=GTP_EFTU_D2; Domain location=412-480; Score=8.8; E_value=0.06; Accession=PF03144.17; Description =Elongation factor Tu domain 2
  Pfam annotation: Domain name=MMR_HSR1; Domain location=3-95; Score= -10.3; E_value=0.0089; Accession=PF01926.15; Description=GTPase of unknown function
  Pfam module annotation: Pfam domain module=GTP_EFTU::GTP_EFTU_D2::GTP_ EFTU_D2::MMR_HSR1; Domain location=1-148::173-236::412-480::3-95
LDALRQTSVAAKEAGGITQHIGAFVVEMPSGASITFLDTPGHAAFSAMRARGAAVTDIVVLVVAADDGVMPQTLEAMSHAKSANVPVVVAINKCDKSGADPERVRIQLGSEGLLLEDMGGDVQVVEISAVAKSGLDKLEEALLLQAEMMDLKARIDGPAQAFVVEAKVDRGRGPLATAIVKSGTLVSGQHIVVGAEWGRIRSLRDTAGKITESAKPAMPVEIEGLRGLPMAGDDVVVVDSEERARMLSQGRKKKQEKDRLRKIDEGMADELEIKEETPERVEMPIIVKADVQGSVQAVTDALRSLNSAQVFVNVVHVGVGPISQHDIDLAQACGAYIVGFNIRSPPIAITQAAARANIKVLLHKVIYHLLEEMGRTIVEKAPGTAETQVSGEAEILNIFELKGRSKSKGPDIRIAGCRITDGHFSKSGTMRLLRSGDVVFEGPCASLKREKQDAETIEKGNDCGLVIQDCDDFQVGDIIQCLEQVIRKPKFISTQSGSVRIEC

SEQ ID NO: 77945 - protein, 98 aa, Setaria italica
  Transcript Sequence Number=SeqID_11971
MGAPTEGPPAWMAAAARRWLEDAGAKVEGGQDRAFNALPLAGVRVSLAERGRAVCSLRVPAHLTDAEGNWHTGAIAAAADDVCAAAIMSVEGIIKVSV

SEQ ID NO: 77946 - protein, 93 aa, Setaria italica
  Transcript Sequence Number=SeqID_11972
FQGNWIDTAECSINNKCFNSISESECFREIIEIASILHNYLFVCCTHRLESKLYPPHVESLLYLTHTTPLLQYCLVSAIHFSASIVAQIFNGV

SEQ ID NO: 77947 - protein, 114 aa, Setaria italica
  Transcript Sequence Number=SeqID_11973
  Gene Ontology: Mol. function=DNA-directed RNA polymerase activity; Cellular component=nucleoplasm; Biological process=regulation of transcription
  Homolog annotation: Hit_ID=B6T3H5; Match level="QueryCoverage=100%, HitCoverage=100%, E-value=3e-51, Identity=81%"; Hit description=DNA -directed RNA polymerase II 14.5 kDa polypeptide
  Pfam annotation: Domain name=RNA_POL_M_15KD; Domain location=4-58; Score=80.8; E_value=5.1e-21; Accession=PF02150.8; Description=RNA polymerases M15 Kd subunit
  Pfam annotation: Domain name=TFIIS_C; Domain location=74-113; Score =8.1; E_value=0.018; Accession=PF01096.10; Description=Transcription factor S-II (TFIIS)
  Pfam module annotation: Pfam domain module=RNA_POL_M_15KD::TFIIS_C; Domain location=4-58::74-113
MSTMKFCRECNNILYPKEDREQKVLLYACRNCDHQEVADNNCVYRNVVHHSAGEFTQVLQDVAGDPTLPRTKDVRCAVCGHGEAVFFQATVRGEEGMTLFFVCCNLSCGNRWRE

SEQ ID NO: 77948 - protein, 323 aa, Setaria italica
  misc_feature (33)..(33): Xaa can be any naturally occurring amino acid
  Transcript Sequence Number=SeqID_11974
  Gene Ontology: Mol. function=protein serine/threonine kinase activity; Biological process=protein amino acid phosphorylation
  Homolog annotation: Hit_ID=Q9ATQ1; Match level="QueryCoverage=99%, HitCoverage=46%, E-value=1e-136, Identity=74%"; Hit description=TAK14
  Pfam annotation: Domain name=Pkinase; Domain location=10-277; Score =158.5; E_value=1.9e-44; Accession=PF00069.17; Description=Protein kinase domain
  Pfam annotation: Domain name=Pkinase_Tyr; Domain location=10-277; Score=91.1; E_value=3.9e-24; Accession=PF07714.9; Description =Protein tyrosine kinase
  Pfam module annotation: Pfam domain module=Pkinase::Pkinase_Tyr; Domain location=10-277::10-277
AYTGITAITSHFRDKLGQGGYGSVYKGVLLPGXAVKILSNSNCNGDEFISEVSTIGRIHHINVVRLVGFCAEDMRRALVYEYMPHGSLDKYIFSSERSFSWDKLNEIALGIARGIDYLHRGCDMQILHFDIKPHNILLDINFVPKVADFGLAKLYPRDKSFVSMSASRGTIGYIAPEMYCRGFGAISSKSDVYSFGMLLLEMAGGRRNFYQNAASPSQAYYPSWVYGQLAKHEEDEISSASNVHMHELERKLCIIGLQCIQLNPQDRPTMSEVKEMLESGADGLQLPSTRPFFCGDDEADDHIAAADSCHSFSELTAISEEDE

SEQ ID NO: 77949 - protein, 55 aa, Setaria italica
  Transcript Sequence Number=SeqID_11975
CKQKIAPTIMKLFCRQTKDYMIQDGDLQQFEAYCPFKSRRGKGVGRHVTLFWQTF

SEQ ID NO: 77950 - protein, 329 aa, Setaria italica
  Transcript Sequence Number=SeqID_11976
  Gene Ontology: Mol. function=oxidoreductase activity; Cellular component=chloroplast; Biological process=chlorophyll catabolic process
  Homolog annotation: Hit_ID=Q1ELF2; Match level="QueryCoverage=100%, HitCoverage=100%, E-value=1e-119, Identity=68%"; Hit description=Red chlorophyll catabolite reductase
  Pfam annotation: Domain name=RCC_reductase; Domain location=71-324; Score=503.6; E_value=2.6e-148; Accession=PF06405.3; Description=Red chlorophyll catabolite reductase (R
  Subcellular localization annotation: CTP_CleavageSite=56; ConfidenceScore=5.19e-01
MLRPEHCLRLLPAATPAFVGASAPFSCPLPGGGAIRLRHPRARTPRLRGEPSSVMRASAGPDAVASAPEMPQREVVRALAEQAVARLGPRLLPSAVPDDVAEFRNGAGNAVGSLDVRRGAPGSSIDFMLQSSLHCKVPNGAIDITSILIFLNCMTDAPHFLLELIQGSPTSIVVVLDLLPRKDLAFHPDYLQKYYENSRMDEQRAKIDELPQVRPYRSPSLFVRCACSPTAVMVSIDCGQGGEGTLEEIVRGQLAMVAKEVLQFWLDCCADSTTKMDNTERDFLLKRDQIVRSKSIEVDLTANLPMMFDPDVSSRVISEIRKAFGVQEA

SEQ ID NO: 77951 - protein, 358 aa, Setaria italica
  misc_feature (6)..(7): Xaa can be any naturally occurring amino acid
  misc_feature (207)..(207): Xaa can be any naturally occurring amino acid
  Transcript Sequence Number=SeqID_11977
  Gene Ontology: Mol. function=transferase activity, transferring glycosyl groups
  Homolog annotation: Hit_ID=Q75J72; Match level="QueryCoverage=100%, HitCoverage=53%, E-value=1e-158, Identity=76%"; Hit description =Putative glycosyltransferase
  Pfam annotation: Domain name=Glyco_transf_8; Domain location=30-332; Score=139.6; E_value=9.8e-39; Accession=PF01501.12; Description =Glycosyl transferase family 8
MTEDEXXFHARQSTYLYRLGVQTLPKSLHCLSMRLTVDYFNASADMEHSDAKKFGNPAFQHYIIFSTNLLASSMTINSSVTNSEESANMVFHLMTDAQNFYAFKNWFIRNSYKGATIRVLNFEDFQVKNSGNGTVEELSPSEEFRITSNGNALTLNTLTRTEYISMFGHSLFLLPELFSNLKRVIVLEDDTIVQKDLSLLWNLDLKXVIGAVQFCRVKFRQLRAYLPDLPYDSGSCIWVSGVSIIDLDEWREHDVTGIHRRILQKLRHDTEATWRSAALPAGLLAFQDLIHPIEGQWVQFGLGHDYGLTHGAIKKAAILHYNGNMKPWLELGIRRYRKYWKRYLPRDDVFMMGCNVNP

SEQ ID NO: 77952 - protein, 51 aa, Setaria italica
  Transcript Sequence Number=SeqID_11978
  Gene Ontology: Mol. function=hydrolase activity
  Homolog annotation: Hit_ID=B6SU45; Match level="QueryCoverage=100%, HitCoverage=32%, E-value=1e-19, Identity=90%"; Hit description=Nudix hydrolase 4
VADELHQWPEMASRKRTWATVNQVMDGCPHWWMREALEKLVARHAKLQSAL

SEQ ID NO: 77953 - protein, 161 aa, Setaria italica
  Transcript Sequence Number=SeqID_11979
  Gene Ontology: Mol. function=hydrolase activity; Cellular component =mitochondrion
  Homolog annotation: Hit_ID=B6SU45; Match level="QueryCoverage=100%, HitCoverage=100%, E-value=1e-72, Identity=84%"; Hit description =Nudix hydrolase 4
  Pfam annotation: Domain name=NUDIX; Domain location=21-153; Score =63.1; E_value=1e-15; Accession=PF00293.20; Description=NUDIX domain
MAVLVARQGRELQRYSQRTGGRIVVGCIPYRVRRDDGELEVLVITSQKGHGMMFPKGGWEEDESMDEAARREALEEAGVLGDTEPMLGFWHYQSRRYADQTYEGFMFPLRVADELHQWPEMASRKRTWATVNQVMDGCPHWWMREALEKLVARHAKLQSAL

SEQ ID NO: 77954 - protein, 112 aa, Setaria italica
  misc_feature (28)..(28): Xaa can be any naturally occurring amino acid
  Transcript Sequence Number=SeqID_11980
  Gene Ontology: Cellular component=integral to membrane
  Homolog annotation: Hit_ID=B6SZ71; Match level="QueryCoverage=41%, HitCoverage=7%, E-value=1e-16, Identity=87%"; Hit description=K -exchanger-like protein
  Subcellular localization annotation: CTP_CleavageSite=61; ConfidenceScore=5.22e-01
PAAVPSACFLLLLLLLLTSSSLLSPIPXSRDGSSSSSLFAGKGAQGSDCAELQSIAGGEARCAYLRAHSPCSPAGYVDYLRLFYCGFAGAPAAACTVLALWLAVLFYLLGDN

SEQ ID NO: 77955 - protein, 129 aa, Setaria italica
  Transcript Sequence Number=SeqID_11981
RRPRSFRRIAALRLPPASRLPRPISLLLRLAAEGSPSATRTSLLKLDHAGRALHLVLARCRSGSLRESRSYAAELPSPVTAGPVSLRCISPTHRTSSPWSTHLLCACPISPLRQYARTPAAVQQWRGEG

SEQ ID NO: 77956 - protein, 89 aa, Setaria italica
  Transcript Sequence Number=SeqID_11982
  Gene Ontology: Mol. function=peptidyl-prolyl cis-trans isomerase activity; Cellular component=chloroplast; Biological process=protein folding
  Homolog annotation: Hit_ID=B6U409; Match level="QueryCoverage=98%, HitCoverage=42%, E-value=3e-41, Identity=92%"; Hit description=FK506 binding protein
  Pfam annotation: Domain name=FKBP_C; Domain location=7-89; Score =45.6; E_value=1.9e-10; Accession=PF00254.20; Description=FKBP-type peptidyl-prolyl cis-trans isomer
TEDVVEGEGPEAREDDLVQFNYVCRRANGYFVHSTVDQFSGESNPVTLPLGGEEMIRGLKDVLIGMKAGGKRRALIPPEVGYISETLKP

SEQ ID NO: 77957 - protein, 148 aa, Setaria italica
  Transcript Sequence Number=SeqID_11983
  Gene Ontology: Mol. function=peptidyl-prolyl cis-trans isomerase activity; Cellular component=chloroplast; Biological process=protein folding
  Homolog annotation: Hit_ID=B6U409; Match level="QueryCoverage=87%, HitCoverage=63%, E-value=1e-63, Identity=92%"; Hit description=FK506 binding protein
  Pfam annotation: Domain name=FKBP_C; Domain location=37-145; Score =80.6; E_value=5.5e-21; Accession=PF00254.20; Description=FKBP-type peptidyl-prolyl cis-trans isomer
PLPSHRLRRQRFRSLTLSVFRYRKLDSGVILEDVVEGEGPEAREDDLVQFNYVCRRANGYFVHSTVDQFSGESNPVTLPLGGEEMIRGLKDVLIGMKAGGKRRALIPPEVGYISETLKPIPEEFGPRRSLLSHAKEPLVFEVQLLKVL

SEQ ID NO: 77958 - protein, 155 aa, Setaria italica
  Transcript Sequence Number=SeqID_11984
  Gene Ontology: Mol. function=acyltransferase activity; Cellular component=chloroplast envelope; Biological process=metabolic process
  Homolog annotation: Hit_ID=B9ST02; Match level="QueryCoverage=94%, HitCoverage=30%, E-value=2e-67, Identity=84%"; Hit description =Dihydrolipoyllysine-residue acetyltransferase component of pyruvate dehydrogenase, putative
  Pfam annotation: Domain name=2-oxoacid_dh; Domain location=1-155; Score=85.9; E_value=1.4e-22; Accession=PF00198.15; Description=2 -oxoacid dehydrogenases acyltransferase (catalytic domain)
KVKPKGVTMTVLLAKAAAMALAQHPAVNASCRDGKSFTYNSNINIAVAVAIDGGLITPVLQDADKLDIYLLSQNWKDLVKKARAKQLQPNEYSSGTFTLSNLGMFGVDRFDAILPPGQGAIMAVGASKPTVVADKDGFFSVKSKSLQECCQISTI

SEQ ID NO: 77959 - protein, 49 aa, Setaria italica
  Transcript Sequence Number=SeqID_11985
PLKARRYKNWRELLNCNQTTDGHIDRSNIIIFKRSYNVKLSGSSSSAPV

SEQ ID NO: 77960 - protein, 312 aa, Setaria italica
  Transcript Sequence Number=SeqID_11986
  Gene Ontology: Mol. function=acyltransferase activity; Cellular component=chloroplast envelope; Biological process=metabolic process
  Homolog annotation: Hit_ID=B9ST02; Match level="QueryCoverage=95%, HitCoverage=61%, E-value=1e-122, Identity=73%"; Hit description =Dihydrolipoyllysine-residue acetyltransferase component of pyruvate dehydrogenase, putative
  Pfam annotation: Domain name=2-oxoacid_dh; Domain location=88-312; Score=299.9; E_value=5.6e-87; Accession=PF00198.15; Description=2 -oxoacid dehydrogenases acyltransferase (catalytic domain)
  Pfam annotation: Domain name=E3_binding; Domain location=13-51; Score= 57.0; E_value=6.9e-14; Accession=PF02817.9; Description=e3 binding domain
  Pfam module annotation: Pfam domain module=2-oxoacid_dh::E3_binding; Domain location=88-312::13-51
DAGGCPAPVAAGTKGIASPQAKKLAKQHRVDLAKVTGTGPYGRITPGDVEAAAGIQPKPKPAAVAAASPPVAAPSAAAVPQAAVLPPVPGATVVPFTTMQAAVSKNMVESLAVPAFRVGYPIVTDKLDELYEKVKPKGVTMTVLLAKAAAMALAQHPAVNASCRDGKSFTYNSNINIAVAVAIDGGLITPVLQDADKLDIYLLSQNWKDLVKKARAKQLQPNEYSSGTFTLSNLGMFGVDRFDAILPPGQGAIMAVGASKPTVVADKDGFFSVKSKMLVNVTADHRIVYGADLAAFLQTFAKIIEDPESLTL

SEQ ID NO: 77961 - protein, 94 aa, Setaria italica
  Transcript Sequence Number=SeqID_11987
LMRQKTIRAMVPKKASSSKATESKKRKAAKKEKEVQLPAPKYVKIQVLVLANLLQEKEFIDWREAARNTWPFESYSDETVIFAHFIERGLALPS

SEQ ID NO: 77962 - protein, 130 aa, Setaria italica
  Transcript Sequence Number=SeqID_11988
  Subcellular localization annotation: CTP_CleavageSite=83; ConfidenceScore=5.48e-01
PIFKYTSWIAKSSSSCWWESRPSRTEASSPPPSLPPSRRWRPSHLRPPAPPWRPFPQPLHHSSHALLTSNRRRERRQGGAKVPAELRRLNFGAADARRFGREGSSRGQRLVDLAVGDLAAVFPHLSAHRG

SEQ ID NO: 77963 - protein, 91 aa, Setaria italica
  Transcript Sequence Number=SeqID_11989
  Gene Ontology: Biological process=carbohydrate metabolic process
  Homolog annotation: Hit_ID=B6TXN0; Match level="QueryCoverage=65%, HitCoverage=19%, E-value=9e-15, Identity=66%"; Hit description=DNA -damage-repair/toleration protein DRT102
  Pfam annotation: Domain name=LacAB_rpiB; Domain location=1-90; Score =0.2; E_value=2.7e-08; Accession=PF02502.10; Description =RiboseGalactose Isomerase
VARQVSSPSSDSAPDAPEVRGVVVCGTGAGVCIFANKYPRVYATHCASPADAVNTRSINACNVLALSGMATPPDAAAAIADTWLATPFRGP

SEQ ID NO: 77964 - protein, 236 aa, Setaria italica
  Transcript Sequence Number=SeqID_11990
  Gene Ontology: Mol. function=nucleic acid binding; Cellular component= integral to membrane; Biological process=transport
  Homolog annotation: Hit_ID=Q2R9P7; Match level="QueryCoverage=90%, HitCoverage=41%, E-value=3e-46, Identity=47%"; Hit description =Ankyrin repeat family protein, putative, expressed
RNGKQQPLHLAVAAGAPGVVEELLRKGKVRADVLNNDGHTAFDLAVGSTNFFTLVSLVVTLVAYGATLGPQRQDHLNRWSGSDTARQGIEKTSDSLAVVAVLIATSALAAGFNLPGGYSDSTGKAILSRKVTFKCFLFLDALAVATSVVVVVLLVYGKASRSAGSWKSFVVALHCMWVSLVSLLLAFYAALAAVLSSKAGYFYLQLAIYFVISFLSQFIVKWIGPDTTLRTVWRFL

SEQ ID NO: 77965 - protein, 233 aa, Setaria italica
  Transcript Sequence Number=SeqID_11991
  Gene Ontology: Mol. function=inositol or phosphatidylinositol phosphatase activity
  Homolog annotation: Hit_ID=A8IDW2; Match level="QueryCoverage=96%, HitCoverage=54%, E-value=4e-38, Identity=52%"; Hit description =Inositol-1,4,5-triphosphate-5-phosphatase
KLLSSFRFQEIIPLEVGYMIGTEDTRPVAAWEHIIHETLNKKCPDESKFKCHSDYPSSARFKLSDYVLGMENGLLSESSNDSDGELHLWDSAKSSISARYLQPLDLACDVSIDNRVKSKRPQYVRLISKQMVGVFLSVWVRRSLQKYIQNVRVSIVGVGTRGFIGNKGSISVSMSIHETHFCFVCCHLAAGEKNGDELKRNGNVEEIQRRTVFDNPVHIVGVPQRIHGHERII

SEQ ID NO: 77966 - protein, 68 aa, Setaria italica
  Transcript Sequence Number=SeqID_11992
  Homolog annotation: Hit_ID=Q9M9V2; Match level="QueryCoverage=100%, HitCoverage=7%, E-value=5e-13, Identity=52%"; Hit description =F6A14.8 protein
MACIKSAQRAALTALAPDAPYLAAGTMSGAVDISFSASANIEIFRLDFQSDSPDLPLLASAPSPDRFN

SEQ ID NO: 77967 - protein, 86 aa, Setaria italica
  Transcript Sequence Number=SeqID_11993
PRRAEFRCRSAGQRIRLPCQLFRVLLRRPNCKIDSVEVWRIQEVRMMDGTGCLGRWTNVQIFFLKIFCYGSGDVQGYANAESLKLF

SEQ ID NO: 77968 - protein, 445 aa, Setaria italica
  Transcript Sequence Number=SeqID_11994
  Gene Ontology: Mol. function=protein kinase activity; Cellular component=plasma membrane; Biological process=protein amino acid phosphorylation
  Homolog annotation: Hit_ID=B6TZ93; Match level="QueryCoverage=99%, HitCoverage=86%, E-value=0.0, Identity=91%"; Hit description=ATP binding protein
  Pfam annotation: Domain name=Pkinase; Domain location=18-256; Score =9.8; E_value=4.5e-09; Accession=PF00069.17; Description=Protein kinase domain
  Pfam annotation: Domain name=Pkinase_Tyr; Domain location=18-256; Score=-72.5; E_value=6.6e-09; Accession=PF07714.9; Description =Protein tyrosine kinase
  Pfam module annotation: Pfam domain module=Pkinase::Pkinase_Tyr; Domain location=18-256::18-256
FVAENIVSESGEKAPNFVYKGRLEHSRRAIAVKKFTKAAWPDAKQFAEEAKGAGKLRHCRMANLIGYCCDGDERLLVAEFMPNDTLAKHLFHWENQTIEWAMRLRVANYIAEALEYCSTEGRPLYHDLNAYRVLFDENGDPRLSCFGLMKNSRDGKSYSTNLAYTPPEYLRNGRVTSESVIYSFGTILLDLLSGKRIPPSRALDMIKGNNIQVLMDSHLEGNYSTEEATTLVDLASQCLQYEPRDRPNTKKLVSVLEPLQIKSEVPSYEMLGIPKYEEEVPPTPAPQPQHPLSPMGEACSRMDLTAIHQILVNTHYRDDEGTNELSFQEWTQQMRDMLEARKRGDFAFRDKDFKAAIDCYTQFVDVGTMVSPTVYARRSLCHLMCDQPDAALRDAMQAQCVYPDWPTAFYMQAVALSKLNMQSDAMDMLNEASQLEEKRQKNTKS

SEQ ID NO: 77969 - protein, 61 aa, Setaria italica
  Transcript Sequence Number=SeqID_11995
  Gene Ontology: Mol. function=transferase activity, transferring glycosyl groups; Biological process=sucrose metabolic process
  Homolog annotation: Hit_ID=Q2HWR2; Match level="QueryCoverage=100%, HitCoverage=6%, E-value=3e-26, Identity=93%"; Hit description =Sucrose synthase
MASKLTRLHSLRERLGATFSSHPNELIALFSRYVNQGKGMLQRHQLLAEFDALFDSDKEKY

SEQ ID NO: 77970 - protein, 49 aa, Setaria italica
  Transcript Sequence Number=SeqID_11996
  Gene Ontology: Mol. function=transferase activity, transferring glycosyl groups; Cellular component=plasma membrane; Biological process=sucrose metabolic process
  Homolog annotation: Hit_ID=Q2HWR2; Match level="QueryCoverage=97%, HitCoverage=5%, E-value=3e-22, Identity=100%"; Hit description =Sucrose synthase
EKTKYPNSDIYLDKFDSQYHFSCQFTADLIAMNHTDFIITSTFQEIAGR

SEQ ID NO: 77971 - protein, 141 aa, Setaria italica
  misc_feature (69)..(69): Xaa can be any naturally occurring amino acid
  misc_feature (125)..(125): Xaa can be any naturally occurring amino acid
  Transcript Sequence Number=SeqID_11997
  Gene Ontology: Mol. function=transferase activity, transferring glycosyl groups; Cellular component=plasma membrane; Biological process=sucrose metabolic process
  Homolog annotation: Hit_ID=P30298; Match level="QueryCoverage=84%, HitCoverage=14%, E-value=8e-59, Identity=94%"; Hit description =Sucrose synthase 2
HILIQYLFHYTRNTSNFVLELDFEPFNASFPRPSMSKSIGNGVQFLNRHLSSKLFQDKESLYPLLNFLXKAHNYKGTTMMLNDRIQSLRGLQSSLRKAEEYLLSIPQDTPYSEFNHRFQELGLEXKGWGDTAKLHYFLGCS

SEQ ID NO: 77972 - protein, 87 aa, Setaria italica
  Transcript Sequence Number=SeqID_11998
  Gene Ontology: Mol. function=transferase activity, transferring glycosyl groups; Cellular component=plasma membrane; Biological process=sucrose metabolic process
  Homolog annotation: Hit_ID=A5Y2Y0; Match level="QueryCoverage=95%, HitCoverage=10%, E-value=2e-44, Identity=100%"; Hit description =Putative sucrose synthase (Fragment)
CNYSDGNLVATLLAHKLGVTQCTIAHALEKTKYPNSDIYLDKFDSQYHFSCQFTADLIAMNHTDFIITSTFQEIAGSKDTVGQYGQL

SEQ ID NO: 77973 - protein, 187 aa, Setaria italica
  misc_feature (87)..(87): Xaa can be any naturally occurring amino acid
  Transcript Sequence Number=SeqID_11999
  Gene Ontology: Mol. function=transferase activity, transferring glycosyl groups; Cellular component=plasma membrane; Biological process=sucrose metabolic process
  Homolog annotation: Hit_ID=P30298; Match level="QueryCoverage=88%, HitCoverage=18%, E-value=1e-66, Identity=78%"; Hit description =Sucrose synthase 2
PCGDRITTLNIIGIVPRNFSTCFLTFLRPLILPFNYKGTTMMLNDRIQSLRGLQSSLRKAEEYLLSIPQDTPYSEFNHRFQELGLEXGWGDTAKRVLDTLHLLLDLLEAPDPANLEKFLGTIPIDFLGTIPMMFNVVILSPHGYFAQSNVLGYPDTGGQVVYILDQVRALEDEMLLRIKQQGLDIYP

SEQ ID NO: 77974 - protein, 226 aa, Setaria italica
  misc_feature (84)..(84): Xaa can be any naturally occurring amino acid
  misc_feature (123)..(123): Xaa can be any naturally occurring amino acid
  misc_feature (202)..(202): Xaa can be any naturally occurring amino acid
  misc_feature (209)..(209): Xaa can be any naturally occurring amino acid
  Transcript Sequence Number=SeqID_12000
  Gene Ontology: Mol. function=transferase activity, transferring glycosyl groups; Cellular component=plasma membrane; Biological process=sucrose metabolic process
  Homolog annotation: Hit_ID=B8XJK1; Match level="QueryCoverage=100%, HitCoverage=92%, E-value=1e-113, Identity=84%"; Hit description =Sucrose synthase (Fragment)
  Pfam annotation: Domain name=Glycos_transf_1; Domain location=3-164; Score=34.7; E_value=3.7e-07; Accession=PF00534.12; Description =Glycosyl transferases group 1
KNMTGLVEMYGKNARLRELANLVIVAGDHGKESKDREEQAEFKRMYSLIDQYNLKGHIRWISAQMNRVRNAELYRYICDTKGAXVQPAFYEAFGLTVIESMTCGLPTIATCHGGPAEIIVDGXSGLHIDPYHSDKAADILVNFFDKCKADPSYWDKISQGGLQRIYEKYTWKLYSERLMTLTGVYGFWKYVSNLERRETRRXTLENSYXTTLKYRSLASAVPLSFD

SEQ ID NO: 77975 - protein, 66 aa, Setaria italica
  Transcript Sequence Number=SeqID_12001
  Gene Ontology: Mol. function=transferase activity, transferring glycosyl groups; Cellular component=plasma membrane; Biological process=sucrose metabolic process
  Homolog annotation: Hit_ID=B8XJK1; Match level="QueryCoverage=84%, HitCoverage=22%, E-value=3e-24, Identity=96%"; Hit description =Sucrose synthase (Fragment)
YTPVRVISLSEYTWKLYSERLMTLTGVYGFWKYVSNLERRETRRYLEMFYALKYRSLASAVPLSFD

SEQ ID NO: 77976 - protein, 803 aa, Setaria italica
  misc_feature (482)..(482): Xaa can be any naturally occurring amino acid
  Transcript Sequence Number=SeqID_12002
  Gene Ontology: Mol. function=transferase activity, transferring glycosyl groups; Cellular component=plasma membrane; Biological process=sucrose metabolic process
  Homolog annotation: Hit_ID=P30298; Match level="QueryCoverage=100%, HitCoverage=99%, E-value=0.0, Identity=91%"; Hit description=Sucrose synthase 2
  Pfam annotation: Domain name=Glycos_transf_1; Domain location=555 -744; Score=104.0; E_value=5.1e-28; Accession=PF00534.12; Description= Glycosyl transferases group 1
  Pfam annotation: Domain name=Sucrose_synth; Domain location=6-552; Score=1365.2; E_value=0; Accession=PF00862.11; Description=Sucrose synthase
  Pfam module annotation: Pfam domain module=Glycos_transf_1::Sucrose _synth; Domain location=555-744::6-552
MASKLTRLHSLRERLGATFSSHPNELIALFSRYVNQGKGMLQRHQLLAEFDALFDSDKEKYAPFEDILRAAQEAIVLPPWVALAIRPRPGVWDYIRVNVSELAVEELSVSEYLAFKEQLVDGQNTSNFVLELDFEPFNASFPRPSMSKSIGNGVQFLNRHLSSKLFQDKESLYPLLNFLKAHNYKGTTMMLNDRIQSLRGLQSSLRKAEEYLLSIPQDTPYSEFNHRFQELGLEKGWGDTAKRVLDTLHLLLDLLEAPDPANLEKFLGTIPMMFNVVILSPHGYFAQSNVLGYPDTGGQVVYILDQVRALEDEMLLRIKQQGLDITPKILIVTRLLPDAVGTTCGQRLEKVIGTEHTDIIRVPFRNENGILRKWISRFDVWPYLETYTEDVASEIMKEMQAKPDLIIGNYSDGNLVATLLAHKLGVTQCTIAHALEKTKYPNSDIYLDKFDSQYHFSCQFTADLIAMNHTDFIITSTFQEIXAGSKDTVGQYESHIAFTLPGLYRVVHGIDVFDPKFNIVSPGADMSVYYPYTETDKRLTAFHPEIEELIYSDVENSEHKFVLKDKNKPIIFSMARLDRVKNMTGLVEMYGKNARLRELANLVIVAGDHGKESKDREEQAEFKRMYSLIDQYNLKGHIRWISAQMNRVRNAELYRYICDTKGAFVQPAFYEAFGLTVIESMTCGLPTIATCHGGPAEIIVDGVSGLHIDPYHSDKAADILVNFFDKCKADPSYWDKISQGGLQRIYEKYTWKLYSERLMTLTGVYGFWKYVSNLERRETRRYLEMFYALKYRSLASAVPLSFD

SEQ ID NO: 77977 - protein, 273 aa, Setaria italica
  Transcript Sequence Number=SeqID_12003
  Gene Ontology: Mol. function=zinc ion binding
  Homolog annotation: Hit_ID=B6T7R8; Match level="QueryCoverage=100%, HitCoverage=73%, E-value=1e-122, Identity=78%"; Hit description=MYND finger family protein
CICGTDVASAKDLSLAAEWNLQSSLCPCTEPENPVPAVLASWEDYYQWRSLPLHSPVSVLLHWPLTLYHCLQLSRLQTSRYDGQDTLCIHYLGPEKELLQLAAFGELRALFPGVQIHIELVGPEVPESRDGEVVNISRYACCSDESCCCKSSIGSEDLSGTAVRLKLWKGFYHERCGDIMKDSNPHLIVAPNAGVAAYPSWMPTIEIIRQTGIPAIFTDFCEEAAHLASCCISSMTGQPLKIPIQVNPFRQPVPADNSALYLPCYSNCFVLDV

SEQ ID NO: 77978 - protein, 68 aa, Setaria italica
  misc_feature (5)..(5): Xaa can be any naturally occurring amino acid
  misc_feature (8)..(8): Xaa can be any naturally occurring amino acid
  Transcript Sequence Number=SeqID_12004
PTFFXFFXFFFYQQKLRILYSIVLVLKKNQILKPYTGETYNFVTIDQLCAKLKASQDGHILLGSFQAV

SEQ ID NO: 77979 - protein, 70 aa, Setaria italica
  Transcript Sequence Number=SeqID_12005
  Homolog annotation: Hit_ID=B6SYZ5; Match level="QueryCoverage=87%, HitCoverage=10%, E-value=3e-25, Identity=85%"; Hit description=PPR2
CAKADDLMEMERVFMHMKHKQCDPDAMTYSILVEAYRKEGMTDKIYALHQENPTLVPTDFVNGVTDSLTE

SEQ ID NO: 77980 - protein, 453 aa, Setaria italica
  misc_feature (99)..(99): Xaa can be any naturally occurring amino acid
  Transcript Sequence Number=SeqID_12006
  Gene Ontology: Mol. function=transcription regulator activity; Cellular component=nucleus; Biological process=regulation of transcription
  Homolog annotation: Hit_ID=B6SYZ5; Match level="QueryCoverage=95%, HitCoverage=74%, E-value=0.0, Identity=84%"; Hit description=PPR2
  Pfam annotation: Domain name=PPR; Domain location=100-134; Score =25.0; E_value=0.00031; Accession=PF01535.12; Description=PPR repeat
  Pfam annotation: Domain name=PPR; Domain location=135-169; Score =31.0; E_value=4.9e-06; Accession=PF01535.12; Description=PPR repeat
  Pfam annotation: Domain name=PPR; Domain location=171-205; Score =20.4; E_value=0.0073; Accession=PF01535.12; Description=PPR repeat
  Pfam annotation: Domain name=PPR; Domain location=206-240; Score =17.0; E_value=0.081; Accession=PF01535.12; Description=PPR repeat
  Pfam annotation: Domain name=PPR; Domain location=242-276; Score =19.5; E_value=0.014; Accession=PF01535.12; Description=PPR repeat
  Pfam annotation: Domain name=PPR; Domain location=277-311; Score =18.9; E_value=0.021; Accession=PF01535.12; Description=PPR repeat
  Pfam annotation: Domain name=PPR; Domain location=312-346; Score =35.0; E_value=3e-07; Accession=PF01535.12; Description=PPR repeat
  Pfam annotation: Domain name=PPR; Domain location=347-381; Score =19.7; E_value=0.012; Accession=PF01535.12; Description=PPR repeat
  Pfam annotation: Domain name=PPR; Domain location=382-416; Score =21.3; E_value=0.0041; Accession=PF01535.12; Description=PPR repeat
  Pfam module annotation: Pfam domain module=PPR::PPR::PPR::PPR::PPR::PP R::PPR::PPR::PPR; Domain location=100-134::135-169::171-205::206 -240::242-276::277-311::312-346::347-381::382-416
EFPVPSAGGRDGGRPAPRQEKRHWKVGEFPGTSAGGPDSKAARTPIKNVKKRLDARADAKAWACTVTEALADRINSKNWKEALQVFEMLKEQPFYHPKXGTYMKLIVLLGRSGQAAQAHQLFNEMLQQGCQPTPELYTALIGAYCRSGLMDDALQLLTDMKASPLCQPDVYTYSTIIKACVDATRFDLIDAMYKDMAERLISPNTVTQNIVLSGYGKAGRLDDMERVLSDMLDSTTCKPDVWTMNIILSLFGNMGQIESMEKWYEKFRSYGIEPETRTLNILIGAYGKKRMYDKMSAVMEYMRKLAFPWTTATYNNVIEAFAEAGDAKNMEHTFNQMRSEGMKPDTKTFCCLINGFSKAGLFHKVVGMVKLAERLDVPANTSFHNAILEACAKADDLMEMERVFMHMKHKQCDPDAMTYSILVEAYRKEGMTDKIYALHQENPTLVPTDFENR

SEQ ID NO: 77981 - protein, 842 aa, Setaria italica
  Transcript Sequence Number=SeqID_12007
  Gene Ontology: Mol. function=DNA binding; Cellular component=nucleus
  Homolog annotation: Hit_ID=Q7XLC7; Match level="QueryCoverage=82%, HitCoverage=87%, E-value=4e-28, Identity=33%"; Hit description =OSJNBa0070C17.22 protein
  Pfam annotation: Domain name=MBD; Domain location=163-230; Score =12.5; E_value=0.0022; Accession=PF01429.11; Description=Methyl-CpG binding domain
MGLSEEALLTKELVAMDEPVTKRFPDGCLNDEMPSRTRSGLVRKSPTVKAVRKDGPVINVFPDGCHGEDMPDGTRSGLVTGSPAIKIQSKDQPVIKGLADGWLKEGTPLGTRSGLVRGSLAAKAPVRAKLVTKGQPNGWTTNEKPTGTQSGLVRGTPAAKTESKNERVIEGLPDGWLKEYRPRKTGSFQDPFYIDPVSGYEFRSLKDVHRYLETGDINQCIMRPKKSTAICDVHITESQPHTITSSQHTRPSTADKGIQCEILTSEGIMVLWEELVTPYSGNDTEHTVLPESENLKAMQGNVDKLETLEHTNVQPVSAQRGPRQTKSLKRKEQNVEVKSKKHKTSPAVTPIRVSPRLAALNVQQELSIEPEDEPINVNPVNLVRTMEENSNDQSQMSQSGTLNQIHGNLESTSNQLQLSQADTAKGTEAIQENTTNHSQPSQALTVDHTETNQEKTANQVESILADIPVLHDRSITDHADIPIQTMQECTTDPLTQADILNHIQTDQEYTASRLQSSQAGTVIPARPFQEYNIDYSQPGKADTINQIQANQETTCDEFHLSQVDTVTEMQIIQENMTRQSQMSQADAVGQIHIDLESTIGYSQPSKADTINQLQANQENTADQLHFSQVDCVTQIEIIQGNMCKNPQLSQEDSVDQIHINLEDTTNHLQPNYAENSMLQAGFSWAPEQNGGASITDFWKNVENQDSSVPMPVDGSTVASFPANVRFQNAAGAEEPALPAQSAAPETCSDQSGLAFQSLFGNAWSDPCIEFAFKTLTGDIPVLDDTIAVTDYFPEQQDLNKDPSPNCSASVLDNTRNHTQVDVNLPAPMPSDKLYNGSWFPPQ

SEQ ID NO: 77982 - protein, 109 aa, Setaria italica
  Transcript Sequence Number=SeqID_12008
  Gene Ontology: Mol. function=acyl-CoA binding
  Homolog annotation: Hit_ID=Q015I1; Match level="QueryCoverage=98%, HitCoverage=18%, E-value=2e-09, Identity=40%"; Hit description=Acyl -CoA-binding protein (ISS) (Fragment)
LKETVRYGLFLGTFAGSYVSVDEYIAAVWGRKRTARWRSLLAGLIAGPSMLLTGPGTQHTSLAIYILMRAAVLASRCGIKSKRFGKICKPLTWSNGDIFLMCLASAQIL

SEQ ID NO: 77983 - protein, 87 aa, Setaria italica
  Transcript Sequence Number=SeqID_12009
KVIMLLHDFGRICGCQIITKCWLIFEFSCQKMIFGTGDDSVLVYTHQPKLSILSGTFCANSNTNICVSSFPHARSDPFALIKQQRCV

SEQ ID NO: 77984 - protein, 100 aa, Setaria italica
  misc_feature (64)..(64): Xaa can be any naturally occurring amino acid
  Transcript Sequence Number=SeqID_12010
  Gene Ontology: Mol. function=hydrolase activity, hydrolyzing O -glycosyl compounds; Cellular component=anchored to membrane; Biological process=carbohydrate metabolic process
  Homolog annotation: Hit_ID=B6TX61; Match level="QueryCoverage=56%, HitCoverage=11%, E-value=3e-23, Identity=89%"; Hit description =Glucan endo-1,3-beta-glucosidase 5
EFRRPPAGPGCATAEAARLHRRTSPPPPPNQPAAAETARLHLFGLMDEDAKRVAPGNFERHWGXFTFDGRPKFPLDLHGGGRPAMPVPARGVEYLPHGQG

SEQ ID NO: 77985 - protein, 55 aa, Setaria italica
  Transcript Sequence Number=SeqID_12011
  Gene Ontology: Cellular component=plasma membrane
  Homolog annotation: Hit_ID=B6SHX4; Match level="QueryCoverage=92%, HitCoverage=44%, E-value=2e-20, Identity=90%"; Hit description=NADH ubiquinone oxidoreductase B22-like subunit
NTNKDYNTNDAEAQHRNFQHPDPYIVPWAPGGTKFTRNPPPPQGIEIIYNYGKED

SEQ ID NO: 77986 - protein, 113 aa, Setaria italica
  Transcript Sequence Number=SeqID_12012
  Gene Ontology: Cellular component=plasma membrane
  Homolog annotation: Hit_ID=B6SHX4; Match level="QueryCoverage=100%, HitCoverage=99%, E-value=1e-59, Identity=97%"; Hit description=NADH ubiquinone oxidoreductase B22-like subunit
  Pfam annotation: Domain name=Complex1_LYR; Domain location=13-78; Score=83.4; E_value=8.1e-22; Accession=PF05347.7; Description =Complex 1 protein (LYR family)
MASTAGYLARRAGQKERVRLLYRRALKDTLNWAVHRHLFYQDASDLRDKFEANRHVDNLDVIDRLIDDAEAQHRNFQHPDPYIVPWAPGGTKFTRNPPPPQGIEIIYNYGKED

SEQ ID NO: 77987 - protein, 638 aa, Setaria italica
  Transcript Sequence Number=SeqID_12013
  Gene Ontology: Mol. function=small protein activating enzyme activity; Cellular component=nucleus; Biological process=protein modification process
  Homolog annotation: Hit_ID=B9RH95; Match level="QueryCoverage=84%, HitCoverage=84%, E-value=0.0, Identity=75%"; Hit description =Ubiquitin-activating enzyme E1b, putative
  Pfam annotation: Domain name=ThiF; Domain location=12-148; Score =186.5; E_value=7.5e-53; Accession=PF00899.13; Description=ThiF family
  Pfam annotation: Domain name=UBACT; Domain location=331-397; Score =122.8; E_value=1.1e-33; Accession=PF02134.13; Description=Repeat in ubiquitin-activating (UBA) protein
  Pfam annotation: Domain name=UBA_e1_thiolCys; Domain location=151 -199; Score=17.5; E_value=8.8e-05; Accession=PF10585.1; Description =Ubiquitin-activating enzyme active si
  Pfam module annotation: Pfam domain module=ThiF::UBACT::UBA_e1 _thiolCys; Domain location=12-148::331-397::151-199
MAAAASSEEAVKAAKVLMVGAGGIGCELLKTLALSGFSDVHIIDLDTIEVSNLNRQFLFRQSHVGQSKAKVARDAVLKFRPNINITPYHANVKDSTFNVEFFKQFSVVLNGLDNLDARRHVNRLCLAAEVPLVESGTTGFLGQVTVHVKGKTECYECQPKPVPKSYPVCTITSTPSKFVHCIVWAKDLLFAKLFGDRNQDNDLNVHSKDDSSSKTDVFERNVDEDLSHYAQRIYDHVFGYNIETALANEETWKNRRRPNPIYVRDALPEDAVQQNGCSQDHKNEEQEPSAMVSLGLRNPQEIWSLADNSRVFLEAFKLFFEKREKEIGNLIFDKDDQLAVEFVTAAANIRASSFGIPLHSLFEAKGVAGNIVHAVATTNAIIAGLIVIEAIKVLKGDYQNYRMSYCLEHPATARKMLLMPVEPFEPNKSCYVCSETPLVLEVNTKTTKLREVIDKVIKSKLGMNLPLVMVGATLVFEDGEGLEPDEAENYALNLDKVLAELPAPVVNDTKLTVEDFQQELKCSINIKQRDEFDKEKEPDGMVLAGWTGPVDKQITSNGDKRLVPSSSSADDVDSAAEDASVKPGMKRKLNEILESQENFDVQNKSDVGSSSAQIVEDDDDDIVMFNEDPMQGKKKRLQ

SEQ ID NO: 77988 - protein, 65 aa, Setaria italica
  Transcript Sequence Number=SeqID_12014
  Gene Ontology: Mol. function=binding
  Homolog annotation: Hit_ID=B6TYD9; Match level="QueryCoverage=100%, HitCoverage=11%, E-value=2e-29, Identity=92%"; Hit description =Armadillo/beta-catenin-like repeat family protein
KKYPVSIFLALAMGGGNGTRRRLMDAGSCQHLQKLADAEVPGAKKALQRISNNRLKSLLSIGWQN

SEQ ID NO: 77989 - protein, 241 aa, Setaria italica
  Transcript Sequence Number=SeqID_12015
  Gene Ontology: Mol. function=binding
  Homolog annotation: Hit_ID=B6TYD9; Match level="QueryCoverage=100%, HitCoverage=41%, E-value=1e-116, Identity=83%"; Hit description =Armadillo/beta-catenin-like repeat family protein
  Pfam annotation: Domain name=Arm; Domain location=20-61; Score=24.2; E_value=0.00052; Accession=PF00514.15; Description=Armadillobeta -catenin-like repeat
TVGTQKSAALCLWSLASMGDDETQSQIVQAGALSPLLQTLHVASDQDLQDSVLRAIHALTSVPAAARTLCSSPLFFAQLTDLICRCSSILLQQMAADMVADLTPTVSEDTKRCMAPCIGTLVKMMEVAKPATVQESAGRALLALLTLKSNRKVFVRDEKNVMRLVQMLDPRNEEIDKKYPVSIFLALAMGGGNGTRRRLMDAGSCQHLQKLADAEVPGAKKALQRISNNRLKSLLSIGWQN

SEQ ID NO: 77990 - protein, 172 aa, Setaria italica
  misc_feature (18)..(18): Xaa can be any naturally occurring amino acid
  Transcript Sequence Number=SeqID_12016
  Gene Ontology: Mol. function=oligosaccharyl transferase activity; Cellular component=membrane; Biological process=protein amino acid glycosylation
  Homolog annotation: Hit_ID=Q6XL70; Match level="QueryCoverage=77%, HitCoverage=57%, E-value=5e-64, Identity=85%"; Hit description =Putative oligosaccharyl transferase STT3 protein (Fragment)
TTTTIATVGTAMASPEKXAWEILNSLDVKYVLVVFGGLIGYPSDDINKFLWMVRIGGGVFPHIKEADYLRDGNYRVDAHGTPTMLNSLMYKLCYYRFADTDGKGFDRVRRYEIGKKHFKLTHFEEVFTTHHWMVRIYKLKPQKNRVRGKLKLKSSSKTSSMRKTGGKKSPWQ

SEQ ID NO: 77991 - protein, 184 aa, Setaria italica
  misc_feature (73)..(73): Xaa can be any naturally occurring amino acid
  Transcript Sequence Number=SeqID_12017
  Gene Ontology: Mol. function=oligosaccharyl transferase activity; Cellular component=membrane; Biological process=protein amino acid glycosylation
  Homolog annotation: Hit_ID=Q6XL70; Match level="QueryCoverage=85%, HitCoverage=67%, E-value=2e-70, Identity=82%"; Hit description =Putative oligosaccharyl transferase STT3 protein (Fragment)
TVIVDNNTWNNTHIATVGTAMASPEKAAWEILNSLDVKYVLVVFGGLIGYPSDDINKFLWMVRIGGGVFPHIXLSYYHRRVNGTNYLVDAHGTPTMLNSLMYKLCYYRFADTDGKGFDRVRRYEIGKKHFKLTHFEEVFTTHHWMVRIYKLKPQKNRVRGKLKLKSSSKTSSMRKTGGKKSPWQ

SEQ ID NO: 77992 - protein, 60 aa, Setaria italica
  Transcript Sequence Number=SeqID_12018
PHLGVLANIRTASLANEIFSQEKYHNLHEFVHEPLMLQWLKESPTYSTQQCKITCIFLLF

SEQ ID NO: 77993 - protein, 73 aa, Setaria italica
  Transcript Sequence Number=SeqID_12019
  Gene Ontology: Mol. function=nucleoside-triphosphatase activity; Cellular component=integral to membrane; Biological process =proteolysis
  Homolog annotation: Hit_ID=Q8GU89; Match level="QueryCoverage=100%, HitCoverage=5%, E-value=2e-25, Identity=74%"; Hit description =Pleiotropic drug resistance protein 4
MDREIHRVTSLRRDSSLWRRGDDVFSRQSSRFHDEEDDEEALRWAALERLPTYDRVRRGILALDEDGEKVEVD

SEQ ID NO: 77994 - protein, 305 aa, Setaria italica
  misc_feature (1)..(1): Xaa can be any naturally occurring amino acid
  Transcript Sequence Number=SeqID_12020
  Gene Ontology: Mol. function=nucleic acid binding; Cellular component= chloroplast
  Homolog annotation: Hit_ID=B9SG63; Match level="QueryCoverage=95%, HitCoverage=76%, E-value=5e-91, Identity=53%"; Hit description=RNA binding protein, putative
  Pfam annotation: Domain name=RRM_1; Domain location=208-278; Score =83.9; E_value=5.7e-22; Accession=PF00076.14; Description=RNA recognition motif. (a.k.a. RRM, RBD, o
XGVSRAEAVDYYASTLAGVVGSEKEAQMRIYEASWDGSYEFRCEIDEGASKELAKMPGVLSVQPDMGQRSQMDNDSLSLSTANLVSIGDGASKSSSGKNEFWLIRMEKPGVEVVTKAQMVDHYTQILMKVLGNEQDAQVSIYHISWERDYGFCCHIDEECAKELADVPGVLSVRPDTNFGSDNKDYKGKNGFKSSEGTGAADIKTKRLFVTGLSFYTSEKTLRAAFEPFGELVEVKIIMDKISKRSKGYAFIEYTTEEAGGAALKAMNGQIINGWMIVVDVAKTRSRDHQSGRPNQTFRPPYHSR

SEQ ID NO: 77995 - protein, 141 aa, Setaria italica
  Transcript Sequence Number=SeqID_12021
  Homolog annotation: Hit_ID=B6TP63; Match level="QueryCoverage=74%, HitCoverage=75%, E-value=1e-44, Identity=82%"; Hit description =Protein yippee-like
  Pfam annotation: Domain name=Yippee; Domain location=1-111; Score =204.9; E_value=2.2e-58; Accession=PF03226.6; Description=Yippee putative zinc-binding protein
MGRLLLVSLPATGAAIYRCKHCDTHLAYATDIISRMFRCKHGKAYLFAKMVNVTVGEKEERAMTTGWHTVCDIFCVACGCNLGWKYLAAVDKTQRYKEGKFILDRREVLATTSTVAVATTNSSGGGGGDEDDDDHQSEEDS

SEQ ID NO: 77996 - protein, 102 aa, Setaria italica
  Transcript Sequence Number=SeqID_12022
MAADDGRATAALDETLKPFQERASEAELRIAKLEALLYNQAGPNSGSEASSSAMKHLQSKLDAVSAECLTEKEKNKKLIIENEKLQYRITHLIRAIKEAESR

SEQ ID NO: 77997 - protein, 396 aa, Setaria italica
  Transcript Sequence Number=SeqID_12023
  Gene Ontology: Mol. function=protein binding; Cellular component =integral to membrane; Biological process=multicellular organismal development
  Homolog annotation: Hit_ID=Q7XKG7; Match level="QueryCoverage=87%, HitCoverage=83%, E-value=8e-50, Identity=38%"; Hit description =OSIGBa0153E02-OSIGBa0093I20.2 protein
  Pfam annotation: Domain name=DUF2296; Domain location=286-336; Score =108.9; E_value=1.7e-29; Accession=PF10058.1; Description=Predicted integral membrane metal-bind
MASSPAAAAEEEVAPAPAPPEAAEAKGKGKRGGVLGRMWRALFGGREDFEKRLQYLSKEEAAVHARMRRRTQFSRRAVRNLIVLSVLAEVLAVVYAIMMTRDEDLTWQMRAIRVLPMFVLPAVSSLIYSTVVNFTRMLERKDQKTLEKLRAERKAKIDELKERTNYYLTQQLIQKYDLDPAAKAAAASVLASKLGEETGLKVHVGEEPKLDAAVARSNDVEILRSDGLRNRKQPNASGSRTGSPSGAHTPAHGTESSPTASAGLETAPAPMVVEHHQGTGASDGGWIAKIAALLVGEDPSQSYALICGNCHMHNGLARKEDYPHVTYYCPHCHALNTSKQSMGQYSGSNSGRSTPAVPADGMSTSSSVQEGELSNLTTLQELPKEGNAEKQETEAS

SEQ ID NO: 77998 - protein, 264 aa, Setaria italica
  Transcript Sequence Number=SeqID_12024
  Gene Ontology: Mol. function=metal ion binding
  Homolog annotation: Hit_ID=Q4JHE0; Match level="QueryCoverage=98%, HitCoverage=61%, E-value=4e-86, Identity=65%"; Hit description=XB3 -related protein
  Pfam annotation: Domain name=Ank; Domain location=1-29; Score=16.6; E_ value=0.11; Accession=PF00023.22; Description=Ankyrin repeat
  Pfam annotation: Domain name=Ank; Domain location=41-73; Score=34.5; E_value=4.4e-07; Accession=PF00023.22; Description=Ankyrin repeat
  Pfam annotation: Domain name=zf-C3HC4; Domain location=146-194; Score= 11.8; E_value=0.0046; Accession=PF00097.17; Description=Zinc finger, C3HC4 type (RING finger)
  Pfam module annotation: Pfam domain module=Ank::Ank::zf-C3HC4; Domain location=1-29::41-73::146-194
ALHLAALHGHVDCVHLLIDEHADLAAQTLPCVAAPMGSIGAGSTPLHYAAAGGEVKCCQILVSRGADRTAVNCNGWLPVDVARTWGCHWLEHVLSPKSHLPIPKFPPSGYLSSPLPSVLTLARDCGLVLNTSSEFSDGGVDESDACAVCLERPCNVAAEVCGHELCVKCALDLCSVIKSYDVPGIAGSIPCPLCRSGIASFRKRAASEAEDEELEPDLNSACSGGSHYKSAGEHTASSSPEKKRSTDSDQGIILPLYSPPAVLS

SEQ ID NO: 77999 - protein, 85 aa, Setaria italica
  Transcript Sequence Number=SeqID_12025
  Gene Ontology: Mol. function=protein binding; Biological process=Mo -molybdopterin cofactor biosynthetic process
  Homolog annotation: Hit_ID=Q6Z2X3; Match level="QueryCoverage=100%, HitCoverage=46%, E-value=1e-29, Identity=72%"; Hit description =Molybdenum cofactor synthesis protein 2B
PAGEASVFVAASATHRADAMEACRYVIDQLKASVPIWKKEVYDDGEVWKENREFLDRHSGAAAPAPVPAAKTGGCCGSKVRVQEA

SEQ ID NO: 78000 - protein, 125 aa, Setaria italica
  Transcript Sequence Number=SeqID_12026
  Gene Ontology: Mol. function=ATP-dependent helicase activity; Cellular component=intracellular
  Homolog annotation: Hit_ID=Q10CV6; Match level="QueryCoverage=85%, HitCoverage=9%, E-value=1e-46, Identity=85%"; Hit description =Helicase associated domain family protein, expressed
  Pfam annotation: Domain name=dsrm; Domain location=21-83; Score=48.1; E_value=3.3e-11; Accession=PF00035.17; Description=Double-stranded RNA binding motif
AKLQSPEEEGKSSLIKDGMNPKSLLQTLLMRAGHTPPKYKTKHLKTNEFRAMVEFKGMQFVGKPKRNKQLAERDAAIEALAWLTQTSGVKPQDEGDDSSPLDLTDSMLKLLTRPRRHSKNNSRRR

SEQ ID NO: 78001 - protein, 276 aa, Setaria italica
  Transcript Sequence Number=SeqID_12027
  Gene Ontology: Mol. function=hydrolase activity; Cellular component =nucleus; Biological process=regulation of transcription, DNA -dependent
  Homolog annotation: Hit_ID=B4FXQ4; Match level="QueryCoverage=100%, HitCoverage=83%, E-value=1e-134, Identity=85%"; Hit description =Ataxin-3
  Pfam annotation: Domain name=Josephin; Domain location=1-123; Score =197.7; E_value=3.2e-56; Accession=PF02099.9; Description=Josephin
EGSQSPGVANAAAGDFLAEGSHNVSLGGDFSIQVLQKALEVWDLQVIPLDSPAAGSSLFDPEQEVAFICHLQDHWFCIRKVNGEWYNFNSLYPAPEHLSKFYLSAFIDTLKGSGWSIFAVRGNFPKECPMATEGSNGFGQWLTPDDAQKITASCNQVQTPPTHQVQSPLLGQQSGGMSEMDMIAAQQEEADLNAAIAASLMDAGGPFPSYDAAQEYSKQQDAPVIEASSSKDNNQEEVDKSEPSAPPCEDTQEPASGSDTKGEVSSIEVKESPKEE

SEQ ID NO: 78002 - protein, 80 aa, Setaria italica
  Transcript Sequence Number=SeqID_12028
  Gene Ontology: Mol. function=nucleoside-triphosphatase activity
MEGSLLSGLNSGVVLSLIAVLWTVVWQNLQHLQLQQFFGRHLSRHARRLAAMVDPYLSVTIAEYEGGRMKRSDAFEEVKA

SEQ ID NO: 78003 - protein, 40 aa, Setaria italica
  Transcript Sequence Number=SeqID_12029
  Gene Ontology: Mol. function=electron carrier activity; Biological process=response to oxidative stress
  Homolog annotation: Hit_ID=B6T173; Match level="QueryCoverage=100%, HitCoverage=11%, E-value=2e-14, Identity=80%"; Hit description =Peroxidase 1
VEKAWQLKFAASMIKMGKIEVLTGDEGEIREKCFVVNPHY

SEQ ID NO: 78004 - protein, 51 aa, Setaria italica
  Transcript Sequence Number=SeqID_12030
MRSMPFQLKSGHHHHHHGAVMEGKPPPPPPQQQQQPATPRVSMFRRLLVRV

SEQ ID NO: 78005 - protein, 239 aa, Setaria italica
  Transcript Sequence Number=SeqID_12031
  Gene Ontology: Mol. function=binding
  Homolog annotation: Hit_ID=B9SP95; Match level="QueryCoverage=44%, HitCoverage=12%, E-value=6e-16, Identity=45%"; Hit description =Microtubule-associated protein TORTIFOLIA1, putative
  Subcellular localization annotation: CTP_CleavageSite=98; ConfidenceScore=5.07e-01
YHLPGSKFFKNQSVSSSPRLSTSTPRSSVDANYKPPPISHLKHEKKWMHDLPSKGSNVCTKEGAEFPKDHVRSRFRKPETVSSESNLGRYVPSSARSQASMVKGALPVSFTSSCEQPEMQNALCASNQSGEFQGTGEIEPAYMEALNCGDYDDLIDLMDRTGPVLEKLSCETANELLRVITCQFLNKKFFDLALPWLQQLADLSTIYKPGQLFASVRAQKEFLSALEEVATSGSTEPAI

SEQ ID NO: 78006 - protein, 132 aa, Setaria italica
  misc_feature (10)..(10): Xaa can be any naturally occurring amino acid
  Transcript Sequence Number=SeqID_12032
  Homolog annotation: Hit_ID=B6T1F5; Match level="QueryCoverage=97%, HitCoverage=40%, E-value=5e-52, Identity=79%"; Hit description=Small multi-drug export protein
  Pfam annotation: Domain name=Sm_multidrug_ex; Domain location=2-92; Score=80.7; E_value=5.3e-21; Accession=PF06695.3; Description =Putative small multi-drug export prot
RAIIILYLKXLATFLSQRSASATRFMDLLFERARRKAAPVEEFQWLGLMLFVAVPFPGTGAWTGAIIASVLGMPFWSGFSANFMGVILAGLLVNLLMNLGLKYAIITGVVLFFVSSAMWSVLRSLKKSVNAK

SEQ ID NO: 78007 - protein, 59 aa, Setaria italica
  Transcript Sequence Number=SeqID_12033
  Gene Ontology: Mol. function=electron carrier activity; Cellular component=extracellular region; Biological process=response to oxidative stress
  Homolog annotation: Hit_ID=Q5U1F7; Match level="QueryCoverage=67%, HitCoverage=12%, E-value=1e-10, Identity=75%"; Hit description=Class III peroxidase 136
RSGEQTQAPNFRSLRGFEVIDNIKAQIEALCPQTVSCADILTVAARDSVVAVRSLARDY

SEQ ID NO: 78008 - protein, 58 aa, Setaria italica
  Transcript Sequence Number=SeqID_12034
  Gene Ontology: Mol. function=electron carrier activity; Cellular component=extracellular region; Biological process=response to oxidative stress
  Homolog annotation: Hit_ID=A5H454; Match level="QueryCoverage=93%, HitCoverage=16%, E-value=3e-15, Identity=72%"; Hit description =Peroxidase 66
MVLQNLIPPTSSLTQLIQGYGNLGLNPTDLVALSGAHTIGQAHCPSYQDHIYNDTNIN

SEQ ID NO: 78009 - protein, 56 aa, Setaria italica
  Transcript Sequence Number=SeqID_12035
NRLVALSGTHTRALLFLSQVLCDDFNMFPMSGLLQVRTRSARRTARATRPHLQRHH

SEQ ID NO: 78010 - protein, 90 aa, Setaria italica
  Transcript Sequence Number=SeqID_12036
  Gene Ontology: Mol. function=electron carrier activity; Cellular component=extracellular region; Biological process=response to oxidative stress
  Homolog annotation: Hit_ID=Q41577; Match level="QueryCoverage=100%, HitCoverage=27%, E-value=9e-18, Identity=54%"; Hit description=Pox1 protein
  Subcellular localization annotation: CTP_CleavageSite=84; ConfidenceScore=5.50e-01
SSLAPLDTASPTSFNNDYFSNLLSRKGLLHSDQELFNGGSADGTVRSFASSASAFSSAFAAAMVKNKGKQSSPKTGVRARSRLTCSKVNS

SEQ ID NO: 78011 - protein, 76 aa, Setaria italica
  misc_feature (37)..(37): Xaa can be any naturally occurring amino acid
  Transcript Sequence Number=SeqID_12037
  Gene Ontology: Mol. function=electron carrier activity; Cellular component=extracellular region; Biological process=response to oxidative stress
  Homolog annotation: Hit_ID=A5H454; Match level="QueryCoverage=94%, HitCoverage=24%, E-value=6e-18, Identity=62%"; Hit description =Peroxidase 66
MVLQNLIPPTSSLTQLIQGYGNLGLNPTDLVALSGAXCPSYQDHIYNDTNINQAFAASLKANCPATGGSNVMAPLD

SEQ ID NO: 78012 - protein, 36 aa, Setaria italica
  Transcript Sequence Number=SeqID_12038
MQLGGPSWTVLLGRRDSTSSFPNQANTDLPAPQSSL

SEQ ID NO: 78013 - protein, 311 aa, Setaria italica
  Transcript Sequence Number=SeqID_12039
  Gene Ontology: Mol. function=electron carrier activity; Cellular component=extracellular region; Biological process=response to oxidative stress
  Homolog annotation: Hit_ID=Q43417; Match level="QueryCoverage=100%, HitCoverage=100%, E-value=1e-151, Identity=86%"; Hit description =Peroxidase
  Pfam annotation: Domain name=peroxidase; Domain location=37-275; Score=474.8; E_value=1.2e-139; Accession=PF00141.15; Description =Peroxidase
  Subcellular localization annotation: CTP_CleavageSite=42; ConfidenceScore=5.28e-01
MASSVSVLLLLCMAAVASAQLSPTFYDTSCPNALSTIKSAVTAAVKKENRMGASLLRLHFHDCFVQGCDASVLLDSGGEQGAIPNAGSLRGFNVIANIKAQVEAICKQTVSCADILAVAARDSVVALGGPSWTVPLGRRDSTSGSAALANSDLPPPFFNLSDLIGSFSNKGFSATEMVALSGAHTIGQAQCLNFRDHIYNDTNINAGFASSLKANCPRPTGNGDGNLAPLDTSTPYTFDNAYYSNLLSQKGLLHSDQELFNGGSTDNTVRNFASNKAAFSSAFAAAMVKMANLSPLTGSQGQIRLTCSKVN

SEQ ID NO: 78014 - protein, 308 aa, Setaria italica
  Transcript Sequence Number=SeqID_12040
  Gene Ontology: Mol. function=electron carrier activity; Cellular component=extracellular region; Biological process=response to oxidative stress
  Homolog annotation: Hit_ID=A5H454; Match level="QueryCoverage=93%, HitCoverage=89%, E-value=1e-111, Identity=70%"; Hit description =Peroxidase 66
  Pfam annotation: Domain name=peroxidase; Domain location=35-271; Score=463.9; E_value=2.4e-136; Accession=PF00141.15; Description =Peroxidase
  Subcellular localization annotation: CTP_CleavageSite=40; ConfidenceScore=5.42e-01
SFLGLLVLVALASGASAQLSPTFYDTSCPNALSTIRTAVNAAVAQEARMGASLLRLHFHDCFVQGCDASVLLNDTNGEQSAGPNVGSLRGFGVIDNIKAQVEALCPQTVSCADILTVAARDSVVALGGPSWTVLLGRRDSTSSFPNQANTDLPAPQSSLRNLIDAFGNKTLSATDMVALSGAHTIGQAQCTNFRDHITESNINPAFAASLRTSCPATGGDTNLAPLDVTTPNTFDNAYYNNLLSQRGLLHSDQELFNNGSTDSTVRNFASNAAAFSSAFTTAMVKMANIQPLTGTQGQIRRLCWRVNS

SEQ ID NO: 78015 - protein, 51 aa, Setaria italica
  Transcript Sequence Number=SeqID_12041
YDAYIDTCIFGFSSWCASEEIAGAEGGGSIPIAMLRLRTFWMDYWMEVLWE

SEQ ID NO: 78016 - protein, 80 aa, Setaria italica
  Transcript Sequence Number=SeqID_12042
SQSVDCDGDGDDDMDAMWKAIMQKTRPAAAAAPAPASPPPAQRSPQRPPPRARDPSLGAEEMNRRFDDFIKKNRNSFGRQ

SEQ ID NO: 78017 - protein, 63 aa, Setaria italica
  Transcript Sequence Number=SeqID_12043
YISKNMDFDGKGILLDRGSEHREHLRRKNILMSIEVVEKATANKIAQVFLRLVYLNTYIVSSS

SEQ ID NO: 78018 - protein, 206 aa, Setaria italica
  Transcript Sequence Number=SeqID_12044
  Homolog annotation: Hit_ID=UPI0001A7B04F; Match level="QueryCoverage =90%, HitCoverage=14%, E-value=7e-48, Identity=50%"; Hit description =REF4 (REDUCED EPIDERMAL FLUORESCENCE 4)
NPQSTSNSSMSSPLPGVQEDECQWPTVPAWEVLEAVPFVLEAVLTACAHGRLSSRDLVTGLRDLADFLPASLAAIVSYFSAEITRGIWKPVMLNGTDWPSPAATLPVVEFEINEVLASAGVNINISSQPRSVMPMLPLPIAALISLSITVKMEKFNHLHGIISQGIETCATSSSWPSMQIIGALWSQKVQHWHDFIILTCSQSPFT

SEQ ID NO: 78019 - protein, 241 aa, Setaria italica
  Transcript Sequence Number=SeqID_12045
  Homolog annotation: Hit_ID=UPI0001A7B04F; Match level="QueryCoverage =80%, HitCoverage=15%, E-value=5e-20, Identity=36%"; Hit description =REF4 (REDUCED EPIDERMAL FLUORESCENCE 4)
SCGLALAEALVANLCFAHNTGAMWKLLDQAMSSRLVHPLHTLALLTPRVVPNRPRQPEAYRLYLELLGRYAVAPVYPECTERKSILAKSIDDAMQLAHRYGFQHLDFGHAVILFVLGLVEMLIDCILDDYGLLNISSHEHDNIYTKNMDFDGKGILLDRGSEHREHLRRKNILMSIEVVEKATANKIAQVFLRLVYLNTPENFNYLLRKLQLLGALKSKNVLPAYILLDSLTMNIQNVIST

SEQ ID NO: 78020 - protein, 518 aa, Setaria italica
  misc_feature (365)..(365): Xaa can be any naturally occurring amino acid
  Transcript Sequence Number=SeqID_12046
  Homolog annotation: Hit_ID=UPI0001A7B04F; Match level="QueryCoverage =91%, HitCoverage=38%, E-value=9e-67, Identity=34%"; Hit description =REF4 (REDUCED EPIDERMAL FLUORESCENCE 4)
  Subcellular localization annotation: CTP_CleavageSite=28; ConfidenceScore=5.01e-01
MNIQNVISTGYQLDRSRLLGVLVSTQPCSSSAFNIFGAGKGSCWVPFDMFMENAMDGRHLHAISSVEFLTELSKTFKVLNRATWQETFQALWISALRLVQQGPAALEGPFPHLYSRLCMLLAIIPLSIATIVNEEVDKLDGGMVAAIKGELVSSLQILVQFSGLLSPPPAAMHLANSAARKAAVVLSNLKSGNENMYSYSKDSSSIKTVGNMIHLIVEACIARNLVDTSAYFWPGYVVALEESSQAQESPWSSLIEGSPLMELKDALMVTPASSVAELEKLYSFALSGSEEEKLVASKVLCGASLLRGWNIQEHVVQMVLKLLSTFLPLDSRSDERYLQHMPMLHALILGISSVDAVHILSMYGXLVPEVAAMLMPLCEIFGSLPASGHRSCNFEEASVYSVFSCAFLSLLRLWKFHRPPIENALSRRGVSVWSEPRLDFLLLLRNSRSALKNLSNVSKSSIFQLDPSLQKPVYIDSFPKLRAWYLQNQACIASTLSSAYNRTNVLQVANIILKIICR

SEQ ID NO: 78021 - protein, 307 aa, Setaria italica
  misc_feature (8)..(8): Xaa can be any naturally occurring amino acid
  misc_feature (18)..(18): Xaa can be any naturally occurring amino acid
  Transcript Sequence Number=SeqID_12047
  Homolog annotation: Hit_ID=UPI0001A7B04F; Match level="QueryCoverage =99%, HitCoverage=24%, E-value=1e-38, Identity=35%"; Hit description =REF4 (REDUCED EPIDERMAL FLUORESCENCE 4)
QKVQHWHXDFIILTCSQXPFTRDNTAVAQLIRSCFTSFLGPLIDGRSCYIENRGVTNLLGRTLDERTQLVIAPGFLYIRSCRLFPDNNFVCEEILKLVIERARALANDCISERPAHLRSDCMPLSVSSSLVEQMSSLAATMLCHAGGVTLIRLLYEHILPTLLLSAGEDKLGSAGHVCSLFEGYALAYVLIWSGASIWGVGETSPAYTSIYTSKRQRIVDRHLEFMVKVMEGNIVLGCGETTWRSYVLCFVGLLVDFVPAWILEVKLETLQKLASGLRRKWHKGDLALALLERGGSKTVTSVVESLM

SEQ ID NO: 78022 - protein, 94 aa, Setaria italica
  Transcript Sequence Number=SeqID_12048
  Gene Ontology: Mol. function=metal ion binding
  Homolog annotation: Hit_ID=Q25A03; Match level="QueryCoverage=93%, HitCoverage=17%, E-value=4e-16, Identity=55%"; Hit description =H0821G03.13 protein
  Subcellular localization annotation: CTP_CleavageSite=57; ConfidenceScore=5.48e-01
TTLSIPPLELPGATSAAPARSPRIHHTSGVIHLYHSSSSTSTTSSSSYASAVAATSSSSHGPAAPQPASDSLLPPWRGTRLLVLAVPTRVSPDD

SEQ ID NO: 78023 - protein, 362 aa, Setaria italica
  Transcript Sequence Number=SeqID_12049
  Gene Ontology: Mol. function=GTP binding
  Homolog annotation: Hit_ID=B0BLH9; Match level="QueryCoverage=73%, HitCoverage=66%, E-value=1e-85, Identity=58%"; Hit description =CM0216.310.nc protein
  Pfam annotation: Domain name=Adaptin_binding; Domain location=51-359; Score=260.4; E_value=4.3e-75; Accession=PF10199.1; Description=Alpha and gamma adaptin binding prote
  Pfam annotation: Domain name=MMR_HSR1; Domain location=9-122; Score= -9.6; E_value=0.0077; Accession=PF01926.15; Description=GTPase of unknown function
  Pfam annotation: Domain name=Miro; Domain location=10-122; Score=7.5; E_value=0.0021; Accession=PF08477.5; Description=Miro-like protein
  Pfam annotation: Domain name=Ras; Domain location=11-204; Score= -81.4; E_value=0.0035; Accession=PF00071.14; Description=Ras family
  Pfam module annotation: Pfam domain module=Adaptin_binding::MMR _HSR1::Miro::Ras; Domain location=51-359::9-122::10-122::11-204
MEGSLEARPGVLLVGAPGVGKRTILSRLLAAEIPDSHDLSSGVLCQGWTIDTKYYSADLSIWTANLGEEFSLGSLPHLDQLAALVMVFDMSDESSLLTLQSWAANVDMQRFEVLLCIGNKADLVPDHGAHVEYRRRMQRLGESSSDPHPEYLDFGINESEGCGLLSVEEPCIEIRNSTSQWCIDQNIEYIEACASNTDFDKCLSVDGDSQGLERLFGALSAHMWPGMILKSGNRITAPSLVEKEESSDDESNYDFEYEVLSHGSDDQWEFVGETSTSRSFERSNEANGTQEHTHQVVNASADSSKPNALPSHAPTETAEENTVTQSNKAGDSDHVDRTTADSADDHQGDAPEANNLFDDEHY

SEQ ID NO: 78024 - protein, 77 aa, Setaria italica
  Transcript Sequence Number=SeqID_12050
  Subcellular localization annotation: CTP_CleavageSite=21; ConfidenceScore=5.16e-01
GSSAPLLYLPLILNPTSHLVKRNRKSNYRSVLIRIFLLNRTVTKFVLHKGFHHSSLKNTTCIKPNRPYNVLPWIANI

SEQ ID NO: 78025 - protein, 1003 aa, Setaria italica
  misc_feature (35)..(35): Xaa can be any naturally occurring amino acid
  misc_feature (124)..(124): Xaa can be any naturally occurring amino acid
  Transcript Sequence Number=SeqID_12051
  Gene Ontology: Mol. function=oxidoreductase activity, acting on the aldehyde or oxo group of donors, disulfide as acceptor; Cellular component=mitochondrial matrix; Biological process=metabolic process
  Homolog annotation: Hit_ID=Q9ZRQ2; Match level="QueryCoverage=95%, HitCoverage=93%, E-value=0.0, Identity=84%"; Hit description=2 -oxoglutarate dehydrogenase, E1 subunit
  Pfam annotation: Domain name=E1_dh; Domain location=223-554; Score =252.6; E_value=9.5e-73; Accession=PF00676.12; Description =Dehydrogenase E1 component
  Pfam annotation: Domain name=Transket_pyr; Domain location=617-833; Score=240.2; E_value=5.2e-69; Accession=PF02779.16; Description =Transketolase, pyrimidine binding dom
  Pfam module annotation: Pfam domain module=E1_dh::Transket_pyr; Domain location=223-554::617-833
  Subcellular localization annotation: CTP_CleavageSite=30; ConfidenceScore=5.54e-01
LRRSLATRAPTAAAATRCARGFHSTALRPRSAAPXPRAVPLSRLSDSFLDGTSSVYLEELQRAWEVDPSSVDESWDNFFRNFVAQASPSAGVSGQTIQESMQLLLLVRAYQVNGHMMAKLDPSXLDDRAVPEDLHLGLYGFTDADLDREFFLGVWRMSGFLSENRPVLTLREILSKLQQAYCGPIGYEYMHIPDRDKCNWLREKIETAKPRDYDKERRLVMLDRLIWSTQFENFLATKWATAKRFGLEGGETLIPGMKEMFDRAADLGVENIVIGMPHRGRLNVLGNVVRKPLSQIFSEFTGGTRPVEGEDGLYTGTGDVKYHLGTSYDRPTRGGKRIHLSLVANPSHLEAVDPVVIGKTRAKQFYSNDADRTKNMGILIHGDGSFAGQGVVYETLHLSALPNYTTGGTIHIVVNNQVAFTTDPRAGRSSQYCTDVAKALNAPIFHVNGDDLEAVVRVCELAAEWRQTFHSDVVVDLICYRRFGHNEIDEPSFTQPKMYQVIKNHPSSLKLYEQKLLGTGEVSKEDVQRIHDKVNRILNEEFTKSKDYVPNKRDWLSAYWTGFKSPEQISRVRNTGVKPEILKRVGQAITTLPENFRPHRAVKKIFELRAAMIESGEGIDWAVAEALAFATLIVEGNHVRLSGQDVERGTFSHRHAVLHDQDTGAKYCPLDHVAMNQSEELFTVSNSSLSEFAVLGFELGYSMENPNSLVLWEAQFGDFANGAQVMFDQFLSSGEAKWLRQTGLVVLLPHGYDGQGPEHSSSRLERFLQMSDDNPFVIPEMEPTLRKQIQECNWQVVNVTTPANYFHVLRRQIHREFRKPLIVTAPKNLLRHKDCKSNLSEFDDVEGHLGFDKQGTRFKRLIKDRNDHKQVEEGINRLILCSGKVYYELDEERKKSERSDIAICRVEQLCPFPYDLIQRELKRYPNAEIVWCQEEPMNMGAYSYISPRLYTAMKALGRGSFEDIKYVGRAPSAATATGFLSVHVQEQSELVKKALQPEPIKFP

SEQ ID NO: 78026 - protein, 84 aa, Setaria italica
  Transcript Sequence Number=SeqID_12052
  Subcellular localization annotation: CTP_CleavageSite=50; ConfidenceScore=5.10e-01
LASALLLRRCVSASSGGGALVRYGRPWPPWQIQPPVVTSRGRWLRRAPIAAAAVQLPPRRPERWLARDLPVPRMRGQREGRRGA

SEQ ID NO: 78027 - protein, 143 aa, Setaria italica
  Transcript Sequence Number=SeqID_12053
ILAPPQRHHCCRSIPGQICRGLTRGLLLVPPFSLVGMLLLRASSAPSLEWPPLGQGLPDPGRGGTGSPHSSLELAAGEPPAAVVARAAHGLCAAQREASPPPPLEPASHRRSSLCTHACRRSSRSRARCSFPTPPPLSLGATT

SEQ ID NO: 78028 - protein, 94 aa, Setaria italica
  misc_feature (8)..(8): Xaa can be any naturally occurring amino acid
  misc_feature (82)..(82): Xaa can be any naturally occurring amino acid
  Transcript Sequence Number=SeqID_12054
  Gene Ontology: Mol. function=catalytic activity
  Homolog annotation: Hit_ID=Q10AR1; Match level="QueryCoverage=100%, HitCoverage=31%, E-value=1e-38, Identity=61%"; Hit description =Pentatricopeptide, putative, expressed
  Pfam annotation: Domain name=PPR; Domain location=40-74; Score=43.2; E_value=1e-09; Accession=PF01535.12; Description=PPR repeat
KLGCDSKXCTGNALINMYSKCGQIASARLAFDVMNLHDVTSWNSLIHGFAQHGDVNLTLEAFSEMCSSGCKPDDSTFLGVLXGCNHAGLVKEGE

SEQ ID NO: 78029 - protein, 80 aa, Setaria italica
  Transcript Sequence Number=SeqID_12055
  Subcellular localization annotation: CTP_CleavageSite=68; ConfidenceScore=5.29e-01
ITNKGGSFRAHLIQSYTSSIKFMCIGFQHVSTRSTSKWAEQVVIRNYTPSLVENGRLTRGKESYGRSRSTSEGSGFWYSN

SEQ ID NO: 78030 - protein, 100 aa, Setaria italica
  Transcript Sequence Number=SeqID_12056
  Gene Ontology: Mol. function=transporter activity; Cellular component= integral to membrane; Biological process=transport
  Homolog annotation: Hit_ID=Q66GI9; Match level="QueryCoverage=100%, HitCoverage=18%, E-value=8e-36, Identity=71%"; Hit description =Probable anion transporter 4, chloroplastic
SPIIASAWLTIAVGLKSFGHSGFLVNLQEIAPQYAGVLHGMSNTAGTFAAILGTVGAGFFVDRMGSFRGFLILTSLLYFSSALFWDIFATGERVDFDGTG

SEQ ID NO: 78031 - protein, 314 aa, Setaria italica
  Transcript Sequence Number=SeqID_12057
  Gene Ontology: Mol. function=nucleic acid binding; Cellular component= chloroplast; Biological process=RNA catabolic process
  Homolog annotation: Hit_ID=Q0JFN7; Match level="QueryCoverage=99%, HitCoverage=71%, E-value=1e-170, Identity=90%"; Hit description=DEAD- box ATP-dependent RNA helicase 58, chloroplastic
  Pfam annotation: Domain name=DEAD; Domain location=1-108; Score= -37.4; E_value=0.021; Accession=PF00270.21; Description=DEADDEAH box helicase
  Pfam annotation: Domain name=Helicase_C; Domain location=194-269; Score=51.1; E_value=4.3e-12; Accession=PF00271.23; Description =Helicase conserved C-terminal domain
  Pfam module annotation: Pfam domain module=DEAD::Helicase_C; Domain location=1-108::194-269
TKVARLLAAKACTVMALLDGGMLKRQKSWVKAEPPAIIVATVPSLCQMVERRAFSLQSMRVLVIDEVDFIFGSSKQVSSLRKILTSYSAASSRQTIFASASIPQHNRFLHDCVQHKWTKSDVVHVHVNPVQPMPSHLCHKYVICTKKERLHVLLSLLERDAPKSAIIFVAEQSERSKKAGNPPSTAVVIEFLRNSYKGSLDVLLLEEDMNFNARAASFSEVMGRGFMLVSTDIASRGFDLPQTSHIYNFDLPKTATDYLHRAGRTGREPFSRLECSVTTLITEDEHFVLQRFQNELKFHCEELPLESMFTFNSS

SEQ ID NO: 78032 - protein, 81 aa, Setaria italica
  Transcript Sequence Number=SeqID_12058
  Gene Ontology: Mol. function=signal transducer activity; Biological process=response to light stimulus
  Homolog annotation: Hit_ID=B6UC07; Match level="QueryCoverage=98%, HitCoverage=13%, E-value=5e-15, Identity=59%"; Hit description =Transposon protein Mutator sub-class
  Subcellular localization annotation: CTP_CleavageSite=68; ConfidenceScore=5.19e-01
MELLRLKMRLRDPSAPLPPTGAAPPPSGRHSMPKKPGAGGGFMNNVSKKLGKLNPFVRHDAMGVPKVRTKPPKDRRHSIGW

SEQ ID NO: 78033 - protein, 59 aa, Setaria italica
  Transcript Sequence Number=SeqID_12059
MRSSIATYRESLSRLAVEVDDAAADEVPVPSAPADARGGDLSATPPSSGKADRTVTTRP

SEQ ID NO: 78034 - protein, 617 aa, Setaria italica
  misc_feature (328)..(328): Xaa can be any naturally occurring amino acid
  misc_feature (420)..(420): Xaa can be any naturally occurring amino acid
  misc_feature (604)..(604): Xaa can be any naturally occurring amino acid
  Transcript Sequence Number=SeqID_12060
  Gene Ontology: Mol. function=DNA ligase (ATP) activity; Cellular component=nucleus; Biological process=response to DNA damage stimulus
  Homolog annotation: Hit_ID=Q7XD67; Match level="QueryCoverage=98%, HitCoverage=74%, E-value=0.0, Identity=87%"; Hit description=DNA ligase
  Pfam annotation: Domain name=DNA_ligase_A_C; Domain location=474-539; Score=89.7; E_value=1e-23; Accession=PF04679.7; Description=ATP dependent DNA ligase C terminal region
  Pfam annotation: Domain name=DNA_ligase_A_M; Domain location=241-449; Score=275.3; E_value=1.4e-79; Accession=PF01068.13; Description=ATP dependent DNA ligase domain
  Pfam annotation: Domain name=DNA_ligase_A_N; Domain location=1-177; Score=283.7; E_value=4e-82; Accession=PF04675.6; Description=DNA ligase N terminus
  Pfam module annotation: Pfam domain module=DNA_ligase_A_C::DNA_ligase_ A_M::DNA_ligase_A_N; Domain location=474-539::241-449::1-177
FLFLARALDLISNESGRIVITEILSNVFRTVMVTTPDDLLATVYLSANRIAPPHEGIELGIGDASVIRALAEAYGRKEEHVKKDLKELGDLGLVAKASRSSQKMMFKPKPLTISRVLSTFRTIAKESGKDSQDKKRNHIKGLLVAATDCEPQYITRLLQSKMRIGLAEKTVQMALGQAAVYSDKKSSPPEVQSPFEEAAKIIKQVYSVLPIYDKIVPALLEAGVWKLPETCKFSIGVPVGPMLAKATKSVSEIIDKFQGLEYTCEYKYDGERAQIHCMEDGSVEIYSRNAERNTGKYPDVVDAVSRFRKPTVKSFVLDCEIVAYDRRXKKKILPFQILSTRARKGVTVNDIKVSVCTFGFDILYMNGKPLLQEQLKIRREHLYNSFEEVPGVFQLATAITSNDLEEIQKFLDTAVNSSFXSCEGLIIKTLDKDATYEPAKRSNNWLKLKKDYMDSIGDSLDLVPIAAFYGRGKRTGVFGSFLLACYDEQNEEYQTICNIGTGFSEQQLEERSSSLRSKVIEKPKAYYRFADTMDPDVWFEPSEVWEVKAADLSISPVHRAANGIVDPNKGISLRFPRLLRLRDDKSPEQATTSEQVADMYRAQXINHGYNQEDEDDD

SEQ ID NO: 78035 - protein, 95 aa, Setaria italica
  misc_feature (76)..(76): Xaa can be any naturally occurring amino acid
  Transcript Sequence Number=SeqID_12061
  Gene Ontology: Mol. function=protein binding
MWCQSCKEEYEEEDAGTCKECYEEASETEEELKREIDDLRSRLHFLRLPSPTLDAASAPHSDLLLHAIPSCSSSGXGGDGDAARVPDTPAVPAIA

SEQ ID NO: 78036 - protein, 91 aa, Setaria italica
  Transcript Sequence Number=SeqID_12062
  Homolog annotation: Hit_ID=B9SAF5; Match level="QueryCoverage=100%, HitCoverage=18%, E-value=1e-18, Identity=53%"; Hit description =Transporter, putative
WDKVALLVVQNLGSAMADVVIDAMVAESVRSAGPQFAGDLQSLSWSSMAVGGIFGSLLGGYALSNLPIHAIYVVFSALPFFQLVSCMFVED

SEQ ID NO: 78037 - protein, 101 aa, Setaria italica
  Transcript Sequence Number=SeqID_12063
  Homolog annotation: Hit_ID=B9SB57; Match level="QueryCoverage=97%, HitCoverage=20%, E-value=9e-24, Identity=52%"; Hit description =Pentatricopeptide repeat-containing protein, putative
ADTLGRAGRVVEAVKMIEEMPFEPDEAMLGGALAACRVHGEMEAAEQVSKRLMDMSPGKSGYYMSLANIYSDAGRYSDAERIRDFMKEVKVSKLPGYSSVV

SEQ ID NO: 78038 - protein, 148 aa, Setaria italica
  Transcript Sequence Number=SeqID_12064
  Homolog annotation: Hit_ID=Q10G99; Match level="QueryCoverage=58%, HitCoverage=11%, E-value=5e-13, Identity=48%"; Hit description =Tesmin/TSO1-like CXC domain containing protein, expressed
  Pfam annotation: Domain name=CXC; Domain location=104-145; Score =69.2; E_value=1.5e-17; Accession=PF03638.7; Description=TesminTSO1 -like CXC domain
LLAVRRVSIAVRINCEWPGIGLHLNAVASNSSNNMPFTINPPLQPEHNSPTTIVSCSETGLYSSEVYTRIHDDHSSQKTMPNANESCQESHKKKRRKLQNGDGDSCRRCSCKKSKCLKLYCACFAAKVYCSGFCSCQGCLNNHTHEET

SEQ ID NO: 78039 - protein, 212 aa, Setaria italica
  Transcript Sequence Number=SeqID_12065
  Gene Ontology: Mol. function=binding
ETFGLALENFVYDWIINASYRVVSQVEYPSLVDLRGLLLDLVAQLLGAISRIRFSSVTERFFIELNTRRSDTPALRSETLSIINGMRYLKLGVKTEGGLNASVSFIAKANPLNRPPNKRKSELQHALCNMLSSILAPLAEGGKNHWPPLGVEPALSLWYDAVTRIRVQLMYWMDKQSKHVAVGFPLVTLLLCLGDANTFNSNFSQHMEILYK

SEQ ID NO: 78040 - protein, 88 aa, Setaria italica
  Transcript Sequence Number=SeqID_12066
IFNVISIIYNRTSGFPIRLPQCVNSQQIGFVVKWLHNKGLVKSETNPSTRNEKVEERKLTRAQNFICIRMLRPHSPPLVSQLLSQTNP

SEQ ID NO: 78041 - protein, 136 aa, Setaria italica
  Transcript Sequence Number=SeqID_12067
  Homolog annotation: Hit_ID=B9RS37; Match level="QueryCoverage=83%, HitCoverage=11%, E-value=9e-12, Identity=35%"; Hit description =Catalytic, putative
LSPVCLAFPCCVSQSDNVLVALNKARSSLFLIEFKSERISYKKVHVSDLVQDLSGTFKLQSLSNGVITLQTSSTVFLLKLKDTNGLEVVQRFDQPAAVSDALTIAEKDEAFAVVQHVGSQIEFIVKFRSDVRQIEK

SEQ ID NO: 78042 - protein, 357 aa, Setaria italica
  Transcript Sequence Number=SeqID_12068
  Gene Ontology: Mol. function=zinc ion binding; Cellular component =intracellular
  Homolog annotation: Hit_ID=Q2Z1Y7; Match level="QueryCoverage=57%, HitCoverage=57%, E-value=3e-60, Identity=54%"; Hit description=Pm27 protein
  Pfam annotation: Domain name=DUF1644; Domain location=48-212; Score =136.4; E_value=9.2e-38; Accession=PF07800.4; Description=Protein of unknown function (DUF1644)
MARSPRGRNLQARQRRSASSDVPLCSWKTKGTGKENDMSVTSEKNEWKGATCPVCLEHPHDAVLLLCTSHHKGCRPYMCGTNYRHSNCLEHFKEAYAKEKMALDVSAESAPGLPLSSNTQPASKQQCAMELACPLCRGEVKGWTVVEPARQYLNRKRRTCMHDGCPFVGSYKELCKHVKSKHPSAKPREVDPAVADEWKKFECETERQDAISTIRAMNPGAVIMGDYVLELNGGGSSHFPSDGDNFDLEERLNFFTSLDRTLNERIDLYDSSDGGLDEGFDFLASLFARGRRISTRDSFSRAYRRHRERPRRSTSSVDASDIQHDSVSTQRGRTGTVRAVGRTSRRMVAHTRPARGS

SEQ ID NO: 78043 - protein, 51 aa, Setaria italica
  Transcript Sequence Number=SeqID_12069
LGRNIIKLSITLLLSSQGDSTVNETIQHKQANLFKLGQILTLNFQQPYLEL

SEQ ID NO: 78044 - protein, 47 aa, Setaria italica
  Transcript Sequence Number=SeqID_12070
NFRPISVNGRWKWVTQLSTLLLQPQNHAIPGPSLILAVILCEKKKKK

SEQ ID NO: 78045 - protein, 92 aa, Setaria italica
  Transcript Sequence Number=SeqID_12071
LLQLNSVVPLLMNTAQLPQRYELLRLVDYAWIFCYRIGNLQWTYDYCHYYNTAALLDKLKFSVKMETTLLTFLVGESGRSLINLAILLTKIF

SEQ ID NO: 78046 - protein, 388 aa, Setaria italica
  Transcript Sequence Number=SeqID_12072
  Gene Ontology: Mol. function=DNA binding; Cellular component=nucleus; Biological process=regulation of transcription
  Homolog annotation: Hit_ID=B2NIC5; Match level="QueryCoverage=100%, HitCoverage=83%, E-value=2e-66, Identity=42%"; Hit description =Transcription factor
  Pfam annotation: Domain name=NAM; Domain location=1-61; Score=20.5; E_ value=2.4e-09; Accession=PF02365.7; Description=No apical meristem (NAM) protein
YATGSRANRLTPNGFWKSTGNDRTIVLNTRIVGMKKTLVFHEGKAPRGDRTDWVMYEYRMEDNELDVGGFSKDAYVLCKIFKKSGPGPRIGEQYGATFNEEEWDNINTETAFPLMPCPSSEVLGATNEPPFQHTVASTSSVVSEPHVLTVASADGLPFEFSTSSITATDELQRHRLRHNGSEMVTVNCSSDALDACDPTEFGGITSEETDKWVRFLNDSTERDGGAREKLAGLPAISEAQAQALEMNSDYCYHELVRLVESGGVSTANDLSPGYVNTECLNTPMVSGLGAGDDYLEINDLFPLGETASFELPAPESQFPQYPLEQCPCNELNHPQYHDEGALAASLAAGDFLPPTSCSMPDISVDDVTCSTNLMWNDCSNSTVWYPFS

SEQ ID NO: 78047 - protein, 150 aa, Setaria italica
  misc_feature (19)..(19): Xaa can be any naturally occurring amino acid
  misc_feature (44)..(44): Xaa can be any naturally occurring amino acid
  Transcript Sequence Number=SeqID_12073
  Gene Ontology: Mol. function=protein binding
  Homolog annotation: Hit_ID=Q9LNB2; Match level="QueryCoverage=71%, HitCoverage=21%, E-value=6e-26, Identity=54%"; Hit description =F5O11.6
PYDYLTYRAVSTARAAVRXNLARALSTHLRSPASPGPRKETFLXNRAFHADFELDTDADVHTPDPAGRCEANLAAYHAVAVLTWEEVLLHGTKHYSEGLSRFCDAKMSEVVSNLGWARARAWPEPLLQAFFLAAKGVWGVRLLARSVHPP

SEQ ID NO: 78048 - protein, 65 aa, Setaria italica
  Transcript Sequence Number=SeqID_12074
SPSTRSVHILSKMTQRGDAREMKLFYERKRKANALDELLPVLQEVLKALLSGTGLENLVAGEDFT

SEQ ID NO: 78049 - protein, 129 aa, Setaria italica
  Transcript Sequence Number=SeqID_12075
  Gene Ontology: Mol. function=transferase activity, transferring glycosyl groups; Cellular component=integral to membrane; Biological process=1,3-beta-glucan biosynthetic process
  Homolog annotation: Hit_ID=Q9LUD7; Match level="QueryCoverage=100%, HitCoverage=7%, E-value=2e-20, Identity=44%"; Hit description =Putative callose synthase 8
HAFEKAHTMDRLSTGRGVRQFKTALLQRLEQDERSTKSKMTQRGDAREMKLFYERKRKANALDELLPVLQEVLKALLSGTGLENLVAGEDFTDKSGLLRYNILPLHPKFSQRPIMLLPEIKVAVSAVFN

SEQ ID NO: 78050 - protein, 975 aa, Setaria italica
  Transcript Sequence Number=SeqID_12076
  Gene Ontology: Mol. function=metal ion binding
  Homolog annotation: Hit_ID=Q25AI3; Match level="QueryCoverage=99%, HitCoverage=73%, E-value=0.0, Identity=81%"; Hit description =H0702G05.10 protein
  Pfam annotation: Domain name=C1_3; Domain location=376-405; Score =10.2; E_value=0.037; Accession=PF07649.4; Description=C1-like domain
  Pfam annotation: Domain name=Helicase_C; Domain location=474-580; Score=-3.0; E_value=0.083; Accession=PF00271.23; Description =Helicase conserved C-terminal domain
  Pfam annotation: Domain name=PHD; Domain location=377-425; Score =32.2; E_value=2.1e-06; Accession=PF00628.21; Description=PHD-finger
  Pfam module annotation: Pfam domain module=C1_3::Helicase_C::PHD; Domain location=376-405::474-580::377-425
CRRDLDDVGAKCVEVHALNKLPYSKLDSKAIGITEGVVFVTYSSLIASSEKGLSRLQQLVQWCGSDFDGLLVFDECHKAKNLIPEAGSQPTRTGKAVLEIQELLPQARVVYCSATGASEPRNLGYMVRLGLWGDGTSFENFHQFLGALEKGGVGALELVAMDMKARGMYVCRTLSYKGADFDVLEAPLEERMMNMYKKAAGLWVELRVELLSAIEYYAEDKGNSAQIWRLYWASHQRFFRHMCMSAKVPAVVRLAKEALAEEKCVVIGLQSTGEARTEEAIAKYGVELEDFVSGPRELLLKLVEDHYPLPPKPDCFQQDEEKVMEFQRKRHYGPDVSLKGRVSKLGKLEDVSDDGSDGHPPPESDHESTDSDEEFYTCQICNTEEEKNLLLYCSVCAARVHPGCLTPPWTETLTDDWSCYSCKEKVENYLKKRDAYLTELSKRYDAAVERKSKILDIIRSLDFPNNPLDDIIDQLGGPDNVAEITGRRGMLIRASDGKGVTYQARNTKEVALDMINMHEKQQFMNGEKNIAIISEAGSAGVSLHADRRAKNQRRRVHITLELPWSADRAIQQFGRTHRSNQTSAPEYRLLFTNLGGEKRFASIVAKRLESLGALTQGDRRAGPSLSAFNYDSNYGKKALTMMYRGIMEQDAFPVVPLGCSENQSTLEEFITKAKAALVSVGIIRDPVMCNGKNGGKLTGRILDSDMHDVARFLNRILGLFPDIQNRLFDLFTSILDLVIQNARTEGQLDSGIVDIKAKSVEMKESPKTVHVDTLSGATTILYAFTIDRGVSFELANAILEERLKDEAGSSSDGFYESRKEWMGRRHFLLAFEGSTEGMYRVIRPAVGEASREMPLVELKSKYRKVSSVDRIGKGWQEEYDASSKQCMHGPKCKLGSHCTVGRRLQEINILGGLILPVWGVVEKALAKQVRQIHKRIRVVRLETTNDNRRFVGLIIPNSAVESVLKGLQWVQDIDD

SEQ ID NO: 78051 - protein, 129 aa, Setaria italica
  Transcript Sequence Number=SeqID_12077
  Gene Ontology: Mol. function=protein tyrosine kinase activity; Biological process=protein amino acid phosphorylation
  Homolog annotation: Hit_ID=Q2HVC0; Match level="QueryCoverage=99%, HitCoverage=15%, E-value=5e-35, Identity=55%"; Hit description =Protein kinase
LLPETTQLQPSQVWTLIKIQQLLNDPPMLSHWRHSTDFCGGAGGFMGPTGSAAVLCYGDTVTQLHIAGAPGSPPLPRNFSVGALVTTLSRLPDLKVLTLSSVGLWGPLPGKLGRLAALEIVNVSGNYLY

SEQ ID NO: 78052 - protein, 895 aa, Setaria italica
  misc_feature (97)..(97): Xaa can be any naturally occurring amino acid
  Transcript Sequence Number=SeqID_12078
  Gene Ontology: Cellular component=integral to membrane
  Homolog annotation: Hit_ID=UPI000060EA85; Match level="QueryCoverage =43%, HitCoverage=15%, E-value=5e-19, Identity=25%"; Hit description =Spatacsin (Spastic paraplegia 11 protein) (Colorectal carcinoma- associated protein).
KDTDIYDWNDFMDDACLLTSLEKDGQWEQARTWARQLESSDIAWESTLDHVTESQAEAMVAEWKEFLWDIPQERAALWGHCQSLFMRYSLPPLKAGXIFLKHAEAVGKEIPARELHEILLLSLQWLSGTMTKSSPVYPLHLLRDIETRVWLLAVESESQSKADGEFATPAVAHNIAVGNGTSIIEQTADVITKIDSNMGSPHMKATERNGIRDNLSCQHAQLFESNSEASSTTINNTRGKRRVKTNLPLRRGVNDNFESRTSDLDNNSNNFQSSKIGEQARNILSEEEFAKMEESLSGWEQNVRPVDMEKAVLSLLEFGQITAAKQLQQKLSPSYIPEELVLVDVALKIANNSSIGISLSCFDTEALSILQSLGVASSSDMIDPLQVMEKLAVKCGEGRGRALIRRIIAVIRTAKLLGLPFSEAFEKQPIEILQLLSLKAQDSFDEAKFLVETHIMPASSIARILADSFLKGLLAAHRGGYLDSQKEEGPAPLLWRSSDFLKWAKLCPSEPEIGHALMRLVMTGHEVPHACEVELLILSHHFYMSSSCLDGVDVLVTFAANRVDSYVLEGDFPCLARLITGVSNFHSLSFILSILVENGQLELLLQKYSATDTATGTPASVRGFRMAVITSLKQFNPNDDDALSMVYRHFDMKHEAASLLELRAEQYMNSWLSRYDKERRNDELLEAMHHLVETAEVLSTIDAGQRTHRACARASLLSLQIRIPDLLWIGLSETNARRIFVEQSRFQEALIVAEAYNINQPMEWAPVFWNQMLKPDLIEQFVAEFVSVLPLQPPMLLELARFYRAEVAARGEQSHFSVWLSPGGLPAEWVKHLGRSFRSLLRRTRDMRLRLQLAALATGFVDVLDICNKVLDKVPENAGPLILRKGHGGAYLPLM

SEQ ID NO: 78053 - protein, 61 aa, Setaria italica
  Transcript Sequence Number=SeqID_12079
  Subcellular localization annotation: CTP_CleavageSite=40; ConfidenceScore=5.24e-01
LKLSSTSSLTTGWLQFSVFPGSNRTIYKEQTQALLVVRFRANLQNSKIWPPRTRVLGQHDI

SEQ ID NO: 78054 - protein, 90 aa, Setaria italica
  misc_feature (32)..(32): Xaa can be any naturally occurring amino acid
  misc_feature (43)..(43): Xaa can be any naturally occurring amino acid
  Transcript Sequence Number=SeqID_12080
  Gene Ontology: Mol. function=hydrolase activity, hydrolyzing O -glycosyl compounds; Biological process=carbohydrate metabolic process
  Homolog annotation: Hit_ID=Q84UE5; Match level="QueryCoverage=84%, HitCoverage=10%, E-value=2e-34, Identity=89%"; Hit description =Isoamylase-type starch debranching enzyme ISO3
KEIAKDSILSRCKIIAEPWDCGGLYLVGRFPXNWDRWVVIGNXQYRDDIRRFIKGDPGMKGVFATRVSGSADLYQVLLCYFFTGLLFSLC

SEQ ID NO: 78055 - protein, 386 aa, Setaria italica
  misc_feature (308)..(308): Xaa can be any naturally occurring amino acid
  Transcript Sequence Number=SeqID_12081
  Gene Ontology: Mol. function=hydrolase activity, hydrolyzing O -glycosyl compounds; Cellular component=chloroplast; Biological process=carbohydrate metabolic process
  Homolog annotation: Hit_ID=Q84UE5; Match level="QueryCoverage=100%, HitCoverage=55%, E-value=0.0, Identity=94%"; Hit description =Isoamylase-type starch debranching enzyme ISO3
DLNNNAELLNFSGCGNTLNCNHPVVKELVLDSLRHWVKEYHIDGFRFDLASVLCRGPDGSPLDAPPLIKEIAKDSILSRCKIIAEPWDCGGLYLVGRFPNWDRWAEWNGQYRDDIRRFIKGDPGMKGVFATRVSGSADLYQVNNRKPYHGVNFIIAHDGFTLCDLVSYNSKHNDANGESGRDGCNDNYSWNCGVEGETDDLNVLSLRSRQMKNFHVALMISQGTPMMLMGDEYGHTRYGNNNSYGHDTHINNFQWGQLEERKDGHFRFFSEMIKFRHNHPILRRDRFLSKNDVTWHEDCWENQESKFXLAFTIHDHNSGGDIYLAFNAHEYFVDAVIPPPPHHKSWSRVVDTNLESPNDIIPEGVPLTSSRYRIAPYSSILLKAKP

SEQ ID NO: 78056 - protein, 81 aa, Setaria italica
  Transcript Sequence Number=SeqID_12082
PGTPWRTATAERHCARATGQAEVLHCRGGIPRRRSERLFQSGVLFLATIAGSRLAGGWTCRGTLQPRVDGISFRVYLVADD

SEQ ID NO: 78057 - protein, 278 aa, Setaria italica
  Transcript Sequence Number=SeqID_12083
  Gene Ontology: Mol. function=metalloendopeptidase activity; Cellular component=integral to membrane; Biological process=proteolysis
  Homolog annotation: Hit_ID=B9SUJ7; Match level="QueryCoverage=100%, HitCoverage=61%, E-value=6e-78, Identity=55%"; Hit description =Protease ecfE, putative
  Pfam annotation: Domain name=Peptidase_M50; Domain location=1-267; Score=24.5; E_value=8.9e-06; Accession=PF02163.14; Description =Peptidase family M50
PVPDRLLVVSAGVAANLAFAFLIVYAQALTVGVPVQAQLPGVLVPEVLPGSSAARAGLLPGDIILAVPGAAPDPSVPVLVDLIKASPSKKVPITVSRTAPGAVDRQSVELTVVPDTSADGTGRIGVQLAPNFRVTRVRPQNLADATVLAVREFTLLTGTVFDGLRQTLLNFSQSAEKVSGPVAIIAVGAEVARSSADGLFQFAAVINLNLAAINLLPLPALDGGTLALILLEAARGGRKIPREVEQGIMSSGILVVLMIGMFLIVRDTLNLDFIKEIL

SEQ ID NO: 78058 - protein, 41 aa, Setaria italica
  Transcript Sequence Number=SeqID_12084
  Homolog annotation: Hit_ID=B6T8I4; Match level="QueryCoverage=100%, HitCoverage=13%, E-value=5e-12, Identity=92%"; Hit description=Pre -mRNA-splicing factor ISY1
DEKEIERMVVERKKKELLSKYASDTLQVEQEEAKEMLNVRR

SEQ ID NO: 78059 - protein, 65 aa, Setaria italica
  misc_feature (35)..(35): Xaa can be any naturally occurring amino acid
  Transcript Sequence Number=SeqID_12085
  Subcellular localization annotation: CTP_CleavageSite=40; ConfidenceScore=5.28e-01
MEAAAAALHLLHCGGFGRVAHLPALPGRLRRRGRXLHCVRAVATEPKPSTTSSSSRPRTRNDLSS

SEQ ID NO: 78060 - protein, 205 aa, Setaria italica
  misc_feature (20)..(20): Xaa can be any naturally occurring amino acid
  misc_feature (56)..(56): Xaa can be any naturally occurring amino acid
  misc_feature (74)..(74): Xaa can be any naturally occurring amino acid
  misc_feature (110)..(110): Xaa can be any naturally occurring amino acid
  Transcript Sequence Number=SeqID_12086
  Gene Ontology: Mol. function=transporter activity; Cellular component= membrane; Biological process=oligopeptide transport
  Homolog annotation: Hit_ID=Q7X619; Match level="QueryCoverage=100%, HitCoverage=33%, E-value=2e-47, Identity=56%"; Hit description =P0076O17.8 protein
AQLQTFSVQQGSIMDTRLAXGLLLPSPIPPASLQAIPYAMLLALVPTYELLLVPCXRRLTGTRSGITPLQRIGXGLCVVALSMAAAALVERRRRDASVSGGGRLSVLWLXLPQFLVFGVSELFTNVGLMEFFYKQAAAGTMQAFFMALFYCSFSFGFFLSSVLVSLVNRATARGGRRGWLGDNDLDKDRLDLFYWVLAGLSVLNF

SEQ ID NO: 78061 - protein, 238 aa, Setaria italica
  Transcript Sequence Number=SeqID_12087
  Gene Ontology: Mol. function=hydrolase activity
  Homolog annotation: Hit_ID=B6TJ32; Match level="QueryCoverage=100%, HitCoverage=72%, E-value=8e-65, Identity=51%"; Hit description =Catalytic/ hydrolase
MVNFIEAQKPLLSRLMKMAGLRPIEIELEPGTTMHIWAPKHHVGKKGTTISPLEPTSAATAAKKSKSSKKRSPESKPNVVLIHGFAAEGNVTWQFNFGVLVSRYNLYIPDLMFFGGSSTASADRSPDFQAGCVAAALARLGVARCDVVGFSYGGMVAFKLAEARPDLVRSLCVSGSVVAMTDAVNREAMERLGAGSSAELLMPETLKGLKALLSISMYKKMWFPDRFYKDYLKVMFTN

SEQ ID NO: 78062 - protein, 56 aa, Setaria italica
  Transcript Sequence Number=SeqID_12088
  Gene Ontology: Mol. function=enzyme inhibitor activity
  Homolog annotation: Hit_ID=B6T292; Match level="QueryCoverage=100%, HitCoverage=26%, E-value=2e-20, Identity=91%"; Hit description =Ripening-related protein
TWCSAALTDENTCLDGLPGGRGVDAGTRAAIRGKVVEVAQVTSNALALVNKVGPGY

SEQ ID NO: 78063 - protein, 72 aa, Setaria italica
  misc_feature (21)..(21): Xaa can be any naturally occurring amino acid
  misc_feature (25)..(25): Xaa can be any naturally occurring amino acid
  Transcript Sequence Number=SeqID_12089
  Gene Ontology: Mol. function=structural constituent of ribosome; Cellular component=ribonucleoprotein complex; Biological process =translation
  Homolog annotation: Hit_ID=B6THG9; Match level="QueryCoverage=84%, HitCoverage=19%, E-value=8e-24, Identity=90%"; Hit description=60S ribosomal protein L5-1
LLARRVLKIRDLDQEYEGNVXATGXEDFSVEPADERRPFRALLDVGLVRTTTGNRVFGALKVYCCELVCLSI

SEQ ID NO: 78064 - protein, 200 aa, Setaria italica
  misc_feature (182)..(182): Xaa can be any naturally occurring amino acid
  Transcript Sequence Number=SeqID_12090
  Gene Ontology: Mol. function=structural constituent of ribosome; Cellular component=ribonucleoprotein complex; Biological process =translation
  Homolog annotation: Hit_ID=B6THG9; Match level="QueryCoverage=97%, HitCoverage=63%, E-value=9e-89, Identity=82%"; Hit description=60S ribosomal protein L5-1
  Pfam annotation: Domain name=Ribosomal_L18p; Domain location=2-95; Score=62.3; E_value=1.8e-15; Accession=PF00861.14; Description =Ribosomal L18pL5e family
QQVPYHPQYGLEVGLTNYAAAYCTGLLLARRVLKIPDLDQEYEGNVEATGEDFSVEPADERRPFRALLDVGLVRTTTGNRVFGALKGALDGGLDIPHSDKRFAGFKKDEKNLDAEIHRKYIYGGHVADYMRTLAEEEPEKYQAHFSEYIKKGIEADDMEALYKKVHAAIRGEPTMAKINLSXPPKEHKRYNPKKLTYEQR

SEQ ID NO: 78065 - protein, 199 aa, Setaria italica
  Transcript Sequence Number=SeqID_12091
  Gene Ontology: Mol. function=structural constituent of ribosome; Cellular component=ribonucleoprotein complex; Biological process =translation
  Homolog annotation: Hit_ID=B6THG9; Match level="QueryCoverage=97%, HitCoverage=64%, E-value=2e-86, Identity=81%"; Hit description=60S ribosomal protein L5-1
  Pfam annotation: Domain name=Ribosomal_L18p; Domain location=27-173; Score=250.7; E_value=3.6e-72; Accession=PF00861.14; Description =Ribosomal L18pL5e family
MGGFVKTQKTNAYFKRFQVKFKRRRAGKTDYRARIRLINQDKNKYNTPKYRFVVRFTNKDITAQIVSASIAGDMVLAAAYSHELPRYGLEVGLTNYAAAYCTGLLLARRVLKIRDLDQEYEGNVEATGEDFSVEPADERRPFRALLDVGLVRTTTGNRVFGALKGALDGGLDIPHSDKRFAGFKKDEKNLDAEIPTVKY

SEQ ID NO: 78066 - protein, 304 aa, Setaria italica
  misc_feature (166)..(166): Xaa can be any naturally occurring amino acid
  Transcript Sequence Number=SeqID_12092
  Gene Ontology: Mol. function=structural constituent of ribosome; Cellular component=ribonucleoprotein complex; Biological process =translation
  Homolog annotation: Hit_ID=B6THG9; Match level="QueryCoverage=97%, HitCoverage=97%, E-value=1e-141, Identity=84%"; Hit description=60S ribosomal protein L5-1
  Pfam annotation: Domain name=Ribosomal_L18p; Domain location=27-174; Score=240.4; E_value=4.3e-69; Accession=PF00861.14; Description =Ribosomal L18pL5e family
MGGFVKTQKTNAYFKRFQVKFKRRRAGKTDYRARIRLINQDKNKYNTPKYRFVVRFTNKDITAQIVSASIAGDMVLAAAYSHELPRYGLEVGLTNYAAAYCTGLLLARRVLKIRDLDQEYEGNVEATGEDFSVEPADERRPFRALLDVGLVRTTTGNRVFGALKGXALDGGLDIPHSDKRFAGFKKDEKNLDAEIHRKYIYGGHVADYMRTLAEEEPEKYQAHFSEYIKKGIEADDMEALYKKVHAAIRGEPTMAKITKQPPKEHKRYNPKKLTYEQRKASLVERLNALNSSGGADDDDDEDDE

SEQ ID NO: 78067 - protein, 233 aa, Setaria italica
  Transcript Sequence Number=SeqID_12093
  Gene Ontology: Mol. function=RNA binding; Cellular component =cytoplasm; Biological process=multicellular organismal development
  Homolog annotation: Hit_ID=B9T521; Match level="QueryCoverage=100%, HitCoverage=85%, E-value=7e-91, Identity=71%"; Hit description =Nucleic acid binding protein, putative (Fragment)
  Subcellular localization annotation: CTP_CleavageSite=44; ConfidenceScore=5.15e-01
VPICNKLLSQEIMRVSSIVHNHGFGDFDRHRFRSPSPMSSPNPRSNVPGNGFSPWSGLQERLGFPQGTSMDWQGAPPSPSSHVVKKILRLEVPVDSYPNFNFVGRILGPRGNSLKRVEASTGCRVFIRGKGSIKDPGKEDKLRGKPGYEHLSDPLHILIEAEFPANIIDARLRHAQEIIEELLKPVDESQDFYKRQQLRELAMLNSTLREDSPHPGSVSPFSNGGMKRAKTGQ

SEQ ID NO: 78068 - protein, 61 aa, Setaria italica
  Transcript Sequence Number=SeqID_12094
  Gene Ontology: Cellular component=mitochondrial matrix
  Homolog annotation: Hit_ID=B6TKL5; Match level="QueryCoverage=100%, HitCoverage=26%, E-value=2e-25, Identity=90%"; Hit description =Mitochondrial glycoprotein
QQYVGRQFSELDEEMQSAVRDYLEQRGVNDDLAAFLHAYMENKEHTELIRWLKNVEYHVKQ

SEQ ID NO: 78069 - protein, 229 aa, Setaria italica
  Transcript Sequence Number=SeqID_12095
  Gene Ontology: Mol. function=nucleotide binding; Cellular component =intrinsic to membrane; Biological process=defense response
  Homolog annotation: Hit_ID=Q9M5Y1; Match level="QueryCoverage=58%, HitCoverage=78%, E-value=3e-61, Identity=84%"; Hit description=NBS -LRR-like protein (Fragment)
  Pfam annotation: Domain name=NB-ARC; Domain location=68-229; Score= -56.9; E_value=8.4e-06; Accession=PF00931.14; Description=NB-ARC domain
QSKPKINKSDIPHIKDAVDNLHKISEDVHNALLLEKLDGINRSTQNTSTDTREAVENFTEAKVFSREEKNEIVDLICHHASSDQELFVLPIVGDGGIGKTTLARLVYHDPQVKGKFDIMIWIYVSANFDEVKLTQGILEQIPDCEYKNTKNLTVLQRCIKKYLTKRFLLVLDDMWEESEGRWDKLLAPLRCTQVKGNAILVTTRKLSVAIITSKKEAHINLDGMKEDVF

SEQ ID NO: 78070 - protein, 118 aa, Setaria italica
  Transcript Sequence Number=SeqID_12096
SSAKSEESFHDSDDRLALVLVDPQLVAQADGGSRTEANDTQAAELHPVSHEEAQQEEENNRLAIVLADHQPQPAAAEPKPHADVESVLLALRRVKEQLRYTIERRSELVVAHRELYGH

SEQ ID NO: 78071 - protein, 286 aa, Setaria italica
  misc_feature (227)..(227): Xaa can be any naturally occurring amino acid
  misc_feature (256)..(256): Xaa can be any naturally occurring amino acid
  Transcript Sequence Number=SeqID_12097
  Gene Ontology: Mol. function=calcium ion binding; Cellular component =oxygen evolving complex; Biological process=photosynthesis
  Homolog annotation: Hit_ID=B9SJN0; Match level="QueryCoverage=79%, HitCoverage=75%, E-value=6e-91, Identity=71%"; Hit description =Thylakoid lumenal 29.8 kDa protein, chloroplast, putative
  Pfam annotation: Domain name=PsbP; Domain location=50-286; Score= -52.4; E_value=0.067; Accession=PF01789.8; Description=PsbP
  Subcellular localization annotation: CTP_CleavageSite=34; ConfidenceScore=5.57e-01
APTSSRCTPPPQTAVAPSADKAVTVPRPAPLVAVASHRRELVLGAALGALLSRAPLPAQAREVVVGTYLPPAPSNPGFVFFRATPKDTPALRAGNVQPYEFVLPPTWKQTRVANILSGNYCQPKCAEPWVEVKFEDEKQGKVQVVASPLIRLTNKPNATIEDIGSPERLIASLGPFVTGNTFDPDELVDTSVEKIDGQTVIQLDRSIPSQYGTIPAQQLKYVSWFFXLMQYYSYVLETPLALTGSHNLAKATAKGXTVVLFVASANDKQWSSSEKVLKAIVDSFQV

SEQ ID NO: 78072 - protein, 157 aa, Setaria italica
  Transcript Sequence Number=SeqID_12098
  Gene Ontology: Mol. function=calcium ion binding; Cellular component =oxygen evolving complex; Biological process=photosynthesis
  Homolog annotation: Hit_ID=B9SJN0; Match level="QueryCoverage=98%, HitCoverage=59%, E-value=8e-73, Identity=83%"; Hit description =Thylakoid lumenal 29.8 kDa protein, chloroplast, putative
  Pfam annotation: Domain name=PsbP; Domain location=5-157; Score= -40.8; E_value=0.011; Accession=PF01789.8; Description=PsbP
ICKLLFHWWKQTRVANILSGNYCQPKCAEPWVEVKFEDEKQGKVQVVASPLIRLTNKPNATIEDIGSPERLIASLGPFVTGNTFDPDELVDTSVEKIDGQTYYSYVLETPLALTGSHNLAKATAKGNTVVLFVASANDKQWSSSEKVLKAIVDSFQV

SEQ ID NO: 78073 - protein, 148 aa, Setaria italica
  misc_feature (93)..(93): Xaa can be any naturally occurring amino acid
  misc_feature (114)..(114): Xaa can be any naturally occurring amino acid
  misc_feature (137)..(137): Xaa can be any naturally occurring amino acid
  misc_feature (144)..(144): Xaa can be any naturally occurring amino acid
  Transcript Sequence Number=SeqID_12099
  Gene Ontology: Mol. function=peptidyl-prolyl cis-trans isomerase activity; Cellular component=thylakoid lumen; Biological process =protein folding
  Homolog annotation: Hit_ID=B6U5I1; Match level="QueryCoverage=100%, HitCoverage=31%, E-value=4e-62, Identity=84%"; Hit description =Peptidyl-prolyl cis-trans isomerase
VQKPLEDITDSLKVAGVRALDSVERNVRQASRALNNGRDLILAGLAESKRANGEDLLNKLAVGLDELQRIVEDKNRDAVAPKQKELLQYVGTXDLPGTLHFCSVEEDMVDGFPXEIPEEYSNMPLLKGRAAVDMKVXKIKDNPXIEDC

SEQ ID NO: 78074 - protein, 340 aa, Setaria italica
  Transcript Sequence Number=SeqID_12100
  Gene Ontology: Mol. function=peptidyl-prolyl cis-trans isomerase activity; Cellular component=thylakoid lumen; Biological process =protein folding
  Homolog annotation: Hit_ID=B6U5I1; Match level="QueryCoverage=93%, HitCoverage=74%, E-value=1e-171, Identity=92%"; Hit description =Peptidyl-prolyl cis-trans isomerase
  Subcellular localization annotation: CTP_CleavageSite=30; ConfidenceScore=5.21e-01
MAAALASSRCCCSRPSLPPLPTRGRRAVARCALGGGEKRNNFSWKECAISVALSVGLITSAPAIGSPAYASPLEPVLPDVSVLISGPPIKDPGALLRYALPIDNKAIREVQKPLEDITDSLKVAGVRALDSVERNVRQASRALNNGRDLILAGLAESKRANGEDLLNKLAVGLDELQRIVEDKNRDAVAPKQKELLQYVGTVEEDMVDGFPFEIPEEYSNMPLLKGRAAVDMKVKIKDNPNIEDCVFRIVLDGYNAPVTAGNFIDLVERKFYDGMEIQRADGFVVQTGDPEGPAEGFIDPSTGKIRTVPLEIMVDGDKAPVYGETLEELGRYKAQTKLPF

SEQ ID NO: 78075 - protein, 161 aa, Setaria italica
  Transcript Sequence Number=SeqID_12101
  Gene Ontology: Mol. function=peptidyl-prolyl cis-trans isomerase activity; Cellular component=chloroplast; Biological process=protein folding
  Homolog annotation: Hit_ID=B6U5I1; Match level="QueryCoverage=100%, HitCoverage=37%, E-value=3e-88, Identity=98%"; Hit description =Peptidyl-prolyl cis-trans isomerase
LVERKFYDGMEIQRADGFVVQTGDPEGPAEGFIDPSTGKIRTVPLEIMVDGDKAPVYGETLEELGRYKAQTKLPFNAFGTMAMAREEFDDNSASSQVFWLLKESELTPSNANILDGRYAVFGYVTENEDYLADVKVGDVIESIQVISGLDNLVNPSYKIAG

SEQ ID NO: 78076 - protein, 262 aa, Setaria italica
  misc_feature (54)..(54): Xaa can be any naturally occurring amino acid
  misc_feature (181)..(181): Xaa can be any naturally occurring amino acid
  Transcript Sequence Number=SeqID_12102
  Gene Ontology: Mol. function=sequence-specific DNA binding; Cellular component=nucleus; Biological process=regulation of transcription
  Homolog annotation: Hit_ID=Q7XMG4; Match level="QueryCoverage=98%, HitCoverage=25%, E-value=3e-94, Identity=63%"; Hit description =OSJNBa0028I23.18 protein
  Pfam annotation: Domain name=SWIM; Domain location=171-218; Score =22.2; E_value=0.0014; Accession=PF04434.9; Description=SWIM zinc finger
INYLIKRDCDFMKEFKACINYYEEERELFTSWEVMINKYSLHGNVWLQKVFEEXEKWAGPYMKWTFSAGMKNTQLNERLHSDVGDYLRTDVDITLFMKHLQKVVDDRRYTELEIEFSSKLKLPDFKIRAPILIQASEAYTDMIFQLFQEEYEEFQSAYIVSRDESGPCREYIVAILDKERXHKVYGNPSEQTVLCSCRKFETLGFLCSHALKILDTMDIKYLPHRYILKRWTKYARCLTSQVDDRKVQEDTTLEFSNRYQYL

SEQ ID NO: 78077 - protein, 384 aa, Setaria italica
  Transcript Sequence Number=SeqID_12103
  Gene Ontology: Mol. function=binding; Cellular component=spindle microtubule; Biological process=cell division
  Homolog annotation: Hit_ID=Q69XV2; Match level="QueryCoverage=98%, HitCoverage=49%, E-value=0.0, Identity=83%"; Hit description =Putative HOBBIT
  Pfam annotation: Domain name=TPR_1; Domain location=157-190; Score =33.4; E_value=9.2e-07; Accession=PF00515.20; Description =Tetratricopeptide repeat
  Pfam annotation: Domain name=TPR_1; Domain location=191-224; Score =28.5; E_value=2.6e-05; Accession=PF00515.20; Description =Tetratricopeptide repeat
  Pfam annotation: Domain name=TPR_1; Domain location=225-258; Score =37.9; E_value=4e-08; Accession=PF00515.20; Description =Tetratricopeptide repeat
  Pfam annotation: Domain name=TPR_1; Domain location=259-292; Score =19.6; E_value=0.013; Accession=PF00515.20; Description =Tetratricopeptide repeat
  Pfam annotation: Domain name=TPR_1; Domain location=293-326; Score =10.4; E_value=0.33; Accession=PF00515.20; Description=Tetratricopepti de repeat
  Pfam annotation: Domain name=TPR_1; Domain location=327-360; Score =14.1; E_value=0.12; Accession=PF00515.20; Description=Tetratricopepti de repeat
  Pfam annotation: Domain name=TPR_1; Domain location=89-122; Score =4.9; E_value=1.5; Accession=PF00515.20; Description=Tetratricopeptide repeat
  Pfam annotation: Domain name=TPR_2; Domain location=157-190; Score =25.2; E_value=0.00026; Accession=PF07719.9; Description =Tetratricopeptide repeat
  Pfam annotation: Domain name=TPR_2; Domain location=191-224; Score =15.6; E_value=0.21; Accession=PF07719.9; Description=Tetratricopeptid e repeat
  Pfam annotation: Domain name=TPR_2; Domain location=225-258; Score =32.4; E_value=1.8e-06; Accession=PF07719.9; Description =Tetratricopeptide repeat
  Pfam annotation: Domain name=TPR_2; Domain location=259-292; Score =21.8; E_value=0.0028; Accession=PF07719.9; Description =Tetratricopeptide repeat
  Pfam annotation: Domain name=TPR_2; Domain location=293-326; Score =18.4; E_value=0.03; Accession=PF07719.9; Description=Tetratricopeptid e repeat
  Pfam annotation: Domain name=TPR_2; Domain location=327-360; Score =13.8; E_value=0.65; Accession=PF07719.9; Description=Tetratricopeptid e repeat
  Pfam annotation: Domain name=TPR_2; Domain location=89-122; Score =6.3; E_value=5.6; Accession=PF07719.9; Description=Tetratricopeptide repeat
  Pfam module annotation: Pfam domain module=TPR_1::TPR_1::TPR_1::TPR _1::TPR_1::TPR_1::TPR_1::TPR_2::TPR_2::TPR_2::TPR_2::TPR_2::TPR _2::TPR_2; Domain location=157-190::191-224::225-258::259-292::293 -326::327-360::89-122::...
  Pfam module annotation: Domain location=157-190::191-224::225 -258::259-292::293-326::327-360::89-122
GSRYEVIDEMWTDNMPATSSSVSTTDGRFFEQDKTERIMSQDSKVAVGIRELLGLLRTLGEGFRLSCLFKCQEALEVYRKLPEPQFNTGWVLCQVGKAYFELVDYLEADHYFELAHRLSPCTLDGMDIYSTVLYHLNAEMRLSYLAQELISIDRLSPQAWCAVGNCFALRKDHETALKNFQRAVQLDSRFAYAHTLCGHEYSALEDYENSIKFYRCALQVDERHYNAWYGLGVVYLRQEKFEFAEHHFRRAFQINPRSSVLMCYLGMALHSLKRNEEALEMMEKAIAADKKNPLPKYQKALILLGLQKYSEALEELERLKEIAPHESSMYALMGKIYKQLNILDKAVFCFGIALDLKPPAADLAIIKSAMEKVHLPDELMEDDL

SEQ ID NO: 78078 - protein, 304 aa, Setaria italica
  Transcript Sequence Number=SeqID_12104
  Gene Ontology: Mol. function=binding; Biological process=cell division
  Homolog annotation: Hit_ID=Q69XV2; Match level="QueryCoverage=96%, HitCoverage=38%, E-value=1e-131, Identity=78%"; Hit description =Putative HOBBIT
  Pfam annotation: Domain name=TPR_1; Domain location=12-45; Score =22.8; E_value=0.0014; Accession=PF00515.20; Description =Tetratricopeptide repeat
  Pfam annotation: Domain name=TPR_2; Domain location=12-45; Score =27.3; E_value=6.3e-05; Accession=PF07719.9; Description =Tetratricopeptide repeat
  Pfam module annotation: Pfam domain module=TPR_1::TPR_2; Domain location=12-45::12-45
HNETNIEVPSGATGHYLLGVIYRCTGRMSAAAEQFTQALTLDPLLWAAYEELCILGVAEDADGCFSEATALRLQQEHTSTSTLEKSNFANENRILSSSLPSSLGDIIPKQMKQLHANNTAEVPGYPHVRATALHVQNSTTSNVAQFDTPSPIATQTSSIVPPPLFRNVHAFQNTISGDVPAKQKANGANQPLRRKHLDEAKLKKVSGRLFNQSSDSLPRRSARLSRDATINSNSNISQFGGNGPDHSSGKLRVNSSTPSKLCSTAVRSVQVRKGKPRATENFDEGDYHFNVDDSSDYINVEKCG

SEQ ID NO: 78079 - protein, 136 aa, Setaria italica
  Transcript Sequence Number=SeqID_12105
  Gene Ontology: Mol. function=RNA binding
  Homolog annotation: Hit_ID=B9SDY1; Match level="QueryCoverage=65%, HitCoverage=8%, E-value=1e-23, Identity=59%"; Hit description =Pumilio, putative
MMSASAVAMRAEMGGGGGEGELEDELDALLSSGAGGQRRRPVDAGERERERELSMFRSGSAPPTIEGSLNAISGLLRGDAEAAVTAAPIPVAEALNGHGGLLSEEELRADPAYLSYYYSHGNLNPRLPPPVLSKED

SEQ ID NO: 78080 - protein, 238 aa, Setaria italica
  Transcript Sequence Number=SeqID_12106
  Gene Ontology: Mol. function=calcium ion binding; Cellular component =plasma membrane; Biological process=biological_process
  Homolog annotation: Hit_ID=B9RGH6; Match level="QueryCoverage=100%, HitCoverage=64%, E-value=3e-78, Identity=60%"; Hit description =Reticulocalbin-2, putative
  Pfam annotation: Domain name=efhand; Domain location=107-135; Score =13.5; E_value=0.72; Accession=PF00036.24; Description=EF hand
  Pfam annotation: Domain name=efhand; Domain location=154-182; Score =20.0; E_value=0.01; Accession=PF00036.24; Description=EF hand
  Pfam annotation: Domain name=efhand; Domain location=193-221; Score =12.2; E_value=1; Accession=PF00036.24; Description=EF hand
  Pfam annotation: Domain name=efhand; Domain location=68-96; Score =8.8; E_value=2.3; Accession=PF00036.24; Description=EF hand
  Pfam module annotation: Pfam domain module=efhand::efhand::efhand::efh and; Domain location=107-135::154-182::193-221::68-96
ADGAVTGDELAAWNLANARREVLHRTARELELHDRDRDGRLAFGEYERPSWAWRFDDHNSTNDGVGWWKEEHFSAADMDDDGFLNLTEFNDFLHPADTANPKLIHWLCKEEVRERDKDNDGKLNFQEFFSGLFYSIRHYDDEGITDDTGGSDAPAKKSFSHLDLDNDGLLSADELKPIIDNLHPSEHFYAKQQADYVISQADTDKDGQLSMKEMIENPYVFYNALFTENDYGFHDELR

SEQ ID NO: 78081 - protein, 241 aa, Setaria italica
  Transcript Sequence Number=SeqID_12107
  Gene Ontology: Cellular component=cytoplasm
  Homolog annotation: Hit_ID=B6SQF9; Match level="QueryCoverage=100%, HitCoverage=100%, E-value=1e-112, Identity=85%"; Hit description =Ngg1 interacting factor 3 like 1 binding protein 1 isoform 1
  Pfam annotation: Domain name=THOC7; Domain location=27-165; Score =176.8; E_value=6.1e-50; Accession=PF05615.5; Description=Tho complex subunit 7
MLAKGRKLAGRGEEMSAHYAFGPQEDDAIIKHRLLTRTTTTRGEPPLKKLQKKFMSFATEIEKDADNTSDCERLYKAFLQEINTFELPLLKSKTVVDANIREKESFNELQVEIERQTLQAQTDIDDLRKQFEQSKIERQHKEECEAIRKVISLQPPRSETERLIADLEKEIADLEAENVACLRTLELRKKQFALLLHVVEELQISIEDEQKSIADELRAIAEEQKMSIEESGGASDAMAVD

SEQ ID NO: 78082 - protein, 86 aa, Setaria italica
  Transcript Sequence Number=SeqID_12108
  Homolog annotation: Hit_ID=B6SZM1; Match level="QueryCoverage=94%, HitCoverage=49%, E-value=7e-17, Identity=60%"; Hit description =Wiscott-Aldrich syndrome, C-terminal
  Pfam annotation: Domain name=PBD; Domain location=32-73; Score=22.5; E_value=0.00037; Accession=PF00786.20; Description=P21-Rho-binding domain
TKDYNEGIKSLSLMFAGDGDDGEEEDEEREMVIGYPTDVQHVGHIGWDGHNKVSGAMGMVNAFSLPSSLSLRQLEMAMDQAAHASA

SEQ ID NO: 78083 - protein, 837 aa, Setaria italica
  misc_feature (84)..(84): Xaa can be any naturally occurring amino acid
  misc_feature (237)..(237): Xaa can be any naturally occurring amino acid
  misc_feature (336)..(336): Xaa can be any naturally occurring amino acid
  misc_feature (534)..(534): Xaa can be any naturally occurring amino acid
  Transcript Sequence Number=SeqID_12109
  Gene Ontology: Mol. function=hydrolase activity, hydrolyzing O -glycosyl compounds; Cellular component=chloroplast; Biological process=carbohydrate metabolic process
  Homolog annotation: Hit_ID=Q9M6P8; Match level="QueryCoverage=100%, HitCoverage=100%, E-value=0.0, Identity=83%"; Hit description=Seed starch branching enzyme
  Pfam annotation: Domain name=Alpha-amylase; Domain location=256-654; Score=-46.3; E_value=8.5e-07; Accession=PF00128.16; Description =Alpha amylase, catalytic domain
  Pfam annotation: Domain name=Alpha-amylase_C; Domain location=664 -767; Score=99.4; E_value=1.2e-26; Accession=PF02806.10; Description =Alpha amylase, C-terminal all-beta do
  Pfam annotation: Domain name=CBM_48; Domain location=131-214; Score =99.7; E_value=1e-26; Accession=PF02922.10; Description=Carbohydrate -binding module 48 (Isoam
  Pfam module annotation: Pfam domain module=Alpha-amylase::Alpha -amylase_C::CBM_48; Domain location=256-654::664-767::131-214
  Subcellular localization annotation: CTP_CleavageSite=39; ConfidenceScore=5.60e-01
MLCITSSSSSPVPLQPTRRPRAPSDRAAPPGIAGGGNVRLSVLSVQRDVRRSGPAKAKSKFATAATVQENKTMEATKDDVNHLXPNNNKLDPKLEKFKDHFSYRMKRYLEQKSSIEKNEGGLEEFSKGYLKFGINTNKDGTVYREWAPAAQEAQLVGDFNDWNGANHNMKKDKFGVWSIKIDHVKGEPAIPHNSRVKFRFKHGGVWVDRIPAWIRYATVDASKFGAPYDGVHWDPPXASERYVFMYPRPPKPDAPRIYEAHVGMSGEEPAVSTYREFADNVLPRIRANNYNTVQLMAVMEHSYYASFGYHVTNFFAVSSRSGTPEDLKYLVDKAHXLGLRVLMDVVHSHASNNVTDGLNGYDVGQNTHESYFHTGDRGYHKLWDSRLFNYANWEVLRFLLSNLRYWMHEFMFDGFRFDGVTSMLYHHHGINVGFTGNYKEYFSLDTDVDAVVYMMLANHLMHKILPEATVVAEDVSGMPVLCRPVDEGGVGFDYRLAMAIPDRWIDYLKNKDDSEWSMGEIAHTLTNRRYTEKXIAYAESHDQSIVGDKTIAFLLMDKEMYTGMSDLQPASPTIDRGIALQKMIHFITMALGGDGYLNFMGNEFGHPEWIDFPREGNNWSYDKCRRQWSLVDTDHLRYKYMNAFDQAMNALDEKFSFLSSSKQIVSDMNEEKKVIVFERGDLVFVFNFHPKKTYDGYKVGCDLPGKYRVALDSDAFVFGGHGRVGHDVDHFTSPEGVPGVPETNFNNRPNSFKVLSPPRTCVAYYRVDEEAEGLEGKAETASSPEVIEVDATPSTEGYGEAADRMATSGGKKYGSTEDASGKKGRKLGRQSSDKSTK

SEQ ID NO: 78084 - protein, 180 aa, Setaria italica
  misc_feature (41)..(41): Xaa can be any naturally occurring amino acid
  Transcript Sequence Number=SeqID_12110
  Gene Ontology: Mol. function=RNA binding
  Subcellular localization annotation: CTP_CleavageSite=58; ConfidenceScore=5.15e-01
PPAASDGAVGGKGKKKRRPLKPSFEEQALRRWSARAPSQRXSVPWEQPQQQSPSPPHRAGRESVGSGGQKTTDGGSSKTLRSIVEYFAGGSSGDDGEGGEREEKGAGNAAAVRAEAARDQEDGSHFRPSYLLGNKPVSAPWMHGEESSNDQWVSSSVAEGEEGVDMDDISDDELGLGRRR

SEQ ID NO: 78085 - protein, 90 aa, Setaria italica
  misc_feature (22)..(22): Xaa can be any naturally occurring amino acid
  Transcript Sequence Number=SeqID_12111
CGCDRRDSPARLRPRVASPPLXRGVSCPARFCFHSRPHVFLVWDALRHRHRDSCCHFFLPRRDSTFWQLTTLESYSYMSMFLKTNCISKL

SEQ ID NO: 78086 - protein, 181 aa, Setaria italica
  Transcript Sequence Number=SeqID_12112
  Homolog annotation: Hit_ID=Q93ZR6; Match level="QueryCoverage=76%, HitCoverage=29%, E-value=1e-20, Identity=37%"; Hit description=O -acyltransferase WSD1
MDAAAGTLRKRQLSVHTTGSNGTAANGVGIRRAGHAGEQEQGELVSPSARLVEDFYIVVVIGIATPVNLPVARAGIEAQLARYPRFRSIQVKDKSGQPRWEPTTVDVNDHIIYPKLDAAAVARDPDRAVEDYVATLSTLPMDETRPLWEFHVLDFPTSEAAATTAIRVHHSLGDGMSLLTL

SEQ ID NO: 78087 - protein, 206 aa, Setaria italica
  misc_feature (14)..(14): Xaa can be any naturally occurring amino acid
  Transcript Sequence Number=SeqID_12113
  Gene Ontology: Mol. function=protein binding; Cellular component =nucleus; Biological process=cell division
  Homolog annotation: Hit_ID=Q9XFH3; Match level="QueryCoverage=100%, HitCoverage=100%, E-value=1e-111, Identity=94%"; Hit description =Mitotic spindle checkpoint protein MAD2
  Pfam annotation: Domain name=HORMA; Domain location=10-199; Score =241.4; E_value=2.3e-69; Accession=PF02301.10; Description=HORMA domain
MASRTASKDIITLXAAIVSEFFGYAANSILYNRAVYPEESFTKVKNYGLTMLLTQDEGVKTFIASLTSQLSEWLEAGKLQRIVLVIMSKATNEVLERWNFNIVTDAEVVEKGAIKEKSDKEIMREIQAIMRQIASCITYLPCLDEPCVFDVLAYTDTDVDAPGTWVESDAKLISNPQMVKLHSFDTKIHKVDTLVSYKNDEWDDEE

SEQ ID NO: 78088 - protein, 37 aa, Setaria italica
  Transcript Sequence Number=SeqID_12114
  Homolog annotation: Hit_ID=Q7XR06; Match level="QueryCoverage=97%, HitCoverage=12%, E-value=9e-10, Identity=86%"; Hit description =Probable protein phosphatase 2C 45
FLLFLASDGLWDVVSNEEAVAMTRSIQDPEEAAKKLL

SEQ ID NO: 78089 - protein, 219 aa, Setaria italica
  misc_feature (99)..(99): Xaa can be any naturally occurring amino acid
  Transcript Sequence Number=SeqID_12115
  Gene Ontology: Mol. function=protein serine/threonine phosphatase activity; Cellular component=protein serine/threonine phosphatase complex; Biological process=protein amino acid dephosphorylation
  Homolog annotation: Hit_ID=Q7XR06; Match level="QueryCoverage=89%, HitCoverage=75%, E-value=3e-99, Identity=84%"; Hit description =Probable protein phosphatase 2C 45
  Pfam annotation: Domain name=PP2C; Domain location=28-217; Score =88.3; E_value=2.6e-23; Accession=PF00481.13; Description=Protein phosphatase 2C
MGYLSTVIGNPTDGSPVSGGGLSQNGKFSYGYASSPGKRASMEDFYETKIDCVDGQIVGLFGVFDGHGGAKVAEYVKENLFSHLLRHPKFISDTKVAIXCGSTASTAVLVGDRLFVANVGDSRAIICRGGNAVAVSKDHKPDQTDERQRIEDAGGFVMWAGTWRVGGVLAVSRAFGDKLLKQYVVVDPEIRVRNLRHFNYLFFHFILLPKCIICDRYSS

SEQ ID NO: 78090 - protein, 184 aa, Setaria italica
  Transcript Sequence Number=SeqID_12116
  Gene Ontology: Mol. function=allene-oxide cyclase activity; Cellular component=chloroplast
  Homolog annotation: Hit_ID=B6TQ59; Match level="QueryCoverage=100%, HitCoverage=77%, E-value=2e-98, Identity=92%"; Hit description =Allene oxide cyclase 4
  Pfam annotation: Domain name=Allene_ox_cyc; Domain location=5-182; Score=407.5; E_value=2.2e-119; Accession=PF06351.3; Description =Allene oxide cyclase
PAVAKDARPTKVQELYVYELNERDRESPAYLRLSAKQTENALGDLVPFTNKVYSGSLDKRLGITAGICILIQHVPERNGDRYEAIYSFYFGDYGHISVQGPYLTYEESYLAVTGGSGVFEGAYGQVKLNQIVFPFKIFYTFYLKGIPDLPRELLCTPVPPSPTVEATPAAKAGEPHACVKNFTN

SEQ ID NO: 78091 - protein, 90 aa, Setaria italica
  misc_feature (80)..(80): Xaa can be any naturally occurring amino acid
  Transcript Sequence Number=SeqID_12117
GGGGGRHGYTSLRDILSSPEYALTAGGSPAACGGVLGGGCGSCGDIHMIRHPLVKHAAYAYLQMTPSAREDPARRGRRWXGAPLCRLLLG

SEQ ID NO: 78092 - protein, 87 aa, Setaria italica
  Transcript Sequence Number=SeqID_12118
  Gene Ontology: Mol. function=cation transmembrane transporter activity; Cellular component=integral to membrane; Biological process=calcium ion transport
  Homolog annotation: Hit_ID=Q5KTQ9; Match level="QueryCoverage=93%, HitCoverage=18%, E-value=9e-25, Identity=67%"; Hit description =Vacuolar cation/proton exchanger 1c
MQVLSYFAFKNRIDITLGIALGSATQILLLVVPIILIVSWVNGIPMDLNLNLLETGSLVMTVFTTAFTLQDDKWHYLKGFNLTLCYV

SEQ ID NO: 78093 - protein, 109 aa, Setaria italica
  misc_feature (76)..(76): Xaa can be any naturally occurring amino acid
  Transcript Sequence Number=SeqID_12119
  Gene Ontology: Mol. function=aminoacyl-tRNA hydrolase activity; Cellular component=mitochondrion; Biological process=apoptosis
  Homolog annotation: Hit_ID=B4FSD3; Match level="QueryCoverage=100%, HitCoverage=44%, E-value=8e-46, Identity=83%"; Hit description =Peptidyl-tRNA hydrolase 2
  Pfam annotation: Domain name=PTH2; Domain location=46-109; Score =57.6; E_value=4.7e-14; Accession=PF01981.8; Description=Peptidyl -tRNA hydrolase PTH2
RTGLRLLFWARNVVTKSDSAREVERAQAQAAASPLEIENLAEIIEDFKMVLVVRNDLKMGKGKIAAQCSHATLGLXKKLQQRAPKSLRRWERCGQVKVVVKIESEEDML

SEQ ID NO: 78094 - protein, 73 aa, Setaria italica
  Transcript Sequence Number=SeqID_12120
RMAWLQPPKAPRATAAGAPPAPQAPLPPELRHGEAATVTQRRLQPEARAPDAAAGPAAVTTSSVCSGNGDRSQ

SEQ ID NO: 78095 - protein, 113 aa, Setaria italica
  Transcript Sequence Number=SeqID_12121
NPNKGFVVLATLRSSHFPETTAGGGSSASAQDPRDTAWSNSRARLIVDSGATRHAIGDISLLEGFVPYRPPLVATLADGSGVRILGIGHIQRGNFSIPNVSLVEGVRDGLIST

SEQ ID NO: 78096 - protein, 145 aa, Setaria italica
  Transcript Sequence Number=SeqID_12122
  Gene Ontology: Mol. function=oxidoreductase activity, acting on single donors with incorporation of molecular oxygen, incorporation of two atoms of oxygen; Cellular component=cytoplasm; Biological process=fatty acid biosynthetic process
  Homolog annotation: Hit_ID=A1XCI7; Match level="QueryCoverage=95%, HitCoverage=16%, E-value=6e-53, Identity=70%"; Hit description =Lipoxygenase
  Pfam annotation: Domain name=PLAT; Domain location=2-71; Score=11.7; E_value=0.00098; Accession=PF01477.15; Description=PLATLH2 domain
PGKTSTMTYQVTLFVDTEFGTPGAIVVKNGLKNDQFFLRYVQLELAEDRSIHFECNSWVYPYKKTNSDRVFFINTSYLPEKTPDALRLLREEELRSLRGNGRGERKDWERIYDYNYYNDLGNPDKEDHIRPVLGGTATYPYRAAA

SEQ ID NO: 78097 - protein, 129 aa, Setaria italica
  Transcript Sequence Number=SeqID_12123
GFWFIHGASQGSGWEMDYLRQMNENRIARQERSRCNSSAAMSNSRLRDSSYRIPSAPPIESFSYQRNTDTPSRDQNPANTESFRYRRNINTPLRDQSPSNGAHRHGKGRRGTKAQSHSVRTGFKAQPSI

SEQ ID NO: 78098 - protein, 151 aa, Setaria italica
  Transcript Sequence Number=SeqID_12124
  Gene Ontology: Mol. function=catalytic activity; Biological process =metabolic process
  Homolog annotation: Hit_ID=B4F8E5; Match level="QueryCoverage=98%, HitCoverage=45%, E-value=3e-66, Identity=81%"; Hit description =Nucleoside-diphosphate-sugar epimerase
NLSAFIFRLGGIYGPGRSALDTLAKSKSLSQRQKLRESKQYTARIHVADIYQAVLASMSMRCARKIFNVVDDDPAPRAEVFAFARSLIEMRYPDLIAESPDVGSTESGFQELPAEKRVSNARLKKELGVKLLHPTYRSGLQSILDSWQAES

SEQ ID NO: 78099 - protein, 81 aa, Setaria italica
  Transcript Sequence Number=SeqID_12125
  Subcellular localization annotation: CTP_CleavageSite=56; ConfidenceScore=5.03e-01
SGDKRVGSCRLGVLGFVYAPPPRKPAGELIVRLIRCRRENFTPFSSVRVGPRMWVRRTVERQACDLLVLLHFAEFANLPYR

SEQ ID NO: 78100 - protein, 230 aa, Setaria italica
  Transcript Sequence Number=SeqID_12126
  Subcellular localization annotation: CTP_CleavageSite=92; ConfidenceScore=5.57e-01
MDPTCQPPFLLLLLSSPSPFFSFLLLFFSSTWTPCASDPSCSWMLAQLPTVQTPDFQIPKNERGGQRFSMTNATPSVNPQVSISVSVCITCSAAAEQPCILGRRGKVGDGTNAISDLSFRQTMASRLLLQRIQSAGSLSGGHGRRQLLSFSCGEGLCSPLPPAGDRSVCSSAFQQEMRSDNFIWTHFCPHLDRFSDPQVAHEDRQFIQFLDRMLDAIKNTYKSLARIQRG

SEQ ID NO: 78101 - protein, 77 aa, Setaria italica
  Transcript Sequence Number=SeqID_12127
MYPSFLLKSLLSLLLAIYVQDHEPHLDRFSDPQVAHEDRQFIQFLDRMLDAIKNPQSLARIQRGKLANGLEALDDDI

SEQ ID NO: 78102 - protein, 128 aa, Setaria italica
  misc_feature (75)..(75): Xaa can be any naturally occurring amino acid
  Transcript Sequence Number=SeqID_12128
  Gene Ontology: Mol. function=protein serine/threonine kinase activity; Cellular component=plasma membrane; Biological process =protein amino acid phosphorylation
  Homolog annotation: Hit_ID=B2CZJ8; Match level="QueryCoverage=92%, HitCoverage=33%, E-value=5e-23, Identity=45%"; Hit description=Pto kinase interactor 1
MSCLACCGGEDTQRAPDSGGPYSGGYPARNDAYRTADPTPRGAQPVKAQPIAVPTIPVEEIREVTKGYGDEALIXGEGSFGRVYFGVLRNGRSAAVKKLDSNKQPDQESLTPWIPVPRISLVLGLVFI

SEQ ID NO: 78103 - protein, 84 aa, Setaria italica
  Transcript Sequence Number=SeqID_12129
  Gene Ontology: Mol. function=protein tyrosine kinase activity; Cellular component=plasma membrane; Biological process=protein amino acid phosphorylation
  Homolog annotation: Hit_ID=Q9LKY3; Match level="QueryCoverage=85%, HitCoverage=20%, E-value=7e-28, Identity=80%"; Hit description=Pti1 kinase-like protein
KGNKTRSLVTWATPRLSEDKVRQCVDSRLGGEYPPKSVAKFAAVAALCVQYEADFRPNMSIVVKALQPLLNARASNNPGEHSGS

SEQ ID NO: 78104 - protein, 215 aa, Setaria italica
  misc_feature (117)..(117): Xaa can be any naturally occurring amino acid
  Transcript Sequence Number=SeqID_12130
  Gene Ontology: Mol. function=protein tyrosine kinase activity; Cellular component=plasma membrane; Biological process=protein amino acid phosphorylation
  Homolog annotation: Hit_ID=Q9LKY3; Match level="QueryCoverage=93%, HitCoverage=55%, E-value=1e-102, Identity=89%"; Hit description=Pti1 kinase-like protein
  Pfam annotation: Domain name=Pkinase; Domain location=1-202; Score= -46.7; E_value=1e-05; Accession=PF00069.17; Description=Protein kinase domain
  Pfam annotation: Domain name=Pkinase_Tyr; Domain location=1-202; Score=-60.5; E_value=1e-09; Accession=PF07714.9; Description=Protein tyrosine kinase
  Pfam module annotation: Pfam domain module=Pkinase::Pkinase_Tyr; Domain location=1-202::1-202
MLKKMWNMPLTGRKGVKGAQPGPVLSWAQRVKIAVGAAKGLEYLHEKAQPHIIHRDIKSSNVLLFDDDVAKIADFDLSNQAPDMAARLHSTRVLGTFGYHAPEYAMTGQLSSKRDVXSFGVVLLELLTGRKPVDHTLPRGQQSLVTWATPRLSEDKVRQCVDSRLGGEYPPKSVAKFAAVAALCVQYEADFRPNMSIVVKALQPLLNARASNNPG

SEQ ID NO: 78105 - protein, 361 aa, Setaria italica
  Transcript Sequence Number=SeqID_12131
  Gene Ontology: Mol. function=protein serine/threonine kinase activity; Cellular component=plasma membrane; Biological process =protein amino acid phosphorylation
  Homolog annotation: Hit_ID=Q9M1Q2; Match level="QueryCoverage=99%, HitCoverage=99%, E-value=1e-156, Identity=75%"; Hit description =Serine/threonine protein kinase-like protein
  Pfam annotation: Domain name=Pkinase; Domain location=68-344; Score =127.5; E_value=4.3e-35; Accession=PF00069.17; Description=Protein kinase domain
  Pfam annotation: Domain name=Pkinase_Tyr; Domain location=61-344; Score=137.0; E_value=6e-38; Accession=PF07714.9; Description=Protein tyrosine kinase
  Pfam module annotation: Pfam domain module=Pkinase::Pkinase_Tyr; Domain location=68-344::61-344
MSCFGCCGDEDTQGVPDSRNQYPGHHPARNDAYRTADPTPRGAQPVKVQPIAVPTIPVDEIKEVTKGYGDEVLIGEGSFGRVYLGVLRNGRSAAIKKLDSNKQPDQEFLAQVSMVSRLKHDNVVELLGYCVDGNTRILAYEFATMGSLHDILHGRKGVKGAQPGPVLSWTQRVKIAVGAAKGLEYLHEKAQPHIIHRDIKSSNVLLFDDDVSKIADFDLSNQAPDMAARLHSTRVLGTFGYHAPEYAMTGQLSSKSDVYSFGVVLLELLTGRKPVDHTLPRGQQSLVTWATPRLSEDKVRQCVDSRLGGDYPPKAVAKFAAVAALCVQYEADFRPNMSIVVKALQPLLNARAANPGENAGS

SEQ ID NO: 78106 - protein, 117 aa, Setaria italica
  Transcript Sequence Number=SeqID_12132
VPHCLRVASTEPISCISCCSSEDSNDIVIPVSCCLLVASTEAISCISCSSSEDPNETVILLSDRLFVSCFEPFSPIPYRSCEPSFVITSGIGLVISRVWGFPFELFYSFLFLPLKGS

SEQ ID NO: 78107 - protein, 176 aa, Setaria italica
  misc_feature (99)..(99): Xaa can be any naturally occurring amino acid
  Transcript Sequence Number=SeqID_12133
  Gene Ontology: Mol. function=DNA binding
  Homolog annotation: Hit_ID=Q9AVE4; Match level="QueryCoverage=51%, HitCoverage=82%, E-value=9e-33, Identity=57%"; Hit description=DNA -binding protein DF1
MSTSRWPKHEVEALIRVRTGLEGRFQEPGLKGPLWEEVSSRMAAAGYGRSAKRCKEKWENINKYFRKAKESGKKRPAHAKTCPYFDELDRLYSRTAGAXGAGGSNNNAGDEAAKASSELLDAVVKYPDAHGGPPGFMFDRERQNEGNGNGGAEDGNDDDDGIAKRRAGGDDQEQEQ

SEQ ID NO: 78108 - protein, 103 aa, Setaria italica
  Transcript Sequence Number=SeqID_12134
  Subcellular localization annotation: CTP_CleavageSite=40; ConfidenceScore=5.21e-01
PNSNQFLQPSLQIQYLDLLSPSPPSAMPGGHSPQPGGGCRCTCTGRLEVLFGESPGFRGAGYDRGRWCRRLAAARPRAAPAQVADGGADGTEGRKEAAAVELK

SEQ ID NO: 78109 - protein, 78 aa, Setaria italica
  Transcript Sequence Number=SeqID_12135
MAGEMSWVGKKIHLYNVTMGLYMLDWWERCLFNILVLILLWFICFNGSRFATDVFESHLKARILQGANYGMGIGMPSS

SEQ ID NO: 78110 - protein, 307 aa, Setaria italica
  Transcript Sequence Number=SeqID_12136
  Gene Ontology: Mol. function=nucleic acid binding
  Homolog annotation: Hit_ID=B4FZ16; Match level="QueryCoverage=94%, HitCoverage=95%, E-value=1e-128, Identity=79%"; Hit description=CID11
  Pfam annotation: Domain name=PAM2; Domain location=31-48; Score=27.5; E_value=5.4e-05; Accession=PF07145.7; Description=Ataxin-2 C-terminal region
  Pfam annotation: Domain name=RRM_1; Domain location=124-191; Score =52.7; E_value=1.4e-12; Accession=PF00076.14; Description=RNA recognition motif. (a.k.a. RRM, RBD, o
  Pfam annotation: Domain name=RRM_1; Domain location=221-289; Score =37.7; E_value=4.6e-08; Accession=PF00076.14; Description=RNA recognition motif. (a.k.a. RRM, RBD, o
  Pfam module annotation: Pfam domain module=PAM2::RRM_1::RRM_1; Domain location=31-48::124-191::221-289
MAAVAEGSASAAAAAAAKEVEYQAGVQKLVDLLSKLNPAAKEFVPSSAAAGSPPKKALSADAPVFDYHSIGAGNGGTKDSATDASFYIGNQQRKRGNGYINQGRRRAIDRARRADREDSIRRTVYVSELDHTVTEERLADIFATCGQVVDCRICGDPHSVLRFAFIEFSDEEGARTALNLGGTVFGFYPVRVLPSKTAILPVNPKFLPRTEDEKEMVMRTVYCTNIDKMVTQLDVKNFFEGLCGEVSRLRLLGDNVHSTRIAFVEFVHAEGAILALNCSGMILGTLPVRVSPSKTPVKPRVNRVGSN

SEQ ID NO: 78111 - protein, 41 aa, Setaria italica
  Transcript Sequence Number=SeqID_12137
DLNSNQAEHGHCLNCFLLNRRSFWGSLSLLGAAHGWISWYV

SEQ ID NO: 78112 - protein, 82 aa, Setaria italica
  Transcript Sequence Number=SeqID_12138
  Gene Ontology: Mol. function=protein binding; Cellular component =endoplasmic reticulum membrane; Biological process=endoplasmic reticulum unfolded protein response
  Homolog annotation: Hit_ID=Q851X7; Match level="QueryCoverage=74%, HitCoverage=24%, E-value=5e-21, Identity=78%"; Hit description =Derlin-2
GDKRHYRRRSCQARRFLPGRPQIISPYHLYLNPKLVVQHYEIWRLVTNFLYFRKMDLDFLFHMFFLARYCKLLEENSFRGRT

SEQ ID NO: 78113 - protein, 239 aa, Setaria italica
  misc_feature (176)..(176): Xaa can be any naturally occurring amino acid
  Transcript Sequence Number=SeqID_12139
  Gene Ontology: Mol. function=protein serine/threonine kinase activity; Biological process=protein amino acid phosphorylation
  Homolog annotation: Hit_ID=Q01MD7; Match level="QueryCoverage=98%, HitCoverage=42%, E-value=8e-37, Identity=40%"; Hit description =H0215E01.6 protein
  Pfam annotation: Domain name=B_lectin; Domain location=26-131; Score =81.1; E_value=4e-21; Accession=PF01453.16; Description=D-mannose binding lectin
SYTSYFGFYTTDGHSFILAVVFLGPQSPVIWSANPDNPVSHDAILNFTGEGDLLLHNGDGTTIWSTATSNKSVANMSLASGNLVLFDENNSAVWQSFDHPTDTLVMGQSLCRGMNLSAKPTNTKWPSSKVYLSAEWNGLQYSFEPAAYTQLFQTESGLQLRLTQTTPISTSTPSTXDAQVNGSLGFPEKIFTLPSASSLQFMRLESDGHLRLYELKEPSKARMLFDVLSMVMDFCDYPL

SEQ ID NO: 78114 - protein, 88 aa, Setaria italica
  misc_feature (28)..(28): Xaa can be any naturally occurring amino acid
  misc_feature (69)..(69): Xaa can be any naturally occurring amino acid
  Transcript Sequence Number=SeqID_12140
  Gene Ontology: Mol. function=structural molecule activity
  Homolog annotation: Hit_ID=B6TRX1; Match level="QueryCoverage=86%, HitCoverage=19%, E-value=6e-14, Identity=60%"; Hit description=VAP27- 2
MYQVTEDVQNLKSKLNNLESKLEEAEKXMIIRLREESRSTTQERDKLQQEMVFLRKKGAPRRSSGFPLXLFVVYVALLGTSLGYLLRL

SEQ ID NO: 78115 - protein, 366 aa, Setaria italica
  Transcript Sequence Number=SeqID_12141
  Gene Ontology: Mol. function=structural molecule activity; Cellular component=plasma membrane; Biological process=lipid transport
  Homolog annotation: Hit_ID=B6TRX1; Match level="QueryCoverage=96%, HitCoverage=96%, E-value=1e-155, Identity=75%"; Hit description =VAP27-2
  Pfam annotation: Domain name=Motile_Sperm; Domain location=5-112; Score=135.6; E_value=1.6e-37; Accession=PF00635.18; Description=MSP (Major sperm protein) domain
MGQDLVEIHPRELQFTFEVKKQSSCTVHLVNKSNEYVAFKVKTTSPKRYCVRPNTGVILPRKTCEFTVTMQALRTAPPDMQLKDKFLVQTTVVPYGTSDEDLVPAFFSKEAGRYIEESKLRVVLVSASHSLEEEPINGVHGTEPAFEVPVLKEMPNIEKEVLPPATKEVPPPLEQTPAIATEIPSPVKETPGLREIPVPLKEAPAAFTESPSTRNDSSAIAIEHPSNVTIEHAPAIKIESPPPLKQSIAVFKESPPLEETPPKEAVMLNDRGLFNVQNHQLSHVTEDVQNLKSKLNNLESKLEEAEKMIIRLREESRSTTQERDKLQQEMVFLRKKGAPRSQVGFPLLFVVYVALLGTSLGYLLRL

SEQ ID NO: 78116 - protein, 410 aa, Setaria italica
  misc_feature (12)..(12): Xaa can be any naturally occurring amino acid
  Transcript Sequence Number=SeqID_12142
  Gene Ontology: Mol. function=DNA-directed DNA polymerase activity; Cellular component=DNA polymerase III complex; Biological process =DNA replication
  Homolog annotation: Hit_ID=B9S048; Match level="QueryCoverage=90%, HitCoverage=30%, E-value=4e-97, Identity=52%"; Hit description =Replication factor C / DNA polymerase III gamma-tau subunit, putative
RSNSCTPVKELXRRVRRSSFSKKGAMRNSTVSKLLDLHVNSGEQSEDTENYNSENHEQLQKAGYFSRSTSPLFAASGCFSSSNPSKLLRVPRREGSSFSCTPVSTSSYYRYKGRNPSTVGSWDGTTAASLDDDGLNQPELLTSRCGIPCYWSKRSKQKGSERSCSPSLSDTLRRKGSSLLCGSQTMHRRKKSSGSNKYGYLNKSSQGVPLLGDSSHFAYSSFDSASDEVSTIFGELDLEALSRLDGRRWSSCKSQDGIALSVSGADHVVPDHRSLSQKYRPRSFLEIVGQNFVVQSLSNAITRERIAPAYLFHGPRGTGKTSAARIFSAALSCTATGEAKPCGICTECNDFFTGNGINLIEVDATNRKGINRVRHLIENIPASATSSRYKVFVVDECHMVSSKVWSAFMK

SEQ ID NO: 78117 - protein, 270 aa, Setaria italica
  misc_feature (266)..(266): Xaa can be any naturally occurring amino acid
  Transcript Sequence Number=SeqID_12143
  Gene Ontology: Mol. function=phospholipase D activity; Cellular component=membrane; Biological process=phosphatidylcholine metabolic process
  Homolog annotation: Hit_ID=Q75KP6; Match level="QueryCoverage=100%, HitCoverage=31%, E-value=1e-117, Identity=77%"; Hit description =Phospholipase D alpha 1, putative, expressed
  Pfam annotation: Domain name=PLDc; Domain location=67-105; Score =38.8; E_value=2.1e-08; Accession=PF00614.14; Description =Phospholipase D. Active site motif
DEGVTVLMLVWDDRTSGGLGPIKRDGLMATHDEDTAGFFRGTRVHCVLCPRNPDKDRSYVQDVETATMFTHHQKTVVVDGGGVPGPNAPPGLVSFLGGIDLCDGRYDTQEHPLFRTLGTTHNKDFHQPNFPGASIKKGGPREPWHDVHCRVEGPAAWDVLDNFEQRWRKQGSGDNLLVALDKAWAPREAAAGDAESWNVQVFRSIDGGAAAGFPENRDEAPDEAARRGLVSGKDHVIERSIQDAYIHAIRRARDFIYIENQYFLGXSYAW

SEQ ID NO: 78118 - protein, 585 aa, Setaria italica
  Transcript Sequence Number=SeqID_12144
  Gene Ontology: Mol. function=phospholipase D activity; Cellular component=membrane; Biological process=phosphatidylcholine metabolic process
  Homolog annotation: Hit_ID=P93844; Match level="QueryCoverage=100%, HitCoverage=70%, E-value=0.0, Identity=61%"; Hit description =Phospholipase D alpha 2
  Pfam annotation: Domain name=C2; Domain location=10-104; Score=30.3; E_value=7.8e-06; Accession=PF00168.22; Description=C2 domain
  Pfam annotation: Domain name=PLDc; Domain location=325-362; Score =28.1; E_value=3.7e-05; Accession=PF00614.14; Description =Phospholipase D. Active site motif
  Pfam module annotation: Pfam domain module=C2::PLDc; Domain location =10-104::325-362
MAAMLLHGTLDATIFEAKFNIPVSKFLVGLIPRVDGIPTGLPQLYATVDLSRARVGRTRVVDDDPANPRWNESFRIYCAHSTTDVVFSVKAALPVDAALVGRAYLPVQDLLKAKGGEVIDRWLDILDEGMMPLLHGPKIHVQVRFTDVAHDPQWGRGVGGAQFTGVPKTFFKQRQGCQVTLYQDAHVPDTFKPLGIQLAGGRPYEPRRCWEDVYDAIAGAKHVVYITGWSVFPEITLVRDGGRRHPGGGVTLGELLKRKADEGVRVLMLVWDDPTSVLNLGLIDGQMKTNDAITLRYFRGSGVHCALCPREPDDAASFAQGLKTFAFSHHQKCVVVDVADVAGGGRRRIVSFVGGLDLTNGRYDTPEHTLFRTINTAHSNDFYQGNLHGATIAAGGPREPWHDIHCKIEGPAAWDVLHNFEQRWRKQGGKDGIVHNLLFPWKAQKDVLVDLRGMEDVIAPQSTPAAPAGNDESWNVQVFRSTDSSACDGFAKTPAEAAQSGLVSGKDHVIERSIQDAYIHAIRRANRFIYIENQYFLGSSFGWKPDGVTPENINALHLIPRELSLKIVSKIEAGEPFAVYVVVPM

SEQ ID NO: 78119 - protein, 107 aa, Setaria italica
  Transcript Sequence Number=SeqID_12145
LFCVNQLGGSAPRCPSVAWKLTQKVEKNFHSHLALQFSSRWLKFPLGIPLTGEIIFDFERQIVRCLVCHGQFWGAMNIPAFSGLPDFVFRKELDLLPFHKTLPDPQL

SEQ ID NO: 78120 - protein, 101 aa, Setaria italica
  misc_feature (30)..(30): Xaa can be any naturally occurring amino acid
  Transcript Sequence Number=SeqID_12146
  Gene Ontology: Mol. function=oxidoreductase activity; Cellular component=cytoplasm; Biological process=oxidation reduction
  Homolog annotation: Hit_ID=A1XFD0; Match level="QueryCoverage=97%, HitCoverage=38%, E-value=5e-42, Identity=85%"; Hit description =Oxidoreductase-like protein
MLDDEPLYGPTPEIASVSFGCERDFVLRKXPTKSQAASGSGEAARKRLKLAAPQQQHSFFLKHGSLLVMRGYTQRDWQHSVPKRAKASSPRINLTFRHVLT

SEQ ID NO: 78121 - protein, 99 aa, Setaria italica
  misc_feature (9)..(9): Xaa can be any naturally occurring amino acid
  misc_feature (16)..(16): Xaa can be any naturally occurring amino acid
  Transcript Sequence Number=SeqID_12147
  Pfam annotation: Domain name=4HBT; Domain location=1-63; Score=18.1; E_value=0.0072; Accession=PF03061.14; Description=Thioesterase superfamily
TASIGCYVXSGYRRLXGVQLSINHVGPAGLGDLVQATATPIQLGRKIQVWEVQIWRIDPSTSECKDLVSTARVTLLANLSTPPKMKSFEEGLKKLSSKL

SEQ ID NO: 78122 - protein, 43 aa, Setaria italica
  Transcript Sequence Number=SeqID_12148
  Gene Ontology: Mol. function=acyltransferase activity; Biological process=metabolic process
FYLQANCSNYMVEMAWVKDMYGVSTAEAMELLEHFLAMNPDSE

SEQ ID NO: 78123 - protein, 518 aa, Setaria italica
  Transcript Sequence Number=SeqID_12149
  Gene Ontology: Mol. function=acyltransferase activity; Cellular component=endoplasmic reticulum membrane; Biological process =metabolic process
  Homolog annotation: Hit_ID=B9RDH9; Match level="QueryCoverage=92%, HitCoverage=85%, E-value=1e-131, Identity=51%"; Hit description=1 -acylglycerophosphocholine O-acyltransferase, putative
  Pfam annotation: Domain name=Acyltransferase; Domain location=130 -253; Score=35.5; E_value=2.2e-07; Accession=PF01553.13; Description =Acyltransferase
  Pfam annotation: Domain name=efhand; Domain location=397-425; Score =3.0; E_value=10; Accession=PF00036.24; Description=EF hand
  Pfam annotation: Domain name=efhand; Domain location=470-498; Score =27.6; E_value=5.2e-05; Accession=PF00036.24; Description=EF hand
  Pfam module annotation: Pfam domain module=Acyltransferase::efhand::ef hand; Domain location=130-253::397-425::470-498
HHGDSDGAAAVSVCDDGGGDPFAFLSEDRPPQDRGPSPADPFRNGTPAWGGGVYAWARTLLLAPVAAVRLVLFGLAIAIGYAATWVALRGWADVQDRPREGAGPMPAWRRRLMWITRISARCILFSFGYHWIRKKGRPAPRELAPIVVSNHVSYIEPIFFFYELFPTIVASESHDALPFVGTIIRAMQVIYVDRFSPASRKAAVNEIKRKAACNSFPRVLLFPEGTTTNGRFLISFQHGAFIPGYPVQPVVVHYPHVHFDQSWGNISLLKLMFKMFTQFHNFMEVEYLPVVYPPEIKQENALHFAENTNYAMARALNVLPTSYSYGDSMIMARAVEAGKANCSNYMVEMAWVKDMYGVSTAEAMELLEHFLAMNPDSDGRVKAQDFWAYFGLDCSPLCKKIFHYFDFSIKESITFRQFLVGCAHLRKQPLFQGACETAFEKCRDPETSEISRGQLADILRLSMLLLSDDGMQKLFKTFDVDGDEKISRDDFITCLGRFPFLIAFFAAPINGEVYIEIV

SEQ ID NO: 78124 - protein, 64 aa, Setaria italica
  Transcript Sequence Number=SeqID_12150
  Subcellular localization annotation: CTP_CleavageSite=41; ConfidenceScore=5.05e-01
VQQNIKSTWVHCTYTQNTAHTRPCVPSTQQCTSVLPHSAVCWEHSRVRQHRCYCLYPCLFVQCT

SEQ ID NO: 78125 - protein, 48 aa, Setaria italica
  Transcript Sequence Number=SeqID_12151
TSKIMYPANHYMDPYHSHYRNHSPYPYYPPHGWEIPWAEGDRMEFPIH

SEQ ID NO: 78126 - protein, 1140 aa, Setaria italica
  misc_feature (932)..(932): Xaa can be any naturally occurring amino acid
  Transcript Sequence Number=SeqID_12152
  Gene Ontology: Mol. function=protein binding; Biological process =apoptosis
  Homolog annotation: Hit_ID=Q2HT37; Match level="QueryCoverage=11%, HitCoverage=66%, E-value=3e-10, Identity=33%"; Hit description=IQ calmodulin-binding region; Apoptosis regulator Bcl-2 protein, BAG
  Pfam annotation: Domain name=BAG; Domain location=629-708; Score =45.0; E_value=3e-10; Accession=PF02179.8; Description=BAG domain
  Pfam annotation: Domain name=IQ; Domain location=606-626; Score=16.8; E_value=0.09; Accession=PF00612.19; Description=IQ calmodulin-binding motif
  Pfam module annotation: Pfam domain module=BAG::IQ; Domain location =629-708::606-626
MYPANHYMDPYHSHYRNHSPYPYYPPHGWEIPSGHPQPMDSSYRPPTYGPWPYNAGMHHPHPSEFHCCCNRTYPPDYYSFRPPLPQELPPPHLYYHGPFPQHSNTCLSYFVPPHPYPVDQMPYGYDKLKSHCCGCPNHVCHGADKSNVKIEEERPDVKLESEYKDADGGSIIRHPNNQYPFIWVPSGNMEGKENGKRYEFSPQLLKEWAPMSRKMTGDVKKQNQDNQFLNGWAPVSSKKTEDVMHQEEGNQKERQFHWPIVWMPAGYDEPKQKAKELKIEESPNNSEEAPQSPKIKIIPLSWFENGHHDQKPATRDGSGDHGDRSATKSQPAVTEHRDGMTLEGSPKTTPAVPKRVNNESKPARENYKTIPVVPENKIDEKKASTYRIIPVTKESDEKKTGMSEKEEAKKASNGDKVEENGKTKHSESSTAKHSKLPPVCLRVDPFPRKKSGNGSSRSPSPPTRKDGDKAKKDVKEAAQGQNMEPKQSDTRHITVSEIKGKSPNEMDKGMQFSNKTVQAASVEHPREEEVPTSKDEQKVQAGSTTIGTQENAGAKSLQGSAVQEKENTGAESFMGCDESKNEDEAVIESEAAKDDAKTCKANLSEPDAAVCIQSAYRGYDVRRWQPLDKLRKIRNVHEQMQGVKKQLQCLEDSCKKPTEKEQVAIGETIMNLLLKLDTIQGLHPSVREARKSVARELVCLQEKLDTLCKQQSGEFDHTNSDEEKSETTENGIQIVAPTITTEACDKEERAVELGKVEEPSSVDTMEPYNAVPSGIPMEVKQDADASKKNEKEESCVTTMEEANEQGKAAGQFELQVPSSMDTLSDAALPEHPTDNQELKIEESNAVSVEQVDEKSEVEGEGKEAMLHDAASTVDSSGLKQCTASTEQSLHAKSESNTGLSYDSTEGINASAVAASVESGVTNEKDGPVNGQXTQAAAVENLELKHDVSPAEEDQQRELSGPVVHLEDSSISLQDEEQHDLIPADDSVMSNTKDQLEVARDVSMQEQAVDTVQDSTKEQDGMLEDSTKEQDGMLEDSTNNMELSASGNAEKPDQPALLEPVLKSDSASAPEETVVGESDDTVQCAVFGKDKPPHEDQETEATIDKLTGGSTNDGDSLPGTSRKEPDIQESHPLYCLPLLQG

SEQ ID NO: 78127 - protein, 84 aa, Setaria italica
  Transcript Sequence Number=SeqID_12153
  Subcellular localization annotation: CTP_CleavageSite=76; ConfidenceScore=5.83e-01
PSPVISPLPLHSQPASRSRWQWRGPPAPSFSASSSWPRAPSRSPPRPLPPSPHPSPPRPRRRRPPRPPPPPPTPIPAAGPCPTA

SEQ ID NO: 78128 - protein, 40 aa, Setaria italica
  Transcript Sequence Number=SeqID_12154
KRIIIILNHFIHESNNTTNQTYPHSAQRSMKACFIITPLV

SEQ ID NO: 78129 - protein, 167 aa, Setaria italica
  misc_feature (15)..(15): Xaa can be any naturally occurring amino acid
  Transcript Sequence Number=SeqID_12155
  Homolog annotation: Hit_ID=B7PUI3; Match level="QueryCoverage=52%, HitCoverage=56%, E-value=2e-11, Identity=42%"; Hit description =Coiled-coil domain-containing protein, putative
  Pfam annotation: Domain name=cwf18; Domain location=34-167; Score =65.8; E_value=1.6e-16; Accession=PF08315.4; Description=cwf18 pre -mRNA splicing factor
RERLRALRAAKELLXPHPAPDGEQQNGTHGATEEHVEQPALPGPQDAPDEASKENISSIEEVEEVQDDGELPAMKFRNYLPHDEQLRGSKLAPVSLPKFEDPISAEAAEPKQVENPFGNIAPKNPNWDLKRDVQKRIDKLEKRTQKALAEIALEQQREKEALEEAQD

SEQ ID NO: 78130 - protein, 127 aa, Setaria italica
  Transcript Sequence Number=SeqID_12156
  Gene Ontology: Mol. function=protein serine/threonine kinase activity; Cellular component=integral to membrane; Biological process=protein amino acid phosphorylation
  Homolog annotation: Hit_ID=A9RKR9; Match level="QueryCoverage=98%, HitCoverage=41%, E-value=1e-21, Identity=36%"; Hit description=CLL2 clavata1-like receptor S/T protein kinase protein
  Pfam annotation: Domain name=LRR_1; Domain location=101-123; Score =10.1; E_value=3.5; Accession=PF00560.25; Description=Leucine Rich Repeat
  Pfam annotation: Domain name=LRR_1; Domain location=29-51; Score =21.0; E_value=0.0049; Accession=PF00560.25; Description=Leucine Rich Repeat
  Pfam annotation: Domain name=LRR_1; Domain location=5-27; Score=11.0; E_value=2.4; Accession=PF00560.25; Description=Leucine Rich Repeat
  Pfam annotation: Domain name=LRR_1; Domain location=53-75; Score=8.2; E_value=8.2; Accession=PF00560.25; Description=Leucine Rich Repeat
  Pfam annotation: Domain name=LRR_1; Domain location=77-99; Score =14.6; E_value=0.41; Accession=PF00560.25; Description=Leucine Rich Repeat
  Pfam module annotation: Pfam domain module=LRR_1::LRR_1::LRR_1::LRR _1::LRR_1; Domain location=101-123::29-51::5-27::53-75::77-99
TAFRSLGWLNLSRCDLSGMIPEALGDLQNLQYLDLSNNQLTGPMPFSLYDLKMLKEIVLDRNKLSGQLSPAIAQLQNLTKLLISKNNISGVLPPELGSLKNLEVLGFHQNRFDGSIPEAFGNLTRLF

SEQ ID NO: 78131 - protein, 197 aa, Setaria italica
  Transcript Sequence Number=SeqID_12157
  Homolog annotation: Hit_ID=B6SJR4; Match level="QueryCoverage=100%, HitCoverage=53%, E-value=1e-71, Identity=70%"; Hit description =Protein kinase Kelch repeat:Kelch
  Pfam annotation: Domain name=Kelch_1; Domain location=1-37; Score =14.3; E_value=0.065; Accession=PF01344.17; Description=Kelch motif
  Pfam annotation: Domain name=Kelch_1; Domain location=39-87; Score =15.8; E_value=0.043; Accession=PF01344.17; Description=Kelch motif
  Pfam module annotation: Pfam domain module=Kelch_1::Kelch_1; Domain location=1-37::39-87
GGAVYVAGGHDEEKNALRSALAYDPDADAWAWLPDMAAERDEPRGLCVAGRFLVVGGYPTQAQGRFVGSAEAFDPATSAWVPVQDGLIEDGACPRTCCAAPGASERMYMLRDGHLVARDGPAASWRPVAQVPEDALTAATVSAIPDGRVVVIGAGCHGGDQTVYVLREEAGKGASWARAPAPPEFSGHVQAACSLQI

SEQ ID NO: 78132 - protein, 130 aa, Setaria italica
  misc_feature (79)..(79): Xaa can be any naturally occurring amino acid
  Transcript Sequence Number=SeqID_12158
  Gene Ontology: Mol. function=oxidoreductase activity; Cellular component=glyoxysome; Biological process=fatty acid metabolic process
  Homolog annotation: Hit_ID=B6UC41; Match level="QueryCoverage=100%, HitCoverage=17%, E-value=9e-63, Identity=86%"; Hit description =Glyoxysomal fatty acid beta-oxidation multifunctional protein MFP-a
  Pfam annotation: Domain name=3HCDH_N; Domain location=1-86; Score =27.3; E_value=1e-10; Accession=PF02737.10; Description=3-hydroxyacyl- CoA dehydrogenase, NAD binding domain
QIFSDLEKYCPSHCVLATNTSTIDLNLIGEKTKSQDRIVGAHFFSPAHIMPLLEIVRTQRTSPQVVVDLLDVGKKIKKXPIVVGNCTGFAVNRMFFPYTQSALFYVDLGMDVYKIDRACTKFGMPMGPFR

SEQ ID NO: 78133 - protein, 183 aa, Setaria italica
  misc_feature (99)..(99): Xaa can be any naturally occurring amino acid
  misc_feature (133)..(133): Xaa can be any naturally occurring amino acid
  Transcript Sequence Number=SeqID_12159
  Gene Ontology: Mol. function=3-hydroxyacyl-CoA dehydrogenase activity; Cellular component=glyoxysome; Biological process=fatty acid metabolic process
  Homolog annotation: Hit_ID=B6UC41; Match level="QueryCoverage=90%, HitCoverage=26%, E-value=5e-86, Identity=85%"; Hit description =Glyoxysomal fatty acid beta-oxidation multifunctional protein MFP-a
  Pfam annotation: Domain name=3HCDH; Domain location=1-68; Score= -12.0; E_value=0.0051; Accession=PF00725.14; Description=3 -hydroxyacyl-CoA dehydrogenase, C-terminal domain
LTDGFKIVALFLLLVSRLADLVGFGVAVATGMQYLENFPERVYKSMLLPLMMEDNRAGEATQKGFYKYEGKRKATPDPEIMKYIEKSRSMAGVTPDPEXINEACRVLDEGIAVKASDLDIASIFGMGFPPYRXIGAKYIHGKLEEWTKRYGSFFKPCSYLAERAAKGIPLSAPAKKVQARLLR

SEQ ID NO: 78134 - protein, 123 aa, Setaria italica
  Transcript Sequence Number=SeqID_12160
  Gene Ontology: Mol. function=3-hydroxyacyl-CoA dehydrogenase activity; Cellular component=glyoxysome; Biological process=fatty acid metabolic process
  Homolog annotation: Hit_ID=B6UC41; Match level="QueryCoverage=83%, HitCoverage=14%, E-value=9e-54, Identity=95%"; Hit description =Glyoxysomal fatty acid beta-oxidation multifunctional protein MFP-a
  Pfam annotation: Domain name=3HCDH; Domain location=16-113; Score= -14.6; E_value=0.0092; Accession=PF00725.14; Description=3 -hydroxyacyl-CoA dehydrogenase, C-terminal domain
TLVLLYQLLKLSEKDIVEMVFFPVINEACRVLDEGIAVKASDLDIASIFGMGFPPYRGGVMYWADSIGAKYIHGKLEEWTKRYGSFFKPCSYLAERAAKGIPLSAPAKKSYKDYGLIKNRTVT

SEQ ID NO: 78135 - protein, 107 aa, Setaria italica
  Transcript Sequence Number=SeqID_12161
  Gene Ontology: Mol. function=oxidoreductase activity; Cellular component=glyoxysome; Biological process=fatty acid metabolic process
  Homolog annotation: Hit_ID=B6UC41; Match level="QueryCoverage=65%, HitCoverage=9%, E-value=7e-28, Identity=81%"; Hit description =Glyoxysomal fatty acid beta-oxidation multifunctional protein MFP-a
ALLSIGKLSPLLCSSLPPLTQTKPIQSDSSQCHLKFARAQAQKQAANLHHPLVCIDVVEEGIVAGPRAGLWKEATAFQDLLFSDTCKSLVHVFFSQRATSKIPRHQP

SEQ ID NO: 78136 - protein, 309 aa, Setaria italica
  Transcript Sequence Number=SeqID_12162
  Gene Ontology: Mol. function=oxidoreductase activity; Cellular component=glyoxysome; Biological process=fatty acid metabolic process
  Homolog annotation: Hit_ID=B6UC41; Match level="QueryCoverage=100%, HitCoverage=42%, E-value=1e-143, Identity=82%"; Hit description =Glyoxysomal fatty acid beta-oxidation multifunctional protein MFP-a
  Pfam annotation: Domain name=ECH; Domain location=17-187; Score =173.7; E_value=5.2e-49; Accession=PF00378.12; Description=Enoyl-CoA hydrataseisomerase family
MAAKGRTELEVGADGVAVITIYNPPVNSLSIDVLYSLKESYEEALRRSDVKAIVVTGKGGKFSGGFDISSFGGVQGGQMMQPKVGYISIDILTDTLEAAAKPSVAAVDGLALGGGLEVAMACHARIATPTAQLGLPELQLGIIPGFGGTQRLPRLVGLTKSLEMMLLSKPIKGGEAHELGLVDALVSPNDLVNTARQWALDIYELRRPWIKSLYKTDKLEPLGEAREILKFARAQAQKQAANLHHPLVCIDVVEEGIVAGPRAGLWKEATAFQDLLFSDTCKSLVHVFFSQRATSKIPGATDLGLMPRK

SEQ ID NO: 78137 - protein, 496 aa, Setaria italica
  Transcript Sequence Number=SeqID_12163
  Gene Ontology: Mol. function=oxidoreductase activity; Cellular component=glyoxysome; Biological process=fatty acid metabolic process
  Homolog annotation: Hit_ID=B6UC41; Match level="QueryCoverage=100%, HitCoverage=68%, E-value=0.0, Identity=93%"; Hit description =Glyoxysomal fatty acid beta-oxidation multifunctional protein MFP-a
  Pfam annotation: Domain name=3HCDH; Domain location=266-359; Score =109.7; E_value=9.9e-30; Accession=PF00725.14; Description=3 -hydroxyacyl-CoA dehydrogenase, C-terminal domain
  Pfam annotation: Domain name=3HCDH_N; Domain location=85-264; Score =291.7; E_value=1.6e-84; Accession=PF02737.10; Description=3 -hydroxyacyl-CoA dehydrogenase, NAD binding domain
  Pfam annotation: Domain name=Ldh_1_N; Domain location=84-219; Score= -54.3; E_value=0.087; Accession=PF00056.15; Description=lactatemalate dehydrogenase, NAD bin
  Pfam module annotation: Pfam domain module=3HCDH::3HCDH_N::Ldh_1_N; Domain location=266-359::85-264::84-219
ILKFARAQAQKQAANLHHPLVCIDVVEEGIVAGPRAGLWKEATAFQDLLFSDTCKSLVHVFFSQRATSKIPGATDLGLMPRKISKIAILGGGLMGSGIATAMILSNYPVILKEVNEKFLNAGIDRIKANLQSRVRKGKMTDERYEKAMSLVTGVLDYEHFKDVDLVIEAVIENVKLKQQIFSDLEKYCPSHCVLATNTSTIDLNLIGEKTKSQDRIVGAHFFSPAHIMPLLEIVRTQRTSPQVVVDLLDVGKKIKKTPIVVGNCTGFAVNRMFFPYTQSALFYVDLGMDVYKIDRACTKFGMPMGPFRLADLVGFGVAVATGMQYLENFPERVYKSMLLPLMMEDNRAGEATQKGFYKYEGKRKATPDPEIMKYIEKSRSMAGVTPDPELLKLSEKDIVEMVFFPVINEACRVLDEGIAVKASDLDIASIFGMGFPPYRGGVMYWADSIGAKYIHGKLEEWTKRYGSFFKPCSYLAERAAKGIPLSAPAKKVQARL

SEQ ID NO: 78138 - protein, 271 aa, Setaria italica
  misc_feature (49)..(49): Xaa can be any naturally occurring amino acid
  Transcript Sequence Number=SeqID_12164
  Gene Ontology: Cellular component=cytoplasm; Biological process=cell differentiation
  Homolog annotation: Hit_ID=Q4JF22; Match level="QueryCoverage=97%, HitCoverage=22%, E-value=1e-143, Identity=92%"; Hit description =OSJNBa0029H02.30 protein
  Pfam annotation: Domain name=Trs120; Domain location=1-102; Score= -24.9; E_value=0.00015; Accession=PF08626.3; Description=Transport protein Trs120
LAVIGICHLPSSPDLDRVAADFVDTARSYSSALANRCFAFCPTDEQMAXKKRDDIIMFPPSDQQSLELHMVTMIQDLAASLLMEFEKWVLRAESTGTILKTPLDSQSSLGSEEVIKAKKRRLGRAQKIIGDYCLLAGSPVDANAHYTTAIELARLTGDVFWHAGALEGSVCALVVDRMGQSDPVLEDEVKYRYYTIIQLYRRATLQDNAQRVSPVSFELEAALKLARYLCRRELAKEVSDLLMGAADGAKALIDASDRLILYIEIDKELFR

SEQ ID NO: 78139 - protein, 32 aa, Setaria italica
  Transcript Sequence Number=SeqID_12165
LRLIMFKPLQPCLTHGFYILIPFLSVQVALDS

SEQ ID NO: 78140 - protein, 116 aa, Setaria italica
  Transcript Sequence Number=SeqID_12166
  Gene Ontology: Mol. function=N-acetyltransferase activity; Biological process=metabolic process
  Homolog annotation: Hit_ID=B9S236; Match level="QueryCoverage=98%, HitCoverage=42%, E-value=2e-26, Identity=52%"; Hit description=N -acetyltransferase, putative
YLHVISYNQPAISFYKKMLFKLVRRLPMFYYIRGQHYDSYLFVYYVNGGRSPCSPLEITSSFVVDFRAFVKMLVAKFWSKEDHCGPRWARCQESNTLLAPQSNKRIISGDSTRCHV

SEQ ID NO: 78141 - protein, 199 aa, Setaria italica
  Transcript Sequence Number=SeqID_12167
  Gene Ontology: Mol. function=N-acetyltransferase activity; Biological process=metabolic process
  Homolog annotation: Hit_ID=B9S236; Match level="QueryCoverage=99%, HitCoverage=80%, E-value=4e-61, Identity=57%"; Hit description=N -acetyltransferase, putative
  Pfam annotation: Domain name=Acetyltransf_1; Domain location=20-116; Score=64.3; E_value=4.7e-16; Accession=PF00583.16; Description =Acetyltransferase (GNAT) family
NVVSGHGIVSWGAVDTSRSDDRRDEIIGFVTTRMIAAKDSEIEDLFRYNSSRKDLTLVYILTLGVVDSYRNLGIASSLVREVVKYAASISNCRRVYLHVISYNQPAISFYKKMLFKLVRRLPMFYYIRGQHYDSYLFVYYVNGGRSPCSPLAFVKMLVAKFWSKEDHCGPRWARCQESNTLLAPQSNKRIISGDSTRCH

SEQ ID NO: 78142 - protein, 254 aa, Setaria italica
  Transcript Sequence Number=SeqID_12168
  Gene Ontology: Mol. function=N-acetyltransferase activity; Biological process=metabolic process
  Homolog annotation: Hit_ID=B9S236; Match level="QueryCoverage=99%, HitCoverage=97%, E-value=1e-77, Identity=57%"; Hit description=N -acetyltransferase, putative
  Pfam annotation: Domain name=Acetyltransf_1; Domain location=63-159; Score=62.8; E_value=1.3e-15; Accession=PF00583.16; Description =Acetyltransferase (GNAT) family
MLDPRSEIYPTIEYRPIQPSDLEALEKIHLALFPIRYEREFFLNVVSGHGIVSWGAVDTSRSDDRRDEIIGFVTTRMIAAKDSEIEDLFRYNSSRKDLTLVYILTLGVVDSYRNLGIASSLVREVVKYAASISNCRGVYLHVISYNQPAISFYKKMLFKLVRRLPMFYYIRGQHYDSYLFVYYVNGGRSPCSPLVHIRIWAAMLVWTLKMLVAKFWSKEDHCGPRWARCQESNTLLAPQSNKRIISGDSTRCHV

SEQ ID NO: 78143 - protein, 34 aa, Setaria italica
  Transcript Sequence Number=SeqID_12169
VPHLAYLQKDNTTILKFFSKITSAIKYTSLVTLV

SEQ ID NO: 78144 - protein, 160 aa, Setaria italica
  Transcript Sequence Number=SeqID_12170
  Gene Ontology: Mol. function=DNA-directed DNA polymerase activity; Cellular component=intracellular; Biological process=DNA replication
  Homolog annotation: Hit_ID=B9SAH0; Match level="QueryCoverage=100%, HitCoverage=16%, E-value=2e-62, Identity=69%"; Hit description=DNA polymerase I, putative
LARDWKVSVKEAKDTLKLWYSDRKEVLAWQMKQKELAQEKCEVYTLLGRSRRFPNMAYATSGQRGHIERAAINAPVQGSAADVAMCAMLEIDRNTHLKELGWTLLLQVHDEVILEGPSESAELAKSIVVECMSKPFYGTNILNVDLAVDAKCAQNWYAAK

SEQ ID NO: 78145 - protein, 80 aa, Setaria italica
  Transcript Sequence Number=SeqID_12171
  Subcellular localization annotation: CTP_CleavageSite=63; ConfidenceScore=5.11e-01
TSHLMNKQHALALLLLSRSSHLKLRSGPTENLHSKKSKRYYTTSVHSQQLEVTASKSSVFQCSAATKKWGCDPAVVGATT

SEQ ID NO: 78146 - protein, 290 aa, Setaria italica
  misc_feature (11)..(11): Xaa can be any naturally occurring amino acid
  Transcript Sequence Number=SeqID_12172
  Gene Ontology: Mol. function=DNA-directed DNA polymerase activity; Cellular component=intracellular; Biological process=DNA replication
  Homolog annotation: Hit_ID=B9SAH0; Match level="QueryCoverage=100%, HitCoverage=30%, E-value=1e-128, Identity=74%"; Hit description=DNA polymerase I, putative
  Pfam annotation: Domain name=DNA_pol_A; Domain location=1-289; Score=- 62.2; E_value=1e-10; Accession=PF00476.12; Description=DNA polymerase family A
LSARTPNLQNXPALKRIGIRIRQAFVAAPGNSLIVADYGQLELRILAHLTNCKSMLDAFKAGGDFHSRTAMNMYQHIRDAVDEKKVLLEWHPQPGQEKPPVPLLKDAFGAERRKAKMLNFSIAYGKTAVGLSRDWKVSVKEARDTLKLWYGDRKEVLAWQKRQKKLAHEKCEVYTLLGRSRRFPNLTQFGPGQRGHIERAAINAPVQGSAADVAMCAMLEIERDTRLKELGWRLLLQVHDEVILEGPSESAETAKAIVVECMSKPFYGTNILNVDLAVDAKCAKSWYAAK

SEQ ID NO: 78147 - protein, 245 aa, Setaria italica
  Transcript Sequence Number=SeqID_12173
GDHKLQLLKHAEPLIQEEPLKPWITLKRNINNIRYLPALADISFKRRYVYIDVGARSYGSSIGGWFRKHYPKQNHTFQVYAIEADPAFHSEYAAKKGVTLLPYAAWVKNDTLKFEINGDPGKEDEAKANGRGRGRIRPAAGNRMSGEVRSVPAFDFAEWLKQTVTEQDYVVMKMDVEGTEFDLIPRLFDTGAICLVDELFLECHYNRWQKCCPGERSPKYENTYEECLDLFSSLRESGVLVHQWW

SEQ ID NO: 78148 - protein, 93 aa, Setaria italica
  Transcript Sequence Number=SeqID_12174
  Subcellular localization annotation: CTP_CleavageSite=54; ConfidenceScore=5.11e-01
MHYYADSSSVYKAAGNSTYYPSGPQPQWQSDTGAAATMSTFGAPGGGWHAPAPPADMTSGLYSSPPLPPPSPHEALGLGKGTFTYEQLAAATG

SEQ ID NO: 78149 - protein, 165 aa, Setaria italica
  Transcript Sequence Number=SeqID_12175
  Gene Ontology: Cellular component=integral to membrane
  Homolog annotation: Hit_ID=O24564; Match level="QueryCoverage=100%, HitCoverage=81%, E-value=4e-67, Identity=45%"; Hit description =Embryogenesis transmembrane protein
RKNVANKLENFSCRYIWTKASFGHNQRSDVNDNDCELGHNQEGDADDRNWERRRNLLLMLAVLAATVTYQAGMNPPGGVWSDDKAVSGKPGDPILQQNNLKRYDVFYYSNSLSFVSSVVITILLVNKESCEHGIKSYALRVCLVVGLVSLLIAYSAGSCRKARES

SEQ ID NO: 78150 - protein, 161 aa, Setaria italica
  Transcript Sequence Number=SeqID_12176
  Gene Ontology: Mol. function=nucleoside-triphosphatase activity; Cellular component=intracellular; Biological process=regulation of transcription, DNA-dependent
  Homolog annotation: Hit_ID=B9S5U3; Match level="QueryCoverage=94%, HitCoverage=2%, E-value=1e-11, Identity=32%"; Hit description=ATP binding protein, putative
LLERICGSANFANTLKHGKKNQKKTALSNLFKTLEECGLSKHRSMGHEWRDELSAPSSLFLEESYDAAHLLQQVSSQKKLEDVSIVHSMLLTTDNWKYANCQYFKCLAMMQQLRQVSLKFNKDLGLEEVNRATSFMNHLLTILSEQRHFAYNLFDSVEAVS

SEQ ID NO: 78151 - protein, 361 aa, Setaria italica
  Transcript Sequence Number=SeqID_12177
  Gene Ontology: Mol. function=iron ion binding; Cellular component =integral to membrane; Biological process=transport
  Homolog annotation: Hit_ID=Q7XRV1; Match level="QueryCoverage=98%, HitCoverage=52%, E-value=1e-166, Identity=80%"; Hit description =Probable metal-nicotianamine transporter YSL5
  Pfam annotation: Domain name=OPT; Domain location=1-342; Score=-27.0; E_value=1.4e-10; Accession=PF03169.7; Description=OPT oligopeptide transporter protein
MSIPAGFIAISIILGDGLYNLVKIFVIIAKEFCNVRSKQHDLPVEALEDDENSEQLVEEKLQTEVFLKDSIPPWFAASGYIALAAISTATVPTIFPQLKWYLVLLCYFLAPAVAFCNSYGMGLTNLNLAPTYGKIALFAFASLVGSDGGGVIAGLAACGIIMSIACSTADLMQDFKSGYLTLSSPRSMFVAQLIGIALGCVIAPLTLWLFWTAFDIGNPDGEYKAPFAIMFREMAILGIKGFSALPMHCVEICCAAFFLALAISLLKDVTPPNVSRFIPIPIAMAAPFYVGAYFGVDMFIGTVILFAWQKLNREEADGYAVAVASGLICGDGIWSIPSAVLSILGINPPICMSFKPSSASR

SEQ ID NO: 78152 - protein, 112 aa, Setaria italica
  Transcript Sequence Number=SeqID_12178
  Gene Ontology: Mol. function=electron carrier activity; Biological process=metabolic process
  Homolog annotation: Hit_ID=B6THA4; Match level="QueryCoverage=96%, HitCoverage=28%, E-value=3e-51, Identity=85%"; Hit description =Oxidoreductase
KTRTLILACGATLYWADGKTATFNCSFLTNLAFDVTIYGTNGTLHVTDLVIPYEEKSAEFSLASKSTFVKPTIGWDPIPSKHIVTTDLPQEALMVKEFSRLVQNIRDAGGRP

SEQ ID NO: 78153 - protein, 141 aa, Setaria italica
  Transcript Sequence Number=SeqID_12179
  Homolog annotation: Hit_ID=B6TFT3; Match level="QueryCoverage=99%, HitCoverage=97%, E-value=3e-45, Identity=65%"; Hit description=Salt tolerant protein
  Pfam annotation: Domain name=UPF0220; Domain location=1-141; Score =21.6; E_value=6.6e-07; Accession=PF05255.3; Description =Uncharacterised protein family (UPF0220)
MENLALLWGIIGPGVAGAIFGAGWWFWVDAVVCSAVSVSFLHYLPGIFASLAALMFNCVNKDEIGYDYYSPYGDDSEWRVKLWLFVAYVVSFVCLAGSVGLLVQDALTDKGPSVWTGVAGVLQCVLVLISGLTYWTCHSED

SEQ ID NO: 78154 - protein, 37 aa, Setaria italica
  Transcript Sequence Number=SeqID_12180
  Homolog annotation: Hit_ID=B6TXP6; Match level="QueryCoverage=100%, HitCoverage=13%, E-value=7e-09, Identity=83%"; Hit description =Transposon protein
PAAFSCELRPSPLHNLSSAASVTRCRSRKLADGGRFR

SEQ ID NO: 78155 - protein, 231 aa, Setaria italica
  Transcript Sequence Number=SeqID_12181
  Gene Ontology: Mol. function=microtubule motor activity; Cellular component=microtubule associated complex; Biological process =microtubule-based movement
IFSEDEELLPKQLKTLAESGKMQNKTEEMGIIDIDSWIHQQIIENTSICQSENVLDIPEITEYGTYNSSTASPIQECIKGGKQAQDEDSNLKLQSSMQNVEGIKQAKAINQFPSAELCTPPSKELCNNEKMKEHKSERLAYNGNSRRTLQEKLDKCMPEQPDKESLEKKPEKESKTDAIIQPEIRLQDEEHYIDKSTKFFRALRTAWVGALLGLGIMSLGLEQDFFQSLTL

SEQ ID NO: 78156 - protein, 476 aa, Setaria italica
  Transcript Sequence Number=SeqID_12182
  Gene Ontology: Mol. function=iron ion binding; Cellular component =integral to membrane; Biological process=iron ion transport
  Homolog annotation: Hit_ID=Q7XN54; Match level="QueryCoverage=100%, HitCoverage=70%, E-value=0.0, Identity=80%"; Hit description =Probable metal-nicotianamine transporter YSL16
  Pfam annotation: Domain name=OPT; Domain location=1-460; Score=279.6; E_value=6.8e-81; Accession=PF03169.7; Description=OPT oligopeptide transporter protein
  Subcellular localization annotation: CTP_CleavageSite=81; ConfidenceScore=5.11e-01
GTATAVLINGFHTPQGDKNAKKQMRGFLKYFGMSFLWSFFQWFYTAGEACGFVQFPTFGLKAWKQTFFFDFSLTYVGAGMICSHLVNVSLLLGAILSWGVMWPLISKQKGNWYSAKASESSMTSIYGYKAFLCIALLVGDGLYNFVKVILISVKNVRERSRRKSLNRVADADTMALDDLQRDEVFNRDNIPAWLAYAGYALLSIIAVIIIPIMFRQVRWYYVIVAYLMAPALGFCNAYGTGLTDMNMGYNYGKIALFILSAWAGKDNGVIAGLVGCGLVKQLVLISADLMHDFKTGHLTLTSPRSMLVGQAVGTLMGCVLAPLTFMLFYKAFDVGNPDGYWKAPYALIYRNMAILGVEGFSALPKHCLQLCAAFFAFAVAANLARDLLPRRLARFVPLPMAMAVPFLVGASFAIDMCVGSLVVFVWHKLDSKKAALMVPAVASGLICGDGIWTFPSSLLALAKVKPPICMKFTPGS

SEQ ID NO: 78157 - protein, 86 aa, Setaria italica
  Transcript Sequence Number=SeqID_12183
  Homolog annotation: Hit_ID=Q10FJ2; Match level="QueryCoverage=96%, HitCoverage=21%, E-value=3e-40, Identity=93%"; Hit description =Pleckstriny domain-containing protein, putative, expressed
FAEVRDTESSLEKVKRQLSSGSGRYLLQGPLLKRSETLRKWNERWVILDPTSGKMEYKLRRNETAIKGAILFDASSTITLSPVNFQ

SEQ ID NO: 78158 - protein, 170 aa, Setaria italica
  Transcript Sequence Number=SeqID_12184
  Homolog annotation: Hit_ID=Q10FJ2; Match level="QueryCoverage=95%, HitCoverage=41%, E-value=1e-72, Identity=80%"; Hit description =Pleckstriny domain-containing protein, putative, expressed
FCLTLLGSLLDPTSGKMEYKLRRNETAIKGAILFDASSTITLSPVNFQGMPKYDGCCFYIGTPQKKDYFLCAETPSAAKAWVSTLNATQLVLRAHKEAVNSLAGNGSPATLGTVATAVANANATAMEATKEIEAAMKVSMRAALGLGTNNSNEGQLDDLTIMKETLRVKD

SEQ ID NO: 78159 - protein, 543 aa, Setaria italica
  Transcript Sequence Number=SeqID_12185
  Gene Ontology: Mol. function=nucleic acid binding
  Homolog annotation: Hit_ID=Q10FJ2; Match level="QueryCoverage=70%, HitCoverage=96%, E-value=1e-163, Identity=76%"; Hit description =Pleckstriny domain-containing protein, putative, expressed
  Pfam annotation: Domain name=PH; Domain location=74-177; Score=49.6; E_value=1.2e-11; Accession=PF00169.21; Description=PH domain
  Pfam annotation: Domain name=TolA; Domain location=213-526; Score= -154.9; E_value=0.099; Accession=PF06519.3; Description=TolA protein
  Pfam module annotation: Pfam domain module=PH::TolA; Domain location =74-177::213-526
  Subcellular localization annotation: CTP_CleavageSite=42; ConfidenceScore=5.55e-01
TTTLSQPDRYDAPPPTPCPSPSAAPRPPKPYYPCRLRRSPPRAMATNGSSPRVRDTESSLEKVKRQLSSGSGRYLLQGPLLKRSETLRKWNERWVILDPTSGKMEYKLRRNETAIKGAILFDASSTITLSPVNFQGMPKYDGCCFYIGTPQKKDYFLCAETPSAAKAWVSTLNATQLVLRAHKEAVNSLAGNGSPATLGTVATAVANANATAMEATKEIEAAMKVSMRAALGLGTNNSNEGQLDDLTIMKETLRVKDEELQHLAKDIRSRDATIKEIADKLTETAEAAEAAASAAHTMDEQRRLLCVEIERLKQALERQIEQSMLKLRQSEEKVISLSKEKDQLMKERDAAFQEAYMWRTELGKAREQAVIQEATIARAEEKARVSEADAAARIKEAAEKLHAVEKEKEELLALVGVLQSQVQREQSSTKQVCEERSESCSGADNSPPLTKHVDASDDNVDKACVSDSRSVLLSSDSTEVQLAVDGVDIRPIGDAEWGTFQQSEALIADVREVSPEAEGGSLDIPVVNPPPVSDHIQGGTTHP

SEQ ID NO: 78160 - protein, 132 aa, Setaria italica
  Transcript Sequence Number=SeqID_12186
  Gene Ontology: Mol. function=ubiquitin-protein ligase activity; Cellular component=ubiquitin ligase complex; Biological process =ubiquitin-dependent protein catabolic process
  Homolog annotation: Hit_ID=O48700; Match level="QueryCoverage=89%, HitCoverage=15%, E-value=1e-27, Identity=52%"; Hit description=U-box domain-containing protein 6
LSLHAPNIPFLMASGIIESLRAVLAPSSLWTDKALAVLLNLALTRAGKAEIAADAAMVGTIVLILDNGEPGEMEKAVSCLYVICSGNEGSSQTVLQEGVIPALVSVTANGTARARDKAQRLLRLFREQRQRE

SEQ ID NO: 78161 - protein, 73 aa, Setaria italica
  Transcript Sequence Number=SeqID_12187
VSLKGLNPQLVHYHFHLLEQTCYYLIRNITVTITLFELTRNKCLLDVKLTCNSVVSTRHRHGIGYPSSALPIC

SEQ ID NO: 78162 - protein, 182 aa, Setaria italica
  misc_feature (41)..(41): Xaa can be any naturally occurring amino acid
  Transcript Sequence Number=SeqID_12188
  Gene Ontology: Mol. function=nucleoside-triphosphatase activity; Cellular component=membrane; Biological process=transport
  Homolog annotation: Hit_ID=Q7XML5; Match level="QueryCoverage=85%, HitCoverage=16%, E-value=8e-66, Identity=80%"; Hit description =OSJNBa0040D17.13 protein
  Pfam annotation: Domain name=ABC_tran; Domain location=53-178; Score=- 14.1; E_value=4.8e-05; Accession=PF00005.19; Description=ABC transporter
NKNLTFTGVIDMVKDQQKEITRPLLKVEFRDLTLMLGKKKXLLRSINGELRPGRVTAVMGPSGAGKTTFLNAVTGKVNGYKMTGSVLVNGKNVNIRSYKKIIGFVPQDDIVHGNLTVEENLWFSAKCRLSARMKHRDKVLIVERVIDSLDLQGIRTSSASCRRALRRSCDEELSRPEVWFYS

SEQ ID NO: 78163 - protein, 73 aa, Setaria italica
  Transcript Sequence Number=SeqID_12189
  Gene Ontology: Mol. function=oxidoreductase activity, acting on single donors with incorporation of molecular oxygen, incorporation of two atoms of oxygen; Biological process=flavonoid biosynthetic process
  Homolog annotation: Hit_ID=P41213; Match level="QueryCoverage=78%, HitCoverage=14%, E-value=1e-21, Identity=82%"; Hit description =Leucoanthocyanidin dioxygenase
LHRGLVNRDAVRVSWVVFCEPPPDLVLLRPMPELVTPDNPARFTPRTFKQHIDSKLFKKHQQLAVTDDDEQTN

SEQ ID NO: 78164 - protein, 189 aa, Setaria italica
  Transcript Sequence Number=SeqID_12190
  Gene Ontology: Mol. function=NAD+ kinase activity; Biological process= metabolic process
  Homolog annotation: Hit_ID=Q60E60; Match level="QueryCoverage=79%, HitCoverage=30%, E-value=3e-52, Identity=67%"; Hit description =Putative NAD kinase 3
MSADELAATREVCDERINLSVATSHQTENWELTKVSSVERAAYAFIPQTPIRSTDAHLEEFSEAMRTVAKTLRRVVEGKAAAQAEAAEWKRKYELQVASKEHKHHNVIKGCSNFGNDKLEQLTSQMALETASIDQTSCCGNHGICSHQILQDECPGPNRKPDEKIVARKAPFRLLWVVDGDKNDQHKHD

SEQ ID NO: 78165 - protein, 119 aa, Setaria italica
  Transcript Sequence Number=SeqID_12191
  Gene Ontology: Mol. function=transporter activity; Cellular component= mitochondrial inner membrane; Biological process=transport
  Homolog annotation: Hit_ID=B9SE25; Match level="QueryCoverage=85%, HitCoverage=41%, E-value=1e-43, Identity=80%"; Hit description =Mitochondrial deoxynucleotide carrier, putative
  Pfam annotation: Domain name=Mito_carr; Domain location=10-105; Score= 84.1; E_value=5e-22; Accession=PF00153.19; Description=Mitochondrial carrier protein
  Subcellular localization annotation: CTP_CleavageSite=20; ConfidenceScore=5.22e-01
QLQHHQPQLGTVPHLLAGGVAGAVSKTCTAPLARLTILFQVQGMHSDVATMRNTSIWREASRIVYEEGFRAFWKGNLVTIAHRLPYSSISFYAYERYKNLLQMLPGLEKNGGFGADVGV

SEQ ID NO: 78166 - protein, 129 aa, Setaria italica
  Transcript Sequence Number=SeqID_12192
  Homolog annotation: Hit_ID=Q2Z1Y5; Match level="QueryCoverage=65%, HitCoverage=65%, E-value=4e-09, Identity=51%"; Hit description=Pm52 protein
MAKFNVVQKNKRQWKQDRKRAAHGEPGTGKLKQRTAPISMSGKRKRKIERRLNRDQKEAAMIKALENNMGDVDMVSAEESSEAAKGKSQVKVSVKKSSRIQIKRLKGKGRKKAKNAKPPTKDKVDAMVE

SEQ ID NO: 78167 - protein, 86 aa, Setaria italica
  Transcript Sequence Number=SeqID_12193
  Gene Ontology: Mol. function=RNA-directed DNA polymerase activity
  Homolog annotation: Hit_ID=B9RMN2; Match level="QueryCoverage=100%, HitCoverage=18%, E-value=2e-26, Identity=56%"; Hit description =Pentatricopeptide repeat-containing protein, putative
  Pfam annotation: Domain name=PPR; Domain location=26-60; Score=38.3; E_value=3e-08; Accession=PF01535.12; Description=PPR repeat
LCKEKKIELAREVFVVLSPHITPDAYTFNIFVHGWCSMRRIDEAMWTIEEMKNKGFPPTVITYTAVIEAYCKQRKFRRVYELLDSM

SEQ ID NO: 78168 - protein, 202 aa, Setaria italica
  Transcript Sequence Number=SeqID_12194
  Gene Ontology: Mol. function=transporter activity; Cellular component= membrane; Biological process=oligopeptide transport
  Homolog annotation: Hit_ID=Q7XUE5; Match level="QueryCoverage=99%, HitCoverage=36%, E-value=1e-76, Identity=73%"; Hit description =OSJNBa0076N16.17 protein
ILSPPTLFIIPTTFQMVMLAIYDQFIVPFLRRRTGYASGITHLQRIGIGFASMILASAFAAVVERKRKEAAVEMSLFWLAPQFFLLGVSDVTSFPGLLEFFNSEAPRGMKSIATALFWCEVGLASLLATFLVQGVNSATGHGHHGGWLEGTSLNNSRLDLFYWVVTVVGFLGFLNYLYWAKKYVYRQDPLVVDEPSADQDSP

SEQ ID NO: 78169 - protein, 131 aa, Setaria italica
  misc_feature (35)..(35): Xaa can be any naturally occurring amino acid
  Transcript Sequence Number=SeqID_12195
  Gene Ontology: Mol. function=nucleic acid binding; Cellular component= endoplasmic reticulum membrane; Biological process=GPI anchor biosynthetic process
  Homolog annotation: Hit_ID=Q33AB1; Match level="QueryCoverage=56%, HitCoverage=6%, E-value=3e-26, Identity=74%"; Hit description =Retrotransposon protein, putative, unclassified
  Subcellular localization annotation: CTP_CleavageSite=56; ConfidenceScore=5.70e-01
MASSSLAQVSPPPTPASTPGAASSPSLPPQPATPXPAPTATPPSTASSTPTHDEPRSVEFATPLPHDEDRVDAYHDGEPLRYRTMADILGDQPMPGRVPHDVKAMLHLMCNDGESRSFAEVEGQAAWRTAM

SEQ ID NO: 78170 - protein, 142 aa, Setaria italica
  Transcript Sequence Number=SeqID_12196
  Homolog annotation: Hit_ID=B6U2V9; Match level="QueryCoverage=100%, HitCoverage=46%, E-value=7e-58, Identity=78%"; Hit description=ENT domain containing protein
  Pfam annotation: Domain name=ENT; Domain location=51-124; Score =125.3; E_value=1.9e-34; Accession=PF03735.6; Description=ENT domain
MAYRAFDGSGTDDELPPTYQISGQRVHFSGNGRSLAGTLSQPRQPRLHSKLDSDIHQIEQQAYTGVLRSFKMQSDALTWEKESLITELRRELKVSDEEHRVLLNKVNEEEAVHRIRQSRQGGGMQSSLHHDSVVAHSLGPLK

SEQ ID NO: 78171 - protein, 84 aa, Setaria italica
  Transcript Sequence Number=SeqID_12197
  Subcellular localization annotation: CTP_CleavageSite=32; ConfidenceScore=5.12e-01
IVPISSPLLIHFKCSVHTTASRLVLTFCVQVKSSMNSYALDLVGSLYICPACLFCYKQMCSIRPLLIVSLCCPFFCVSGVANLL

SEQ ID NO: 78172 - protein, 231 aa, Setaria italica
  Transcript Sequence Number=SeqID_12198
  Gene Ontology: Mol. function=zinc ion binding; Cellular component =intracellular
  Homolog annotation: Hit_ID=Q7XP23; Match level="QueryCoverage=93%, HitCoverage=56%, E-value=2e-37, Identity=39%"; Hit description =OSJNBa0027H09.16 protein
  Pfam annotation: Domain name=DUF1644; Domain location=22-231; Score =141.7; E_value=2.2e-39; Accession=PF07800.4; Description=Protein of unknown function (DUF1644)
MTSKKSNRSTVTSRTALHMEWDRISCPICMEQPHNAVLLICSSYKNGCRCYVCNTSHRHSNCLDRFRKMNGDSKVLASHSTYSVLSNSNIRTVQPRAHYNIISRRSRSPRPGRHVDNEASHRSNANNGQNADGISRSEPEIVNYQEYENPALSIGEGSVVIGGCHDAMQSSAEVKCPLCRGSVSGWIPAGEVRQYLDRKLRTCSHDSCKFVGTYEQLREHARNAHFLTKPA

SEQ ID NO: 78173 - protein, 324 aa, Setaria italica
  Transcript Sequence Number=SeqID_12199
  Gene Ontology: Mol. function=zinc ion binding; Cellular component =intracellular
  Homolog annotation: Hit_ID=Q7XP23; Match level="QueryCoverage=32%, HitCoverage=28%, E-value=2e-28, Identity=53%"; Hit description =OSJNBa0027H09.16 protein
  Pfam annotation: Domain name=DUF1644; Domain location=1-156; Score =14.4; E_value=1.3e-07; Accession=PF07800.4; Description=Protein of unknown function (DUF1644)
MVIVRRSRSPRPGRHVDNEASHRSNANNGQNADGISRSEPEIVNYQEYENPALSIGEGSVVIGGCHDAMQSSAEVKCPLCRGSVSGWIPAGEVRQYLDRKLRTCSHDSCKFVGTYEQLREHARNAHFLTKPAHVDLSRKRTWDRIEREQEVGDVISAIRSQIPGAIIVGDYVIETRDDMSPDIDSGDESSEEWWSDRGDAESPGNRLDSPSVWANDTLGSPSIWPDERRNLPRLLPQNNRVSPRLSFSNRRSLHSDWQGIRQPRTQSLLRPGFSNRHSGHRSNYRGYRRTFLDRSYTRDPGRSIDPSLVPSRRQRLRYTHRSHY

SEQ ID NO: 78174 - protein, 392 aa, Setaria italica
  Transcript Sequence Number=SeqID_12200
  Gene Ontology: Mol. function=metal ion binding; Cellular component =endoplasmic reticulum membrane
  Homolog annotation: Hit_ID=B6TCF5; Match level="QueryCoverage=100%, HitCoverage=100%, E-value=0.0, Identity=79%"; Hit description =Palmitoyltransferase swf1
  Pfam annotation: Domain name=zf-DHHC; Domain location=152-215; Score =98.0; E_value=3.3e-26; Accession=PF01529.12; Description=DHHC zinc finger domain
MEVPWLLVAHGSVTALVVVSFLCGQWPIFEGTFIQSINHFLTFGAYHYLLRFVQAVCGTGARDLVLGVEQYCCDRPNPILQVFYVAIIGVTYFMIVQTSFEYIPGYYVSGWHRYLSIVAVAVGAILFVLTSFSDPGTVTAENFSQYVSAYPYDNIIFVEKECSTCKITRPARAKHCRICDKCVARFDHHCGWMNNCIGEKNTRYFVAFLVWHFLICVYGALVLGFILAGELKERKVIYILTAYYGIENSFLGLFPHVAQWLLAVHNTQILLSVFLAILALLLGGFCAYHAHLCLTNTTTNESFKWQDYIMWMKKENEAKANAAALKASMGSSNSEAHKAPPSKWRSFFVRSRRPSVEPVVKNNIYDRGMIRNMCEVIVPLSERKSFSRRKSD

SEQ ID NO: 78175 - protein, 128 aa, Setaria italica
  Transcript Sequence Number=SeqID_12201
  Gene Ontology: Cellular component=integral to membrane
  Homolog annotation: Hit_ID=Q5Z5T2; Match level="QueryCoverage=92%, HitCoverage=18%, E-value=4e-63, Identity=97%"; Hit description =Putative PHG1A protein
  Pfam annotation: Domain name=EMP70; Domain location=1-128; Score= -272.1; E_value=1.8e-05; Accession=PF02990.8; Description =Endomembrane protein 70
RWDVYLLSSDSQIHWFSIVNSLMIVLFLSGMVAMIMMRTLYKDIANYNQLDNQDEAQEETGWKLVHGDVFRPPVHSGLLCVYVGTGVQFFGMTLVTMMFALLGFLSPANRGGLMTASVIPKNCTPVPT

SEQ ID NO: 78176 - protein, 38 aa, Setaria italica
  Transcript Sequence Number=SeqID_12202
  Gene Ontology: Cellular component=integral to membrane
  Homolog annotation: Hit_ID=Q5Z5T2; Match level="QueryCoverage=78%, HitCoverage=4%, E-value=5e-09, Identity=96%"; Hit description =Putative PHG1A protein
FNQSIFTEAYAFFVLTGTIGFYACFWFVRKIYASVKID

SEQ ID NO: 78177 - protein, 639 aa, Setaria italica
  Transcript Sequence Number=SeqID_12203
  Gene Ontology: Cellular component=integral to membrane
  Homolog annotation: Hit_ID=Q5Z5T2; Match level="QueryCoverage=95%, HitCoverage=94%, E-value=0.0, Identity=90%"; Hit description =Putative PHG1A protein
  Pfam annotation: Domain name=Cytochrom_B_C; Domain location=474-555; Score=-12.0; E_value=0.022; Accession=PF00032.9; Description =Cytochrome b(C-terminal)b6petD
  Pfam annotation: Domain name=EMP70; Domain location=62-597; Score =1066.0; E_value=0; Accession=PF02990.8; Description=Endomembrane protein 70
  Pfam module annotation: Pfam domain module=Cytochrom_B_C::EMP70; Domain location=474-555::62-597
MATPGRGLRPRHLLIFLAAAVLYAASSPAGAFYLPGVAPRDFQKDDELQVKVNKLSSIKTQLPYDYYFLDYCKPQAIKNSAENLGEVLRGDRIENSVYNFKMRRDESCKVVCRRKLSQEAAKNFKEKIDDEYRVNMILDNLPVVVPRQTREGSQTPSFEHGYRVGYKLKDDKYYINNHLSFKVLYHEDQTSPDARIVGFHVIPSSIKHEYGTWDDNNPTAQTCNANIKITPGSHTPQEVAPDAYVVFSYDVTFEASEIIWASRWDVYLLSSDSQIHWFSIVNSLMIVLFLSGMVAMIMMRTLYKDIANYNQLDNQDEAQEETGWKLVHGDVFRPPVHSGLLCVYVGTGVQFFGMTLVTMMFALLGFLSPANRGGLMTAMVLLWVFMGVLAGYTSSRLYKMFKGTEWKKITLKTAFMFPGIIFALFFFLNALIWGEKSSGAVPFGTMFALFLLWFGISVPLVFVGSFLGFKQPAIEDPVKTNKIPRQIPEQAWYLQPAFAILAGGILPFGAVFIELFFILTSIWLNQFYYIFGFLFIVFIILIVTCAEITIVLCYFQLCSEDYHWWWRAYLTAGSSALYLFAYAIFYFFNKLEITKLVSGILYFGYMLIISYAFFVLTGTIGFYACFWFVRKIYASVKID

SEQ ID NO: 78178 - protein, 189 aa, Setaria italica
  Transcript Sequence Number=SeqID_12204
  Gene Ontology: Cellular component=ribosome
  Homolog annotation: Hit_ID=B6T286; Match level="QueryCoverage=43%, HitCoverage=48%, E-value=3e-13, Identity=50%"; Hit description=60S ribosomal protein L18A
MGGEMPDADGKPRGADSSSASYGYPPSAPPQPQHQHQYGTFGTPSGGSGEFPQPAVGFPQPALPPGMQQYPQPPPASYAVYPPPPQQPYSAAAPYYAQGYQAVQGYIPVVEGRPVRMRRLPCCGLGMGWFLFIIGFFLAAIPWYVGAFVLIFVRVHDYREKPGYVACTIAASLAAIAVLLGATKGADVW

SEQ ID NO: 78179 - protein, 49 aa, Setaria italica
  Transcript Sequence Number=SeqID_12205
PNTAHESTYLGFSSNKFIGIHSKLYICMPLLPSPATGLISTYRNSLPLP

SEQ ID NO: 78180 - protein, 119 aa, Setaria italica
  Transcript Sequence Number=SeqID_12206
  Subcellular localization annotation: CTP_CleavageSite=95; ConfidenceScore=5.57e-01
YSSTGVGVFLPKVRSVYLSVRSYRPSSRCRTYLSRRQGRRSAGKAPPASSLGATATATPQPRLYGVTSINCCVQLWGCCKSSWSISFSLCFQPLRLMSPAAVRACCAISLQLFASMLMC

SEQ ID NO: 78181 - protein, 120 aa, Setaria italica
  Transcript Sequence Number=SeqID_12207
  Subcellular localization annotation: CTP_CleavageSite=96; ConfidenceScore=5.61e-01
GAQVSWWARRSHGGGAPPRKAALPPATAAPVRPPSRRQGRRSAGKAPPASSLGATATATPQPRLYGVTSINCCVQLWGCCKSSWSISFSLCFQPLRLMSPAAVRACCAISLQLFASMLMC

SEQ ID NO: 78182 - protein, 134 aa, Setaria italica
  misc_feature (123)..(123): Xaa can be any naturally occurring amino acid
  Transcript Sequence Number=SeqID_12208
  Gene Ontology: Mol. function=protein binding
  Subcellular localization annotation: CTP_CleavageSite=63; ConfidenceScore=5.63e-01
TNLDINTSKSDAPSVPEVNPHTMQLPTGPPSNSPSTIASASGSSSIPIQMPSNLSLPPRPEVFGTARPSVPGQPSPIFSNPTSLPGRPIVPSAAPLPQTAPSIANPGAMLQNSQPTFYPSYPXAGYVPTQPLWG

SEQ ID NO: 78183 - protein, 53 aa, Setaria italica
  Transcript Sequence Number=SeqID_12209
  Subcellular localization annotation: CTP_CleavageSite=19; ConfidenceScore=5.24e-01
MIGVNTCSLNAGAWSSGTPKMRKKSYSLESSNLAVPATGLTLMPVRSLSGILI

SEQ ID NO: 78184 - protein, 86 aa, Setaria italica
  Transcript Sequence Number=SeqID_12210
HQAKKWYTEKMVQANVVMEELLDEITDPSQELASANIENVEDLEGKDIASIVSETSTSSHVSDDVVHTEEKDEERKLLPADIAHLP

SEQ ID NO: 78185 - protein, 137 aa, Setaria italica
  misc_feature (86)..(86): Xaa can be any naturally occurring amino acid
  misc_feature (91)..(91): Xaa can be any naturally occurring amino acid
  Transcript Sequence Number=SeqID_12211
LEAHVPTSKAALNRRWNKDAFAKYWDQISDEDAYSILSDGDQTVEKSHGLPVDPIFKKWILGPEFLVTPPEVRDALKQLKQLKHFXERKRXKPSSDVLLGILKVGSEGTFFSTNLPEGGFFLCGGRQSQNTTRTMLT

SEQ ID NO: 78186 - protein, 221 aa, Setaria italica
  Transcript Sequence Number=SeqID_12212
  Pfam annotation: Domain name=DUF544; Domain location=35-147; Score= -20.1; E_value=0.0035; Accession=PF04424.5; Description=Protein of unknown function (DUF544)
NRKMRYTAREMEFMGGSTKVLVCNDRAASALTSLSNWLVLNNKVNFDSREPKFTVAKFMEMHISRKILNWHKINVLPTPEIHQIVQEYFDITERLRTGIKVNPVAGTAKFEDSREYDFFRILGVPLLHAPAFNEQVFPSLKEQLEPGQIGILYLNEEFNTICKHNGIVYMLVEDEALHKKNPFASWKTMVDEKEIFVAGDFSSTRAHINQKVYKCSKCLGR

SEQ ID NO: 78187 - protein, 327 aa, Setaria italica
  Transcript Sequence Number=SeqID_12213
  Pfam annotation: Domain name=DUF544; Domain location=32-144; Score= -26.3; E_value=0.013; Accession=PF04424.5; Description=Protein of unknown function (DUF544)
  Pfam annotation: Domain name=zf-C2H2; Domain location=210-232; Score =21.2; E_value=0.0043; Accession=PF00096.18; Description=Zinc finger, C2H2 type
  Pfam module annotation: Pfam domain module=DUF544::zf-C2H2; Domain location=32-144::210-232
MRYTAREMEFMGGSTKVLVCNDRAASALTSLSNWLVLNNEANFDSREPKFTVAQFMERLISGKILNWHKNNVLPTPESQRIVVEYFDITKRLCTGIKVNPVAGTAKFEDSREYDLFRILGVPLLHAPAFNEQVFPSLQEQLEPGQIGILYLNGEFNTICKHNGTVYMLVEDEALHKKNPSASWKTMVDEKEIFVAGDFSYTRAHINQKVYKCSKCLEEFCTEINYERHLEAHVPTSKAALNRSWNKDVLAKYWDQISDEDACSILFDGDQTVEKSHGSPIKPIFENWILGPEFLVTPPEVRDALKQLKQLKRFYGRGIGRSHRLMCF

SEQ ID NO: 78188 - protein, 387 aa, Setaria italica
  Transcript Sequence Number=SeqID_12214
MERKREKPSSDVLLGILKVGSEGTFFSTNLPEGGFSFVEAGKSQNTTRTMLTYFSLRVEEVLAKKWYTEKTVQANVVMKELLAECTDPSEEYFPNFVSRKRLVRLFTLFNKDIVTALTRTGRKIAKRLLNYILKAHKAGHCWDGEWNILDIRVRGDGATLIIDKMPVNATKDGIVADLQKFIVLLRPYYKIEGIKGPAYFDEFHSDVMSLPELESEKFEIFQKFLADHMAFLPPASTSNLLERLFKLCDDIRRQNADFDYRPLQRLDCIGWTKIRDTMPYSKVFHYDQSLSHPYNDNYWDLLRFVRNFINRGLKYTQIDGVQSIEDPVILDIMVAYDLGKFITKLVLHVLYVFEKPKRLVSTWNAYKTSDDATEEIDEDGTEENEGI

SEQ ID NO: 78189 - protein, 448 aa, Setaria italica
  Transcript Sequence Number=SeqID_12215
MEGDRQKPSSDVLLAVLEVGSEGTIFSTNLPEGGFSFVEAGKSQNTTRTMLTYFSLRVEEVLAKKWYTEKTVQANLVMEELLAQYTDPSQELASASIENVEDLEGKDIASIVSETSTSSHVSGDVVHTEEKDEERKLLPADIAHLPELLGEEYFPNFVSRKTLVRLFTLFNKDVVTALTRTGRKIAKRLLNYILKAHKAGHCWNGEWNILDIRVRGDGATLIIDKMPVNATKDGIVADLQKFIVLLCPYYKIEGIKGPAYFDEFHSDVMSLPELKSEKFEIFQKFLADHMAFLPPASTSNLLERLFKLCDDVRRQNGHFTYHPLQRLDCLGWTKIGDIMPYHKVFHYDKTIVEPYKDNYWDLLRFVRNFSNHGLQFTQIDGVQSIEDPVILDIMVAYDLGKFITKLVLHVLYVFEKPKRLVSTWNAYKTSDDATEEIDEDGTEENEGI

SEQ ID NO: 78190 - protein, 578 aa, Setaria italica
  Transcript Sequence Number=SeqID_12216
  Gene Ontology: Mol. function=zinc ion binding; Cellular component =intracellular
  Pfam annotation: Domain name=zf-C2H2; Domain location=25-47; Score =21.2; E_value=0.0043; Accession=PF00096.18; Description=Zinc finger, C2H2 type
MVDEKEIFVAGDFSYTRAHINQKVYKCSKCLEEFCTEINYERHLEAHVPTSKAALNRSWNKDAFAKYWDQISDEDAYSILSDGDQTVEKSHGLPVDPIFKKWILGPEFLVTPPEVRDALKQLKQLKHLMEMKREKPSSDVLLGILKVGSEGTFFSTNLPEGGFSFVEAGKSQNTTRTMLTYFSLRVEEVLAKKWYTEKMVQANVVMEELLDEITDPSQELASANIENVEDLEGKDIASIVSETSTSSHVSDDVVHTEEKDEERKLLPADIAHLPELLGEEYFPNFVSRKRLVRLFTLFNKDIVTALTRTGRKIAKRLLNYILKVHKAGHCWNGEWSILDIRVRGDGATLIIDKMAVNATKDGIVADLQKFIVLLRPYYKIEGIKGPAYFDEFHSDVMSLPELESEKFEIFQKFLADHMAFLPPASTSNLLERLFRLCDDARRQNADFEYRPLRRLDRVGWTKIGAIMPYNKVFHYDEASSSIETYKDHYWDLLRFVRNFSNHGLKYTQIDGVQSIEDPVILDIMVAYDLGRFITKLVLHVLYVFEKPERLVSTWNAYKTSDDATEEIDEDGTEENEGI

SEQ ID NO: 78191 - protein, 104 aa, Setaria italica
  Transcript Sequence Number=SeqID_12217
  Gene Ontology: Mol. function=inositol or phosphatidylinositol phosphatase activity
  Homolog annotation: Hit_ID=Q9SKB7; Match level="QueryCoverage=89%, HitCoverage=8%, E-value=8e-11, Identity=41%"; Hit description=Type II inositol-1,4,5-trisphosphate 5-phosphatase 14
EVTCFTKRRKADSRTKELLKVVNIDGQVDTRFDILSAQDPCSYETKQTLFSSPRKEKARSPVGFLQRSRNALLGAADAVRRVAVKAGFGDDTRRIEAFTMSTDG

SEQ ID NO: 78192 - protein, 83 aa, Setaria italica
  Transcript Sequence Number=SeqID_12218
RCPLLKKKKSNSTWTSCKHQLNITTIGAISQVKEPVTQKPMNQEIWIVSLSKVTTLSNNSTHIKVIKLISHLEIWIQKAKLIT

SEQ ID NO: 78193 - protein, 207 aa, Setaria italica
  Transcript Sequence Number=SeqID_12219
  Gene Ontology: Mol. function=kinase activity
  Homolog annotation: Hit_ID=B6TIV0; Match level="QueryCoverage=100%, HitCoverage=60%, E-value=1e-92, Identity=83%"; Hit description=ATPase
  Pfam annotation: Domain name=BcrAD_BadFG; Domain location=17-207; Score=33.1; E_value=1.4e-08; Accession=PF01869.12; Description =BadFBadGBcrABcrD ATPase family
MGGYENGDSPAEDGVILGVDGGTTNTVCVCLPAAMPTPESPAAVPVVARAVAGCSNRNSVGESAALETLEQVMTQALAMANTDRSAVRAVCLAVSGVNHPSDQQRMLEWIRDLFPGNTKFYVENDAVAALSSGTMGRLHGCVLIAGTGCIAYGVTEDGKVARAAGAGPVLGDWGSGYGIAAQALTAVIKAHDGRGPQTCLTGEILEK

SEQ ID NO: 78194 - protein, 90 aa, Setaria italica
  Transcript Sequence Number=SeqID_12220
  Gene Ontology: Mol. function=kinase activity
  Homolog annotation: Hit_ID=B6TIV0; Match level="QueryCoverage=66%, HitCoverage=17%, E-value=2e-26, Identity=98%"; Hit description=ATPase
EIIGWTYADPSWARIAALVPVVVSSAEDGDEVANKILHDSVQELADTVIAVVRRLRLCGEGNVYVDHGTSLGFNFVHQLYFDYSNGVIAS

SEQ ID NO: 78195 - protein, 50 aa, Setaria italica
  Transcript Sequence Number=SeqID_12221
IQILFTFRKSFVSSDYMLTTSIFFQLSERLGSGLSSWGFTFYSNIQGSVP

SEQ ID NO: 78196 - protein, 98 aa, Setaria italica
  Transcript Sequence Number=SeqID_12222
LLLSPLQTKTQTPPPPPLVTAAESREESRIAKPGEAAAPHAPAPHRARDGRTEPGRRHRRHLPQPTRFGLALALASSCGLAAGAEIPKGKGPGSKRGA

SEQ ID NO: 78197 - protein, 96 aa, Setaria italica
  Transcript Sequence Number=SeqID_12223
RSRQTRTGGGCLRRSLLQPAVEFQHHRPGGGVPPRPAPNTLPPAVAAEEPLPPHPRPTETPDLRPGRSPAHRRAAQIRPRGHRIRRPEAPPPPPWP

SEQ ID NO: 78198 - protein, 179 aa, Setaria italica
  misc_feature (14)..(14): Xaa can be any naturally occurring amino acid
  misc_feature (25)..(25): Xaa can be any naturally occurring amino acid
  Transcript Sequence Number=SeqID_12224
  Gene Ontology: Mol. function=metal ion binding; Cellular component =plasma membrane
  Homolog annotation: Hit_ID=Q2R2X5; Match level="QueryCoverage=100%, HitCoverage=45%, E-value=2e-63, Identity=71%"; Hit description=Uvb -resistance protein uvr8, possible, putative, expressed
  Pfam annotation: Domain name=RCC1; Domain location=12-57; Score=6.7; E_value=0.15; Accession=PF00415.10; Description=Regulator of chromosome condensation (RCC1)
  Pfam annotation: Domain name=RCC1; Domain location=124-173; Score =9.1; E_value=0.084; Accession=PF00415.10; Description=Regulator of chromosome condensation (RCC1)
  Pfam annotation: Domain name=RCC1; Domain location=60-110; Score =45.4; E_value=2.2e-10; Accession=PF00415.10; Description=Regulator of chromosome condensation (RCC1)
  Pfam module annotation: Pfam domain module=RCC1::RCC1::RCC1; Domain location=12-57::124-173::60-110
AAGMLHSACIDEKXLFIFGQKTEKXFGRSNEAFRPVIVEEIPFSEEVACGGYHTCVVADSGDLYSWGSNENGCLGLGGTDMVRSPEILKSSLFKLPVSKVSCGWKHTAVISGDDIYTWGWGGANGTFFEEGHSSGGQLGHGNDVDYFEPMMVPFGKNARAVHVSCGFNHTGAIYEYCED

SEQ ID NO: 78199 - protein, 205 aa, Setaria italica
  Transcript Sequence Number=SeqID_12225
  Subcellular localization annotation: CTP_CleavageSite=54; ConfidenceScore=5.75e-01
TRPTASARLARTSNPARPTRTIMNALPSASVNSVLPATTAPLSFFPALPSTCVREDALSPSPRLSRPPPHQLVGFWHEASRSRTPRPDLAGLTRPHMLCAGSQGGPHQARLVNRAAGPGLPRLLHAALHGLRLVVQRDYQPSNPRTTRSSQHEKKNNFQSTGVIRTARNTCTTFILLDLICKCKYGVGTKESFFNTRKYVIFANM

SEQ ID NO: 78200 - protein, 249 aa, Setaria italica
  Transcript Sequence Number=SeqID_12226
  Gene Ontology: Cellular component=vacuole
  Homolog annotation: Hit_ID=B9RG20; Match level="QueryCoverage=67%, HitCoverage=75%, E-value=1e-34, Identity=45%"; Hit description =Transferase, transferring glycosyl groups, putative
KTTTTRHGAHPLPPPPLLLLLLLFAAAATVAEDASGLPLPSPTPWPERFHAVLFTNLTNYSSASTGPPLRITDLYYDWPRRRNLNLVRHQLSADPLYDVEWNNGTAFYFDSSTCRVVRFPVGVLPPWWLSGGGAEYAGRAVSGGIDCHVWGKAGLIVYYEEAATGRPVRWDFLDDDGIKQYVIRFEPGVALEDAQWQAPAHCFPPDDDDDAEQGKGNDDVASSSKEEVGVAMLEAARLLRKLAGAAATF

SEQ ID NO: 78201 - protein, 130 aa, Setaria italica
  misc_feature (29)..(29): Xaa can be any naturally occurring amino acid
  misc_feature (78)..(78): Xaa can be any naturally occurring amino acid
  Transcript Sequence Number=SeqID_12227
  Gene Ontology: Mol. function=transcription factor binding; Cellular component=intracellular; Biological process=ER to Golgi vesicle -mediated transport
  Homolog annotation: Hit_ID=B6SHR1; Match level="QueryCoverage=100%, HitCoverage=94%, E-value=3e-62, Identity=92%"; Hit description =Trafficking protein particle complex protein 2
  Pfam annotation: Domain name=Sedlin_N; Domain location=9-130; Score =197.9; E_value=2.7e-56; Accession=PF04628.5; Description=Sedlin, N -terminal conserved region
MTSTACFVIVSKNDIPIYEAEVGSTPKKXEDLSYHHQFILHAALDVVQDLAWTTNAMFLKSVDRFNDLVVSVYVTAVXTHTRFMLLHDSRSEDGIKSFFQEVHELYIKIFLNPLYLPGSRITSSHFDTKV

SEQ ID NO: 78202 - protein, 135 aa, Setaria italica
  Transcript Sequence Number=SeqID_12228
  Gene Ontology: Mol. function=transcription factor binding; Cellular component=intracellular; Biological process=ER to Golgi vesicle -mediated transport
  Homolog annotation: Hit_ID=B6SHR1; Match level="QueryCoverage=100%, HitCoverage=100%, E-value=8e-72, Identity=97%"; Hit description =Trafficking protein particle complex protein 2
  Pfam annotation: Domain name=Sedlin_N; Domain location=9-133; Score =239.0; E_value=1.2e-68; Accession=PF04628.5; Description=Sedlin, N -terminal conserved region
MASTACFVIVSKNDIPIYEAEVGSAPKKEDLSYHHQFILHAALDVVQDLAWTTNAMFLKSVDRFNDLVVSVYVTAGHTRFMLLHDSRSEDGIKSFFQEVHELYIKIFLNPLYLPGSRITSSHFDTKVRALARKYL

SEQ ID NO: 78203 - protein, 249 aa, Setaria italica
  Transcript Sequence Number=SeqID_12229
  Gene Ontology: Mol. function=electron carrier activity; Cellular component=integral to membrane; Biological process=oxidation reduction
  Homolog annotation: Hit_ID=A0MNY8; Match level="QueryCoverage=98%, HitCoverage=50%, E-value=1e-119, Identity=85%"; Hit description =Brassinosteroid C-3 oxidase
  Pfam annotation: Domain name=p450; Domain location=1-244; Score= -194.6; E_value=0.029; Accession=PF00067.14; Description=Cytochrome P450
KLIQGIIQEKRRRRRAVPDGGEGPRAPRDAIDVLISGGGSDELTDELISDNMIDLMIPAEDSVPVLITLAIKYLSECPLALQQLEEENMQLKRRKTDMGEALQWTDYMSLSFTQHVITETLRMGNIINGIMRKAVRDVEVKGHLIPKGWCVFVYFRSVHLDDKLYDEPYRFNPWRWKEKDTSTSSFTPFGGGQRLCPGLDLARLEASIFLHHLVTSFRWVAEEDHIVNFPTVRLKRGMPIRVTTKDGSH

SEQ ID NO: 78204 - protein, 129 aa, Setaria italica
  Transcript Sequence Number=SeqID_12230
  Subcellular localization annotation: CTP_CleavageSite=71; ConfidenceScore=5.32e-01
GACAAMVIEGSKTSHAKSSGCGSGCGSGCGGGGCGALFNSSTAAGQAKSGGCGSGCGSGGCGAMVTEGSKSSQAKSGGCGSGCGGGCGNGIMFNASTKAGGEGLSMSGGCGSGCGGGCGGGGCGALFNA

SEQ ID NO: 78205 - protein, 143 aa, Setaria italica
  misc_feature (124)..(124): Xaa can be any naturally occurring amino acid
  Transcript Sequence Number=SeqID_12231
  Gene Ontology: Mol. function=protein serine/threonine kinase activity
  Homolog annotation: Hit_ID=Q336S1; Match level="QueryCoverage=91%, HitCoverage=14%, E-value=4e-18, Identity=41%"; Hit description =Protein kinase domain containing protein, expressed
ANACAEVCKDKTTQILFQPPMDTKAAPIASQMNRNSEPEALPQEATRYDCMDMRDLNIIAENRESKYLNNGKQPWNEVEANVSKNGQDRMVAKQNEKTKKNALPKEDKDRFAAKAQKSHVVPNXLPSFKGFVIEEEEGSGGYG

SEQ ID NO: 78206 - protein, 171 aa, Setaria italica
  misc_feature (40)..(40): Xaa can be any naturally occurring amino acid
  Transcript Sequence Number=SeqID_12232
SGGAEADKITEFHHGGHGGSGGVLVVGFVVGVLSLAIAEXAALLWAIRTLTTTTTRPSNSSSNSSDDTSPAPPPPPLGDLKRQGFLWILEQEKMPAKASHHPSNDAQSHGGIKDKKTVVEVFPVKMLAKLEGHSLTLSAPDDASQQTTTIHLLDSTIVAVSASNLPSRKWA

SEQ ID NO: 78207 - protein, 57 aa, Setaria italica
  Transcript Sequence Number=SeqID_12233
  Gene Ontology: Mol. function=protein serine/threonine kinase activity; Cellular component=integral to membrane; Biological process=protein amino acid phosphorylation
  Homolog annotation: Hit_ID=C0LGW6; Match level="QueryCoverage=92%, HitCoverage=5%, E-value=2e-15, Identity=71%"; Hit description =Leucine-rich repeat receptor-like protein kinase (Fragment)
DLKSGKAIAVKRLYSQYNHSLREFETELETIGSIRHRNLVSLHGFSLKFSVNLIISS

SEQ ID NO: 78208 - protein, 769 aa, Setaria italica
  Transcript Sequence Number=SeqID_12234
  Gene Ontology: Mol. function=protein serine/threonine kinase activity; Cellular component=integral to membrane; Biological process=protein amino acid phosphorylation
  Homolog annotation: Hit_ID=B9R9M2; Match level="QueryCoverage=99%, HitCoverage=96%, E-value=0.0, Identity=50%"; Hit description=Erecta, putative
  Pfam annotation: Domain name=LRR_1; Domain location=101-123; Score =8.7; E_value=6.5; Accession=PF00560.25; Description=Leucine Rich Repeat
  Pfam annotation: Domain name=LRR_1; Domain location=125-147; Score =16.7; E_value=0.097; Accession=PF00560.25; Description=Leucine Rich Repeat
  Pfam annotation: Domain name=LRR_1; Domain location=149-171; Score =13.3; E_value=0.87; Accession=PF00560.25; Description=Leucine Rich Repeat
  Pfam annotation: Domain name=LRR_1; Domain location=173-195; Score =9.2; E_value=5.4; Accession=PF00560.25; Description=Leucine Rich Repeat
  Pfam annotation: Domain name=LRR_1; Domain location=197-219; Score =16.1; E_value=0.15; Accession=PF00560.25; Description=Leucine Rich Repeat
  Pfam annotation: Domain name=LRR_1; Domain location=221-243; Score =15.1; E_value=0.29; Accession=PF00560.25; Description=Leucine Rich Repeat
  Pfam annotation: Domain name=LRR_1; Domain location=245-267; Score =15.4; E_value=0.24; Accession=PF00560.25; Description=Leucine Rich Repeat
  Pfam annotation: Domain name=LRR_1; Domain location=269-291; Score =14.1; E_value=0.57; Accession=PF00560.25; Description=Leucine Rich Repeat
  Pfam annotation: Domain name=LRR_1; Domain location=293-315; Score =15.4; E_value=0.25; Accession=PF00560.25; Description=Leucine Rich Repeat
  Pfam annotation: Domain name=LRR_1; Domain location=30-52; Score =13.8; E_value=0.7; Accession=PF00560.25; Description=Leucine Rich Repeat
  Pfam annotation: Domain name=LRR_1; Domain location=317-338; Score =13.5; E_value=0.78; Accession=PF00560.25; Description=Leucine Rich Repeat
  Pfam annotation: Domain name=LRR_1; Domain location=53-74; Score=9.6; E_value=4.4; Accession=PF00560.25; Description=Leucine Rich Repeat
  Pfam annotation: Domain name=LRR_1; Domain location=6-28; Score=9.7; E_value=4.3; Accession=PF00560.25; Description=Leucine Rich Repeat
  Pfam annotation: Domain name=LRR_1; Domain location=77-99; Score =12.8; E_value=1.1; Accession=PF00560.25; Description=Leucine Rich Repeat
  Pfam annotation: Domain name=Pkinase; Domain location=439-709; Score =109.1; E_value=1.5e-29; Accession=PF00069.17; Description=Protein kinase domain
  Pfam annotation: Domain name=Pkinase_Tyr; Domain location=439-705; Score=78.4; E_value=2.5e-20; Accession=PF07714.9; Description =Protein tyrosine kinase
  Pfam module annotation: Pfam domain module=LRR_1::LRR_1::LRR_1::LRR _1::LRR_1::LRR_1::LRR_1::LRR_1::LRR_1::LRR_1::LRR_1::LRR_1::LRR _1::LRR_1::Pkinase::Pkinase_Tyr; Domain location=101-123::125 -147::149-171::173-195::...
  Pfam module annotation: Domain location=197-219::221-243::245 -267::269-291::293-315::30-52::317-338::53-74::6-28::77-99::439 -709::439-705
MCQLTGLWYFDVRGNNLTGTIPEGIGNCTSFEILDISYNQISGEIPYNIGYLQVATLSLQGNRLTGRIPEVIGLMQALAVLDLSENDLVGPIPPILGNLSYTGKLYLHGNKLTGHIPPELGNMSKLSYLQLNDNELTGTIPAELGKLTELFELNLANNNLEGHIPANISSCSALNKFNVYGNRLNGSIPGGFQKLESLTYLNLSSNNLKGQIPSELGHIVNLDTLDLSYNDFSGPVPPTIGDLEHLLELNLSKNHLIGSVPAEFGNLRSVQVIDISSNNLSGYLPEELGQLQNLDSLILNNNNLVGEIPAQLANCFSLITLNLSYNNFSGHVPSAKNFSKFPMDSFEGNPMLYVYCQDSSCGHSHGTKVNISRTAVACIILGFIILLCIMLLAIYKTNKPLPPEKGSDKPVQGPPKLVVLQMDMASHTYEEIMRLTENFSEKYIIGYGASSTVYKCDLKSGKAIAVKRLYSQYNHSLREFETELETIGSIRHRNLVSLHGFSLSPHGNLLFYDYMENGSLWDLLHGPSKKVKLDWDTRLKIAVGAAQGLAYLHHDCNPRIVHRDVKSSNILLDENFEAHLSDFGIAKCVPAAKSHASTYVLGTIGYIDPEYARTSRLNEKSDVYSFGIVLLELLTGKKAVDNESNLHQLILAKADDNTVMEAVDSEVSVTCTDMNLVRKAFQLALLCTKRHPADRPTMHEVARVLLSLLPAPAVKPPTTKGAAGDYTRFLATTTADMKHDVSVDIGDNSSSDEQWFVRFGEVISKHTMS

SEQ ID NO: 78209 - protein, 173 aa, Setaria italica
  misc_feature (36)..(36): Xaa can be any naturally occurring amino acid
  Transcript Sequence Number=SeqID_12235
  Gene Ontology: Mol. function=transporter activity; Cellular component= mitochondrial inner membrane; Biological process=transport
  Homolog annotation: Hit_ID=Q53WK5; Match level="QueryCoverage=91%, HitCoverage=43%, E-value=6e-62, Identity=78%"; Hit description =Putative ADP/ATP translocase
  Pfam annotation: Domain name=Mito_carr; Domain location=27-120; Score= 77.9; E_value=3.8e-20; Accession=PF00153.19; Description =Mitochondrial carrier protein
VVPIGRRRERDERGLAAGRVWEFERDLVAGAVMGGXAVHTVVAPIERVKLLLQTQDGNAALLGRARRFRGFADCVARTVRDEGVLSLWRGNGTAVIRYYPSVALNFSLKDLYRSILKDAGTSADNKFASIALTNFFAGAAAGCTTLVLIYPLDIAHTRLAADIGRTDTRQFRG

SEQ ID NO: 78210 - protein, 220 aa, Setaria italica
  Transcript Sequence Number=SeqID_12236
  Gene Ontology: Mol. function=transporter activity; Cellular component= mitochondrial inner membrane; Biological process=transport
  Homolog annotation: Hit_ID=Q53WK5; Match level="QueryCoverage=96%, HitCoverage=58%, E-value=1e-111, Identity=90%"; Hit description =Putative ADP/ATP translocase
  Pfam annotation: Domain name=Mito_carr; Domain location=128-218; Score=84.3; E_value=4.5e-22; Accession=PF00153.19; Description =Mitochondrial carrier protein
  Pfam annotation: Domain name=Mito_carr; Domain location=33-126; Score= 85.9; E_value=1.5e-22; Accession=PF00153.19; Description =Mitochondrial carrier protein
  Pfam module annotation: Pfam domain module=Mito_carr::Mito_carr; Domain location=128-218::33-126
MVISDPLALFLQDLYRSILKDAGTSADNKFASIALTNFFAGAAAGCTTLVLIYPLDIAHTRLAADIGRTDTRQFRGIRHFIQTVYKKNGIRGIYRGLPASLHGMVVHRGLYFGGFDTAKDVLVPLESPLWQRWVAAQAVTSMAGLISYPLDTVRRRMMMQSGMEVQMYSSTLDCWRKIYRLESVRSFYRGALSNMFRSTGAAAILVLYDEVKKFMDRGRL

SEQ ID NO: 78211 - protein, 82 aa, Setaria italica
  misc_feature (64)..(64): Xaa can be any naturally occurring amino acid
  Transcript Sequence Number=SeqID_12237
  Gene Ontology: Mol. function=metal ion binding
  Homolog annotation: Hit_ID=B6T6C6; Match level="QueryCoverage=74%, HitCoverage=34%, E-value=6e-21, Identity=85%"; Hit description=RHB1A
LSTSFVFAPNFHSVKLTFLCLIQHRQNPEEHEPLSSAFDGASPTSAIVAVDTNLDTSTLDTYRXAPPAPLPYDVGLKVAENP

SEQ ID NO: 78212 - protein, 64 aa, Setaria italica
  Transcript Sequence Number=SeqID_12238
  Homolog annotation: Hit_ID=B9SRF4; Match level="QueryCoverage=82%, HitCoverage=10%, E-value=1e-18, Identity=77%"; Hit description=Ran GTPase binding protein, putative
  Subcellular localization annotation: CTP_CleavageSite=41; ConfidenceScore=5.06e-01
IQDPHECIHAQGVLGHGPDTTQCAAFSRVSFPSLSRVINISASHNHAAFLTESGEVFTCGDNSS

SEQ ID NO: 78213 - protein, 259 aa, Setaria italica
  misc_feature (22)..(22): Xaa can be any naturally occurring amino acid
  Transcript Sequence Number=SeqID_12239
  Gene Ontology: Mol. function=acid-amino acid ligase activity; Cellular component=intracellular; Biological process=regulation of cyclin-dependent protein kinase activity
  Homolog annotation: Hit_ID=B9SRF4; Match level="QueryCoverage=90%, HitCoverage=68%, E-value=1e-92, Identity=51%"; Hit description=Ran GTPase binding protein, putative
  Pfam annotation: Domain name=RCC1; Domain location=114-164; Score =1.6; E_value=0.55; Accession=PF00415.10; Description=Regulator of chromosome condensation (RCC1)
  Pfam annotation: Domain name=RCC1; Domain location=167-217; Score =44.1; E_value=5.6e-10; Accession=PF00415.10; Description=Regulator of chromosome condensation (RCC1)
  Pfam module annotation: Pfam domain module=RCC1::RCC1; Domain location=114-164::167-217
RAAFAAMGPAARGELLERCRGXWKKVLRFLQSVEQSSGTVQTSSGSMQVATGRYHTLLVHDSSVYSCGSSLCGVLGHGPDTTQCAAFSRVSFPSLSRVINISASHNHAAFLTESGEVFTCGDNSSLCCGHGEVGRTIFRPTQVEALKGVSCKQVATGLSFTVILTRDGQVYTCGSNTHGQLGHGDTIDRATPKIIELFEGPTQVVQIAAGASYTFAVTEDGTVHSFGSCTNFCLGHGDQHDELRPRATACSSPADTRTT

SEQ ID NO: 78214 - protein, 273 aa, Setaria italica
  Transcript Sequence Number=SeqID_12240
  Gene Ontology: Mol. function=acid-amino acid ligase activity; Cellular component=anaphase-promoting complex; Biological process =regulation of mitotic metaphase/anaphase transition
  Homolog annotation: Hit_ID=B9SRF4; Match level="QueryCoverage=99%, HitCoverage=75%, E-value=1e-115, Identity=53%"; Hit description=Ran GTPase binding protein, putative
  Pfam annotation: Domain name=RCC1; Domain location=123-171; Score =20.9; E_value=0.0044; Accession=PF00415.10; Description=Regulator of chromosome condensation (RCC1)
  Pfam annotation: Domain name=RCC1; Domain location=15-65; Score=44.1; E_value=5.6e-10; Accession=PF00415.10; Description=Regulator of chromosome condensation (RCC1)
  Pfam annotation: Domain name=RCC1; Domain location=174-226; Score =19.5; E_value=0.0064; Accession=PF00415.10; Description=Regulator of chromosome condensation (RCC1)
  Pfam annotation: Domain name=RCC1; Domain location=68-119; Score =26.3; E_value=0.00012; Accession=PF00415.10; Description=Regulator of chromosome condensation (RCC1)
  Pfam module annotation: Pfam domain module=RCC1::RCC1::RCC1::RCC1; Domain location=123-171::15-65::174-226::68-119
QVATGLSFTVILTRDGQVYTCGSNTHGQLGHGDTIDRATPKIIELFEGPTQVVQIAAGASYTFAVTEDGTVHSFGSCTNFCLGHGDQHDELRPRAIQSFKRRNIHVVRVSAGDEHAVALDALGHVYTWGRGYCGALGHGDENDKTSPELISSLKNQVAVQVCARKRKTFVLTDEGSVYAFGWMGFGSLGFPDRGSSDKVMKPRVLESLRDHYVSQISTGLYHTVAVTNKGIVFGFGDNERAQLGHEYIRVCLKPTEIMFQKSMEDIAIAAPSG

SEQ ID NO: 78215 - protein, 259 aa, Setaria italica
  misc_feature (54)..(54): Xaa can be any naturally occurring amino acid
  Transcript Sequence Number=SeqID_12241
  Gene Ontology: Cellular component=plasma membrane
  Homolog annotation: Hit_ID=B6T2A6; Match level="QueryCoverage=99%, HitCoverage=100%, E-value=1e-108, Identity=79%"; Hit description =Stem-specific protein TSJT1
MLAIFQKQVAHAPQELNSPRSGGECKPRNPDEILRDFHATHPANAFSTSFGGGXAALACVGGSCPASGGYQRMFCGLDDIYCVFLGRLDNLSGLIRQYGLCNKSTNEALLVIEAYRTLRDRGPYPADQVVKDLAGSFAFVVFDNKSGAVFAALSTDGGVPLYWGIAADGSVVICEDRDIVKRGCGKSYAPFPVGCMFHSEGGLKSFEHPMNRLKAMPRVDSEGVMCGATFKVDTFTKINSMPRVGSATNWAAWDEGMGI

SEQ ID NO: 78216 - protein, 184 aa, Setaria italica
  misc_feature (177)..(177): Xaa can be any naturally occurring amino acid
  Transcript Sequence Number=SeqID_12242
  Gene Ontology: Mol. function=receptor activity
  Homolog annotation: Hit_ID=A0EJF3; Match level="QueryCoverage=100%, HitCoverage=27%, E-value=9e-37, Identity=44%"; Hit description=Beta -glucan-binding protein 4
FDDLSVTLDVSPSLRAHLVRGCPYVTVVTTAGPVDVSVASVHAFIEVAPCDDDGTKWRLRMNSGQTFLLYASAPIRLEQAGTTQLSAPRFAGAIRVAYLPDASMEPVLDRHSGCFPTAGDAALNRAFCVDYAWRKEGPGELLMLAHPLHLRLLSDDCAVRVLDDFRYRSIDGDLVGXVGDAWSL

SEQ ID NO: 78217 - protein, 114 aa, Setaria italica
  Transcript Sequence Number=SeqID_12243
  Gene Ontology: Mol. function=nucleic acid binding; Cellular component= plasma membrane; Biological process=protein amino acid phosphorylation
  Homolog annotation: Hit_ID=O82318; Match level="QueryCoverage=96%, HitCoverage=11%, E-value=2e-10, Identity=37%"; Hit description =Leucine-rich repeat receptor-like protein kinase
  Pfam annotation: Domain name=LRR_1; Domain location=21-44; Score =12.8; E_value=1.1; Accession=PF00560.25; Description=Leucine Rich Repeat
  Pfam annotation: Domain name=LRR_1; Domain location=46-69; Score =14.3; E_value=0.5; Accession=PF00560.25; Description=Leucine Rich Repeat
  Pfam annotation: Domain name=LRR_1; Domain location=70-86; Score=7.3; E_value=12; Accession=PF00560.25; Description=Leucine Rich Repeat
  Pfam module annotation: Pfam domain module=LRR_1::LRR_1::LRR_1; Domain location=21-44::46-69::70-86
MLDLSNCQFHGPIPPFAQWPKIQMVDLSGNNLNGSLPSDGYLSLHNLTEVTLGNNSISGVIPASLFSHPSLKYLDLSQNNFTGNFLLYPTVSSSFRWIDLSLTITGPLPKLLSK

SEQ ID NO: 78218 - protein, 74 aa, Setaria italica
  Transcript Sequence Number=SeqID_12244
QSRVRLLESRSLLVLIKPAASDCKQEALLPPHHHRLLGFRYQDHLCGPWTAVSPAHASQSPRPHGPSILILLKE

SEQ ID NO: 78219 - protein, 66 aa, Setaria italica
  Transcript Sequence Number=SeqID_12245
MDRQPALTKLGFAVLGCNSVLAVYNSWGHPDSVAFVLGADAALALLFLCLCQFERDRGGAGAAGEG

SEQ ID NO: 78220 - protein, 216 aa, Setaria italica
  Transcript Sequence Number=SeqID_12246
  Gene Ontology: Mol. function=protein serine/threonine kinase activity; Cellular component=plasma membrane; Biological process =protein amino acid phosphorylation
  Homolog annotation: Hit_ID=B9SFK9; Match level="QueryCoverage=83%, HitCoverage=27%, E-value=1e-69, Identity=70%"; Hit description =Kinase, putative
  Pfam annotation: Domain name=Pkinase; Domain location=2-155; Score= -97.7; E_value=0.011; Accession=PF00069.17; Description=Protein kinase domain
  Pfam annotation: Domain name=Pkinase_Tyr; Domain location=1-155; Score=-145.6; E_value=0.00048; Accession=PF07714.9; Description =Protein tyrosine kinase
  Pfam module annotation: Pfam domain module=Pkinase::Pkinase_Tyr; Domain location=2-155::1-155
LSQPAIIHRDIKASNILLDDEFEAKVADFGLAKFAPEGMTHVSTRVAGTLGYVAPEYALYGQLTEKSDVYSFGVVLLELLSGKRAFISLSEGQSFVLTDWAWSLVRRGKTVEVIQEGMIEPGPTEVMEKYVLVGALCTHPQLHARPTMEQALKILEADSAPSPLIIPERPIPVVANLAEIERSASSSGSGQLFSPSGFRSFIHANEDAALASPNET

SEQ ID NO: 78221 - protein, 112 aa, Setaria italica
  Transcript Sequence Number=SeqID_12247
RKNNQTEIKKVFFLAIDFTGEIRPGNVSPQQGNFEPFAFPLRSYQPRLAWPALFIPHPHGRLTPVSWPRPPRPVRRRSCRCRPAPSLPWGSPTPASPPLPPRSRRRPPSPEP

SEQ ID NO: 78222 - protein, 395 aa, Setaria italica
  Transcript Sequence Number=SeqID_12248
  Subcellular localization annotation: CTP_CleavageSite=39; ConfidenceScore=5.52e-01
VFSCRLRATAQPSAAPVAPVENIVPLQKTTPPVTGRIPSSSAGRQHSGATGRFQGGNATLRDKKTSLSKKKEALLKYELLTDLQNQLTAVLLKQCRTVAIKEADSSYVEFQNPEANMSVQEGATIASPSAPSEATKVFVNEKSIPAGATESELGQKRKRNPIIVTPAWCYSEASTETVRNEQNSSSNSDTARNFNIWKGHANPLFSHRDNKKNILFCLEGRETGASWSQASSCGGYAGRNSERWTPFLEGWNSPAVQFEGPAVPLVRKNYLSWCPTSCAYTSSAPSAQPHDRQGVRKVLDVKFHPEGLPQLVSSSNEAPNELLLFNLLSGRAIQLRGHNTKIQSVGFAVKGASIVSCASNLLKVWDCITGSCLYTLGGDNQNSVGHTQKISAMAV

SEQ ID NO: 78223 - protein, 69 aa, Setaria italica
  Transcript Sequence Number=SeqID_12249
MWPEKMKAWAAMADDPLKTASSASSHPSNPLKRYSPTTLAAGGLIVVGGLGYLMFGGKKNGHDQQASRA

SEQ ID NO: 78224 - protein, 654 aa, Setaria italica
  misc_feature (390)..(390): Xaa can be any naturally occurring amino acid
  misc_feature (408)..(408): Xaa can be any naturally occurring amino acid
  misc_feature (417)..(417): Xaa can be any naturally occurring amino acid
  Transcript Sequence Number=SeqID_12250
  Gene Ontology: Mol. function=hydrolase activity; Cellular component =membrane; Biological process=response to chemical stimulus
  Homolog annotation: Hit_ID=B9N0R4; Match level="QueryCoverage=100%, HitCoverage=86%, E-value=0.0, Identity=57%"; Hit description=Mtn21 -like protein
  Pfam annotation: Domain name=GDA1_CD39; Domain location=40-487; Score= 102.8; E_value=1.2e-27; Accession=PF01150.9; Description=GDA1CD39 (nucleoside phosphatase) family
KEHPPSSPTNRKKCMRAAGCAIALIVLAFFAYASWRYFHVFLSEGNSEYYVVLDCGSTGTRVYVYEWHINHNDANGFPIVLKPLGNAPKKKSGKLTRLYQRMETEPGLSKLVHNEAGLKKALEPLLQMAEKQIPRRAHKHTPLFLYATAGVRKLPSADSEWLLDKAWDVLKNSSFLCSRDRVKIITGMDEAYYGWIALNHHMNMLGTSASKMTYGSLDLGGSSLQVTFETDKTVQDETSISLRIGSVDHHLSAYSLTGYGLNDAFDKSVAHLVKKLGGVANNGKVQVKHPCLQTGYKEDYVCSYCHPLKQDGSPSVGEKTTGKEKQGVPVELVGAPQWNECSALAKVTVNLSEWSSASPGLDCSLHPCALASNFPQPHGKFFAMSGFFVXVFKFFNLTADATLVDVLXRGQEFCENXWKVAKSSVPPQPFIDQYCFRAPYIASLLREGLQIKDNQVIIGSGSITWTLGVALWEAGQALSTRIDIQGYRILHREINPNILIVLFLVSIVLVICAILCVSNSIPRSFRKSYLPLYRHNSAGSSVLGMGSPFRFQLWSPINSGDGRTKTPLSPTVAGSDPHPFGMSHGLGGSSVQLMESSRQSLGVYHSYSVGSLGQMQFSSGVRNPSRGQTTLQSRRSQSREDLSSSLADIHVPKV

SEQ ID NO: 78225 - protein, 92 aa, Setaria italica
  Transcript Sequence Number=SeqID_12251
RRLVTAAIDISEEGEDLDLADDDVDYQAPRPPQQRTSGRRFVIGDDDDSDVPVADGAMDVEEDDGVNWSELENDDEDGAYNGGRSVDVEERG

SEQ ID NO: 78226 - protein, 173 aa, Setaria italica
  Transcript Sequence Number=SeqID_12252
  Subcellular localization annotation: CTP_CleavageSite=29; ConfidenceScore=5.48e-01
QPQNLGPPMPMQFRPVVPSQQPPQFMPPPAQQFRPVGQPMPGANIGMPGQMPHFPQPGQHLSHSSQVPPASQGVPMAYQPARPMSSAPMQPQQQAVYPGGHMPTMGAPMQPPSYTYQPTSIPPVVQPWGQSVPHVTPLVQPGHQPVPATATLPSVNSSEPSSSDWQEHTAAEG

SEQ ID NO: 78227 - protein, 129 aa, Setaria italica
  Transcript Sequence Number=SeqID_12253
  Gene Ontology: Mol. function=aspartic-type endopeptidase activity; Cellular component=integral to membrane
  Homolog annotation: Hit_ID=B9RCD0; Match level="QueryCoverage=100%, HitCoverage=23%, E-value=4e-61, Identity=86%"; Hit description=Minor histocompatibility antigen H13, putative
  Pfam annotation: Domain name=Peptidase_A22B; Domain location=1-129; Score=26.9; E_value=2.6e-12; Accession=PF04258.5; Description=Signal peptide peptidase
VRVPNLKVGSVLLSCAFLYDIFWVFVSKRWFHESVMIVVARGDKTDEDGVPMLLKIPRMFDPWGGYSIIGFGDILLPGLLVAFALRYDFVAKKSLQSGYFLWSMVAYGSGLLITYVALNLMDGHGQPAL

SEQ ID NO: 78228 - protein, 332 aa, Setaria italica
  Transcript Sequence Number=SeqID_12254
  Gene Ontology: Mol. function=aspartic-type endopeptidase activity; Cellular component=integral to membrane
  Homolog annotation: Hit_ID=Q945B8; Match level="QueryCoverage=92%, HitCoverage=57%, E-value=1e-123, Identity=70%"; Hit description =Growth-on protein GRO10
  Pfam annotation: Domain name=PA; Domain location=72-168; Score=65.6; E_value=1.8e-16; Accession=PF02225.14; Description=PA domain
MAAAPVLALLLLSALAEAAAGGDIVHHDDEAPKIPGCNNDFILVKVQSWVNGKEGDEFVGVGARFGPKIVSKEKHANRTRLTLADPSDCCTPPKEKVAGDILLVERGNCKFTTKAKVAESAGASAIIIINDKHELYKMVCERNETDLDIGIPAVLLPKDAGTKLQSLLSSGEVLVQLYSPDRPLVDTAEVFLWLMAVGTILCASYWSAWSAREADIEQEKLLKDGHEIPPNLEAGGSSGTVDINMASAILFVVIASCFLITLYRLMSHWFLELLVVIFCIGGVEGLQTCLVALLSRWFKPAAESFVKVPFIGAVSHLTLAVSPFCIAFVKHY

SEQ ID NO: 78229 - protein, 145 aa, Setaria italica
  Transcript Sequence Number=SeqID_12255
  Gene Ontology: Mol. function=aspartic-type endopeptidase activity; Cellular component=integral to membrane
  Homolog annotation: Hit_ID=B9RCD0; Match level="QueryCoverage=94%, HitCoverage=25%, E-value=4e-61, Identity=80%"; Hit description=Minor histocompatibility antigen H13, putative
  Pfam annotation: Domain name=Peptidase_A22B; Domain location=1-127; Score=21.2; E_value=5.7e-12; Accession=PF04258.5; Description=Signal peptide peptidase
HESVMIVVARGDKTDEDGVPMLLKIPRMFDPWGGYSIIGFGDILLPGLLVAFALRYDFVAKKSLQSGYFLWSMVAYGSGLLITYVALNLMDGHGQPALLYIVPFTLGTLIALGWKRGELRNLWVKGEPDRVCTHMHLPLLPASPN

SEQ ID NO: 78230 - protein, 540 aa, Setaria italica
  Transcript Sequence Number=SeqID_12256
  Gene Ontology: Mol. function=aspartic-type endopeptidase activity; Cellular component=integral to membrane
  Homolog annotation: Hit_ID=B9RCD0; Match level="QueryCoverage=93%, HitCoverage=93%, E-value=0.0, Identity=72%"; Hit description=Minor histocompatibility antigen H13, putative
  Pfam annotation: Domain name=PA; Domain location=72-168; Score=53.3; E_value=9e-13; Accession=PF02225.14; Description=PA domain
  Pfam annotation: Domain name=Peptidase_A22B; Domain location=236-518; Score=459.3; E_value=5.6e-135; Accession=PF04258.5; Description =Signal peptide peptidase
  Pfam module annotation: Pfam domain module=PA::Peptidase_A22B; Domain location=72-168::236-518
MARSSPAVLLLLAALAGVAAAGDIVHQDDEAPKIPGCNNDFILVKVQSWVNGKEGDEFVGVGARFGPKIVSKEKHANRTKLTLADPIDCCSPPKHKVSGDVLLVQRGKCKFTKKAKFAEAAGASAIVIINHVHELYKMVCEKNETDLDIHIPAVLLPKDAGSALHTLLTSGNAVSVQLYSPDRPVVDTAEVFLWLMAVGTVLGASYWSAWSAREADIEQEKLLKDGHEGLLNVEAGGSTGTVDINMASAILFVVIASCFLITLYRLMSHWFVELLVVIFCIGGVEGLQTCLVALLSRWFKPAAESFVKVPFIGAVSYLTLAVCPFCIVFAVLWAVYRRWRYAWIGQDILGIALIVTVIQIVRVPNLKVGSVLLSCAFLYDIFWVFISKMLFHESVMIVVARGDKTDEDGVPMLLKIPRMFDPWGGYSIIGFGDILLPGLLIAFALRYDWAAKKTLQSGYFLWSMVAYGSGLLITYVALNLMDGHGQPALLYIVPFTIGTFLALGLKRGELRNLWTRGQPERACTHTHPSPKDSADPVSSS

SEQ ID NO: 78231 - protein, 42 aa, Setaria italica
  Transcript Sequence Number=SeqID_12257
  Homolog annotation: Hit_ID=Q70KG3; Match level="QueryCoverage=100%, HitCoverage=11%, E-value=3e-16, Identity=90%"; Hit description =Protein RAFTIN 1B
SRWNPEHVSFKLLGTKPGGAPICHLMPYGHIIWAKNEKRSPA

SEQ ID NO: 78232 - protein, 258 aa, Setaria italica
  Transcript Sequence Number=SeqID_12258
  Gene Ontology: Mol. function=transferase activity, transferring glycosyl groups; Cellular component=integral to membrane; Biological process=cellulose biosynthetic process
  Homolog annotation: Hit_ID=C3U576; Match level="QueryCoverage=100%, HitCoverage=33%, E-value=6e-87, Identity=60%"; Hit description =Cellulose synthase-like protein H1
YKRWATGLLEIILSRNNPILACTSKHLEFRQCLAYLVFYVWPVRAPFELCYALLGPYCLLANKSFLPKASEPGFVIPLALFLTLNVHSVAEYMECRLSARAWWNNHRMQRIVSSSAWLLAFLTVVLKTMGLSETVFEVTRKEQGGAADGGDAAGADPGRFTFDSSPVFVPPTALTILTLVAIAVGAWRAVAGAAAAGGVPPAGGGPGVGEFVCCGWLALCFWPFVRGLAGKGSYGIPWSVKIKAVLLVAAFVHFCTRN

SEQ ID NO: 78233 - protein, 170 aa, Setaria italica
  Transcript Sequence Number=SeqID_12259
  Gene Ontology: Cellular component=extracellular region; Biological process=response to biotic stimulus
  Homolog annotation: Hit_ID=Q9FE57; Match level="QueryCoverage=83%, HitCoverage=85%, E-value=3e-51, Identity=70%"; Hit description =Acidic PR-1 type pathogenesis-related protein PR-1a
  Pfam annotation: Domain name=SCP; Domain location=36-158; Score =126.4; E_value=9.4e-35; Accession=PF00188.18; Description=SCP-like extracellular protein
MAVYSSKLACLAFVAVAVAVLAATPCAAQNSPQDYVDPHNAARSDVGVGPVTWDDTVAAYAQSYAAQRQGDCALVHSGGPYGENIFWGSAGADWSAADAVGSWVSEKQWYDHGSNSCSAPEGQSCGHYTQVVWRDSTAVGCARVVCDNDGGVFITCNYNPPGNVVGQSPY

SEQ ID NO: 78234 - protein, 104 aa, Setaria italica
  Transcript Sequence Number=SeqID_12260
  Gene Ontology: Mol. function=kinase activity; Cellular component =cytoplasm; Biological process=purine nucleotide metabolic process
  Homolog annotation: Hit_ID=B6TFQ2; Match level="QueryCoverage=99%, HitCoverage=35%, E-value=7e-52, Identity=94%"; Hit description =Guanylate kinase
  Pfam annotation: Domain name=Guanylate_kin; Domain location=58-104; Score=-26.9; E_value=0.017; Accession=PF00625.13; Description =Guanylate kinase
FRGLEAALGTTFSSEPLAPPPQPMILVISGPSGVGKDAVIKRLQEEREGMHFVVTATSRAMRPGEVDGKDYYFITKEEFLTMIERDELLEYALVYGEYKGIPKS

SEQ ID NO: 78235 - protein, 47 aa, Setaria italica
  Transcript Sequence Number=SeqID_12261
RVFSSQFFFRLPINGVLRKPSSVNNYTKCVSLVGDQLLLAKQEASHL

SEQ ID NO: 78236 - protein, 63 aa, Setaria italica
  Transcript Sequence Number=SeqID_12262
GSEQALLQLGVEASSLAACLKFLLVAANAFILLDEISLQNRTCSRNQRYIFLLSSQGTTKYSY

SEQ ID NO: 78237 - protein, 147 aa, Setaria italica
  misc_feature (25)..(25): Xaa can be any naturally occurring amino acid
  misc_feature (73)..(73): Xaa can be any naturally occurring amino acid
  Transcript Sequence Number=SeqID_12263
  Gene Ontology: Mol. function=glutamate dehydrogenase [NAD(P)+] activity; Cellular component=mitochondrial matrix; Biological process=amino acid metabolic process
  Homolog annotation: Hit_ID=Q43260; Match level="QueryCoverage=85%, HitCoverage=29%, E-value=4e-59, Identity=90%"; Hit description =Glutamate dehydrogenase
  Pfam annotation: Domain name=ELFV_dehydrog_N; Domain location=1-114; Score=140.0; E_value=7.5e-39; Accession=PF02812.10; Description =GluLeuPheVal dehydrogenase, dimeri
VGFRVQHDNARGPIERVGNTRITNXEVDPDEVNALAQLMTWKTAVANIPYGGAKGGIGCSPGELSISELERLXTRVFTQKIHDLIGIHTDVPAPDMGTNSQTMAWILDEYSKFHGYSPAVVTGKPVVSFYLSCNSGHVCVLKMMFPN

SEQ ID NO: 78238 - protein, 70 aa, Setaria italica
  Transcript Sequence Number=SeqID_12264
  Gene Ontology: Mol. function=glutamate dehydrogenase [NAD(P)+] activity; Cellular component=mitochondrial matrix; Biological process=amino acid metabolic process
  Homolog annotation: Hit_ID=Q43260; Match level="QueryCoverage=84%, HitCoverage=14%, E-value=2e-27, Identity=93%"; Hit description =Glutamate dehydrogenase
YPLCALPILCCVSQANHPTDPEADEILSKKGVLILPDILANSGGVTVSYFEWVQNIQGFMWDEEKVNTEL

SEQ ID NO: 78239 - protein, 174 aa, Setaria italica
  Transcript Sequence Number=SeqID_12265
  Gene Ontology: Mol. function=acid-amino acid ligase activity; Cellular component=chloroplast; Biological process=ubiquitin -dependent protein catabolic process
  Homolog annotation: Hit_ID=B6THC5; Match level="QueryCoverage=97%, HitCoverage=39%, E-value=5e-87, Identity=92%"; Hit description =Ankyrin repeat protein
  Pfam annotation: Domain name=Ank; Domain location=1-33; Score=15.4; E_ value=0.22; Accession=PF00023.22; Description=Ankyrin repeat
  Pfam annotation: Domain name=Ank; Domain location=100-132; Score =42.7; E_value=1.5e-09; Accession=PF00023.22; Description=Ankyrin repeat
  Pfam annotation: Domain name=Ank; Domain location=34-66; Score=22.4; E_value=0.0019; Accession=PF00023.22; Description=Ankyrin repeat
  Pfam annotation: Domain name=Ank; Domain location=67-99; Score=24.3; E_value=0.0005; Accession=PF00023.22; Description=Ankyrin repeat
  Pfam module annotation: Pfam domain module=Ank::Ank::Ank::Ank; Domain location=1-33::100-132::34-66::67-99
SKWPPLHTLAASGDFYLLDSLLKHNVDINALDKDGLPAIHKAILSKKAAIINYLLRNSANPFIQDKDGATLMHYAVQAACSQTIKTLLLYNVDINRPDDYGWTPLHLAVQTQRTDIVKLLLIKGADRNLKTQDGLTPLELCLRLGHHARTYELLKLLKSFRGKKQRDSVYLEGV

SEQ ID NO: 78240 - protein, 66 aa, Setaria italica
  Transcript Sequence Number=SeqID_12266
CACTRYKGLFFSFDTVSPFLQLDNIDIITKPKLPSQHESICHCVIQYASDIFISVKLLNNLHWIQS

SEQ ID NO: 78241 - protein, 48 aa, Setaria italica
  Transcript Sequence Number=SeqID_12267
MAARVAATLVALLVALFAVAATAQAPAAAPKMAPLPPPPKRAPMASPP

SEQ ID NO: 78242 - protein, 370 aa, Setaria italica
  misc_feature (19)..(19): Xaa can be any naturally occurring amino acid
  Transcript Sequence Number=SeqID_12268
  Gene Ontology: Mol. function=heat shock protein binding; Cellular component=intracellular; Biological process=response to stress
  Homolog annotation: Hit_ID=C3SA38; Match level="QueryCoverage=87%, HitCoverage=55%, E-value=2e-46, Identity=36%"; Hit description=Heat shock protein
  Pfam annotation: Domain name=zf-C2H2; Domain location=336-360; Score =11.1; E_value=0.75; Accession=PF00096.18; Description=Zinc finger, C2H2 type
  Pfam annotation: Domain name=zf-C2H2; Domain location=63-87; Score =11.6; E_value=0.67; Accession=PF00096.18; Description=Zinc finger, C2H2 type
  Pfam module annotation: Pfam domain module=zf-C2H2::zf-C2H2; Domain location=336-360::63-87
KERKAEEEKKKAEEKERKXEEEKRKKERAMAYQEPDWARVEEEEGLYDDEEEEEMKAKRKEELYCVACNKKFKSDKQWKNHEQSKKHRDKIAELRMAFKEEEESLKEAEEEGEGDLDEVDVGFDFKPMQESDDESAFSDAAEELAEDLEEGLEVRDKEDGDKVFDSAEQEVGSYDEASVLEAMLSSRKNRKGGYVAPTEKTSSGAAEEEEDDDRSSEVNNTKRKGRRRRAAKKEQDEGTYADNERHGKSEVQPEESGNGNGADDKMEGPSSSNEGSASASKGDEQNGKNSNPKKNKKNKKGAEKKTTVSADQKSTSKAEQKSKGKKQKEVSKAPSNDCETCGGTFESRNKLFSHLEETGHAMLKTRQKNR

SEQ ID NO: 78243 - protein, 1254 aa, Setaria italica
  Transcript Sequence Number=SeqID_12269
  Gene Ontology: Mol. function=nucleic acid binding; Cellular component= nucleolus; Biological process=regulation of transcription, DNA -dependent
  Homolog annotation: Hit_ID=Q53QK3; Match level="QueryCoverage=48%, HitCoverage=90%, E-value=2e-42, Identity=34%"; Hit description=PWWP domain containing protein, expressed
  Pfam annotation: Domain name=PWWP; Domain location=103-176; Score =49.9; E_value=9.5e-12; Accession=PF00855.9; Description=PWWP domain
KLEENHINAEHGTENNEIDYGIARSDKEIQNHVPAEVEGSSKIYADDGAPAVDQPGDGYVMMPQTGEQFPDSGNGLSSNEESASLGNVVHGARYCLPPLDKGGFQVADLVWGKVKSHPWWPGEIFDPSDASELGLKHQKKDSHLVAYFGDNTFAWCDESQLKPFVTNYSQMEKQSSSDAFVGSVNNALEELSRRILSGMSCSCLPEELADNGMSYTVDNAGLKDGVTCSAVNRPEILNCFSPEKLLHYIKELALFPGQGGDLLELVIACSQLTSFYRSKGCPELASFQTGDAWVEDGLDGTDTSATQNVVAEEVVINEVPPTQDKPKRGRGRPRKQKPGDGQVVMEKRDLSNRANDASHDDFDDFDNLQNKKKRNFDSFEDLEKASAPTGGKSFKIGECIRRAASQLTGSSSIVKAQNEPTGYKNAAEAENGEFDISSDDAVDELTVEKRAKRRRLHRNHTADPKELLSQLCLVATEPMNGYSFSAMLISYFNDYRNYIVSTTTEASIVEKGASRRGRKRKEVLPSPEVETTDHMQDSYWSGLSLHNHPIHDLRKESPTTRPRRRRRSSRYAYVPSSELGDSVPKKQIQVIERSIIHVDEKMVDELKPSALVLSFGRSASIPSELDLVKMFSRYGPLKEMETEVDKDTNTVKVVFKKRADAERAFSAAGKYGTFGPSLRSFRLVNMPFSLKALSANNPVKHPEHHGAEIPGSSKSETPNDAMEVDLVHKTEKVEVGEQSVEQVEAVKQTSQVEAANAAFANQVDMVEKTGKIDAELIGHVNQIGTTAQAASVAEGSSEQVGNVEQAYTQKEASIGGLPDITQSGAVTGASIGGMVDEIQLHETPNQASMADTANTFQVESAPEAQTLHSDATIKESPLDVSDNMQMDVAAEAPKQSHISGDNTVSEAITEAPGTAQVCTEVDTANEVPEELMVSPALQSQTAGEKLVEQDATEQHVGSEGSKLEAETFAGEPAVQGVVKQVEVEVESKTTVEVSGEQVYSIEQTVQLEAVTEASGGQLEVGRQTPGDESMADATTEHSTIMVEETVEAKAVPFKEDIEDNAAAVGVAEETAEGETKEEAPDNGKMGNKAAADRLAGETREGEITVEAPDEKAETKAIAEPITRETAEAIGEEPAEEARTSEEIVEDVKTLDDKTTSAEKLVEDATVVTEQDERTTTVKKTVEDAKVEQPNEKATTAETTMENAVAEPPNTNTSEAEKTVEGATLKSPDEKGTAAEKKIEDTTIEAQDVQAGASE

SEQ ID NO: 78244 - protein, 187 aa, Setaria italica
  misc_feature (150)..(150): Xaa can be any naturally occurring amino acid
  Transcript Sequence Number=SeqID_12270
  Pfam annotation: Domain name=LRR_2; Domain location=11-34; Score =19.1; E_value=0.018; Accession=PF07723.5; Description=Leucine Rich Repeat
EPHLVICGFMRLKKLHLHCVHIIGDLPGLLLNCSSLEDLELITCSGVTDLNIPHQLDKLNHLLIRSNICVQMVEFHVPDLSHFEYQGDVIPIVLHGRPTLEEVTLMFHKALFDRDNNRALSHAITGIPCISTAKVLNVHTQMMEDRPVWXHRGPNNHARLLLLAHYLDSAPRLETLQLHANVLCCGG

SEQ ID NO: 78245 - protein, 369 aa, Setaria italica
  misc_feature (205)..(205): Xaa can be any naturally occurring amino acid
  misc_feature (231)..(231): Xaa can be any naturally occurring amino acid
  misc_feature (263)..(263): Xaa can be any naturally occurring amino acid
  misc_feature (296)..(296): Xaa can be any naturally occurring amino acid
  Transcript Sequence Number=SeqID_12271
  Homolog annotation: Hit_ID=Q2R332; Match level="QueryCoverage=86%, HitCoverage=73%, E-value=1e-24, Identity=32%"; Hit description=F-box domain containing protein
  Pfam annotation: Domain name=FBD; Domain location=269-321; Score=1.6; E_value=0.099; Accession=PF08387.2; Description=FBD
  Pfam annotation: Domain name=LRR_2; Domain location=119-142; Score =19.1; E_value=0.018; Accession=PF07723.5; Description=Leucine Rich Repeat
  Pfam module annotation: Pfam domain module=FBD::LRR_2; Domain location=269-321::119-142
NDQSTNDDSIKIESAVFIETVNSIIQQHGGIGLNKFSIRCSLRDNSSDHIDRWIRFATASKAKIIDMNLWPKRNNVGPTRNVYRFPLEALDAQDGPFIQSLFLTNVSIEPHLVICGFMRLKKLHLHCVHIIGDLPGLLLNCSSLEDLELITCSGVTDLNIPHQLDKLNHLLIRSNICVQMVEFHVPDLSHFEYQGDVIPIVLHGXPNTRGAKVLNVHTQMMEDRPVWSSQXPNNHARLLLLAHYLDSAPRLETLQLHANVLCXAGGSHCWHGEEASFRTCRLDRLKTVYMSGFHCXYRPQVELLCGILENGTALENVTIQPLVTPYGKNSLNIYIPEYKIRDWVRRVSQRYGKVITVVEAPRQCLGHVY

SEQ ID NO: 78246 - protein, 98 aa, Setaria italica
  Transcript Sequence Number=SeqID_12272
  Gene Ontology: Mol. function=hydrolase activity, hydrolyzing O -glycosyl compounds; Cellular component=plasma membrane; Biological process=carbohydrate metabolic process
  Homolog annotation: Hit_ID=B4FB19; Match level="QueryCoverage=98%, HitCoverage=19%, E-value=1e-33, Identity=64%"; Hit description =Glucan endo-1,3-beta-glucosidase 5
  Pfam annotation: Domain name=X8; Domain location=28-98; Score=81.9; E_ value=2.3e-21; Accession=PF07983.5; Description=X8 domain
PKYPMDLSGQGQNAMLVPAQGVEYLPRTWCVVNTESPNMDKLADNINFACTFADCTALGYGSTCGGMDSNGNASYAFNAFFQMKDQADEACDFQGLAT

SEQ ID NO: 78247 - protein, 171 aa, Setaria italica
  Transcript Sequence Number=SeqID_12273
  Gene Ontology: Mol. function=hydrolase activity, hydrolyzing O -glycosyl compounds; Cellular component=anchored to membrane; Biological process=carbohydrate metabolic process
  Homolog annotation: Hit_ID=A2Q5Q4; Match level="QueryCoverage=84%, HitCoverage=30%, E-value=7e-59, Identity=74%"; Hit description =Glycoside hydrolase, family 17; X8
  Pfam annotation: Domain name=Glyco_hydro_17; Domain location=32-171; Score=-144.0; E_value=0.0082; Accession=PF00332.10; Description =Glycosyl hydrolases family 17
MENLAALRPWLCLLAAMAAAASWSGVARVEALGMNWGTQATHQLPPKIVVQMLKDNGIKKVKLFDADQSTLSALAGTGIEVMVAIPNVLLDRITDYDTAKEWVRHNVSRYNFDGGVTIKYVAVGNEPFLAAYNNTFDKVTFPALQNIQNALDEAGLGDTIKATVPLNADVV

SEQ ID NO: 78248 - protein, 417 aa, Setaria italica
  Transcript Sequence Number=SeqID_12274
  Gene Ontology: Mol. function=hydrolase activity, hydrolyzing O -glycosyl compounds; Cellular component=plasma membrane; Biological process=carbohydrate metabolic process
  Homolog annotation: Hit_ID=B4FB19; Match level="QueryCoverage=83%, HitCoverage=72%, E-value=1e-155, Identity=75%"; Hit description =Glucan endo-1,3-beta-glucosidase 5
  Pfam annotation: Domain name=Glyco_hydro_17; Domain location=1-276; Score=106.7; E_value=7.9e-29; Accession=PF00332.10; Description =Glycosyl hydrolases family 17
  Pfam annotation: Domain name=X8; Domain location=297-380; Score =139.5; E_value=1e-38; Accession=PF07983.5; Description=X8 domain
  Pfam module annotation: Pfam domain module=Glyco_hydro_17::X8; Domain location=1-276::297-380
  Subcellular localization annotation: CTP_CleavageSite=18; ConfidenceScore=5.09e-01
EATALSSFSSPAHSWLVRGAAAAAPPRRVCGRWLKLIVLHCRYVAVGNEPFLAAYNNTFDKVTFPALQNIQNALDEAGLGDTIKATVPLNADVYMSPTDNPVPSAGRWRPDIADLMTDIVQFLSNHSAPFTVNIYPFISLFLNDNFPVDFAFFDGGATPVLDNGVQYTNVFDANFDTLVAALRAVGHGDMPVVVGEVGWPTDGDKHAKVSYAQRFYAGLLRRLAANAGTPARPNQYIEVYLFGLVDEDLKSVAPGNFERHWGILRYDGQPKYPMDLAGQGRNTMLVPAKGIKYLPKTWCALNPNAKDLSKLGANIDYACTFADCTALGYGSTCGGMDSNGNASYAFNAFFQMKDQADEACDFQGLARPTQTDPSTNTCNFTIQIATTSAAAGHRRPIGVAAAAAVLLFLAQLTILLH

SEQ ID NO: 78249 - protein, 95 aa, Setaria italica
  Transcript Sequence Number=SeqID_12275
  Gene Ontology: Mol. function=receptor activity
  Homolog annotation: Hit_ID=Q53M46; Match level="QueryCoverage=91%, HitCoverage=14%, E-value=3e-25, Identity=63%"; Hit description =Receptor-interacting serine-threonine kinase 4, putative
  Pfam annotation: Domain name=Ank; Domain location=19-52; Score=13.1; E_value=0.47; Accession=PF00023.22; Description=Ankyrin repeat
  Pfam annotation: Domain name=Ank; Domain location=53-85; Score=24.3; E_value=0.00049; Accession=PF00023.22; Description=Ankyrin repeat
  Pfam module annotation: Pfam domain module=Ank::Ank; Domain location =19-52::53-85
TYFGSSCHDPAVLLGRTPQGNTCLHISSIHGHAGFCMDALALNRSLLSAVNKDGETPFLTAVTSGRTSIASFLLKHCCDLKLREAILKQDKLGYN

SEQ ID NO: 78250 - protein, 167 aa, Setaria italica
  Transcript Sequence Number=SeqID_12276
  Gene Ontology: Mol. function=protein serine/threonine kinase activity; Biological process=protein amino acid phosphorylation
  Homolog annotation: Hit_ID=B8QUI7; Match level="QueryCoverage=46%, HitCoverage=16%, E-value=4e-14, Identity=56%"; Hit description=NPKL1
AQLLEHPFLASAGGCEATKGEWVSPKSTLDAAFWESDSDDEDHDVSSQSTAERIGALACPASALPDWDSDEGWIDVLSTPTEASEAATAADAVEATCLDGGVGSEEEASAEAVPHDIDADSGAGAHNVGEADSSAEHERRHPCVNSGCDDDDVPCKLLRDTNKLTKL

SEQ ID NO: 78251 - protein, 65 aa, Setaria italica
  Transcript Sequence Number=SeqID_12277
MAAAEATTTATTSRFAAACGALSQFVRAAEAERERGGAWHPAVPVRPLPLMPGADVDEEPKAGPA

SEQ ID NO: 78252 - protein, 282 aa, Setaria italica
  Transcript Sequence Number=SeqID_12278
  Gene Ontology: Mol. function=oxidoreductase activity
  Homolog annotation: Hit_ID=B7P5Y9; Match level="QueryCoverage=86%, HitCoverage=87%, E-value=2e-34, Identity=35%"; Hit description =Calcium-dependent cysteine protease, putative
QEAAAAAPPERPSSAFVLRSLQDYTVGAIPTLFYVPDFISQSEQSQLLHHIYQAPAPKWKSLKNRRLQNWGGVVHEKGLLPQALPSWLTRITDRIWQWTGLFPSAINHVLINEYHPNQGIMPHQDGPAYYPVVAIISLASPVVIDFTPHKRLKEQEHTDPQNIQTDELLGPSMMESNGSGSHECGTPNESDPASSSLMLMPCSLLIFKDQAYTDYLHGIQDNELHNLDKVANLSRCQELRHLNSDSIQGTMDEQHGTFRRTATRVSLTCRLVLKVHKNLFKI

SEQ ID NO: 78253 - protein, 64 aa, Setaria italica
  Transcript Sequence Number=SeqID_12279
  Gene Ontology: Mol. function=transporter activity; Cellular component= integral to membrane; Biological process=transport
  Homolog annotation: Hit_ID=B6U8S7; Match level="QueryCoverage=51%, HitCoverage=5%, E-value=3e-10, Identity=93%"; Hit description =Carbohydrate transporter/ sugar porter/ transporter
DNDEKRHVSFDFWSITICRMLVGVGEASFISLAAPFIDDRLINEASPTPTITGMLGWWLVKLHL

SEQ ID NO: 78254 - protein, 60 aa, Setaria italica
  Transcript Sequence Number=SeqID_12280
VHSLFTVTFLIEFFYQASADLMFGGITIVCGILGTLSGGIILDKIWATIPNAFKVRKYNT

SEQ ID NO: 78255 - protein, 75 aa, Setaria italica
  Transcript Sequence Number=SeqID_12281
GGAGEERDGHGALPHQKGHRPSTTSSRLSSEASADLMFGGITIVCGILGTLSGGIILDKIWATIPNAFKVRKYNT

SEQ ID NO: 78256 - protein, 90 aa, Setaria italica
  Transcript Sequence Number=SeqID_12282
ISAKLDLNCLSYELFQMVIKANLVQFIIKLDLQLRIVCFTKMNRSTRRSESRRISVCKEQPAPMETILLCCTKKQNCNKKTVIVQWEDKN

SEQ ID NO: 78257 - protein, 75 aa, Setaria italica
  Transcript Sequence Number=SeqID_12283
TGRGELWRRGGERDGHGALPHQKGHRPSTTSSRLSSEASADLMFGGITIVCGILGTLSGGIILDKIGATIPNAFK

SEQ ID NO: 78258 - protein, 593 aa, Setaria italica
  Transcript Sequence Number=SeqID_12284
  Gene Ontology: Mol. function=transporter activity; Cellular component= integral to membrane; Biological process=transport
  Homolog annotation: Hit_ID=B6U8S7; Match level="QueryCoverage=99%, HitCoverage=97%, E-value=0.0, Identity=75%"; Hit description =Carbohydrate transporter/ sugar porter/ transporter
  Pfam annotation: Domain name=MFS_1; Domain location=109-519; Score =108.6; E_value=2.1e-29; Accession=PF07690.8; Description=Major Facilitator Superfamily
  Pfam annotation: Domain name=OATP; Domain location=106-539; Score= -264.4; E_value=0.0017; Accession=PF03137.12; Description=Organic Anion Transporter Polypeptide
  Pfam annotation: Domain name=Sugar_tr; Domain location=107-570; Score= -98.6; E_value=4.4e-05; Accession=PF00083.16; Description=Sugar (and other) transporter
  Pfam module annotation: Pfam domain module=MFS_1::OATP::Sugar_tr; Domain location=109-519::106-539::107-570
RTTNAARVVVPVAGSHVESASNPLPAAPGSVTPVAEGDQEHSKREAPAAAAAAASVEAKKEAAPAAAAGVEAMAVTVVRDVETGLAASTSDQGGDKPSWFTPKRLLVMFCIINMLNYVDRGAIASNGVNGSRKNCSGGTCTSGSGIQGDFNLSNAEDGVLSSAFMVGLLVASLIFASLAKRHNPFRLIGVGLLVWTIATAGCGVSFDFWSITICRMLVGVGEASFISLAAPFIDDNAPVAQKTGWLAMFYMCIPTGIALGYVYGGLVGKILNWRAAFWGESILMIPFVILGFVIKPLELKGFSQNRTKEYGQMLNPEVQDQINNNGTKRVMPGGIDDLAGKVPQKLSFSRFGQSLMTEIGRFGKDMKELLQEMPFFIVVLGYISYNFVIGAYSYWGPKAGKQIYNMASADLMFGGITIVCGILGTLSGGIILDKIGATIPNAFKLLSSATFLGAIFCFGAFCFKSLYGFIFFFAIGEILVFATQAPVNFVCLHTVKPHLRPLAMAVSTVSIHIFGDVPSSPLVGLLQDKINNWRSTALILTSILFIAAVFWFIGIFVPSVDRFKEESEDAVPAAERSNLRPLLDDNEGARTSD

SEQ ID NO: 78259 - protein, 50 aa, Setaria italica
  Transcript Sequence Number=SeqID_12285
ACCDLCSCAFVLLAIYIRTGIVRGCLVILCGNVVLFLISIAQTWSWIISR

SEQ ID NO: 78260 - protein, 89 aa, Setaria italica
  Transcript Sequence Number=SeqID_12286
  Gene Ontology: Mol. function=protein serine/threonine kinase activity; Cellular component=plasma membrane; Biological process =protein amino acid phosphorylation
  Homolog annotation: Hit_ID=B6UF43; Match level="QueryCoverage=76%, HitCoverage=12%, E-value=4e-28, Identity=88%"; Hit description =Calcium-dependent protein kinase, isoform 2
  Pfam annotation: Domain name=efhand; Domain location=22-50; Score =33.3; E_value=1e-06; Accession=PF00036.24; Description=EF hand
MVHYVEFISATMHMNRLEKEDHIYKAFEYFDKDHSGHITVDELEEALKKYDMGDEATIKEIIAEVDTDHVSNSKEMPKIISLVVSTPII

SEQ ID NO: 78261 - protein, 53 aa, Setaria italica
  Transcript Sequence Number=SeqID_12287
  Gene Ontology: Mol. function=protein serine/threonine kinase activity; Cellular component=plasma membrane; Biological process =protein amino acid phosphorylation
  Homolog annotation: Hit_ID=B6UF43; Match level="QueryCoverage=86%, HitCoverage=8%, E-value=8e-16, Identity=89%"; Hit description =Calcium-dependent protein kinase, isoform 2
  Pfam annotation: Domain name=efhand; Domain location=2-30; Score =34.7; E_value=3.6e-07; Accession=PF00036.24; Description=EF hand
VGLKEMFKSLDTDNSGTITLEELRTGLPKLGTKISESEIRQLMEAVRSFLVDP

SEQ ID NO: 78262 - protein, 238 aa, Setaria italica
  misc_feature (2)..(2): Xaa can be any naturally occurring amino acid
  misc_feature (25)..(25): Xaa can be any naturally occurring amino acid
  Transcript Sequence Number=SeqID_12288
  Gene Ontology: Mol. function=protein serine/threonine kinase activity; Cellular component=plasma membrane; Biological process =protein amino acid phosphorylation
  Homolog annotation: Hit_ID=B6UF43; Match level="QueryCoverage=100%, HitCoverage=45%, E-value=1e-123, Identity=89%"; Hit description =Calcium-dependent protein kinase, isoform 2
  Pfam annotation: Domain name=efhand; Domain location=127-155; Score =32.9; E_value=1.3e-06; Accession=PF00036.24; Description=EF hand
  Pfam annotation: Domain name=efhand; Domain location=163-191; Score =33.3; E_value=1e-06; Accession=PF00036.24; Description=EF hand
  Pfam annotation: Domain name=efhand; Domain location=198-226; Score =41.5; E_value=3.2e-09; Accession=PF00036.24; Description=EF hand
  Pfam annotation: Domain name=efhand; Domain location=91-119; Score =24.7; E_value=0.00038; Accession=PF00036.24; Description=EF hand
  Pfam module annotation: Pfam domain module=efhand::efhand::efhand::efh and; Domain location=127-155::163-191::198-226::91-119
DXVLRGHIDFSSDPWPSISNGAKDXVKKMLRQDPKERLTAAEILNHPWIREDGEAPDKPLDITVISRMKQFRAMNKLKKVALKIVAENFIRYLNCFRSLDADNSGTITLEELRSGLPKLGTKISESEIRQLMEAADVDGNGTIDYAEFISATMHMNRLEKEDHIYKAFEYFDKDHSGHITVDELEEALKKYDMGDEATIKEIIAEVDTDHDGRIDYQEFVAMMKNNSPEIVPNRRRMF

SEQ ID NO: 78263 - protein, 477 aa, Setaria italica
  Transcript Sequence Number=SeqID_12289
  Gene Ontology: Mol. function=protein serine/threonine kinase activity; Cellular component=plasma membrane; Biological process =protein amino acid phosphorylation
  Homolog annotation: Hit_ID=B6UF43; Match level="QueryCoverage=99%, HitCoverage=89%, E-value=0.0, Identity=95%"; Hit description=Calcium- dependent protein kinase, isoform 2
  Pfam annotation: Domain name=Pkinase; Domain location=25-283; Score =354.8; E_value=1.6e-103; Accession=PF00069.17; Description=Protein kinase domain
  Pfam annotation: Domain name=Pkinase_Tyr; Domain location=25-281; Score=-41.9; E_value=6.1e-11; Accession=PF07714.9; Description =Protein tyrosine kinase
  Pfam annotation: Domain name=efhand; Domain location=330-358; Score =33.3; E_value=9.9e-07; Accession=PF00036.24; Description=EF hand
  Pfam annotation: Domain name=efhand; Domain location=366-394; Score =32.9; E_value=1.3e-06; Accession=PF00036.24; Description=EF hand
  Pfam annotation: Domain name=efhand; Domain location=402-430; Score =35.1; E_value=2.7e-07; Accession=PF00036.24; Description=EF hand
  Pfam annotation: Domain name=efhand; Domain location=437-465; Score =40.3; E_value=7.8e-09; Accession=PF00036.24; Description=EF hand
  Pfam module annotation: Pfam domain module=Pkinase::Pkinase _Tyr::efhand::efhand::efhand::efhand; Domain location=25-283::25 -281::330-358::366-394::402-430::437-465
AAPSADAGVAGRVLGRPMEDVRATYTFGRELGRGQFGVTYLVTHRETGQRFACKSIATRKLVHRDDIEDVRREVQIMHHLTGHRNIVELRGAYEDRHSVNLVMELCEGGELFDRIIARGHYTERAAAALCREIVAVVHSCHSMGVFHRDLKPENFLFLNDKEDSPLKATDFGLSVFFKPGEQFRDLVGSAYYVAPEVLKRRYGAEADIWSAGVILYILLSGVPPFWAENEDGIFDAVLQGHIDFATDPWPSISNSAKDLVKKMLRQDPKERLTAAEILNHPWIREDGEAPDKPLDITVISRMKQFRAMNKLKKVALKIVAENLSDEEIMGLKEMFRSLDADNSGTITLEELRSGLPKLGTKISESEIRQLMEAADVDGNGTIDYAEFISATMHLNRLEKEDHILKAFEYFDKDHSGYITVDELEEALKKYDMGDDKTIKEIIAEVDTDHDGRINYQEFVAMMRNNSPEIVPNRRRMF

SEQ ID NO: 78264 - protein, 61 aa, Setaria italica
  Transcript Sequence Number=SeqID_12290
  Gene Ontology: Mol. function=phospholipase A2 activity; Biological process=phospholipid metabolic process
  Homolog annotation: Hit_ID=B6TUT8; Match level="QueryCoverage=96%, HitCoverage=41%, E-value=1e-23, Identity=89%"; Hit description =Phospholipase A2
MLGLMSVKCHEKFKNCMRKVKKAGKVGFSVKCPYEMAMATMTQGMDMAIMLSQLGSHKLEL

SEQ ID NO: 78265 - protein, 490 aa, Setaria italica
  Transcript Sequence Number=SeqID_12291
  Gene Ontology: Mol. function=nucleic acid binding; Cellular component= nucleus; Biological process=negative regulation of transcription
  Homolog annotation: Hit_ID=Q6H7U1; Match level="QueryCoverage=99%, HitCoverage=23%, E-value=0.0, Identity=77%"; Hit description =Putative SNF2 domain-containing protein
  Pfam annotation: Domain name=HEAT; Domain location=26-61; Score=17.2; E_value=0.066; Accession=PF02985.14; Description=HEAT repeat
  Pfam annotation: Domain name=HEAT; Domain location=423-459; Score =3.7; E_value=17; Accession=PF02985.14; Description=HEAT repeat
  Pfam module annotation: Pfam domain module=HEAT::HEAT; Domain location=26-61::423-459
RGEFDLNRATQTAEQEDKLTSSENPYGLATLMPRLWPFMRHSITSVRRSAIRTLEKLLEVGNTGSLSGTTPSKFWPTSILGDALQVVFQNLLLESNDEILQSSERAWKLVLQCPEKDLESAAKLYFSNWVQLATTPFGSALDSTKMFLPVALPRGSRSRAAAKIRSAGLEHEYTRMISFGSTGESTSHERHFDVPTSVSKIIVGADSDKSVTHTRVLTSMALGLFASKLPVDSWQVVLSPLANDLMSLSGVQRQVASMVIVSWFKDLRGRDPVSVGALLAFLSSVKEWLLDLLTCSDPALPTKDSVLPYSELSRTYTKMRNEANNLIHSIDSCAAFKDCISGVNLNVDMLSVDDAINFASKLLLPSESDLHSESEKTVLNNIESAKQGLLSTSGYLKCVQNNLHVTVCSLVASAVVWMSGLPSKLNPVILPLMAAIKREQEEVLQDKAADALAELIFSCVGRKPGPNDKLTRNLCTLTCTDASETPQAAI

SEQ ID NO: 78266 - protein, 55 aa, Setaria italica
  Transcript Sequence Number=SeqID_12292
TTEHQDVEAAAEDYDYEAADVNAEEDNEYQEYQDDDDDLEDDDDDFARKVGVMIS

SEQ ID NO: 78267 - protein, 418 aa, Setaria italica
  Transcript Sequence Number=SeqID_12293
  Gene Ontology: Mol. function=electron carrier activity; Cellular component=endoplasmic reticulum membrane; Biological process =oxidation reduction
  Homolog annotation: Hit_ID=B6UET7; Match level="QueryCoverage=100%, HitCoverage=80%, E-value=0.0, Identity=83%"; Hit description =Cytochrome P450 CYP94D27
  Pfam annotation: Domain name=p450; Domain location=1-410; Score=85.0; E_value=2.6e-22; Accession=PF00067.14; Description=Cytochrome P450
TNFANYPKGELAVSMIEDFLGHGIFNSDGEQWLWQRKAASYEFGKRSLRNLIVDAVRFEVVERLLPLLDRARQDGRTLDVQDVLERFAFDNICRVAFGEDPACLAEENMAAPQSAEFMRAFNDAQNAIMARFMSPLKSLWRLKRLLNMEPERRMREALCTIHGYADRIVRERRERGDAGLASRDDFLSRFAASGEHSDESLRDVVTNFLLAGRDTTSSALTWFFWLVSGRPDVEDRIVREIRAVRALSSHGSTHPSPTFSFDELRDMHYLHAAVTESMRLYPPVAMNTHCCQQDDFLPDGTFVGRGWLMTYSAYAMARVEDVWGKDCEEFRPERWLGEDGAFRPESPFRYPVFHAGPRMCLGKEMAYIQMKSIVACVFERFSFRFVGGEERPGLVLSLTLRMEGGLPMEVIERKSSVI

SEQ ID NO: 78268 - protein, 79 aa, Setaria italica
  Transcript Sequence Number=SeqID_12294
  Gene Ontology: Mol. function=RNA binding
  Homolog annotation: Hit_ID=B4FSK2; Match level="QueryCoverage=78%, HitCoverage=12%, E-value=3e-30, Identity=96%"; Hit description =Mov34/MPN/PAD-1 family protein
FTICLILSWNATQRLDLVMLPEAIAIVMAPTDTTRKHGIFHLTDPGGVGVIHDCQERGFHPHKAPLDGSPIYEQCSHVY

SEQ ID NO: 78269 - protein, 68 aa, Setaria italica
  Transcript Sequence Number=SeqID_12295
CQIRRGDWSSTHASSLFSEYQSGLFRISLMHDKVLTTNGQDNIVERGIWKKIKSKTGIARHTATGFVK

SEQ ID NO: 78270 - protein, 81 aa, Setaria italica
  Transcript Sequence Number=SeqID_12296
  Homolog annotation: Hit_ID=B4FSK2; Match level="QueryCoverage=70%, HitCoverage=11%, E-value=3e-15, Identity=71%"; Hit description =Mov34/MPN/PAD-1 family protein
  Subcellular localization annotation: CTP_CleavageSite=30; ConfidenceScore=5.35e-01
QVGHAASRRTSACHTTPKSSISLESPRPFVGSADGALQNSFHVGRQVPSLPIVQSDRFMNLPYPSEETLARHSILGPNGLH

SEQ ID NO: 78271 - protein, 74 aa, Setaria italica
  Transcript Sequence Number=SeqID_12297
IRRYIERKELTRGLARLMELSGVVWHVDVRRLTAWPTCYRPLCRTIHIHAIGQPEIFTQTDGVEDMGSRRWRGV

SEQ ID NO: 78272 - protein, 55 aa, Setaria italica
  Transcript Sequence Number=SeqID_12298
  Subcellular localization annotation: CTP_CleavageSite=16; ConfidenceScore=5.10e-01
GAGPARPTPSWARGVRARSRRARTPAWRSSGVRCHLRDRDAVPRAGLRHWAAVAR

SEQ ID NO: 78273 - protein, 114 aa, Setaria italica
  misc_feature (72)..(72): Xaa can be any naturally occurring amino acid
  Transcript Sequence Number=SeqID_12299
  Gene Ontology: Mol. function=diacylglycerol kinase activity; Biological process=activation of protein kinase C activity
  Homolog annotation: Hit_ID=B6ST14; Match level="QueryCoverage=41%, HitCoverage=7%, E-value=2e-15, Identity=87%"; Hit description =Diacylglycerol kinase
  Subcellular localization annotation: CTP_CleavageSite=21; ConfidenceScore=5.48e-01
LFYSSLFANSLLNNDLIGCVPSKSPVPFLGKTRCCSFFIFVGNSVCRFGSPLHKQGCIICRHLTQFTKKGFXTPLSFKFVEHHKTPAFTFISSHDESVWNLDGEIFQGRVRSQS

SEQ ID NO: 78274 - protein, 83 aa, Setaria italica
  Transcript Sequence Number=SeqID_12300
QKMLVNMNGESYTNNDTNLSSCLFLFMVVPVKFWSCDFLLYLFLWLVLVAWTTKFFSARSEGEIGPQHMLALYFQSIRVGYFG

SEQ ID NO: 78275 - protein, 70 aa, Setaria italica
  Transcript Sequence Number=SeqID_12301
NFYLLLTCSCGWFWLPGQQNSLVPDQKEYQSGLFRISLMHDKVLTTNGQDNIVERGIWKKSSPKRALQGT

SEQ ID NO: 78276 - protein, 60 aa, Setaria italica
  Transcript Sequence Number=SeqID_12302
KAIQAASNKQSVKHDGTTTKINIYGVPLCLMPACKSYITIPIGCMKRSYPCTRSSRKKLC

SEQ ID NO: 78277 - protein, 82 aa, Setaria italica
  Transcript Sequence Number=SeqID_12303
  Gene Ontology: Mol. function=RNA binding
  Homolog annotation: Hit_ID=B4FSK2; Match level="QueryCoverage=100%, HitCoverage=16%, E-value=2e-40, Identity=91%"; Hit description =Mov34/MPN/PAD-1 family protein
HYSYQVMLPEAIAIVVSVGAITRKHGIFHLTDPGGMGVIHDCQERGFHPHKAPLDGSPIYEQCSHVYMDTDIKFDMIDLRER

SEQ ID NO: 78278 - protein, 105 aa, Setaria italica
  Transcript Sequence Number=SeqID_12304
  Gene Ontology: Mol. function=diacylglycerol kinase activity; Biological process=activation of protein kinase C activity
  Homolog annotation: Hit_ID=B6ST14; Match level="QueryCoverage=63%, HitCoverage=11%, E-value=1e-29, Identity=92%"; Hit description =Diacylglycerol kinase
SPVPFLGKTRCCSFFIFVGNSVCRFGSPLHKQGCIICRHLTQFTKKGLDPLSFKFVEHHKTPAFTFISSHDESVWNLDGEIFQACEVSVQACRGLVNLFASGPEV

SEQ ID NO: 78279 - protein, 152 aa, Setaria italica
  Transcript Sequence Number=SeqID_12305
  Gene Ontology: Mol. function=diacylglycerol kinase activity; Biological process=activation of protein kinase C activity
  Homolog annotation: Hit_ID=B6ST14; Match level="QueryCoverage=98%, HitCoverage=24%, E-value=1e-62, Identity=78%"; Hit description =Diacylglycerol kinase
KNKRLIVTDRAGHAYDTLASLSDIELKALEGVVAVGGDGLFNEVLNGILSSRHKASYPPTPEGFGYFGSNGNCKEQAKNGLNCSMPIPDSVNTMFPGNSSKCDDHEPLLSTSQPTGLEIPSSNSSKEPCIGDKDHLVSFPNDWFRLGIIPSG

SEQ ID NO: 78280 - protein, 103 aa, Setaria italica
  Transcript Sequence Number=SeqID_12306
  Gene Ontology: Mol. function=diacylglycerol kinase activity; Biological process=activation of protein kinase C activity
  Homolog annotation: Hit_ID=B6ST14; Match level="QueryCoverage=100%, HitCoverage=16%, E-value=8e-48, Identity=89%"; Hit description =Diacylglycerol kinase
GAQPLRFRQKRPRKIICRTNCFVCKEASTSGQNSEDEIADSSRTICKNPKWVWSEGRFLSVGAAVISCRNERAPDGLVADAHLSDGFLHLLLIRDCPLPLYLW

SEQ ID NO: 78281 - protein, 100 aa, Setaria italica
  Transcript Sequence Number=SeqID_12307
  Gene Ontology: Mol. function=transferase activity, transferring acyl groups, acyl groups converted into alkyl on transfer; Cellular component=phagocytic vesicle; Biological process=cellular carbohydrate metabolic process
  Homolog annotation: Hit_ID=Q9AXR6; Match level="QueryCoverage=93%, HitCoverage=15%, E-value=3e-36, Identity=81%"; Hit description =ATP:citrate lyase
SLSVQVTLEYAVQVETYTLSKANNLVMNVRIGAIGSLFLDLLSGSGMFTKQEIDEIVEIGYLNGLFVLARSIGLIGHTFDQKRLKQPLYRHPWEDVLYTK

SEQ ID NO: 78282 - protein, 146 aa, Setaria italica
  Transcript Sequence Number=SeqID_12308
TKNGCGHLRVGIRREMVEGGVGDGGDEKKMDSASGGFSPFLSTRRALLGGRTVNIIFFSGGTTHPPWLVLRRPSKSFPSSLIFVVPAGSRIREIAPARRPLYPFRQAKPLGATRKALPLLPDQKGRLVPQHMLALYFQSIRVGYFG

SEQ ID NO: 78283 - protein, 61 aa, Setaria italica
  Transcript Sequence Number=SeqID_12309
FFIPFLLQPFVGSVDGALQKSFHVGRQVPSLPSVQSDRRIQKYLPCHDPSHGRMQIKSLGA

SEQ ID NO: 78284 - protein, 94 aa, Setaria italica
  Transcript Sequence Number=SeqID_12310
  Gene Ontology: Mol. function=transferase activity, transferring acyl groups, acyl groups converted into alkyl on transfer; Cellular component=phagocytic vesicle; Biological process=cellular carbohydrate metabolic process
  Homolog annotation: Hit_ID=Q9FGX1; Match level="QueryCoverage=88%, HitCoverage=13%, E-value=1e-41, Identity=97%"; Hit description=ATP citrate lyase
  Pfam annotation: Domain name=Ligase_CoA; Domain location=8-94; Score=- 36.2; E_value=0.00043; Accession=PF00549.11; Description=CoA-ligase
KIGDTAGTIDNIIQCKLYRPGSVGFVSKSGGMSNEMYNTIARVTDGIYEGIAIGGDVFPGSTLSDHILRFNNIPQVKMMVVLGLQLSDLLGIDR

SEQ ID NO: 78285 - protein, 157 aa, Setaria italica
  misc_feature (139)..(139): Xaa can be any naturally occurring amino acid
  Transcript Sequence Number=SeqID_12311
  Gene Ontology: Mol. function=calcium ion binding; Cellular component =cytoplasm; Biological process=response to calcium ion
  Homolog annotation: Hit_ID=Q2RAR8; Match level="QueryCoverage=100%, HitCoverage=50%, E-value=7e-81, Identity=92%"; Hit description=EF hand family protein, expressed
  Pfam annotation: Domain name=efhand; Domain location=26-54; Score =21.6; E_value=0.0032; Accession=PF00036.24; Description=EF hand
  Pfam annotation: Domain name=efhand; Domain location=92-120; Score =26.2; E_value=0.00014; Accession=PF00036.24; Description=EF hand
  Pfam module annotation: Pfam domain module=efhand::efhand; Domain location=26-54::92-120
YGGAGGYGSPFASLVPSAFQPGTDPNVVACFQSADRDGSGMIDDKELQAALSGYNQSFSLRTVHLLMYLFTNTNVRKIGPKEFTSVFYSLQNWRGIFERFDGDRSGKIDSSELRDALLSLGYSVSPTVLDLLVSKFDKXTGGKNKAIEYDNFIECCL

SEQ ID NO: 78286 - protein, 94 aa, Setaria italica
  Transcript Sequence Number=SeqID_12312
  Subcellular localization annotation: CTP_CleavageSite=30; ConfidenceScore=5.34e-01
QVGHAVSRRTSTCHTTPESSISLASPRPFVGSADGALQKSFHVGRQVPSLPSVQSDRRIQKQYVCLLVIFMSAICSYSVSLGLTIMWSFSYFLM

SEQ ID NO: 78287 - protein, 211 aa, Setaria italica
  Transcript Sequence Number=SeqID_12313
  Gene Ontology: Mol. function=transferase activity, transferring acyl groups, acyl groups converted into alkyl on transfer; Cellular component=phagocytic vesicle; Biological process=cellular carbohydrate metabolic process
  Homolog annotation: Hit_ID=Q9FGX1; Match level="QueryCoverage=90%, HitCoverage=31%, E-value=2e-90, Identity=83%"; Hit description=ATP citrate lyase
VVYCSLLNPLQQLVSEPSLVSRVSGTCARLFKSEVQFGHAGAKSGGELESAQAKNEALREAGAIVPTSYEALESAIKETFEKLVEDGKISPVAEITPPPIPEDLKTAIKSGKVRAPTHIISTISDDRGEEPCYAGVPMSTIIEQGYGVGDVISLLWFKRSLPRYCTQFIEICIMLCADHGPCVSGAHNSIVTARDTQGPWSAQSMMHISIN

SEQ ID NO: 78288 - protein, 122 aa, Setaria italica
  Transcript Sequence Number=SeqID_12314
  Gene Ontology: Mol. function=calcium ion binding; Cellular component =cytoplasm
  Homolog annotation: Hit_ID=B6SNX9; Match level="QueryCoverage=94%, HitCoverage=38%, E-value=1e-59, Identity=96%"; Hit description =Grancalcin
  Pfam annotation: Domain name=efhand; Domain location=21-49; Score =29.5; E_value=1.4e-05; Accession=PF00036.24; Description=EF hand
FSFSIFSGPKEFTSVFYSLQNWRGIFERFDRDRSGKIDSSELRDALLSLGYSVSPTVLDLLVSKFDKTGGKSRAIEYDNFIECCLTVKGLTEKFKEKDTAYSGSATFTYEAFMLTVLPFLIA

SEQ ID NO: 78289 - protein, 326 aa, Setaria italica
  Transcript Sequence Number=SeqID_12315
  Gene Ontology: Mol. function=diacylglycerol kinase activity; Cellular component=integral to membrane of membrane fraction; Biological process=activation of protein kinase C activity
  Homolog annotation: Hit_ID=B6ST14; Match level="QueryCoverage=97%, HitCoverage=52%, E-value=1e-167, Identity=89%"; Hit description =Diacylglycerol kinase
VFWWFLVADSSKEPCIGDKDHLVSFPNDWFRLGIIPSGSTDAIVLSTTGERDPVTSALLIILGRRMSLDIAQVVRWKSSPTAEVLPTVRYAASFAGYGFYGEVIRESENYRWMGPARYDFSGTMVFLKHRSYEAKVAFLESPNTDSLTESAEDDVTGAQPLRFRQKRPRKIICRTNCFVCKEASTSGQNSEDEIADSSRTICKNPKWVWSEGRFLSVGAAVISCRNERAPDGLVADAHLSDGFLHLLLIRDCPLPLYLWHLTQFTKKGLDPLSFKFVEHHKTPAFTFISSHDESVWNLDGEIFQACEVSVQACRGLVNLFASGPEV

SEQ ID NO: 78290 - protein, 68 aa, Setaria italica
  Transcript Sequence Number=SeqID_12316
AYLHRDAGKCILAIDGDRPIHPVLQHIGLADILHLWKIVNNSILRGREIGPQHMLALYFQSIRVGYFG

SEQ ID NO: 78291 - protein, 79 aa, Setaria italica
  Transcript Sequence Number=SeqID_12317
MKHVSASEFLRALIHRDAGKCILAIDGDRPIHPVLQHIGLADILHLWKIVNNSILRGREIGPQHMLALYFQSIRVGYFG

SEQ ID NO: 78292 - protein, 152 aa, Setaria italica
  Transcript Sequence Number=SeqID_12318
  Subcellular localization annotation: CTP_CleavageSite=44; ConfidenceScore=5.67e-01
LLGAATVGLPRATAAQCRSPARGWHRGRGGGSGRRCRTRPASALASTTPSLPSPNSVWVVQGLLLPNSASPPPPPTCLRAPASPSLSRSPTCCSSPAPPQPRPLPPDSATTPISSAATPCRLQEPQVLRPVVCVKISGWPIAWMWMVRQRGR

SEQ ID NO: 78293 - protein, 311 aa, Setaria italica
  misc_feature (88)..(88): Xaa can be any naturally occurring amino acid
  misc_feature (160)..(160): Xaa can be any naturally occurring amino acid
  Transcript Sequence Number=SeqID_12319
  Gene Ontology: Cellular component=Golgi apparatus
  Homolog annotation: Hit_ID=B9SB27; Match level="QueryCoverage=37%, HitCoverage=13%, E-value=6e-22, Identity=42%"; Hit description=Early endosome antigen, putative
SLEKQLLRQVSNIKEEYEDLYVESTIRDEIYQTVTRKLVDSHRNILEDTAQNFHAKLSSLEAALSEKDKALSLSNEENQKLKENCQYXKKKHFVQNNQQDLELTKQESEEMVLRDIEMETHVAPQRPYEISDQDMPYEELINLNQTLEIASTTLKEVETXKLDYSDILGKREQEKQLDCIMVSIMDLSKEFVEIEHKMSEDIKGNDKKTENLNDRCNHMVQQAIVLTKKGLWYKQMLDTRRSELRKAESEVDILGNKVNALLSLVQKIYVTLEHYSPVFQHHPVLLDAFLKTCKLVAGIRSRQKEESEDTT

SEQ ID NO: 78294 - protein, 947 aa, Setaria italica
  misc_feature (349)..(349): Xaa can be any naturally occurring amino acid
  Transcript Sequence Number=SeqID_12320
  Gene Ontology: Mol. function=histone-lysine N-methyltransferase activity; Cellular component=intracellular; Biological process =chromatin modification
  Homolog annotation: Hit_ID=Q84XG3; Match level="QueryCoverage=100%, HitCoverage=78%, E-value=0.0, Identity=83%"; Hit description=SET domain protein SDG117
  Pfam annotation: Domain name=Pre-SET; Domain location=652-784; Score =40.3; E_value=7.6e-09; Accession=PF05033.8; Description=Pre-SET motif
  Pfam annotation: Domain name=SET; Domain location=786-931; Score =158.8; E_value=1.7e-44; Accession=PF00856.20; Description=SET domain
  Pfam annotation: Domain name=zf-C2H2; Domain location=271-294; Score =6.9; E_value=2.2; Accession=PF00096.18; Description=Zinc finger, C2H2 type
  Pfam annotation: Domain name=zf-C2H2; Domain location=305-328; Score =18.0; E_value=0.04; Accession=PF00096.18; Description=Zinc finger, C2H2 type
  Pfam annotation: Domain name=zf-C2H2; Domain location=407-430; Score =14.7; E_value=0.31; Accession=PF00096.18; Description=Zinc finger, C2H2 type
  Pfam module annotation: Pfam domain module=Pre-SET::SET::zf-C2H2::zf -C2H2::zf-C2H2; Domain location=652-784::786-931::271-294::305 -328::407-430
MGRKCKHRAQHGTTFCKKHRLRTNLDAMHPENLLGSSEVPHMREEYPNKWVEEVSKSQTMYSVDSETDKNVQAAMQVKLMPTVATEISGEKACATEKIDLCTASTSITNTDDVPLCIGIRSHDSIVECQDYAKRHTLYCEKHLPKFLKRARNGKSRLVSKDVFVNLLKGCTSRKDKICLHQACEFLYWFLRNNLSHQRTGLGSDHMPQILVEASKNPDVGQFLLKLISTEREKLENLWGFGTNRSKQIYSENKEGSAVLLHEEGANLSSGPKCKICTHEFSDDQALGLHWTSAHKKESRWLFRGYSCAVCMESFTNKKVLERHVQDVHGAQYLQYSILIRCMSCNSNFXLNTDLLYPHIVSDHAQQFRLLDVPQRPNGRSVQQTEGTSGMLLYDNHNVEKDDGSQKFACRLCGLRFDLLPDLGRHHQVAHMDSSAVGNIPPGCGKYQLNRGRHYYSAFKKSLRPTSTLKKSSSSGIEKSFKFQSSGLSMVRSQTVESETASLGKLPDFQCSDVAETLFSKIQKTRPHPSNLDILSVARSVCCKTNLLAALEVKYGSLPENIFVKAAKLCSDNGIQIDWHHEEFVCPKGCKSRYNSNALPPIQLMSADFPEAPSVIDPPNIDEMWDMDEYHYVLDSKHFVWKLKKERVVLCEDVSFGREEVPIVCVIDVDAKDSFSTKPEELLPHGSSVPWQGLHYITKRVMDSSLVDSENSMPGCACSHTECFPEKCDHVSLFDGVYDNLVDIHGTPMHGRFAYDEDSKIILQEGYPIYECNSSCTCNSSCQNKVLQKGLLVKLELFRTENKGWAIRAAEPIPQGTFVCEYVGEVVKTDEAMKTAERMSSSECSYLFDIASQIDRERVQTVGTVKYMIDATRSGNVSRFINHSCSPNLSTRLVLVESKDCQLAHIGLFANQDIAAGEELAYDYRQKLVPGDGCPCHCGSKNCRGRVY

SEQ ID NO: 78295 - protein, 185 aa, Setaria italica
  misc_feature (34)..(34): Xaa can be any naturally occurring amino acid
  misc_feature (73)..(73): Xaa can be any naturally occurring amino acid
  Transcript Sequence Number=SeqID_12321
  Gene Ontology: Mol. function=diacylglycerol kinase activity; Cellular component=integral to membrane of membrane fraction; Biological process=activation of protein kinase C activity
  Homolog annotation: Hit_ID=B6ST14; Match level="QueryCoverage=95%, HitCoverage=28%, E-value=7e-77, Identity=80%"; Hit description =Diacylglycerol kinase
MLIGLCNTTVERDPVTSALLIILSRRMSLDIAQXIRWKSSPTAEVLPTVRYAASFAGYGFYGEVIRESENYRXMGPAHYEFSGTMVFLKQHRSYEAKVAFLESPNTNSLTESAEDDVTGAQPLRFSQKRPRKIICRTNCFVCKEASTSGQNSEDEIADSSITICENPKWVWSEGRFLSVGAENFQ

SEQ ID NO: 78296 - protein, 114 aa, Setaria italica
  Transcript Sequence Number=SeqID_12322
AFQVTEERDKVAEITTEFNKLTQKVSKSVELEKKVHDLEQKLQVAYSKSEEQVKFTLDSSTILSKQNDKSLGADAASPNPIQQEVLPCSTIIPVFFSPPSQQSTIASFFIFLPP

SEQ ID NO: 78297 - protein, 1316 aa, Setaria italica
  misc_feature (696)..(696): Xaa can be any naturally occurring amino acid
  misc_feature (1023)..(1023): Xaa can be any naturally occurring amino acid
  misc_feature (1218)..(1218): Xaa can be any naturally occurring amino acid
  Transcript Sequence Number=SeqID_12323
  Homolog annotation: Hit_ID=Q7XN10; Match level="QueryCoverage=100%, HitCoverage=82%, E-value=0.0, Identity=57%"; Hit description =OSJNBa0008M17.5 protein
  Pfam annotation: Domain name=Apolipoprotein; Domain location=460-657; Score=-50.3; E_value=0.067; Accession=PF01442.10; Description =Apolipoprotein A1A4E family
  Pfam annotation: Domain name=Cast; Domain location=45-920; Score= -303.1; E_value=0.07; Accession=PF10174.1; Description=RIM-binding protein of the cytomatrix
  Pfam annotation: Domain name=Cenp-F_leu_zip; Domain location=814-948; Score=-10.9; E_value=0.057; Accession=PF10473.1; Description=Leucine -rich repeats of kinetochore p
  Pfam annotation: Domain name=EzrA; Domain location=80-563; Score= -374.5; E_value=0.023; Accession=PF06160.4; Description=Septation ring formation regulator, EzrA
  Pfam annotation: Domain name=Filament; Domain location=248-557; Score= -168.7; E_value=0.0056; Accession=PF00038.13; Description =Intermediate filament protein
  Pfam annotation: Domain name=KID; Domain location=1226-1236; Score =2.0; E_value=2.1e+02; Accession=PF00038.13; Description=KID repeat
  Pfam annotation: Domain name=KID; Domain location=307-317; Score=4.1; E_value=74; Accession=PF00038.13; Description=KID repeat
  Pfam annotation: Domain name=KID; Domain location=384-394; Score=7.7; E_value=13; Accession=PF00038.13; Description=KID repeat
  Pfam annotation: Domain name=KID; Domain location=69-79; Score=4.3; E_ value=68; Accession=PF00038.13; Description=KID repeat
  Pfam annotation: Domain name=KID; Domain location=830-840; Score=2.9; E_value=1.4e+02; Accession=PF00038.13; Description=KID repeat
  Pfam annotation: Domain name=KID; Domain location=872-882; Score=1.1; E_value=3.3e+02; Accession=PF00038.13; Description=KID repeat
  Pfam annotation: Domain name=KID; Domain location=935-945; Score=3.9; E_value=84; Accession=PF00038.13; Description=KID repeat
  Pfam annotation: Domain name=LMP; Domain location=493-635; Score= -24.3; E_value=0.087; Accession=PF04778.4; Description=LMP repeated region
  Pfam annotation: Domain name=M; Domain location=1046-1069; Score=0.7; E_value=1.2e+02; Accession=PF02370.8; Description=M protein repeat
  Pfam annotation: Domain name=M; Domain location=1218-1238; Score=9.3; E_value=8.6; Accession=PF02370.8; Description=M protein repeat
  Pfam annotation: Domain name=M; Domain location=222-242; Score=1.6; E_ value=89; Accession=PF02370.8; Description=M protein repeat
  Pfam annotation: Domain name=M; Domain location=257-277; Score=5.2; E_ value=29; Accession=PF02370.8; Description=M protein repeat
  Pfam annotation: Domain name=M; Domain location=5-25; Score=1.2; E _value=1e+02; Accession=PF02370.8; Description=M protein repeat
  Pfam annotation: Domain name=M; Domain location=538-558; Score=0.5; E_ value=1.3e+02; Accession=PF02370.8; Description=M protein repeat
  Pfam annotation: Domain name=M; Domain location=54-74; Score=3.4; E _value=51; Accession=PF02370.8; Description=M protein repeat
  Pfam annotation: Domain name=M; Domain location=562-582; Score=3.3; E_ value=54; Accession=PF02370.8; Description=M protein repeat
  Pfam annotation: Domain name=M; Domain location=611-631; Score=2.6; E_ value=66; Accession=PF02370.8; Description=M protein repeat
  Pfam annotation: Domain name=M; Domain location=822-842; Score=1.0; E_ value=1.1e+02; Accession=PF02370.8; Description=M protein repeat
  Pfam annotation: Domain name=M; Domain location=966-986; Score=2.8; E_ value=62; Accession=PF02370.8; Description=M protein repeat
  Pfam annotation: Domain name=M; Domain location=991-1011; Score=3.5; E_value=51; Accession=PF02370.8; Description=M protein repeat
  Pfam annotation: Domain name=Myosin_tail_1; Domain location=19-944; Score=-525.1; E_value=0.094; Accession=PF01576.11; Description =Myosin tail
  Pfam annotation: Domain name=Pox_A_type_inc; Domain location=113-135; Score=3.9; E_value=26; Accession=PF04508.4; Description=Viral A-type inclusion protein repeat
  Pfam annotation: Domain name=Pox_A_type_inc; Domain location=1162 -1184; Score=10.0; E_value=3.2; Accession=PF04508.4; Description =Viral A-type inclusion protein repeat
  Pfam annotation: Domain name=Pox_A_type_inc; Domain location=1221 -1240; Score=1.8; E_value=52; Accession=PF04508.4; Description=Viral A-type inclusion protein repeat
  Pfam annotation: Domain name=Pox_A_type_inc; Domain location=152-174; Score=4.6; E_value=20; Accession=PF04508.4; Description=Viral A-type inclusion protein repeat
  Pfam annotation: Domain name=Pox_A_type_inc; Domain location=313-335; Score=7.9; E_value=6.6; Accession=PF04508.4; Description=Viral A-type inclusion protein repeat
  Pfam annotation: Domain name=Pox_A_type_inc; Domain location=376-398; Score=1.9; E_value=50; Accession=PF04508.4; Description=Viral A-type inclusion protein repeat
  Pfam annotation: Domain name=Pox_A_type_inc; Domain location=75-97; Score=12.3; E_value=1.5; Accession=PF04508.4; Description=Viral A -type inclusion protein repeat
  Pfam annotation: Domain name=Strep_SA_rep; Domain location=1045-1069; Score=2.2; E_value=51; Accession=PF06696.3; Description=Streptococcal surface antigen repeat
  Pfam annotation: Domain name=Strep_SA_rep; Domain location=134-155; Score=2.6; E_value=45; Accession=PF06696.3; Description =Streptococcal surface antigen repeat
  Pfam annotation: Domain name=Strep_SA_rep; Domain location=316-340; Score=5.5; E_value=15; Accession=PF06696.3; Description =Streptococcal surface antigen repeat
  Pfam annotation: Domain name=Strep_SA_rep; Domain location=516-540; Score=2.0; E_value=55; Accession=PF06696.3; Description =Streptococcal surface antigen repeat
  Pfam annotation: Domain name=Strep_SA_rep; Domain location=78-102; Score=5.1; E_value=18; Accession=PF06696.3; Description =Streptococcal surface antigen repeat
  Pfam annotation: Domain name=Strep_SA_rep; Domain location=966-990; Score=0.2; E_value=1.1e+02; Accession=PF06696.3; Description =Streptococcal surface antigen repeat
  Pfam module annotation: Pfam domain module=Apolipoprotein::Cast::Cenp- F_leu_zip::EzrA::Filament::KID::KID::KID::KID::KID::KID::KID::LMP::M:: M::M::M::M::M::M::M::M::M::M::M::Myosin_tail_1::Pox_A_type_inc::Pox_A_ type_inc::...
  Pfam module annotation: Pfam domain module=Pox_A_type_inc::Pox_A_type_ inc::Pox_A_type_inc::Pox_A_type_inc::Pox_A_type_inc::Strep_SA _rep::Strep_SA_rep::Strep_SA_rep::Strep_SA_rep::Strep_SA_rep::Strep _SA_rep; Domain ...
  Pfam module annotation: Pfam domain module=location=460-657::45 -920::814-948::80-563::248-557::1226-1236::307-317::384-394::69 -79::830-840::872-882::935-945::493-635::1046-1069::1218-1238::222 -242::257-277::5-25::...
  Pfam module annotation: =538-558::54-74::562-582::611-631::822 -842::966-986::991-1011::19-944::113-135::1162-1184::1221-1240::152 -174::313-335::376-398::75-97::1045-1069::134-155::316-340::516 -540::78-102::966-990
DSSVSKNQLLEQEVKELTDKCSEHQEQAHSVRQRSLELEDLLHTSKTDAEGAYSRTQELEQELNSTHEKLKGVEEELEQYRSKASQLSDDLEAYQTKAASLEAVVEAASEKEKELMESLTQITEEKKKIEELMAEYEAKLQENLKEKQSFEESLQSQESKVLDLQQELVKLREEKEHHDNTIADLSLQLSTKNDMYSQLESQLNEASDDHSKTRSLLSEAQSHKEELELNLRSLNDLHTASKTAAETTMQRVSELEAQIQELTASEQSLKLQLSELESKLASSEKTGIDLDEELKAATTECSNYRVKIDELFGELEAYKEKSTKLETSLAEAKQTEAELSEKLAQVNEEKETFEELSKKTTIKHLEAEKQVQTLQDELESARGKMEEVENELQSLGFRESSVLEKLKSAEEQLEHKGRALEHATSKKIDLEALYQSLLEDTEMKLQQSADNLAQKDIECQQLSEKLKLAEEQATSYQSRATAATEEVESMKVELEAFESEISTHDATIEELKTKVSDAESKAEQALAELAMLSGTNQALKEELDAKLALLHEVQEQLNSTQAEKEEVAAKLAEHERTVEHLTEVHSRGIELHSAAESRNAEIEAQLRDALGAAEQKEAEAKNLNEKLVALESEIESLTHVNEALKQEINAKLVMVDELQEKCSSINSEKEEVAEKLASHERKLEHLIEEHSRGLEXLQSVAESRNAEIESQLREVLEKVAQKEDEVTELTEKLALLEAENEKLAVANKALKEEVDTKLAMFDELQERFSSTHAEKEEAAEKLAVHERTISHLTEVHSRSLELHSAAESKNEEIEARLHEALETIAQKEGEIKELSKKLDALEIELGYYEEQATVAVAAEENHKVQFDGASQKIKILEEQLEETQSKVEHFLVEKESLAQANSSLNGELEVHQNKLNELQLALAAAVAEKEGASEEIHSLRKTLDGMIERKAELEIQNIFQVSSTMEELEELKSKYQNTLEEKQTLNDKYETTKKDLEEAIANLEEKMNVDKSEKESHISKLEXRQITLSETKYMEEIETMQVETTEKDEALTAKMQEHANLQHEKDELEQQLLEIRKELDGAYHTIANQEEQASVREIKWDAYRKYSEDQLEAEQQRASELELQVSALKQQLQEAEIHYKQKEEQVSSRAVQWEADKNHSLDELEAQRQYANDLEKQIEALAQKLQSADAHYKQKVTEERDKLAEITTEFNKLTQKVXKSVELEKKVQDLEQKLQVAYSKSEEQAKGAVQLRSREFTLDSSTISSKQNDKSQGADTASPNPIQQEVQEPSGIMAFKFILGVALLSILIGVFLGKRY

SEQ ID NO: 78298 - protein, 610 aa, Setaria italica
  misc_feature (415)..(415): Xaa can be any naturally occurring amino acid
  Transcript Sequence Number=SeqID_12324
  Gene Ontology: Mol. function=transferase activity, transferring acyl groups, acyl groups converted into alkyl on transfer; Cellular component=phagocytic vesicle; Biological process=cellular carbohydrate metabolic process
  Homolog annotation: Hit_ID=Q9FGX1; Match level="QueryCoverage=100%, HitCoverage=100%, E-value=0.0, Identity=88%"; Hit description=ATP citrate lyase
  Pfam annotation: Domain name=Citrate_synt; Domain location=275-602; Score=-174.1; E_value=0.0024; Accession=PF00285.13; Description =Citrate synthase
  Pfam annotation: Domain name=CoA_binding; Domain location=6-114; Score=-9.7; E_value=0.0093; Accession=PF02629.11; Description=CoA binding domain
  Pfam annotation: Domain name=Ligase_CoA; Domain location=155-300; Score=119.5; E_value=1.1e-32; Accession=PF00549.11; Description=CoA -ligase
  Pfam module annotation: Pfam domain module=Citrate_synt::CoA _binding::Ligase_CoA; Domain location=275-602::6-114::155-300
MATGQLFSKTTQALFYNYKQLPIQRMLDFDFLCGRETPSVAGIINPGSDGFQKLFFGQEEIAIPVHPTVEAACNAHPTADVFINFASFRSAAASSMSALKQPTIRVVAIIAEGVPESDAKQLISFARANNKVIIGPATVGGIQAGAFKIGDTAGTIDNIIQCKLYRPGSVGFVSKSGGMSNEMYNTIARVTDGIYEGIAIGGDVFPGSTLSDHILRFNNIPQVKMMVVLGELGGKDEYSLVEALKQGKVQKPVVAWVSGTCARLFKSEVQFGHAGAKSGGELESAQAKNEALREAGAIVPTSYEALESAIKETFEKLVEDGKISPVAEITPPPIPEDLKTAIKSGKVRAPTHIISTISDDRGEEPCYAGVPMSTIIEQGYGVGDVISLLWFKRSLPRYCTQFIEICIMLCADHGXPCVSGAHNSIVTARAGKDLVSSLVSGLLTIGPRFGGAIDDAARYFKDACDRGLTPYEFFVEGMKKKGIRVPGIGHRIKSRDNRDKRVQLLQKYAHTHFPSVKYMEYAVQVETYTLSKANNLVMNVDGAIGSLFLDLLSGSGMFTKQEIDEIVEIGYLNGLFVLARSIGLIGHTFDQKRLKQPLYRHPWEDVLYTK

SEQ ID NO: 78299 - protein, 617 aa, Setaria italica
  misc_feature (165)..(165): Xaa can be any naturally occurring amino acid
  Transcript Sequence Number=SeqID_12325
  Gene Ontology: Mol. function=phosphotransferase activity, alcohol group as acceptor; Cellular component=peroxisome; Biological process= protein modification process
  Homolog annotation: Hit_ID=B6U4S4; Match level="QueryCoverage=100%, HitCoverage=100%, E-value=0.0, Identity=90%"; Hit description =Phosphatidylinositol 3-and 4-kinase family protein
  Pfam annotation: Domain name=PI3_PI4_kinase; Domain location=175-440; Score=238.3; E_value=2e-68; Accession=PF00454.19; Description =Phosphatidylinositol 3- and 4-kinase
  Subcellular localization annotation: CTP_CleavageSite=48; ConfidenceScore=5.19e-01
MSPNLDSAIKSQVPALLLRRLFGASRRDEAKQLSRSPSTAPVGRRRVYVQTETGCVLGMDLDRGDNAHTVKRRLQLALNVPTGETSLTFGDRVLENDLSSIRSDSPLLLTRNSINRSCSTPCLCPVSKDFEQKDCSGLVEMLGCSSSCDRVKRLVEDVVTAIRSXGVDPVPISSGLGGSYYFRNVIGDRVAIVKPTDEEPFAPNNPKGFVGRALGQPGLKKSVRVGETGFREVAAYLLDHDNFANVPATALVKITHSIFNINCPVNGGNPSPTHDQKQQVNSKIASFQQFIAHDFDASDHGTSSFPVAAVHRIGILDIRIFNTDRHAGNVLVRKLNGGTGRFGCQTELFPIDHGMCLPENLEDPYFEWIHWAQASIPFSEEELEYIRNLDPGKDVMMLRRELPMIREACLRVLVLCTIFLKKAAAFGLCLAEIGEMMTREFRGMEEEPSQLEVVCMEARKRVAEWEPFSATAEQEGDIDFQFSMDMLGEYNDLMRSPRFNGSGFKGSSYRSPLSKLVESVEEGNDGHEDQNESDRVFYTGWNTPNFPSKATKSAMNRSADEQLQSSMCFVRLSDMSADEWNVFLEKFQELLKEALQERARAAAGQRMKQRLGTSCKF

SEQ ID NO: 78300 - protein, 237 aa, Setaria italica
  Transcript Sequence Number=SeqID_12326
  Gene Ontology: Mol. function=transferase activity, transferring glycosyl groups; Biological process=metabolic process
  Homolog annotation: Hit_ID=B4FG90; Match level="QueryCoverage=100%, HitCoverage=48%, E-value=9e-87, Identity=65%"; Hit description =Anthocyanidin 5,3-O-glucosyltransferase
MVNIWKRNTDTQGVLVNTFYSLESRALQAFRDPLCVPGEVLPPVYSVGPLVGKGGADKEEAERHECVAWLDAQPERSVVFLCWGSKGSLSEEQIKEIAAGLEKSGQRFLWVVRTPAGTDDPKRYLEKRPEPDLDALLPEGFLERTKGRGFVVKSWAPQVDVLMHPATGAFVTHCGWNSTLEAIVAGVPMLCWPLGAEQKMNKVLMVDESMSIGVELEGYNTGFVKAEEIEAKVKLVL

SEQ ID NO: 78301 - protein, 202 aa, Setaria italica
  Transcript Sequence Number=SeqID_12327
  Gene Ontology: Mol. function=DNA binding; Cellular component=nucleus; Biological process=negative regulation of transcription from RNA polymerase II promoter
  Homolog annotation: Hit_ID=Q2L3A9; Match level="QueryCoverage=68%, HitCoverage=24%, E-value=1e-41, Identity=68%"; Hit description =Jumonji family protein (Fragment)
  Pfam annotation: Domain name=JmjN; Domain location=76-109; Score =74.5; E_value=3.9e-19; Accession=PF02375.9; Description=jmjN domain
MVSSSVSSEEASPARRREKRRMLCGVAASPGPGATAAASLDHCPSRSCEEGFDRATTKCGIWHPGESQRPEIDDAPIFTPTEEEFKDAIGYIASIRPQAEKYGICRIIPPSSWRPPCPLKEKSFWESTEFNTRVQQVDKLQNREPIKKQTQPRIQRKRKRRKRLRFGMTHRRPSSRVDSEDKFGFQSGSDFTLEEFQKYSCL

SEQ ID NO: 78302 - protein, 149 aa, Setaria italica
  Transcript Sequence Number=SeqID_12328
  Gene Ontology: Mol. function=alpha-amylase activity; Cellular component=cellular_component; Biological process=carbohydrate metabolic process
  Homolog annotation: Hit_ID=Q41770; Match level="QueryCoverage=100%, HitCoverage=33%, E-value=2e-61, Identity=73%"; Hit description=Alpha- amylase
LRSLIAAFRGRGIQAVADVVINHRCADKQDARGVYCVFEGGDPEGRRLNWDADMICSDDTAYSNGRGNRDTGKDFGAAPDIDHLNPRVRRELTDWLRWLTADVGFGGWRLDFAKGYSAAVAKAYVDGAGPSFVVAEIWSSLNYDGDGKP

SEQ ID NO: 78303 - protein, 115 aa, Setaria italica
  Transcript Sequence Number=SeqID_12329
  Gene Ontology: Mol. function=nucleic acid binding; Cellular component= plasma membrane; Biological process=mRNA processing
  Homolog annotation: Hit_ID=Q2PWT6; Match level="QueryCoverage=72%, HitCoverage=70%, E-value=2e-37, Identity=92%"; Hit description =Putative small nuclear ribonucleoprotein D1
  Pfam annotation: Domain name=LSM; Domain location=5-70; Score=73.5; E_ value=7.9e-19; Accession=PF01423.14; Description=LSM domain
MKLVRFLMKLNNETVTIELKNGTVVHGTITGVDISMNTHLKTVKLTLKGKNPVTLDHLSVRGNNIRYYILPDSLNLETLLVEETPRVKPKKPTTGKPLGRGRGRGRGRGRGRGPR

SEQ ID NO: 78304 - protein, 64 aa, Setaria italica
  Transcript Sequence Number=SeqID_12330
PIARWWAGNLVQIPGPPQVEKLQWTKRRRQCHSKNTCKSYNRYLAFIIFILSHISGSPLIIVGH

SEQ ID NO: 78305 - protein, 89 aa, Setaria italica
  Transcript Sequence Number=SeqID_12331
  Gene Ontology: Mol. function=protein tyrosine kinase activity; Biological process=protein amino acid phosphorylation
  Homolog annotation: Hit_ID=B9RGW0; Match level="QueryCoverage=97%, HitCoverage=22%, E-value=1e-12, Identity=42%"; Hit description =Serine/threonine protein kinase, putative
MQVQNFQESSDISAIADNRMTSSFTSESMKELLRLASWCVNPMSEQRPSMSLVEAEIHRIREQEISLTTVMTGRTPTVTLGSQLFRTSR

SEQ ID NO: 78306 - protein, 366 aa, Setaria italica
  Transcript Sequence Number=SeqID_12332
  Gene Ontology: Mol. function=protein tyrosine kinase activity; Biological process=protein amino acid phosphorylation
  Homolog annotation: Hit_ID=B9RGW0; Match level="QueryCoverage=86%, HitCoverage=83%, E-value=5e-93, Identity=54%"; Hit description =Serine/threonine protein kinase, putative
  Pfam annotation: Domain name=Pkinase; Domain location=70-332; Score =42.6; E_value=5e-11; Accession=PF00069.17; Description=Protein kinase domain
  Pfam annotation: Domain name=Pkinase_Tyr; Domain location=70-334; Score=56.0; E_value=1.9e-17; Accession=PF07714.9; Description =Protein tyrosine kinase
  Pfam module annotation: Pfam domain module=Pkinase::Pkinase_Tyr; Domain location=70-332::70-334
MSGLLAAALGGAVGGLTLLCIVTVVIVLCLQYRRRTSDSSESGSSGQALPELQGARCLTLEELNLATRNFSNANLIGQGMFGEVYKGLLQDGTIVAVKRRHAPPSQEFVQEVNYLSSLQHRNLVKLLGYCQENVVQMLVYEYIPNGSVSTHLHGYSHAPGVRLEFKHRLSIAHGAAKGLSHLHSLTPPAIHMNFKTSNVLVDEDFIPKVADTGIPGLLDRLGVTGLSSRTPNDPFVDPRMRESMNLNFSIQSDVYSFGVFLVELVSGRRAVSDQNIIQWVQNFQESSDISAIADNRMTSSFTSESMKELLRLASWCVNPMSEQRPSMSLVEAEIHRIREQEISLTTVMTGRTPTVTLGSQLFRTSR

SEQ ID NO: 78307 - protein, 303 aa, Setaria italica
  Transcript Sequence Number=SeqID_12333
LSTRTSSGGNYNSELYDRNQIVGTRGEARSTVARNFFDSDDNEKLYEQSVSPSPLTTKSSDRVNSNQELYNEKSRGEARSTMARNFFDSDADEKLYEQSVNPSPPTTKSSERVNSNQELYNEKPGTGARREMRSRMARNYFDTDDSEDELEQQQTTQPKQSGVQIQSRRTRDVTSDTKRDGHVRTGARYADETVSLPKDTKAPQLNNSSTEQRRVAPVYPRVAVQRSSPKDENVESPMVARGKSQEAEMSRTSVPGNVGDTETSAGTLKESTPKTPPAHVHPKLPTDYDSFAAHFMSLRTNRR

SEQ ID NO: 78308 - protein, 138 aa, Setaria italica
  Transcript Sequence Number=SeqID_12334
  Gene Ontology: Mol. function=4-(cytidine 5'-diphospho)-2-C-methyl-D -erythritol kinase activity; Cellular component=chromoplast; Biological process=isoprenoid biosynthetic process
  Homolog annotation: Hit_ID=B6TB55; Match level="QueryCoverage=89%, HitCoverage=30%, E-value=2e-57, Identity=86%"; Hit description=4 -diphosphocytidyl-2-C-methyl-D-erythritol kinase
ASFEQGRRQVEVSYDPQAKFNQIADQIDKDAGMTRLNLFSPCKINVFLRITGKRPDGFHDLASLFHVISLGDTIKFSLSPSRSRDRLSTNVPGVPVDESNLIIKALNLYRQKTGTDNFFWVLLIMQTLVLRNCSFFCH

SEQ ID NO: 78309 - protein, 364 aa, Setaria italica
  misc_feature (14)..(14): Xaa can be any naturally occurring amino acid
  Transcript Sequence Number=SeqID_12335
  Gene Ontology: Mol. function=4-(cytidine 5'-diphospho)-2-C-methyl-D -erythritol kinase activity; Cellular component=chromoplast; Biological process=isoprenoid biosynthetic process
  Homolog annotation: Hit_ID=B6TB55; Match level="QueryCoverage=100%, HitCoverage=90%, E-value=1e-153, Identity=74%"; Hit description=4 -diphosphocytidyl-2-C-methyl-D-erythritol kinase
  Pfam annotation: Domain name=GHMP_kinases_C; Domain location=250-326; Score=28.8; E_value=2.2e-05; Accession=PF08544.5; Description=GHMP kinases C terminal
  Pfam annotation: Domain name=GHMP_kinases_N; Domain location=137-195; Score=50.0; E_value=9.1e-12; Accession=PF00288.18; Description=GHMP kinases N terminal domain
  Pfam module annotation: Pfam domain module=GHMP_kinases_C::GHMP _kinases_N; Domain location=250-326::137-195
AASPGSSAGGCRGXSLRVAASFEQGRRQVSYDPQAKFNQIADQIDKDAGMTRLNLFSPCKINVFLRITGKRPDGFHDLASLFHVISLGDTIKFSLSPSRSRDRLSTNVPGVPVDESNLIIKALNLYRQKTGTDNFFWIHLDKKVPTGAGLGGGSSNAATALWAANQFAGCIASEKDLQEWSGEIGSDIPFFFSRGAAYCTGRGEIVEDIPNPLLENLPLVLIKPPEACSTAEVYKRFRLEQASKADPLTLLKEITQNGISQDVCVNDLEPPAFEVLPSLKRLKKRIIAASRDDYNAVFMSGSGSTIVGIGSPDPPAFVYDDDDYKDVFVSEACFLTRDENEWYREPISSKAAFSKDDLPASVID

SEQ ID NO: 78310 - protein, 98 aa, Setaria italica
  Transcript Sequence Number=SeqID_12336
MGEEKEKVVMEILEDDEKRSSENSVPSAVLDLNEGFGEGSDGGEVGEDADDDDVEEEEDYEGGSTSEVAGAGSSNSSSNHNSGSNMDHDMNSGSKGEG

SEQ ID NO: 78311 - protein, 77 aa, Setaria italica
  Transcript Sequence Number=SeqID_12337
  Gene Ontology: Mol. function=SNAP receptor activity; Cellular component=membrane; Biological process=intracellular protein transport
  Homolog annotation: Hit_ID=B9S0N2; Match level="QueryCoverage=100%, HitCoverage=28%, E-value=3e-21, Identity=67%"; Hit description =Syntaxin, putative
TLSSISSIKGTCLSNSSFMSDEMDDKVDRANADLKNTNVRLKETVLQLRSSRNFCIDIILLCVILGIAAYLYNVLKK

SEQ ID NO: 78312 - protein, 270 aa, Setaria italica
  Transcript Sequence Number=SeqID_12338
  Gene Ontology: Mol. function=SNAP receptor activity; Cellular component=membrane; Biological process=intracellular protein transport
  Homolog annotation: Hit_ID=B9S0N2; Match level="QueryCoverage=100%, HitCoverage=100%, E-value=1e-110, Identity=74%"; Hit description =Syntaxin, putative
  Pfam annotation: Domain name=SNARE; Domain location=180-242; Score =55.5; E_value=2e-13; Accession=PF05739.11; Description=SNARE domain
  Pfam annotation: Domain name=Syntaxin-6_N; Domain location=34-122; Score=-11.1; E_value=0.086; Accession=PF09177.3; Description =Syntaxin 6, N-terminal
  Pfam module annotation: Pfam domain module=SNARE::Syntaxin-6_N; Domain location=180-242::34-122
MTVIDILTRVDAICQKYDKYDVDKLNGTNVAGDDPFARLYASVDADINQCVEKAETAKQEKNRAAVVALNAEIRRTKAKLLEEDLPKLQRLAVKKVKGLTKEEIATRSDLVAALPDRIQSIPDGSSTATKKNGTWGASGSRTGGAIKFDSTADGNFDDEYFKGTEESNQFRREYEMRRMKQDEGLDVIGEGLETLKNMASDMNEELDRQVPLMDEMDDKVDRANADLKNTNVRLKETVLQLRSSRNFCIDIILLCVILGIAAYLYNVLKK

SEQ ID NO: 78313 - protein, 106 aa, Setaria italica
  Transcript Sequence Number=SeqID_12339
AASLVALLLTVLIIPLLSFLLIAAKRSSSRLQRGDGRRLPPSPPGGLPLLGHLHLLGRLPHRALGSMAASCGPVMLLRLGQVPTVVASSAAAAEEAMKTRDLAFAS

SEQ ID NO: 78314 - protein, 233 aa, Setaria italica
  Transcript Sequence Number=SeqID_12340
PSPCSYLLHADADDEALIQIPGRNPSLVGASAPFALLPAIDPAPHISSQFYTFSAASYGLMLRCILAGRPASSDEVRAATSLSVLASWRAVWKDRNEDTAYLTAWKRIQDKLAASADGRHLHFKTNAAQRVSHVGMWRDIVSEAHADPDLLRHLAFKDTVDRIKQSWTVGAKFYGIPESFIRVCVAACPVCKAAPAGQPDSTISSPGRGKRRRRFEYTETLDVPARDVPRRLQ

SEQ ID NO: 78315 - protein, 50 aa, Setaria italica
  Transcript Sequence Number=SeqID_12341
  Gene Ontology: Mol. function=nucleotide binding; Cellular component =plasma membrane; Biological process=small GTPase mediated signal transduction
  Homolog annotation: Hit_ID=A9SI73; Match level="QueryCoverage=90%, HitCoverage=20%, E-value=9e-16, Identity=86%"; Hit description =Rab8/RabE-family small GTPase
SNHCVGVGKTCLLLQFSDHSFTTSFITTHGIDFKVRTIELDGWRIKLQIW

SEQ ID NO: 78316 - protein, 207 aa, Setaria italica
  Transcript Sequence Number=SeqID_12342
  Gene Ontology: Mol. function=nucleotide binding; Cellular component =plasma membrane; Biological process=small GTPase mediated signal transduction
  Homolog annotation: Hit_ID=Q39433; Match level="QueryCoverage=98%, HitCoverage=92%, E-value=2e-88, Identity=80%"; Hit description=Ras -related protein RAB1BV
  Pfam annotation: Domain name=Arf; Domain location=5-165; Score=-75.2; E_value=0.00091; Accession=PF00025.13; Description=ADP-ribosylation factor family
  Pfam annotation: Domain name=MMR_HSR1; Domain location=4-119; Score= -5.0; E_value=0.0029; Accession=PF01926.15; Description=GTPase of unknown function
  Pfam annotation: Domain name=Miro; Domain location=5-119; Score=84.4; E_value=4.2e-22; Accession=PF08477.5; Description=Miro-like protein
  Pfam annotation: Domain name=Ras; Domain location=5-167; Score=327.2; E_value=3.4e-95; Accession=PF00071.14; Description=Ras family
  Pfam module annotation: Pfam domain module=Arf::MMR_HSR1::Miro::Ras; Domain location=5-165::4-119::5-119::5-167
TNVPKLLLIGDSKVGKTCLLLQFSDHSFTTSFITTHGIDFKVRTIELDGWRIKLQIWDTAGQERFRTITTAYYRNAMGILLVYDVTDESSFNNIRNWIRNTEQHASDNVNKILIGNKADMDESKRAVPTSKGQALADEYGIKFFETSAKTNLNVNQVFFSIARDVTQRFVETNTKQPEFWESTTITINRPEGGGDTSTQQKSACCGS

SEQ ID NO: 78317 - protein, 59 aa, Setaria italica
  Transcript Sequence Number=SeqID_12343
TTQGQAYFVFMHHVKQKEQGKHSHCENLPRRWLTIGKGKGITTKKVTKNDKQDLCKHYS

SEQ ID NO: 78318 - protein, 258 aa, Setaria italica
  Transcript Sequence Number=SeqID_12344
  Gene Ontology: Mol. function=serine-type endopeptidase activity; Cellular component=cytoplasm; Biological process=proteolysis
  Homolog annotation: Hit_ID=B6U134; Match level="QueryCoverage=97%, HitCoverage=33%, E-value=1e-108, Identity=72%"; Hit description =Prolyl endopeptidase
  Pfam annotation: Domain name=Peptidase_S9; Domain location=91-250; Score=157.4; E_value=4.2e-44; Accession=PF00326.13; Description =Prolyl oligopeptidase family
KVVQSKFASFLTPGIIYRCDVSTEVPEMSVYREISVPGFDRNEFEAKQVFYPSKDGTKIAMFIVSKKNLNLNGSHPALLFGYGGFGMSMTPQFSVTRVVLMRNLGFVTCVANIRGGGEYGEGWHRAGSLANKQNCFDDFIAAGEFLVAAGYTNPTRLCIEGGSNGGLLVAACLNQRPDLFGCALAHVGVMDMLRFHKFTIGRAWTCDFGCSENEEEFHWLIKYSPLHNVRRPWEEKGDDDPRRRVCWGGQYPPTMLLT

SEQ ID NO: 78319 - protein, 75 aa, Setaria italica
  Transcript Sequence Number=SeqID_12345
  Gene Ontology: Cellular component=integral to membrane
  Homolog annotation: Hit_ID=B6TBP2; Match level="QueryCoverage=65%, HitCoverage=65%, E-value=1e-18, Identity=91%"; Hit description =Hydrophobic protein LTI6B
  Pfam annotation: Domain name=UPF0057; Domain location=8-59; Score =70.0; E_value=8.7e-18; Accession=PF01679.9; Description =Uncharacterized protein family UPF0057
MGLCSCCCRCLELLCSVLLPPLGVCLRHGCCSLEFWISVLLTILGYLPGVLYAIYVICSVDPHRHDDPDDYVYVA

SEQ ID NO: 78320 - protein, 61 aa, Setaria italica
  Transcript Sequence Number=SeqID_12346
  Gene Ontology: Mol. function=protein serine/threonine kinase activity; Cellular component=plasma membrane; Biological process =protein amino acid phosphorylation
  Homolog annotation: Hit_ID=B6SXI8; Match level="QueryCoverage=95%, HitCoverage=10%, E-value=2e-21, Identity=86%"; Hit description =Transposon protein
LVLIRFFLQKRRFVTHANAKSKSEKFPPPHQDGAVGVPLDSSNHMDPLYEPPDPSSFSTVF

SEQ ID NO: 78321 - protein, 245 aa, Setaria italica
  misc_feature (24)..(24): Xaa can be any naturally occurring amino acid
  Transcript Sequence Number=SeqID_12347
  Gene Ontology: Mol. function=protein serine/threonine kinase activity; Cellular component=plasma membrane; Biological process =protein amino acid phosphorylation
  Homolog annotation: Hit_ID=B6SXI8; Match level="QueryCoverage=100%, HitCoverage=44%, E-value=1e-104, Identity=78%"; Hit description =Transposon protein
RTEVEQLHKIFKLCGSPTEEYWKXSKLPHATIFKPQQPYKRRIRETFKDFPQSALQLIETLLAIDPADRLTATAALRSDFFTTEPFACEPSSLPKYPPSKEIDAKRRDEEARRLRAAAGRANGDGSKKTRTRDRPKAVPAPEANAELQVNIDKRRFVTHANAKSKSEKFPPPHQDGAVGVPLDSSNHMDPLYEPPDPSSFSTVFTYEKGAVPTWSGPLADPAAVANQKRKHKSRSSKQPATARAR

SEQ ID NO: 78322 - protein, 357 aa, Setaria italica
  Transcript Sequence Number=SeqID_12348
  Gene Ontology: Mol. function=nucleic acid binding; Cellular component= ribonucleoprotein complex; Biological process=RNA processing
  Homolog annotation: Hit_ID=Q2QVL9; Match level="QueryCoverage=85%, HitCoverage=73%, E-value=2e-63, Identity=43%"; Hit description =Transposon protein, putative, Mutator sub-class, expressed
  Pfam annotation: Domain name=La; Domain location=46-105; Score=99.4; E_value=1.2e-26; Accession=PF05383.9; Description=La domain
HQHYQPRHQHHHQGEDDGVAAAAGEDKEGPAGAGHHRLNDADARKVVKQVEFYFSDINLATTEHLMKFITNDPDGFVPISVVANFRKIREIVSDRSLLVAALRTSSELVVSEDGKKVKRLRPFNTEEVQSRIVVAENLPDQKYQALMKIFSDVGSVKSIRTCYPQDGGAAAASKTSRIEMLFANKLHAFVEYGAVEDAEKAVAFSAEGKWRDGGIRVRSLLACLKHGLGQGRKGGDEYAVDEDGPDTTGHPHDYGTEDTTQISEAHLDHQAEDGSHDKGGMRQGRGRGRGGRGRGRGQYYGHSRDAHHPIGTPPSDHPAVPKPPPGPRMPDGTRGFTMGRGKPLNPSPDAAPTTDAA

SEQ ID NO: 78323 - protein, 51 aa, Setaria italica
  Transcript Sequence Number=SeqID_12349
QAKTYCISEQIEGNVIIWHPNLVALSQLRLNCVRTESIQIIYPGNKPNSLL

SEQ ID NO: 78324 - protein, 65 aa, Setaria italica
  Transcript Sequence Number=SeqID_12350
  Gene Ontology: Mol. function=ribose phosphate diphosphokinase activity; Cellular component=cytoplasm; Biological process =nucleotide biosynthetic process
  Homolog annotation: Hit_ID=Q6ZFT5; Match level="QueryCoverage=72%, HitCoverage=14%, E-value=4e-18, Identity=87%"; Hit description =Ribose-phosphate pyrophosphokinase 4
MEVATAAAAAKQKPKKHIHLFYCSECEELALKIAASSDAIELQSINWRSFDDGFPNLFINKAHRE

SEQ ID NO: 78325 - protein, 41 aa, Setaria italica
  Transcript Sequence Number=SeqID_12351
ESKTSVNGTKDVAIQDRVKLNGDARLFTDIPPVLPVQVRVK

SEQ ID NO: 78326 - protein, 115 aa, Setaria italica
  Transcript Sequence Number=SeqID_12352
  Subcellular localization annotation: CTP_CleavageSite=45; ConfidenceScore=5.51e-01
STTTALQLLTAPYTTKRTKHRRPQGIYNTRRSHTNLVEVKFLKFCCERGSSKSIMFFMFSVNNSIVSSSCQLPDFDSKCPSETGMLSTSLCIKLLQSKEMVKLLLSLVQLLFPSS

SEQ ID NO: 78327 - protein, 693 aa, Setaria italica
  misc_feature (120)..(120): Xaa can be any naturally occurring amino acid
  Transcript Sequence Number=SeqID_12353
  Gene Ontology: Mol. function=protein serine/threonine kinase activity; Cellular component=plasma membrane; Biological process =protein amino acid phosphorylation
  Homolog annotation: Hit_ID=B9RLU5; Match level="QueryCoverage=89%, HitCoverage=91%, E-value=0.0, Identity=60%"; Hit description=ATP binding protein, putative
  Pfam annotation: Domain name=Pkinase; Domain location=108-392; Score =301.6; E_value=1.6e-87; Accession=PF00069.17; Description=Protein kinase domain
  Pfam annotation: Domain name=Pkinase_Tyr; Domain location=108-338; Score=13.1; E_value=1.3e-14; Accession=PF07714.9; Description =Protein tyrosine kinase
  Pfam module annotation: Pfam domain module=Pkinase::Pkinase_Tyr; Domain location=108-392::108-338
  Subcellular localization annotation: CTP_CleavageSite=30; ConfidenceScore=5.04e-01
DLSGAIRDRSQPRAHESAAPVPLPVPAAVVSSLRSSSYAARRSEKVKDEAEEPEKAAVVVPAASRSFRLRSLRKSLEGEQVAAGWPPWLSAVAGEAIQGWIPLKADSFEKLQKVGQGTYXSVFRARELETGKIVALKKVRFDNFEPESVRFMAREIQILRRLDHPNVMKLEGLITSRLSCSLYLVFEYMEHDLAGLCSSPDIKFTDAQLKCYMNQLLSGLEHCHSRRVVHRDIKGANLLVNNEGVLKIADFGLANYFDPSKNHPLTSRVVTLWYRPPELLLGSTHYDAAVDLWSVGCVFAEMFRGKPILQGRTEVEQLHKIFKLCGSPADDYWKKSKLPHATIFKPHHPYPSTLRDVFKEVPGNALSLLETLLSVEPYKRGTAAGALSSEFFRTKPYACDPSSLPKYAPNKEMDAKLREDALRRKASSRGHGTEASKKSSRLSRVAREPSAVPKQISNKEESKTSVNGTKDVAIQDRVKLNGDARLFTDIPPVLPVQVRERSRHFKNDTREEVPFSGPLSVSSSGGFAWAKRPQEDRSFARSRTRSSSRGQFPGEADQDRKSQAKENVGLRELPSRDVSISISRTNSKIQDREPHDVAKRAVLKKWSQLERPDSFDSCDTYHSQNFSNAMFLGGTVSSKNSFKGDHDQEEKVEYSGPLLSQSHKVDELLQKHERHIRQVVRTSWFRRGRKLDK

SEQ ID NO: 78328 - protein, 62 aa, Setaria italica
  misc_feature (37)..(37): Xaa can be any naturally occurring amino acid
  Transcript Sequence Number=SeqID_12354
  Gene Ontology: Mol. function=inorganic diphosphatase activity; Cellular component=cytoplasm; Biological process=phosphate metabolic process
  Homolog annotation: Hit_ID=B6TWH2; Match level="QueryCoverage=51%, HitCoverage=15%, E-value=5e-12, Identity=93%"; Hit description =Soluble inorganic pyrophosphatase
SSTLITTDSSPGRSARWTGSLYSSVVYPHNYGFIPRXLCEDNDPMDVLVLMQVTHHSQALFQ

SEQ ID NO: 78329 - protein, 47 aa, Setaria italica
  misc_feature (41)..(41): Xaa can be any naturally occurring amino acid
  Transcript Sequence Number=SeqID_12355
  Gene Ontology: Mol. function=inorganic diphosphatase activity; Cellular component=cytoplasm; Biological process=phosphate metabolic process
  Homolog annotation: Hit_ID=B6TWH2; Match level="QueryCoverage=72%, HitCoverage=15%, E-value=4e-10, Identity=97%"; Hit description =Soluble inorganic pyrophosphatase
SRYQLTDRACVPAGPEAPAVFNVVVEITKGSKVKYELDKKXGLIKVD

SEQ ID NO: 78330 - protein, 196 aa, Setaria italica
  misc_feature (115)..(115): Xaa can be any naturally occurring amino acid
  Transcript Sequence Number=SeqID_12356
  Gene Ontology: Mol. function=inorganic diphosphatase activity; Cellular component=cytoplasm; Biological process=phosphate metabolic process
  Homolog annotation: Hit_ID=O48556; Match level="QueryCoverage=93%, HitCoverage=79%, E-value=5e-88, Identity=85%"; Hit description =Soluble inorganic pyrophosphatase
  Pfam annotation: Domain name=Pyrophosphatase; Domain location=22-188; Score=153.0; E_value=8.8e-43; Accession=PF00719.11; Description =Inorganic pyrophosphatase
SRDQLTDRACVPAGPEAPAVFNVVVEITKGSKVKYELDKKTGLIKVDRVLYSSVVYPHNYGFIPRSLCEDNDPMDVLVLMQEPVLPGAFLRARAIGLMPMIDQAGEYMNHFHLAXGEKDDKIIAVCADDPEYRHYNDISELSPHRLQEIRRFFEDYKKNENKDVAVDDFLPAAAAREAIQYSMDLYGQYIMQTLRR

SEQ ID NO: 78331 - protein, 82 aa, Setaria italica
  misc_feature (26)..(26): Xaa can be any naturally occurring amino acid
  misc_feature (65)..(65): Xaa can be any naturally occurring amino acid
  Transcript Sequence Number=SeqID_12357
  Subcellular localization annotation: CTP_CleavageSite=60; ConfidenceScore=5.76e-01
ERISQVPTRPPPPPPTFSSSGIRPPXPSRPQPLPPLHPEGRNPSFRRRSLPPDSRPQPPRSSRDXSARPSPNAPSPPSSSSD

SEQ ID NO: 78332 - protein, 142 aa, Setaria italica
  misc_feature (71)..(71): Xaa can be any naturally occurring amino acid
  misc_feature (98)..(98): Xaa can be any naturally occurring amino acid
  Transcript Sequence Number=SeqID_12358
  Gene Ontology: Mol. function=electron carrier activity; Biological process=metabolic process
  Homolog annotation: Hit_ID=B4F8B4; Match level="QueryCoverage=92%, HitCoverage=39%, E-value=3e-51, Identity=75%"; Hit description =Oxidoreductase
MASGWRGILGFDYGIVQAPLGPDISGPELAAAVANAGAIGLLRLPDWPAPDRVRELIRKTRSLTSRPFGAXILAFPHEENLRVVLEEKLAVLQVYWGXFPRERVEEAHRAGVKVLHQVLAIASRSAVTDASTLLNCCYACAC

SEQ ID NO: 78333 - protein, 335 aa, Setaria italica
  misc_feature (247)..(247): Xaa can be any naturally occurring amino acid
  Transcript Sequence Number=SeqID_12359
  Gene Ontology: Mol. function=oxidoreductase activity, acting on single donors with incorporation of molecular oxygen, incorporation of two atoms of oxygen; Biological process=metabolic process
  Homolog annotation: Hit_ID=B4F8B4; Match level="QueryCoverage=99%, HitCoverage=98%, E-value=1e-164, Identity=86%"; Hit description =Oxidoreductase
  Pfam annotation: Domain name=IMPDH; Domain location=7-273; Score= -235.8; E_value=0.03; Accession=PF00478.17; Description=IMP dehydrogenase  GMP reductase domain
  Pfam annotation: Domain name=NPD; Domain location=2-322; Score=198.5; E_value=1.8e-56; Accession=PF03060.7; Description=2-nitropropane dioxygenase
  Pfam annotation: Domain name=NanE; Domain location=27-213; Score= -110.0; E_value=0.098; Accession=PF04131.6; Description=Putative N -acetylmannosamine-6-phosph
  Pfam module annotation: Pfam domain module=IMPDH::NPD::NanE; Domain location=7-273::2-322::27-213
MGSGWRGILGFDYGIVQAPLGPDISGPELAAAVANAGAIGLIRLPDFPAPEYVRELIRKTRSLTSRPFGAAIVLPFPYDENLRVVLEEKLAVLQVYWGEFPRERVEEAHRAGVKVLHQVGNLEEAAKAKEAGVDGIIIQGREAGGHVIGQEGLFPLLPRVVDLVSDSGIPVIAAGGIVDGRGYVAALALGAQGVCLGTRFVATEESFAHPIYKQKLIEVSHTDYTNVFGRARWPDAPQRVLETPFYXSQSNLSDQETEESQPIIGHSIIHGVHKDIRRFAGTVPNATATGDIESMAMYAGQGVGLITEVIPAGDVVKRLVVEAKDVIREKLSDLK

SEQ ID NO: 78334 - protein, 102 aa, Setaria italica
  Transcript Sequence Number=SeqID_12360
  Gene Ontology: Mol. function=hydrolase activity, acting on carbon -nitrogen (but not peptide) bonds; Biological process=nitrogen compound metabolic process
  Homolog annotation: Hit_ID=Q93XI4; Match level="QueryCoverage=95%, HitCoverage=32%, E-value=3e-51, Identity=95%"; Hit description=N -carbamoylputrescine amidase
YRKSHIPDVPGYQEKFYFNPGDTGFKAFKTKYATIGVGICWDQWFPECARAMVLQGAEILFYPTAIGSEPQDGNLDSREHWKRVMQGHAGANLVLFVVLYSS

SEQ ID NO: 78335 - protein, 139 aa, Setaria italica
  Transcript Sequence Number=SeqID_12361
  Homolog annotation: Hit_ID=Q9ZWA0; Match level="QueryCoverage=43%, HitCoverage=7%, E-value=9e-10, Identity=56%"; Hit description =F11M21.29 protein
MAPDTGTVAAAAAIDEAYEFSAPRFFDFINEETEEAVRAAESWFEAAQSHAPSPFNPRIKESRAEAKVAILCDLAEAEEPALKEEPVEGVAGSAANHGADAIEGSTQEKKDPSFGSLSEGNPGGTCANAGNHHEEESAP

SEQ ID NO: 78336 - protein, 140 aa, Setaria italica
  misc_feature (80)..(80): Xaa can be any naturally occurring amino acid
  Transcript Sequence Number=SeqID_12362
  Gene Ontology: Mol. function=binding; Cellular component=cytosol; Biological process=embryonic development ending in birth or egg hatching
  Homolog annotation: Hit_ID=Q84NS6; Match level="QueryCoverage=100%, HitCoverage=15%, E-value=2e-65, Identity=83%"; Hit description =Tetratricopeptide repeat (TPR)-containing protein-like protein
LRKEYGELIISCGIVGEALDIFKDLELWDNLIYCYRLLGKVADAVSLINARLSVTPNDPRLWCSLGDVTNNDDHYKKALXVSNNKSARAMRSLARSAYNRNDFNTSKILWESALSLNSLVPDGWFAYGTAAWKDKDLDKA

SEQ ID NO: 78337 - protein, 646 aa, Setaria italica
  misc_feature (344)..(344): Xaa can be any naturally occurring amino acid
  Transcript Sequence Number=SeqID_12363
  Gene Ontology: Mol. function=binding; Cellular component=cytosol
  Homolog annotation: Hit_ID=Q84NS6; Match level="QueryCoverage=99%, HitCoverage=75%, E-value=0.0, Identity=71%"; Hit description =Tetratricopeptide repeat (TPR)-containing protein-like protein
  Pfam annotation: Domain name=TPR_1; Domain location=307-340; Score =0.5; E_value=5.2; Accession=PF00515.20; Description=Tetratricopeptide repeat
  Pfam annotation: Domain name=TPR_1; Domain location=375-408; Score =28.2; E_value=3.3e-05; Accession=PF00515.20; Description =Tetratricopeptide repeat
  Pfam annotation: Domain name=TPR_1; Domain location=409-442; Score =26.0; E_value=0.00015; Accession=PF00515.20; Description =Tetratricopeptide repeat
  Pfam annotation: Domain name=TPR_2; Domain location=307-340; Score =3.5; E_value=12; Accession=PF07719.9; Description=Tetratricopeptide repeat
  Pfam annotation: Domain name=TPR_2; Domain location=341-374; Score =6.9; E_value=4.7; Accession=PF07719.9; Description=Tetratricopeptide repeat
  Pfam annotation: Domain name=TPR_2; Domain location=375-408; Score =33.6; E_value=7.8e-07; Accession=PF07719.9; Description =Tetratricopeptide repeat
  Pfam annotation: Domain name=TPR_2; Domain location=409-442; Score =23.4; E_value=0.00096; Accession=PF07719.9; Description =Tetratricopeptide repeat
  Pfam annotation: Domain name=TPR_3; Domain location=375-408; Score =18.7; E_value=0.024; Accession=PF07720.4; Description=Tetratricopepti de repeat
  Pfam module annotation: Pfam domain module=TPR_1::TPR_1::TPR_1::TPR _2::TPR_2::TPR_2::TPR_2::TPR_3; Domain location=307-340::375-408::409- 442::307-340::341-374::375-408::409-442::375-408
PSRTFLDELSSSLYDQVQVYKNKMLGHFGELEKVSTYWDPILCDGEGSYFVSASFLEAGIAEYKYGRVDASRLHLDSAQEACGLHLSLTGILGFRTIHQVDAKSQMVLVAKTNKSGSDEGQATELTLAQNDNSALKNARGSVPVESDEFCDILRTPRLVHDGSNSASANTTGPSANISLSAIQQAAVLAQCLHVSRRSRSDEMSGWEMAPYIESIDSQGESYFVVRSLCDILRIRWESTRSRTKQRALLMMQNLVEDVGKEFPVTAQRVKMVFGVHMPTLPALRKEYGELLISCGIVGEALDIFKDLELWDNLIYCYRLLGKVADAVSLINARLSVTPNDPRLXRSLARSAYNRNDFNTSKILWESALSLNSLVPDGWFAYGTAAWKDKDLDKAVDAFSRAVQIDPENGEAWNNIACLHMIRGKSQAAVQAFREAVKFKRNSWEIWENYSKVALDTGNVRLTLEASKTVLNLSSNKRFNVDILDKVMALLEEQPPHFVDSHEASDGANKETRQSNQLLDIIGDILQQIVRSGGSNADVWGLYARWHKTKGNLLACSEALLKQVRSLQGSGLWHDEKKFTKYAQASLQLCKVYMEISSSSGSRRELLTAEMHLKSTLKQAVDFSDTEEYKALDNCLEEIKNLIAATA

SEQ ID NO: 78338 - protein, 129 aa, Setaria italica
  Transcript Sequence Number=SeqID_12364
  Subcellular localization annotation: CTP_CleavageSite=69; ConfidenceScore=5.46e-01
LQLQPKHAISSADPPIRATTAPAPPNPSPPWAIQATASTSALNHAAAGSAAHYLSVWAREGTTETGAVVAAVLGRAAQETALTSMGRHGEATIESPIRNRDWDAAPPVVQDPPPGWIGGAPPPAIEAPP

SEQ ID NO: 78339 - protein, 76 aa, Setaria italica
  Transcript Sequence Number=SeqID_12365
  Gene Ontology: Mol. function=transcription factor activity; Cellular component=nucleus; Biological process=regulation of transcription, DNA-dependent
  Homolog annotation: Hit_ID=Q2TQ34; Match level="QueryCoverage=100%, HitCoverage=18%, E-value=1e-30, Identity=74%"; Hit description =Transcription factor AP2D23-like
GVTLHKCGRWEARMGQFLGKKAYDKAAIKCNGREAVTNFEPSTYDGELLTEVATEGADVDLNLSISQPSSQSPKRD

SEQ ID NO: 78340 - protein, 93 aa, Setaria italica
  misc_feature (19)..(19): Xaa can be any naturally occurring amino acid
  Transcript Sequence Number=SeqID_12366
  Gene Ontology: Mol. function=transcription factor activity; Cellular component=nucleus; Biological process=regulation of transcription, DNA-dependent
  Homolog annotation: Hit_ID=Q2TQ34; Match level="QueryCoverage=100%, HitCoverage=21%, E-value=2e-34, Identity=70%"; Hit description =Transcription factor AP2D23-like
GRWEARMGQFLGKKAYDKXVAIKCNGREAVTNFEPSTYDGELLTEVATEGADVDLNLSISQPSSQSPKRDKNSLGLQLHHGSFEGSELKKNKD

SEQ ID NO: 78341 - protein, 126 aa, Setaria italica
  misc_feature (107)..(107): Xaa can be any naturally occurring amino acid
  Transcript Sequence Number=SeqID_12367
  Gene Ontology: Mol. function=transcription factor activity; Cellular component=nucleus; Biological process=regulation of transcription, DNA-dependent
  Homolog annotation: Hit_ID=A6NAX7; Match level="QueryCoverage=51%, HitCoverage=14%, E-value=1e-21, Identity=75%"; Hit description=AP2 domain transcription factor
  Pfam annotation: Domain name=AP2; Domain location=61-111; Score=59.4; E_value=1.3e-14; Accession=PF00847.12; Description=AP2 domain
  Subcellular localization annotation: CTP_CleavageSite=59; ConfidenceScore=5.96e-01
PARRRSIGPTSASSAPPSRRARSRTSGSCRTLTRTPRRRSPPPVQPQAAKKSRRGPRSRSSQYRGVTFYRRTGRWESHIWDCGKQVYLGGFDTAHAAARAYDRAAIXFRGVDADINFNLSDYEDDM

SEQ ID NO: 78342 - protein, 84 aa, Setaria italica
  misc_feature (68)..(68): Xaa can be any naturally occurring amino acid
  misc_feature (78)..(78): Xaa can be any naturally occurring amino acid
  Transcript Sequence Number=SeqID_12368
  Gene Ontology: Mol. function=transcription factor activity; Cellular component=nucleus; Biological process=regulation of transcription, DNA-dependent
  Homolog annotation: Hit_ID=Q2TQ34; Match level="QueryCoverage=98%, HitCoverage=15%, E-value=6e-30, Identity=79%"; Hit description =Transcription factor AP2D23-like
GKQVYLGGFDTAHAAARAYDRAAIKFRGVDADINFNLSDYEDDMKQMKSLSKEEFVHVLRRQSTGFSXRGSSKYRGVXTLHKCR

SEQ ID NO: 78343 - protein, 104 aa, Setaria italica
  Transcript Sequence Number=SeqID_12369
  Gene Ontology: Mol. function=transcription factor activity; Cellular component=nucleus; Biological process=regulation of transcription, DNA-dependent
  Homolog annotation: Hit_ID=Q2TQ34; Match level="QueryCoverage=99%, HitCoverage=20%, E-value=3e-48, Identity=85%"; Hit description =Transcription factor AP2D23-like
WESHIWDCGKQVYLGGFDTAHAAARAYDRAAIKFRGVDADINFNLSDYEDDMKQMKSLSKEEFVHVLRRQSTGFSRGSSKYRGVTLHKCGRWEARMGQFLGKKA

SEQ ID NO: 78344 - protein, 91 aa, Setaria italica
  Transcript Sequence Number=SeqID_12370
  Gene Ontology: Mol. function=transcription factor activity; Cellular component=nucleus; Biological process=regulation of transcription, DNA-dependent
  Homolog annotation: Hit_ID=Q60F43; Match level="QueryCoverage=100%, HitCoverage=21%, E-value=2e-47, Identity=96%"; Hit description =Putative AP2 domain transcription factor
  Pfam annotation: Domain name=AP2; Domain location=45-81; Score=15.0; E_value=0.074; Accession=PF00847.12; Description=AP2 domain
RGVDADINFNLSDYEDDMKQMKSLSKEEFVHVLRRQSTGFSRGSSKYRGVTLHKCGRWEARMGQFLGKKAYDKAAIKCNGREAVTNFEPST

SEQ ID NO: 78345 - protein, 84 aa, Setaria italica
  Transcript Sequence Number=SeqID_12371
  Gene Ontology: Mol. function=transcription factor activity; Cellular component=nucleus; Biological process=regulation of transcription, DNA-dependent
  Homolog annotation: Hit_ID=Q2TQ34; Match level="QueryCoverage=100%, HitCoverage=16%, E-value=2e-36, Identity=82%"; Hit description =Transcription factor AP2D23-like
  Pfam annotation: Domain name=AP2; Domain location=1-46; Score=38.7; E_ value=2.3e-08; Accession=PF00847.12; Description=AP2 domain
VTFYRRTGRWESHIWDCGKQVYLGGFDTAHAAARAYDRAAIKFRGVDADINFNLSDYEDDMKQMKSLSKEEFVHVLRRQSTGFS

SEQ ID NO: 78346 - protein, 79 aa, Setaria italica
  Transcript Sequence Number=SeqID_12372
  Gene Ontology: Mol. function=transcription factor activity; Cellular component=nucleus; Biological process=regulation of transcription, DNA-dependent
  Homolog annotation: Hit_ID=A6NAX7; Match level="QueryCoverage=91%, HitCoverage=14%, E-value=1e-29, Identity=90%"; Hit description=AP2 domain transcription factor
RPHLCRGVTLHKCGRWEARMGQFLGKKAYDKAAIKCNGREAVTNFEPSTYDGELLTEVATEGADVDLNLSISQPSSQSP

SEQ ID NO: 78347 - protein, 135 aa, Setaria italica
  Transcript Sequence Number=SeqID_12373
  Gene Ontology: Mol. function=transcription factor activity; Cellular component=nucleus; Biological process=regulation of transcription, DNA-dependent
  Homolog annotation: Hit_ID=Q2TQ34; Match level="QueryCoverage=100%, HitCoverage=25%, E-value=3e-30, Identity=55%"; Hit description =Transcription factor AP2D23-like
  Pfam annotation: Domain name=AP2; Domain location=69-119; Score=61.1; E_value=4.2e-15; Accession=PF00847.12; Description=AP2 domain
TRELFPAVAGPPPQHWADLGFFRAAEPPRPQPDIRILPHPHPHATPPAPPPVQPQAAKKSRRGPRSRSSQYRGVTFYRRTGRWESHIWDCGKQVYLGGFDTAHAAARAYDRAAIKFRGVDADINFNLSDYEDDMK

SEQ ID NO: 78348 - protein, 125 aa, Setaria italica
  Transcript Sequence Number=SeqID_12374
  Gene Ontology: Mol. function=transcription factor activity; Cellular component=nucleus; Biological process=regulation of transcription, DNA-dependent
  Homolog annotation: Hit_ID=Q2TQ34; Match level="QueryCoverage=86%, HitCoverage=21%, E-value=6e-55, Identity=94%"; Hit description =Transcription factor AP2D23-like
  Pfam annotation: Domain name=AP2; Domain location=54-105; Score=56.4; E_value=1.1e-13; Accession=PF00847.12; Description=AP2 domain
ERITKLPTDVRTTEHKTYNLSDYEDDMKQMKSLSKEEFVHVLRRQSTGFSRGSSKYRGVTLHKCGRWEARMGQFLGKKYIYLGLFDSEVEAARAYDKAAIKCNGREAVTNFEPSTYDGELLTEVA

SEQ ID NO: 78349 - protein, 194 aa, Setaria italica
  misc_feature (102)..(102): Xaa can be any naturally occurring amino acid
  misc_feature (168)..(168): Xaa can be any naturally occurring amino acid
  Transcript Sequence Number=SeqID_12375
  Gene Ontology: Mol. function=transcription factor activity; Cellular component=nucleus; Biological process=regulation of transcription, DNA-dependent
  Homolog annotation: Hit_ID=Q2TQ34; Match level="QueryCoverage=84%, HitCoverage=32%, E-value=7e-66, Identity=75%"; Hit description =Transcription factor AP2D23-like
QFLGKKYIYLGLFDSEVEAARLAYDKAAIKCNGREAVTNFEPSTYDGELLTEVATEGADVDLNLSISQPSSQSPKRDKNSLGLQLHHGSFEGSELKRTKANXTPSELAGRPHRFPLMTEHPPIWPAQSHPFFTNNEGASRDINRRPEGGTGSGVPSWAWKMTAPPPHXLPLPLFSSSSSSAAASSGFSNTATTA

SEQ ID NO: 78350 - protein, 81 aa, Setaria italica
  Transcript Sequence Number=SeqID_12376
  Subcellular localization annotation: CTP_CleavageSite=45; ConfidenceScore=5.49e-01
MQGASRDINRRPEGGTGSGVPSWAWKMTAPPPTLPLPLFSSSSSSAAASSGFSNTATTAAPATPSASPRFDPPSSSSHHHR

SEQ ID NO: 78351 - protein, 354 aa, Setaria italica
  misc_feature (337)..(337): Xaa can be any naturally occurring amino acid
  Transcript Sequence Number=SeqID_12377
  Gene Ontology: Mol. function=transcription factor activity; Cellular component=nucleus; Biological process=regulation of transcription, DNA-dependent
  Homolog annotation: Hit_ID=Q2TQ34; Match level="QueryCoverage=70%, HitCoverage=49%, E-value=1e-113, Identity=79%"; Hit description =Transcription factor AP2D23-like
  Pfam annotation: Domain name=AP2; Domain location=12-81; Score=10.5; E_value=0.23; Accession=PF00847.12; Description=AP2 domain
  Pfam annotation: Domain name=AP2; Domain location=123-174; Score =56.4; E_value=1.1e-13; Accession=PF00847.12; Description=AP2 domain
  Pfam module annotation: Pfam domain module=AP2::AP2; Domain location =12-81::123-174
RHLLPPHRPLESHIWSVHQSSASSPCPFRYQPIASLLTQTSRLLVARKCRDCGKQVYLGGFDTAHAAARAYDRAAIKFRGVDADINFNLSDYEDDMKQMKSLSKEEFVHVLRRQSTGFSRGSSKYRGVTLHKCGRWEARMGQFLGKKYIYLGLFDSEVEAARAYDKAAIKCNGREAVTNFEPSTYDGELLTEVATEGADVDLNLSISQPSSQSPKRDKNSLGLQLHHGSFEGSELKRTKIDTPSELAGRPHRFPLMTEHPPIWPAQSHPFFTNNEGASRDINRRPEGGTGSGVPSWAWKMTAPPPTLPLPLFSSSSSSAAASSGFSNTATTAAPAHXSASPRFDPPSSSSHHHR

SEQ ID NO: 78352 - protein, 88 aa, Setaria italica
  Transcript Sequence Number=SeqID_12378
  Homolog annotation: Hit_ID=B6SU93; Match level="QueryCoverage=71%, HitCoverage=28%, E-value=3e-30, Identity=98%"; Hit description =Groundhog protein 7
QQQGPHGAAPSPSPAPAQGQQGYLHLLRYTPSPLPRWEATPRRHEYFSGEYRSYYPTPVREGIYRIATDANRLTTIFSEENPNACTIV

SEQ ID NO: 78353 - protein, 77 aa, Setaria italica
  Transcript Sequence Number=SeqID_12379
IICSLTECDASAVGCSKNLLRYHDFLLSKFRMPVIPYLCWFHLFLLLIRSVEIVTHLPKLLYLSSALQWRELYRGSK

SEQ ID NO: 78354 - protein, 97 aa, Setaria italica
  Transcript Sequence Number=SeqID_12380
  Subcellular localization annotation: CTP_CleavageSite=5; ConfidenceScore=5.14e-01
PPGVPAVMPPGAVRPPPMYAPPQPGAYMPQPGAAVPHPGMRYPAPYPMVRPGFVPRPMPPPGVVPIQRPPIIPGIRGVPPLVAPAARPPAPTVTPAE

SEQ ID NO: 78355 - protein, 76 aa, Setaria italica
  Transcript Sequence Number=SeqID_12381
VCFFMYLDASAVGCSKNLLRYHDFLLSKFRMPVIPYLCWFHLFLLLIRSVEIVTHLPKLLYLSSALQWRELYRVSK

SEQ ID NO: 78356 - protein, 414 aa, Setaria italica
  Transcript Sequence Number=SeqID_12382
  Gene Ontology: Mol. function=nucleic acid binding; Biological process= mRNA processing
  Homolog annotation: Hit_ID=O80743; Match level="QueryCoverage=42%, HitCoverage=22%, E-value=9e-34, Identity=46%"; Hit description =T13D8.9 protein
  Pfam annotation: Domain name=RRM_1; Domain location=73-143; Score =47.4; E_value=5.5e-11; Accession=PF00076.14; Description=RNA recognition motif. (a.k.a. RRM, RBD, o
  Subcellular localization annotation: CTP_CleavageSite=7; ConfidenceScore=5.13e-01
MSLLSLSAGMRYPAPYPMVRPGFVPRPMPPPGVVPIQRPPIIPGIRGVPPLVAPAARPPAPTVTPADKPPTAVYVGKIAPTVDNDFLLSLLRLCGSVKSWKRAQDPSNGKPKGFGFCEFESAEGILRATRLLNKLSIDGQELVININDATKEYLKKHVEEKKRAQDKAKETEDGGGDGTTAVAETESSKPVPDESDKATRDSVDKDSEENTKKFGIVTDEDSEADKDVAEKISSMIEEWLKTRPPPPPPPPPVQPSADSSGVDITKTDSDDKNDADTDKRAANETERSETGSPDRRKDKERDKDKRDKDLERYERDRERERVRRDRERDREKDYKHREAEKHFRDRLKEWESREREKEYQRQNEKEKEKDRERDRRREILRQEDESDEEDNRKRKRRSSSTLEERKRRRQREKE

SEQ ID NO: 78357 - protein, 634 aa, Setaria italica
  misc_feature (156)..(156): Xaa can be any naturally occurring amino acid
  Transcript Sequence Number=SeqID_12383
  Gene Ontology: Mol. function=nucleic acid binding; Cellular component= nucleus; Biological process=mRNA processing
  Homolog annotation: Hit_ID=O80743; Match level="QueryCoverage=89%, HitCoverage=93%, E-value=2e-73, Identity=58%"; Hit description =T13D8.9 protein
  Pfam annotation: Domain name=PWI; Domain location=555-626; Score =123.0; E_value=1e-33; Accession=PF01480.9; Description=PWI domain
  Pfam annotation: Domain name=RRM_1; Domain location=73-143; Score =47.4; E_value=5.5e-11; Accession=PF00076.14; Description=RNA recognition motif. (a.k.a. RRM, RBD, o
  Pfam module annotation: Pfam domain module=PWI::RRM_1; Domain location=555-626::73-143
  Subcellular localization annotation: CTP_CleavageSite=7; ConfidenceScore=5.13e-01
MSLLSLSAGMRYPAPYPMVRPGFVPRPMPPPGVVPIQRPPIIPGIRGVPPLVAPAARPPAPTVTPADKPPTAVYVGKIAPTVDNDFLLSLLRLCGSVKSWKRAQDPSNGKPKGFGFCEFESAEGILRATRLLNKLSIDGQELVININDATKEYLKXLLMTKRAANETERSETGSPDRRKDKERDKDKRDKDLERYERDRERERVRRDRERDREKDYKHREAEKHFRDRLKEWESREREKEYQRQNEKEKEKDRERDRRREILRQEDESDEEDNRKRKRRSSSTLEERKRRRQREKEEDMADKVREEEEIAEARRRAVELQRQADEAAAAAAAAAEESATLMEVDGDDEKETIAQNKPAVVEVDNIASFANGAGVGDGLRKESISDETSMAPGQIPDTKQNSNAPAKKLGFGLVGSGKRTSVPSVFAEEDDENNVDKTIRPLVPIDYSNEELQAVQANSSAGPNVAAAAEFAKRISVSNSKEEKSETDKDRNRRSSEARVNDERREKVHDREKEKPKSENKKILDAKQLIDMIPRTKEELFAYDINWAIYDKHELHERMRPWISKKIIEFLGEEESTLVDYIVSCTKDHVQAEKMLELLQSILDVEAEMFVLKMWRMLIFEIKKVESGLSGRAKA

SEQ ID NO: 78358 - protein, 362 aa, Setaria italica
  Transcript Sequence Number=SeqID_12384
  Gene Ontology: Mol. function=binding; Cellular component=integral to membrane; Biological process=transport
  Homolog annotation: Hit_ID=B9R8X3; Match level="QueryCoverage=76%, HitCoverage=91%, E-value=1e-101, Identity=67%"; Hit description =Peroxisomal membrane protein pmp34, putative
  Pfam annotation: Domain name=Mito_carr; Domain location=118-242; Score=66.8; E_value=8e-17; Accession=PF00153.19; Description =Mitochondrial carrier protein
  Pfam annotation: Domain name=Mito_carr; Domain location=253-348; Score=89.0; E_value=1.7e-23; Accession=PF00153.19; Description =Mitochondrial carrier protein
  Pfam annotation: Domain name=Mito_carr; Domain location=3-101; Score =69.7; E_value=1.1e-17; Accession=PF00153.19; Description =Mitochondrial carrier protein
  Pfam module annotation: Pfam domain module=Mito_carr::Mito_carr::Mito_ carr; Domain location=118-242::253-348::3-101
  Subcellular localization annotation: CTP_CleavageSite=31; ConfidenceScore=5.12e-01
MSSAVVNGLAGAGGGIIAQIITYPLQTVNTRQQTERSAKKRKAGSGANDTSTLFQMLQLIQTEGWGGLYSGLKPSLIGTAASQGIYYYFYQILKNKVEDVAAARGKKGLGDGTVGMLSWLGIAAVAGSINVLLTNPIWVLVTRMQTHTQAERKILESKKDLLLKEISRANSLEVSILKDRLVKLESEKPHPYGTFQAIREVYCESGIRGYWKGLVPTLIMVCNPSIQFMIYETLAKRLQSKRSGKQLPKRNLTAMEVFLLGAIAKLGATVVTYPLLVVKSRLQAKQEIGRNVMSRYTGTIDAIIKMVRYEGLHGFYKGMGTKIVQSVFAASVLFMVKEELVKLAALLVARSRTMLITKPKKR

SEQ ID NO: 78359 - protein, 109 aa, Setaria italica
  Transcript Sequence Number=SeqID_12385
  Gene Ontology: Mol. function=binding; Cellular component=integral to membrane; Biological process=transport
KKQRNRQIREVYCESGIRGYWKGLVPTLIMVSYLFLKCHTQSSLVTYGVPQLPKCVKFQVCNPSIQFMIYETLAKRLQSKRSGKQLPKRNLTAMEVQTFRLDPVIFLSL

SEQ ID NO: 78360 - protein, 97 aa, Setaria italica
  Transcript Sequence Number=SeqID_12386
  Gene Ontology: Mol. function=transporter activity; Cellular component= membrane; Biological process=sodium ion transport
  Homolog annotation: Hit_ID=Q768R2; Match level="QueryCoverage=59%, HitCoverage=10%, E-value=2e-22, Identity=96%"; Hit description =Plastidic general dicarboxylate transporter
  Subcellular localization annotation: CTP_CleavageSite=13; ConfidenceScore=5.33e-01
TRRHLPPILASASASAVAKPSPDPKPAAAAGGAKPLPLLISLAAGLAVRFLVPRPAEVTPQAWQLLSIFLSTIAGLVLGPLPVGAWAFLGLTATVAT

SEQ ID NO: 78361 - protein, 195 aa, Setaria italica
  Transcript Sequence Number=SeqID_12387
  Gene Ontology: Mol. function=protein serine/threonine kinase activity; Cellular component=plasma membrane; Biological process =protein amino acid phosphorylation
  Homolog annotation: Hit_ID=B9RS14; Match level="QueryCoverage=97%, HitCoverage=19%, E-value=1e-42, Identity=47%"; Hit description =Serine-threonine protein kinase, plant-type, putative
  Pfam annotation: Domain name=Pkinase_Tyr; Domain location=71-195; Score=-164.9; E_value=0.0092; Accession=PF07714.9; Description =Protein tyrosine kinase
SLNMDIPACPYHDRNQMTTGLIILFSVVAGVLLIGAVGCFVIRRKTRERDLMTWKVTPFRKVDFTESDILTKLGEENVIGSGGSGKVYRVPLRGGAVVAVKKLWSRGKTEEKAGKEFDSEVRILGDIRHTNIVSLLCYISSDDTKLLVYEYMENGSLDRWLRPAGGGGGVAMAPAPLDWPTRLGIAIDAARGLQD

SEQ ID NO: 78362 - protein, 299 aa, Setaria italica
  Transcript Sequence Number=SeqID_12388
  Gene Ontology: Cellular component=microtubule; Biological process =microtubule cytoskeleton organization and biogenesis
  Homolog annotation: Hit_ID=B9SG32; Match level="QueryCoverage=52%, HitCoverage=28%, E-value=3e-35, Identity=48%"; Hit description =Protein FRIGIDA, putative
  Pfam annotation: Domain name=Frigida; Domain location=1-147; Score =13.8; E_value=1.9e-09; Accession=PF07899.3; Description=Frigida-like protein
NVDSVLDEDELCKIVVAVSRRKQTAVTCRSLGLNERIPGIIEELVNRHRQIDAVHFIQAFGLSDTFPPAPLLKTYVDELKDSFDNNGDATAAASKDDPKTKELLALRAVIKCIEEYKLQKEYSLGPLQKRVSELKPKSEKRPSSDAGRAYSKKPRGPGTSFPRRPAGPVGSAARRPPFPASNWQRAPAPMPSRAPAPMAPLPDRYGAADQYHYTPPAATYDTGAFSSYGEPFSAPKPFQYTPGSVAASYNSSHYKVAYGGPGALPGTSGYAGYSGGSGPSASSSYPNYLGSGYRPTQQP

SEQ ID NO: 78363 - protein, 370 aa, Setaria italica
  Transcript Sequence Number=SeqID_12389
  Gene Ontology: Cellular component=microtubule; Biological process =microtubule cytoskeleton organization and biogenesis
  Homolog annotation: Hit_ID=B9SG32; Match level="QueryCoverage=94%, HitCoverage=60%, E-value=9e-69, Identity=41%"; Hit description =Protein FRIGIDA, putative
  Pfam annotation: Domain name=Frigida; Domain location=164-370; Score =142.0; E_value=1.9e-39; Accession=PF07899.3; Description=Frigida -like protein
MATEATLNNSGGSESTMSLLEQLAEVFGKLKSHTEASLQLQNGMNWGDIKEYFLNVDKSYRSKFDELEEKQKALEEKKTEASRLIAEKEANVSAKERASLNQLQELKDAAVSSVAEVRQKYKVELADILDANGSKDKKVSTSINGNNASRASEENTPASGSAEPSEASLVEVKPRPVLKELCEQMDTKGLLKFLSENCKKLPSLRDELSVALRCATDPARFVLDSLEGFFPPDQTNSPGNKQNALQVQRRSCIVLMEAIAPALGTKEPGGNDPWSSEIKEQAKAIAEEWKSKLAEVDLDASNGHSLEAQAFLQLLTTFNVDSVLDEDELCKIVVAVSRRKQTAVTCRSLGLNERIPGWYPPRTPQGVLIP

SEQ ID NO: 78364 - protein, 95 aa, Setaria italica
  Transcript Sequence Number=SeqID_12390
  Gene Ontology: Mol. function=protein tyrosine kinase activity; Biological process=protein amino acid phosphorylation
SDSGSEGNSLCGEENGTGAATPDDASTVSGGTVRSRPESSDGKKTPVRKADGKVPPRQTGSRQKVKPASAVKPPTTARKTLGLKPEVPAQRPTSG

SEQ ID NO: 78365 - protein, 69 aa, Setaria italica
  Transcript Sequence Number=SeqID_12391
PKSKPISFGLLSTLLMAFCFIYVPLGEVISEHYALATREVSSWYLTNLGTNKLVLVPMMSVLTNGLPHL

SEQ ID NO: 78366 - protein, 135 aa, Setaria italica
  misc_feature (10)..(10): Xaa can be any naturally occurring amino acid
  misc_feature (47)..(47): Xaa can be any naturally occurring amino acid
  misc_feature (78)..(78): Xaa can be any naturally occurring amino acid
  misc_feature (88)..(88): Xaa can be any naturally occurring amino acid
  Transcript Sequence Number=SeqID_12392
  Gene Ontology: Mol. function=hydrolase activity, acting on ester bonds; Cellular component=RNA-induced silencing complex; Biological process=RNA interference
  Homolog annotation: Hit_ID=Q0JRI3; Match level="QueryCoverage=97%, HitCoverage=12%, E-value=4e-34, Identity=59%"; Hit description=TUDOR protein with multiple SNc domains
IKSRPTLEDXFGQEAAEYLSECLLSSSKQYRAMIEDRDTSGGKSKGXGTGNVLIVTLVDAETESSINATMLEEGLARXERSKRWDTRXRGKRRLQNLEQFQEKAKKERLRIWQYGDVESDEDEQAPAARKPGGRR

SEQ ID NO: 78367 - protein, 71 aa, Setaria italica
  Transcript Sequence Number=SeqID_12393
  Gene Ontology: Mol. function=hydrolase activity, acting on ester bonds; Cellular component=RNA-induced silencing complex; Biological process=RNA interference
  Homolog annotation: Hit_ID=Q0JRI3; Match level="QueryCoverage=90%, HitCoverage=6%, E-value=2e-16, Identity=70%"; Hit description=TUDOR protein with multiple SNc domains
HYLLCLYLQEGLARLERSKRWDTRERKTALQNLEQFQEKAKKERLRIWQYGDVESDEDEQAPAARKPGGRR

SEQ ID NO: 78368 - protein, 988 aa, Setaria italica
  misc_feature (340)..(340): Xaa can be any naturally occurring amino acid
  misc_feature (928)..(928): Xaa can be any naturally occurring amino acid
  Transcript Sequence Number=SeqID_12394
  Gene Ontology: Mol. function=hydrolase activity, acting on ester bonds; Cellular component=RNA-induced silencing complex; Biological process=RNA interference
  Homolog annotation: Hit_ID=Q0JRI3; Match level="QueryCoverage=100%, HitCoverage=100%, E-value=0.0, Identity=66%"; Hit description=TUDOR protein with multiple SNc domains
  Pfam annotation: Domain name=SNase; Domain location=183-364; Score =42.3; E_value=1.9e-09; Accession=PF00565.9; Description =Staphylococcal nuclease homologue
  Pfam annotation: Domain name=SNase; Domain location=378-557; Score =16.6; E_value=2.8e-06; Accession=PF00565.9; Description =Staphylococcal nuclease homologue
  Pfam annotation: Domain name=SNase; Domain location=587-713; Score =44.8; E_value=3.3e-10; Accession=PF00565.9; Description =Staphylococcal nuclease homologue
  Pfam annotation: Domain name=SNase; Domain location=9-148; Score =41.0; E_value=4.6e-09; Accession=PF00565.9; Description =Staphylococcal nuclease homologue
  Pfam annotation: Domain name=TUDOR; Domain location=728-854; Score =127.5; E_value=4.4e-35; Accession=PF00567.16; Description=Tudor domain
  Pfam module annotation: Pfam domain module=SNase::SNase::SNase::SNase: :TUDOR; Domain location=183-364::378-557::587-713::9-148::728-854
MATNTGASGWLRGKVKAVTSGDCLLIMGSTKAEIPPEKSITLSYLMAPRLARRGGVDEPFAWESREFLRKLCIGKEVTFRVDYTAPNIGREFGTVYLGDKNVAYSVVSAGWARVKEQGPKGGEQNPYLTELLRLEEVAKQQGVGRWSKEPGAAEESIRDLPPSAIGEASGFDAKGFAVANKGKSLEAIVEQVRDGSTIRVYLLPSFQFVQIYVAGVQAPSMGRRSSAPTVVAETDGTANGANGEDSEGAPAQLTTAQRLAASAASAEIPPDRFGREAKHFTETRVLNRDVRIVVEGTDSFSNIIGSVYYPDGETAKDLALELVENGLAKYVEWSANIDLXVEVKIKLKNAELKAKKDQLRIWTGFKPPVTNSKPIHDQKFTGKVVEVVSGDCIIVADDAAPYGSPSAERRINLSSIRAPKMGNARRDEKPDNFAREAKEFLRTRLIGKQVAVEMEYSRRISTVDGQNAAPTANAADTRVLDYGSVFLGSPSQADGEDVSSAPSSASQPGVNIAELLLSRGFARISKHRDYEERSHYYDALLAAESRAEKAKKGVHSQKESPVMHITDLTTVSAKKAKDFLPFLQRNRRHSAIVEYVFSGHRFKLTIPKETCSIAFSLSGVRCPGKGEPYSDEAIALMRRRILQRDVEIEVEAVDRTGTFIGSLWESKTNMGSVLLEAGLAKLSSFGLDRISDAYVLTRAEQSAKQQKLKIWENYVEGEQATNGSTPESKQKEILKVVVTEVLGGGKFYVQTVGDQRVASIQQQLASLKLKDAPVIGAFNPVKGEIVLAQFSLDNSWNRAMIVNGPRAVESPNDKFEVFYIDYGNQEVVPYSRLRPVDPSVSSSPALTQLCSLAFIKVPTLEDDFGQEAAEYLSECLLSSSKQYRAMIEDRDTSGGKSKGQGTGNVLIVTLVDAETESSINATMLEEGXLARLERSKRWDTRERKTALQNLEQFQEKAKKERLRIWQYGDVESDEDEQAPAARKPGGRR

SEQ ID NO: 78369 - protein, 424 aa, Setaria italica
  Transcript Sequence Number=SeqID_12395
  Gene Ontology: Mol. function=aminoacyl-tRNA ligase activity; Cellular component=cytoplasm; Biological process=tRNA aminoacylation for protein translation
  Homolog annotation: Hit_ID=Q7EZJ3; Match level="QueryCoverage=100%, HitCoverage=45%, E-value=0.0, Identity=89%"; Hit description =Putative valyl-tRNA synthetase
  Pfam annotation: Domain name=Anticodon_1; Domain location=145-294; Score=159.9; E_value=7.4e-45; Accession=PF08264.5; Description =Anticodon-binding domain
  Pfam annotation: Domain name=Val_tRNA-synt_C; Domain location=354 -419; Score=58.7; E_value=2.3e-14; Accession=PF10458.1; Description =Valyl tRNA synthetase tRNA binding ar
  Pfam module annotation: Pfam domain module=Anticodon_1::Val_tRNA-synt_ C; Domain location=145-294::354-419
NFYPSTVLETGHDILFFWVARMVMMGIEFTGSVPFSYVYLHGLIRDSEGRKMSKTLGNVIDPLDTIKDYGTDALRFTLSLGTAGQDLNLSTERLTSNKAFTNKLWNAGKFLLQNLPDRSDVSAWDFLLANKFDTEASLQKLPLPECWVVTGLHELIDKVSTSYDKFFFGDAAREIYDFFWGDFADWYIEASKTRLYHSGDKLAAATAQSVLLYVFENILKLLHPFMPFVTEELWQAFPYRKQALMVAPWPTTDLPKDLRSIKRFQNLQSLIRGIRNVRAEYAVEPAKRISASVVATADVLDYVSKEKQVLALLSKLDVQNVHFTESAPGDANQSVHIVADEGLEAYLPLADMVDVSEEVKRLSKRLTKMQSEYDALMARLNSQSFVEKAPEEIVRGVREKASEAEEKISLTKTRLAFLQSTVSS

SEQ ID NO: 78370 - protein, 177 aa, Setaria italica
  misc_feature (24)..(24): Xaa can be any naturally occurring amino acid
  Transcript Sequence Number=SeqID_12396
  Gene Ontology: Cellular component=endoplasmic reticulum membrane
  Pfam annotation: Domain name=PIG-X; Domain location=1-177; Score= -42.8; E_value=0.00018; Accession=PF08320.4; Description=PIG-X  PBN1
NLCLSDAMVNFLNGYDACLVIVEXLPMGFADPFELQHFVERKVFLDVAVFGDTNLELPSALSNRSAVEIHFDLRPSTLTNCNIVIDLPLHARYPPLDASGYATVEFGSPDLFLRYRKKETDSDSCLWVLKNLEAAPVEKAAWRIPCGDEVRIGFVSNITFLSALVCSMSIVLATLIF

SEQ ID NO: 78371 - protein, 121 aa, Setaria italica
  Transcript Sequence Number=SeqID_12397
MAVAGGPRLLAAAWIFAAAAASLPLEQAGRSQKSINCMPCSRTYIGDAYLHTLTDHAHHRGLAEMSDSDELCEGLTDDVEVPTLSELQRQLVGEGSHRHLVYSVKFSACQDAMVNFLNGYE

SEQ ID NO: 78372 - protein, 88 aa, Setaria italica
  Transcript Sequence Number=SeqID_12398
  Homolog annotation: Hit_ID=B6ST43; Match level="QueryCoverage=92%, HitCoverage=9%, E-value=2e-31, Identity=79%"; Hit description =Receptor-like protein kinase
RTCLQYNRLVDGYWSPATEMSTYLRVVSSDNDSNPFTGMTDMIQTVCPVRLALPVPPKQAKTTIRNVAIITALFAAVLARGAEGGDEG

SEQ ID NO: 78373 - protein, 822 aa, Setaria italica
  misc_feature (236)..(236): Xaa can be any naturally occurring amino acid
  Transcript Sequence Number=SeqID_12399
  Gene Ontology: Mol. function=protein serine/threonine kinase activity; Biological process=protein amino acid phosphorylation
  Homolog annotation: Hit_ID=B6ST43; Match level="QueryCoverage=97%, HitCoverage=97%, E-value=0.0, Identity=78%"; Hit description =Receptor-like protein kinase
  Pfam annotation: Domain name=B_lectin; Domain location=78-189; Score=- 6.9; E_value=0.011; Accession=PF01453.16; Description=D-mannose binding lectin
  Pfam annotation: Domain name=PAN_2; Domain location=309-390; Score= -0.5; E_value=0.0017; Accession=PF08276.3; Description=PAN-like domain
  Pfam annotation: Domain name=Pkinase; Domain location=503-802; Score =159.7; E_value=8.6e-45; Accession=PF00069.17; Description=Protein kinase domain
  Pfam annotation: Domain name=Pkinase_Tyr; Domain location=504-802; Score=88.8; E_value=1.9e-23; Accession=PF07714.9; Description =Protein tyrosine kinase
  Pfam module annotation: Pfam domain module=B_lectin::PAN _2::Pkinase::Pkinase_Tyr; Domain location=78-189::309-390::503 -802::504-802
  Subcellular localization annotation: CTP_CleavageSite=54; ConfidenceScore=5.21e-01
MASLPFLCLILLVPVLAAAQRMPSFSANDTAWRPADSNRTLVSPQGDFAAGFVAASSAPPAPPSYRFAVWVVGANSTDRAVIWYAHKSADSSPIDAVVADGTSALAVDASGRLAWTAGGNNTAIWSPAMNSSTGTAVLQLNDSGSLVYGAAWSSFSEPINTLMAGQAIPGGGSANRTLQSANGRYTLVKSATLQYGNLMYANISGGGSLLNLTNDGKLLLSGGNGQLIASDQGTSXRVRRLTLDDDGNLRLYSLLPKTRRWNVVWQLVQELCTIRGTCNASRICVPVGADSVSCVCPPGYRNATADGPCAPKQNYTGRGNDDKFVRMDFISFSGGALNTLSDSGPWMKKQTPQNLAECERICRQDAGCVAFGYKFGGDRTCLQYNRLVDGYWSPATEMSTYLRVVSSDNDSNPFTGMTDMIQTVCPVRLALPVPPKQAKTTIRNVAIITALFAVELLAGVLSFWAFLRKYSQYREMARTLGLEYLPAGGPRRFSHAELKAATKDFSDVVGRGAYGTVYRGELPDRRAVAVKQLHSVGGGEAEFWAEVTIIARMHHLNLVRMWGFCADRDQRMLVYEYVPNGSLDKYLFAGGGGGAAAAGEENDNSSSSEQQQQQPLLDLHTRYRIALGVARAIAYLHEECLEWVLHCDIKPENILLEDDFCPKVSDFGLSKLTSKRDKVTMSRIRGTRGYMAPEWVIHREPITAKADVYSFGMVLLEIVSGRRNYGFRQESVGSEDWYFPKWAYEKVYVERRIDDILDPRIAASYDDAASVATVERMVKTAMWCLQDRAEMRPSMGKVAKMLEGSVEITDPVKPTIFCVQDD

SEQ ID NO: 78374 - protein, 195 aa, Setaria italica
  Transcript Sequence Number=SeqID_12400
  Gene Ontology: Mol. function=signal transducer activity; Cellular component=plasma membrane; Biological process=response to light stimulus
  Homolog annotation: Hit_ID=B6U1M7; Match level="QueryCoverage=100%, HitCoverage=32%, E-value=1e-108, Identity=94%"; Hit description =Transposon protein Mutator sub-class
ASELVSDITVRIGTTKFYLHKFPLLSKCARFQKLIPTTGDENIDIQIHDIPGGAKAFEICAKFCYGMIVTLNAYNVIAARCAAEYLEMNETVDKGNLIYKIDVFLSSSIFRSWKDSIIVLGTTKAHLPWAEDLKLVSHCIDSVASKASIDVSKVEWSYTYNRKKLPTESGNDSPWNGVKQQQLVPKDWWVEDLTD

SEQ ID NO: 78375 - protein, 489 aa, Setaria italica
  Transcript Sequence Number=SeqID_12401
  Gene Ontology: Mol. function=sterol 14-demethylase activity; Cellular component=integral to membrane; Biological process=steroid biosynthetic process
  Homolog annotation: Hit_ID=P93846; Match level="QueryCoverage=99%, HitCoverage=100%, E-value=0.0, Identity=92%"; Hit description =Obtusifoliol 14-alpha demethylase
  Pfam annotation: Domain name=p450; Domain location=39-480; Score =142.3; E_value=1.5e-39; Accession=PF00067.14; Description=Cytochrome P450
MMDLADSQQRLIAGAALLLATIAFVKLLLGARSRGKRLPPTIPGAPVVGGLIKFMRGPIPMIREQYARLGSVFTVPILSRRITFLIGPEVSAHFFKGNEAEMSQQEVYRFNVPTFGPGVVFDVDYSVRQEQFRFFTEALRANKLRSYVDQMVAEAEEYFSKWGDSGTVDLKYELEHLIILTASRCLLGREVREKLFDDVSALFHDLDNGMRPISVIFPYLPIPAHKRRDRARARLAEIFATIIKSRKASGQSEEDMLQCFIDSKYKNGRSTTESEVTGLLIAALFAGQHTSSITSTWTGAYLLRFKQFFAEAVEEQKEVMKRHGNKIDHDILAEMDVLYRCIKEALRLHPPLIMLLRQSHNDFTVTTKEGKEYDIPKGHIVATSPSFANRLPHIYKNPDSYDPDRFGPGREEDKAAGAFSYISFGGGRHGCLGEPFAYLQIKAIWTHLLRNFEFELVSPFPENDWNAMVVGIKGKVMVNYKRRKLVVDN

SEQ ID NO: 78376 - protein, 98 aa, Setaria italica
  Transcript Sequence Number=SeqID_12402
  Gene Ontology: Mol. function=ARF guanyl-nucleotide exchange factor activity; Cellular component=intracellular; Biological process =regulation of ARF protein signal transduction
  Homolog annotation: Hit_ID=Q7F8R6; Match level="QueryCoverage=83%, HitCoverage=4%, E-value=1e-31, Identity=76%"; Hit description =Putative guanine nucleotide-exchange protein GEP2
QVVKACYNVYLGSASGGNQLCAKLAIAQVLAIVFARVEADDMDVRVRTVSAADMMDLSDRSLNDSSVVQAAQAFINEAMEGSDVPEEAPPVDAVPIEG

SEQ ID NO: 78377 - protein, 92 aa, Setaria italica
  Transcript Sequence Number=SeqID_12403
  Subcellular localization annotation: CTP_CleavageSite=42; ConfidenceScore=5.63e-01
MAEIAGDEVPAPPPPAPSTSGETSGGQSTSNPTSTGSRNPPSRTTKPGVKRLVLTASVLLSFLLGLPFLLKSTEIHRSPLPSDAITALAHRL

SEQ ID NO: 78378 - protein, 58 aa, Setaria italica
  Transcript Sequence Number=SeqID_12404
IIFSNQSIFSLKHARQLHIVILRIKRDKKPCKLTRTRSGTIGYRLADNKKEKTNLELT

SEQ ID NO: 78379 - protein, 214 aa, Setaria italica
  Transcript Sequence Number=SeqID_12405
  Gene Ontology: Cellular component=plasma membrane
  Homolog annotation: Hit_ID=B4FGY0; Match level="QueryCoverage=92%, HitCoverage=92%, E-value=7e-77, Identity=73%"; Hit description =Calcyclin-binding protein
  Pfam annotation: Domain name=CS; Domain location=68-145; Score=71.5; E_value=3e-18; Accession=PF04969.8; Description=CS domain
  Pfam annotation: Domain name=SGS; Domain location=149-213; Score =58.5; E_value=2.5e-14; Accession=PF05002.7; Description=SGS domain
  Pfam annotation: Domain name=Siah-Interact_N; Domain location=1-66; Score=3.4; E_value=0.026; Accession=PF09032.3; Description=Siah interacting protein, N terminal
  Pfam module annotation: Pfam domain module=CS::SGS::Siah-Interact_N; Domain location=68-145::149-213::1-66
MSAEELRLELDELRQLEGLAKRPRVQSLLANEIRIVEAKLAKATAPAPEPQAALSAPARPGLNYVTLGSFSWDQDNEKIRIYVFLEGVEQEKVETVFKPMSVDIKFHDVKGKNYRCAIPKLNKEIVPEKCKVVVKPTKVVVTLCKASKGNWLDLYFKEDKFKPSMDKEKDPMSGIMDLMKNMYEEGDEDMKRTIAKAWTDARSGKTTDSLSGLH

SEQ ID NO: 78380 - protein, 132 aa, Setaria italica
  Transcript Sequence Number=SeqID_12406
ESRASFRLCLQIISRNRLAVPTNKWALKGIYIELQVTTNKKNVFLKVRSRVLKLSREHGRVDRVLPDSKHRCRLCFSFGSSSRLQDIVLKFIYHRFKNSETNRLQTDATTNFSKKKKQNKLQRCLGANRLIQ

SEQ ID NO: 78381 - protein, 65 aa, Setaria italica
  Transcript Sequence Number=SeqID_12407
  Gene Ontology: Mol. function=hydrolase activity, hydrolyzing O -glycosyl compounds; Biological process=carbohydrate metabolic process
MGMGASSPPPPWRRHHLCSEFLVLFLLLWGTSEANEEVAALPPRGWNSYDSFSWTVDESAYLQNA

SEQ ID NO: 78382 - protein, 45 aa, Setaria italica
  Transcript Sequence Number=SeqID_12408
  Gene Ontology: Mol. function=catalytic activity; Biological process =guanosine tetraphosphate metabolic process
  Homolog annotation: Hit_ID=Q7XAP3; Match level="QueryCoverage=97%, HitCoverage=6%, E-value=8e-18, Identity=90%"; Hit description =Plastid (P)ppGpp synthase
IHGLRLVVEKEEDCYRALSVVHKLWPQVTGRFKDYISRPKLNGYA

SEQ ID NO: 78383 - protein, 130 aa, Setaria italica
  misc_feature (14)..(14): Xaa can be any naturally occurring amino acid
  misc_feature (22)..(22): Xaa can be any naturally occurring amino acid
  misc_feature (26)..(26): Xaa can be any naturally occurring amino acid
  Transcript Sequence Number=SeqID_12409
  Gene Ontology: Cellular component=integral to membrane
  Homolog annotation: Hit_ID=B6TYI0; Match level="QueryCoverage=100%, HitCoverage=31%, E-value=4e-60, Identity=81%"; Hit description =Membrane protein
VLLMRPQFGYINQXNSPLGYPXGVTXRKFKIYQIILFVIATVILISGFTVGLVLLFQGFDASQHCSWCHYLSCVPTSKWSCKTPNNSCMSSQLGNQLNLTCQSTGKTASYVLNNPNSQEAIRNLCVHLCS

SEQ ID NO: 78384 - protein, 315 aa, Setaria italica
  Transcript Sequence Number=SeqID_12410
  Gene Ontology: Mol. function=kinase activity
  Homolog annotation: Hit_ID=B6T7U3; Match level="QueryCoverage=92%, HitCoverage=92%, E-value=1e-151, Identity=88%"; Hit description =Uncharacterized enzyme involved in pigment biosynthesis
  Pfam annotation: Domain name=Indigoidine_A; Domain location=7-299; Score=620.4; E_value=1.8e-183; Accession=PF04227.4; Description =Indigoidine synthase A like protein
MSIAVAPEVAAALARGGAVVALESTIICHGMPYPKNLQTAFEVEAVVRDAGAIPATIAILDGVPHVGLSSEQLKRLAISGRQFQKTARRDIAHVVASGGNGATTVSATMFFAHKVGIPIFVTGGIGGVHRHGEQTMDISSDLTELGKTPVAVISAGVKSILDIPRTLEYLETQGVTVAAYRTNEFPAFFTEISGCQVPCRVDSPEECAKIIHANSNLHLGSGILIAVPVPTQHAASGNIIESAIQKALKEAEEKRITGNAITPFMLERVKELTGGSSLEANIALVKNNARLGAEVAVALSNLQQRERNKIGRSSL

SEQ ID NO: 78385 - protein, 93 aa, Setaria italica
  Transcript Sequence Number=SeqID_12411
  Gene Ontology: Mol. function=serine-type peptidase activity; Biological process=proteolysis
  Homolog annotation: Hit_ID=B6SPN8; Match level="QueryCoverage=98%, HitCoverage=20%, E-value=4e-20, Identity=57%"; Hit description =Carboxyl-terminal-processing protease
VLPFPDALRAAAAAAAVSLSLLTGNAVGAVVEAAQPTEVCRDGVAAVVEEVRAEAVTNEQLVEEAWEVVNESFLPDAGSRPWSPEMWMQRKQD

SEQ ID NO: 78386 - protein, 289 aa, Setaria italica
  Transcript Sequence Number=SeqID_12412
  Subcellular localization annotation: CTP_CleavageSite=38; ConfidenceScore=5.13e-01
MAAGPLVVDFPSMGAALCFNSLESLLRDSASGFLAAVSAAPAPGAADLTNFHRVFSRVLSGYPDPPLEAIWFFSALSFHDSPGDLRSLLQLLSAFTASSPGAAKPLALLAPVISELFHSDKTRRETEALVEAVLSYISICSSRPAASADGASADAGRLLPAFGELVKVWSVRHSMDRCPFQVLFPLAGEEARRELMKEGCSVEYLAGVVVAEVFLLRLCLKVQNGTGVPRAELQKELKMWAVSSIPVFQNPAFLRVLLNMLLNSPLPVYSLLVSFSLLMTNEQLRMLCL

SEQ ID NO: 78387 - protein, 327 aa, Setaria italica
  Transcript Sequence Number=SeqID_12413
KEGCSVEYLAGVVVAEAFLLRLCLKVQNGTGVPRAELQKELKMWAVSSIPVFQNQHFFGVLLNMLLNSPLPVYSLLSADDEILVRDAIYDALILVDYSFINNVSGVDQADLLPIYLSRLIITLDAVNDARRKGDQGRAMSFVNAFSISNVPNYLIKWATCKAVFGAVSKPIANTPQALLKWLVDLEDKGLKVFGDNSSWIKGRLIYDEVKNGFGNRMIHSGADLFFIDKQSGEEVMDTTKGSEDEDAVEMETTGNAFMAAAQSMKVETNGIRKRKGCGNEDAAAVKFVKYKVEDSSVKDYFLSANNGMSSGSEVENPQSDDEMEESD

SEQ ID NO: 78388 - protein, 69 aa, Setaria italica
  Transcript Sequence Number=SeqID_12414
  Gene Ontology: Mol. function=oxidoreductase activity; Biological process=amino acid metabolic process
MNSAMDEINLLRQAQRQHHHHLMVRGMGEEIDLEIGPGDDPSFSGADLVAVASGHHDTIVPADDHKSLL

SEQ ID NO: 78389 - protein, 603 aa, Setaria italica
  Transcript Sequence Number=SeqID_12415
  Gene Ontology: Mol. function=binding
  Homolog annotation: Hit_ID=Q7XZF5; Match level="QueryCoverage=99%, HitCoverage=32%, E-value=1e-111, Identity=39%"; Hit description=RST1
LMAICIGAGSLLSFILDDGLHAMDFSAVKKLLDTLRHIYTHPFPPLVHLGGMFGVVNACGAGAGDLTGMCSKLMTSQIKHEESSLVRGPLLVSPIGETLSTSMVHEIYLLAKDAEDKNIQDNAAWAISFLRSRWLSKNLILYNDNGSNRSSGDPSQASSFSEQSLVWNLSRWLNDLKLEKPFDMVPVSTVGTVLRCLSKAPRLPTTDWGVIVRRCMKVEVQIPYKPTDQQDLKFLREECLHFSLAHATHISPLLQFLDYLTDILRFRRLEINVQSILLQHLSHLMKLFSDSRLDKLYEDLTEYLYSPTSSYLNYSCEQKSMIRMSFWEGICKCLVDVVSEESGGFSFTKKCIECLLPLLTLHNDGQPEFMDEWSAALTCLTNAQSSWLGDMLQVRNAALVTEEEHVDVAKKIIIRARLCATGCGSVHELGNIKTMILCARADGVWWSVLVEIAAAINSVENSIKRQWLLDALEIGCVTAHPSTVLRFVGLLCDSCCIYMPLLVVNSRNVLSDLPVTLPSFLSSSIWDDFRDIVADKLWLLTSHIYTWAEQLAHGNDLTGHDHIHRSETEMATFLANILRSTCIAVEDYLTVDRKLKLANLESL

SEQ ID NO: 78390 - protein, 157 aa, Setaria italica
  Transcript Sequence Number=SeqID_12416
  Homolog annotation: Hit_ID=P92952; Match level="QueryCoverage=94%, HitCoverage=36%, E-value=5e-27, Identity=41%"; Hit description =HAPp48,5 protein (Fragment)
ILFICWDFRFFPDDVCIDILIEKLESSREVISSPSLGWLIQQCQRCFIINALRRSLVNDANNSRHSFEYFDKEEAIVAHLDRGIDASIKISSDWPLCSYGLKLISLRNSGTHPTNMASSLLSKTKELANGLDLHIRQHLLRFVDAVEEILIRELRSG

SEQ ID NO: 78391 - protein, 312 aa, Setaria italica
  Transcript Sequence Number=SeqID_12417
  Homolog annotation: Hit_ID=Q7XKG8; Match level="QueryCoverage=39%, HitCoverage=66%, E-value=2e-12, Identity=39%"; Hit description =OSJNBa0083D01.26 protein
MAEAGALAPAQVPEEAPLDAAAIRSRVEQLSLKRRRRGVEEEAEVADAEVALGLDSAYQVAEEGMDVLDSSTAAVSIDDLDAYLERLRKEVSLADEGNRKVSDEIGVTAETTTNDMIRLDVDSEVLESLLSKLESKGFNHFEASPAPGQSDSSSTDSCRNQSISDKDCIYEVLELDQQIGKIKMNLKMLQSLQSVDEMWQLKSMLLPFEAKVLDFKDNSLRMFLKAPTLTSGCVIYGQKLDCAIDSFVSDHELLIEVDEGNMEPKNVKIFPDDVCIDILIEKLESSREVISSPSLGWLIQQCQRCFIINALK

SEQ ID NO: 78392 - protein, 84 aa, Setaria italica
  Transcript Sequence Number=SeqID_12418
  Gene Ontology: Cellular component=integral to membrane
  Homolog annotation: Hit_ID=B6TMZ7; Match level="QueryCoverage=96%, HitCoverage=25%, E-value=9e-37, Identity=93%"; Hit description =Cytochrome c oxidoreductase
  Pfam annotation: Domain name=MtN3_slv; Domain location=7-84; Score =86.3; E_value=1.1e-22; Accession=PF03083.8; Description=MtN3saliva family
  Subcellular localization annotation: CTP_CleavageSite=21; ConfidenceScore=5.18e-01
MAADPSFVVGIIGNVISILVFASPIKTFRRIVRNRSTEDFRWLPYVTTLLSTSLWTFYGLLKPGGLLVVTVNGAGAALEAAYVT

SEQ ID NO: 78393 - protein, 207 aa, Setaria italica
  Transcript Sequence Number=SeqID_12419
  Gene Ontology: Mol. function=transferase activity, transferring glycosyl groups; Cellular component=nucleus; Biological process =gibberellic acid mediated signaling
  Homolog annotation: Hit_ID=O82422; Match level="QueryCoverage=100%, HitCoverage=21%, E-value=1e-104, Identity=86%"; Hit description =Probable UDP-N-acetylglucosamine--peptide N-acetylglucosaminyltransfe rase SPINDLY
  Subcellular localization annotation: CTP_CleavageSite=36; ConfidenceScore=5.28e-01
CYTPSPEAGPVCPTPAISNGFVTFGSFNNLAKITPKVLQVWAQILCAVPNSRLVVKCKPFCCDSIRQKFLSTLEELGLESLRVDLLPLIHLNHDHMQAYSLMDISLDTFPYAGTTTTCESLYMGVPCVTMAGAVHAHNVGVSLLSKVGLGDWLPKTEDEYVSLALDLASDVNALQELRMSLRELMMKSPVCDGEKFTRGLEAAYRNM

SEQ ID NO: 78394 - protein, 880 aa, Setaria italica
  misc_feature (11)..(11): Xaa can be any naturally occurring amino acid
  misc_feature (26)..(26): Xaa can be any naturally occurring amino acid
  misc_feature (660)..(660): Xaa can be any naturally occurring amino acid
  misc_feature (671)..(671): Xaa can be any naturally occurring amino acid
  Transcript Sequence Number=SeqID_12420
  Gene Ontology: Mol. function=transferase activity, transferring glycosyl groups; Cellular component=nucleus; Biological process =gibberellic acid mediated signaling
  Homolog annotation: Hit_ID=O82422; Match level="QueryCoverage=100%, HitCoverage=94%, E-value=0.0, Identity=84%"; Hit description =Probable UDP-N-acetylglucosamine--peptide N-acetylglucosaminyltransfe rase SPINDLY
  Pfam annotation: Domain name=Sel1; Domain location=127-158; Score =8.6; E_value=1.7; Accession=PF08238.4; Description=Sel1 repeat
  Pfam annotation: Domain name=Sel1; Domain location=236-267; Score =10.3; E_value=1; Accession=PF08238.4; Description=Sel1 repeat
  Pfam annotation: Domain name=Sel1; Domain location=270-301; Score =9.7; E_value=1.2; Accession=PF08238.4; Description=Sel1 repeat
  Pfam annotation: Domain name=TPR_1; Domain location=127-160; Score =34.9; E_value=3.2e-07; Accession=PF00515.20; Description =Tetratricopeptide repeat
  Pfam annotation: Domain name=TPR_1; Domain location=161-194; Score =49.7; E_value=1.2e-11; Accession=PF00515.20; Description =Tetratricopeptide repeat
  Pfam annotation: Domain name=TPR_1; Domain location=18-51; Score =19.0; E_value=0.019; Accession=PF00515.20; Description =Tetratricopeptide repeat
  Pfam annotation: Domain name=TPR_1; Domain location=202-235; Score =4.8; E_value=1.6; Accession=PF00515.20; Description=Tetratricopeptide repeat
  Pfam annotation: Domain name=TPR_1; Domain location=236-269; Score =33.1; E_value=1.1e-06; Accession=PF00515.20; Description =Tetratricopeptide repeat
  Pfam annotation: Domain name=TPR_1; Domain location=270-303; Score =47.9; E_value=4e-11; Accession=PF00515.20; Description =Tetratricopeptide repeat
  Pfam annotation: Domain name=TPR_1; Domain location=304-337; Score =26.8; E_value=9.1e-05; Accession=PF00515.20; Description =Tetratricopeptide repeat
  Pfam annotation: Domain name=TPR_1; Domain location=338-371; Score =42.5; E_value=1.7e-09; Accession=PF00515.20; Description =Tetratricopeptide repeat
  Pfam annotation: Domain name=TPR_1; Domain location=52-85; Score =23.1; E_value=0.0012; Accession=PF00515.20; Description =Tetratricopeptide repeat
  Pfam annotation: Domain name=TPR_1; Domain location=93-126; Score =9.3; E_value=0.45; Accession=PF00515.20; Description=Tetratricopeptid e repeat
  Pfam annotation: Domain name=TPR_2; Domain location=127-160; Score =23.0; E_value=0.0012; Accession=PF07719.9; Description =Tetratricopeptide repeat
  Pfam annotation: Domain name=TPR_2; Domain location=161-194; Score =36.8; E_value=8.5e-08; Accession=PF07719.9; Description =Tetratricopeptide repeat
  Pfam annotation: Domain name=TPR_2; Domain location=18-51; Score =16.6; E_value=0.11; Accession=PF07719.9; Description=Tetratricopeptid e repeat
  Pfam annotation: Domain name=TPR_2; Domain location=236-269; Score =23.2; E_value=0.0011; Accession=PF07719.9; Description =Tetratricopeptide repeat
  Pfam annotation: Domain name=TPR_2; Domain location=270-303; Score =34.9; E_value=3.2e-07; Accession=PF07719.9; Description =Tetratricopeptide repeat
  Pfam annotation: Domain name=TPR_2; Domain location=304-337; Score =17.9; E_value=0.043; Accession=PF07719.9; Description=Tetratricopepti de repeat
  Pfam annotation: Domain name=TPR_2; Domain location=338-371; Score =34.4; E_value=4.5e-07; Accession=PF07719.9; Description =Tetratricopeptide repeat
  Pfam annotation: Domain name=TPR_2; Domain location=52-85; Score =20.4; E_value=0.0077; Accession=PF07719.9; Description =Tetratricopeptide repeat
  Pfam annotation: Domain name=TPR_2; Domain location=93-126; Score =8.9; E_value=2.6; Accession=PF07719.9; Description=Tetratricopeptide repeat
  Pfam annotation: Domain name=TPR_4; Domain location=127-152; Score =1.3; E_value=31; Accession=PF07721.6; Description=Tetratricopeptide repeat
  Pfam annotation: Domain name=TPR_4; Domain location=161-186; Score =9.5; E_value=3.2; Accession=PF07721.6; Description=Tetratricopeptide repeat
  Pfam annotation: Domain name=TPR_4; Domain location=270-295; Score =2.2; E_value=23; Accession=PF07721.6; Description=Tetratricopeptide repeat
  Pfam annotation: Domain name=TPR_4; Domain location=304-329; Score =5.3; E_value=10; Accession=PF07721.6; Description=Tetratricopeptide repeat
  Pfam annotation: Domain name=TPR_4; Domain location=338-363; Score =3.5; E_value=17; Accession=PF07721.6; Description=Tetratricopeptide repeat
  Pfam module annotation: Pfam domain module=Sel1::Sel1::Sel1::TPR _1::TPR_1::TPR_1::TPR_1::TPR_1::TPR_1::TPR_1::TPR_1::TPR_1::TPR _1::TPR_2::TPR_2::TPR_2::TPR_2::TPR_2::TPR_2::TPR_2::TPR_2::TPR _2::TPR_4::TPR_4::TPR_4::...
  Pfam module annotation: Pfam domain module=TPR_4::TPR_4; Domain location=127-158::236-267::270-301::127-160::161-194::18-51::202 -235::236-269::270-303::304-337::338-371::52-85::93-126::127-160::161- 194::18-51::236-269::...
  Pfam module annotation: Domain location=270-303::304-337::338-371::52- 85::93-126::127-152::161-186::270-295::304-329::338-363
KFADAIQLYTXVLEKEGTNVSLLEGXCLQAQSLPRQAIECFTEAVKIEPENACALTHCGIIYKDEGHLVEAAEAYQKARTADPSYKPASEFLAIVLTDLGTSLKLAGNTEEGIQKYCEALEVDNHYAPAYYNLGVVYSEMMQFDMALTCYEKAALERPLYAEAYCNMGVIYKNRGELEAAIACYERCLTISPNFEIAKNNMAIALTDLGTKVKIEGDINQGVAYYKKALFYNWHYADAMYNLGVAYGEMLNFEMAIVFYELALHFNPRCAEACNNLGVIYKDRDNLDKAVECYQMALSIKPNFSQSLNNLGVVYTVQGKMDAAASMIEKAIIANPTYAEAYNNLGVLYRDAGSITLAIQAYERCLQIDPDSRNAGQNRLLAMNYIDEGSDDKLYEAHREWGKRFMKLYPQHTSWDNSKVADRPLIIGYVSPDYFTHSVSYFIEAPLTHHDYTNCKVVVYSGVVKADAKTLRFKDKVLKKGGLWRDIYGIDEKRVASLVREDKVDILVELTGHTANNKLGTMACRPAPIQVTWIGYPNTTGLPTIDYRITDSLADPPGTKQKHVEELVHLPESFLCYTPSPEAGPVCPTPAISNGFVTFGSFNNLAKITPKVLQVWAQILCAVPNSRLVVKCKPFCCDSIRQKFLSTLEELGLGSTIRRSXNLVRPTTIPIXKSLRVDLLPLIHLNHDHMQAYSLMDISLDTFPYAGTTTTCESLYMGVPCVTMAGAVHAHNVGVSLLSKVGLGRLVAKTEDEYVSLALDLASDVNALQELRMSLRELMMKSPVCDGEKFTRGLEAAYRNMWHRYCDGDVPSLRRLELLQEHPVANKQDSDKTAEKLADLKAQKANATVEGDKQPPVMANGVSSPDSPASAKFEANGHCSQ

SEQ ID NO: 78395 - protein, 406 aa, Setaria italica
  Transcript Sequence Number=SeqID_12421
  Gene Ontology: Mol. function=protein dimerization activity; Cellular component=nucleus; Biological process=regulation of transcription, DNA-dependent
  Homolog annotation: Hit_ID=Q0JCZ4; Match level="QueryCoverage=100%, HitCoverage=60%, E-value=0.0, Identity=84%"; Hit description=Auxin response factor 9
  Pfam annotation: Domain name=Auxin_resp; Domain location=197-282; Score=152.3; E_value=1.5e-42; Accession=PF06507.5; Description=Auxin response factor
  Pfam annotation: Domain name=B3; Domain location=70-175; Score=120.3; E_value=6.1e-33; Accession=PF02362.13; Description=B3 DNA binding domain
  Pfam module annotation: Pfam domain module=Auxin_resp::B3; Domain location=197-282::70-175
ASTHQQLDQYLPMFNLPSKILCSVVNVELRAEADSDEVYAQIMLQPEADQSELTSPDPELQEPEKCTAHSFCKTLTASDTSTHGGFSVLRRHAEECLPQLDMSQNPPCQELVAKDLHGTEWHFRHIFRGQPKRHLLTTGWSVFVSSKRLVAGDAFIFMRGENGELRVGVRRLMRQVNNMPSSVISSHSMHLGVLATASHAISTGTLFSVFYKPRTSRSDFIVSVNKYLEAKKQKISVGMRFKMRFEGDEAPERRFSGTIVDIGSLPAMSKSLWADSDWRSLKVQWDEPSSILRPDRISPWEVEPLDAANPQSPQPPLRNKRARPLASPSMVAELPSGFGLWKSPTDSARTLSFSEPQRARELFPSIPPSAFSSSSNVSFNSKNEPSMLSSQFYWSARDTRADSCAA

SEQ ID NO: 78396 - protein, 68 aa, Setaria italica
  Transcript Sequence Number=SeqID_12422
DQFAASELSETLGTCVGNAGAGEHFIDCVEFWYTLQCACYTWTKKLTQAYCSLSATEQCFSLTTNQSF

SEQ ID NO: 78397 - protein, 340 aa, Setaria italica
  Transcript Sequence Number=SeqID_12423
  Gene Ontology: Mol. function=triacylglycerol lipase activity; Cellular component=extracellular region; Biological process=lipid catabolic process
  Homolog annotation: Hit_ID=Q71DJ5; Match level="QueryCoverage=93%, HitCoverage=80%, E-value=1e-129, Identity=65%"; Hit description =Triacylglycerol lipase 1
  Pfam annotation: Domain name=Abhydro_lipase; Domain location=1-37; Score=-0.5; E_value=0.0047; Accession=PF04083.8; Description=ab -hydrolase associated lipase region
  Pfam annotation: Domain name=Abhydrolase_1; Domain location=51-328; Score=-4.5; E_value=0.013; Accession=PF00561.12; Description =alphabeta hydrolase fold
  Pfam module annotation: Pfam domain module=Abhydro_lipase::Abhydrolase _1; Domain location=1-37::51-328
SLQHIPHGKNRVADNAGPPVFLQHGLFQGGDTWFINSNEQSLGYILADNGFDVWIGNVRGTRWSKGHSTLSVHDKLFWDWSWQDLAEYDLVAMLSYVYTVTQSKIFYVGHSQGTIMGLAAFTKPEIVKMISSAALLCPISYLDHVSASFVLRAVAMHLDQMLITMGIHQLNFRSEMGVQILDSLCDAESLDCNSMLSSITGENCCFNSSRIDYYLEYEPHPSSTKNLRHLFQMIRKGTFAQYDYGWVGNLGRYGQLHPPPFDLSSIPESLPIWMGYGGLDALADITDVEHTIRELRSTPELLYIGDYGHIDFIMSMKAKDDVYVDLMRFLRAQQGMHSSS

SEQ ID NO: 78398 - protein, 48 aa, Setaria italica
  Transcript Sequence Number=SeqID_12424
FVSDAICKMANKSVLISLIYCYEFKLWLCRYRSFYVRVQIMLTLFVYK

SEQ ID NO: 78399 - protein, 54 aa, Setaria italica
  Transcript Sequence Number=SeqID_12425
  Homolog annotation: Hit_ID=Q851R0; Match level="QueryCoverage=75%, HitCoverage=6%, E-value=6e-14, Identity=92%"; Hit description =Nodulin family protein, putative, expressed
MAFASGDGGGGGPQVLTARFVRQVVLGRWFMVFACLLILSASGATYIFGIYSKV

SEQ ID NO: 78400 - protein, 229 aa, Setaria italica
  Transcript Sequence Number=SeqID_12426
  Gene Ontology: Mol. function=inorganic diphosphatase activity; Cellular component=cytoplasm; Biological process=phosphate metabolic process
  Homolog annotation: Hit_ID=O48556; Match level="QueryCoverage=92%, HitCoverage=98%, E-value=1e-105, Identity=85%"; Hit description =Soluble inorganic pyrophosphatase
  Pfam annotation: Domain name=Pyrophosphatase; Domain location=52-206; Score=179.0; E_value=1.4e-50; Accession=PF00719.11; Description =Inorganic pyrophosphatase
MSEAVRRAGADEPGRAAPRLNERILSSLSRRSVAAHPWHDLEIGPDAPAVFNVVVEISKGSKVKYELDKKTGLIKVDRVLYSSVVYPHNYGFIPRTLCEDNDPMDVLVLMQEPVLPGCFLRARAIGLMPMMDQGEKDDKIIAVCTDDPEYRHYNDLSELSPHRVQEIRRFFEDYKKNENKEVAVDEVQPASTARDAIKYSMDLYAQYIYRACDSSLDACFTTYFLYLSK

SEQ ID NO: 78401 - protein, 138 aa, Setaria italica
  misc_feature (10)..(10): Xaa can be any naturally occurring amino acid
  misc_feature (21)..(21): Xaa can be any naturally occurring amino acid
  Transcript Sequence Number=SeqID_12427
QQREINRKRXSRVERGKGTRXPGGDGSRQPPAALPAVPPPVPAAAAAAAGVSLRVPVPSSSAAVVRRAGRAVPRSVALVPGVRRRAAPSAAAVPLRPAPGLPAPTAAPRLPAAGASLALRPRVRPLLLPVPILLPEPQ

SEQ ID NO: 78402 - protein, 487 aa, Setaria italica
  Transcript Sequence Number=SeqID_12428
  Gene Ontology: Mol. function=serine-type endopeptidase activity; Cellular component=extracellular region; Biological process=negative regulation of catalytic activity
  Homolog annotation: Hit_ID=B6U1P8; Match level="QueryCoverage=100%, HitCoverage=63%, E-value=0.0, Identity=85%"; Hit description =Subtilisin-like protease
  Pfam annotation: Domain name=PA; Domain location=78-177; Score=103.0; E_value=1e-27; Accession=PF02225.14; Description=PA domain
  Pfam annotation: Domain name=Peptidase_S8; Domain location=101-319; Score=-72.0; E_value=0.0073; Accession=PF00082.14; Description =Subtilase family
  Pfam module annotation: Pfam domain module=PA::Peptidase_S8; Domain location=78-177::101-319
  Subcellular localization annotation: CTP_CleavageSite=25; ConfidenceScore=5.03e-01
GAADYSRDSVAIGAFSAMEQNVLVSCSAGNAGPGSSTLSNVAPWITTVGAGTLDRDFPAYVALGNGKNYTGVSLYSGKALPSTPLPIIYAANASNSTAGNLCMPGTLTPEKVAGKIVVCDRGVSARVQKGFVVRDAGGAGMVLSNTAANGQELVADAHLLPATGVGEREGVAIKSYVASDPSPTATIVVAGTQVGVHPSPVVAAFSSRGPNMVTPEILKPDIIAPGVNILAAWTGKAGPTGLAADTRRVGFNIISGTSMSCPHVSGLAALLRSAHPDWSPAAVRSALMTTAYATYSGGSSPLLDAATGATATPFDYGAGHVDPSRAVDPGLVYDLGTRDYVDFLCALKYSPAMIATVARSRDFSCAENRTYSVGGLNYPSFSVAFSTANGEGGESSAAATVTHTRTLTNVGGAGTYKVSTSVAGAAAQGVTVAVEPTELAFTSAGEKKSYTVRFTSRSQPSGTSGFGRLVWSDGKHSVASPIAFTWT

SEQ ID NO: 78403 - protein, 91 aa, Setaria italica
  Transcript Sequence Number=SeqID_12429
  Homolog annotation: Hit_ID=B6TYN1; Match level="QueryCoverage=64%, HitCoverage=13%, E-value=1e-22, Identity=87%"; Hit description =Transposon protein Mutator sub-class
PAPESAADFHALLEHELNRNPWADSDDAPVLFATLYELPPAAGGAALFVRIHTVACDRSAANALARELLVLLGGGGKEGGRAPEDAAAEAA

SEQ ID NO: 78404 - protein, 98 aa, Setaria italica
  Transcript Sequence Number=SeqID_12430
  Gene Ontology: Mol. function=electron carrier activity; Cellular component=integral to membrane; Biological process=oxidation reduction
  Homolog annotation: Hit_ID=B6TCT8; Match level="QueryCoverage=98%, HitCoverage=17%, E-value=9e-46, Identity=92%"; Hit description =Cytochrome P450 CYP86A34
RESLAIVDRYMTEAIAARKATPSDDLLSRFMKKRDGNGRAFPEDVLQWIALNFVLAGRDTSSVALSWFFWMLMLRRDVERKVVVEIASVLRETRGDDT

SEQ ID NO: 78405 - protein, 98 aa, Setaria italica
  Transcript Sequence Number=SeqID_12431
REEHRIISFKLSMLPIPSLCCDDRRQHLLDQGPARNNKRMRKYYTKPEVPIGQCKRCCYPERKQVCHVKPCLSFEAFQVIEGPSTSTLALPFRHIFTN

SEQ ID NO: 78406 - protein, 216 aa, Setaria italica
  misc_feature (142)..(142): Xaa can be any naturally occurring amino acid
  Transcript Sequence Number=SeqID_12432
  Gene Ontology: Mol. function=protein serine/threonine kinase activity; Biological process=protein amino acid phosphorylation
  Homolog annotation: Hit_ID=B6UHY8; Match level="QueryCoverage=98%, HitCoverage=68%, E-value=5e-84, Identity=87%"; Hit description=ATP binding protein
KNRNDLPGDEGRSQTQSSDSNWPSHLDHKVQSLSLTKQEKNLDSSLYCREAGHSLQAAQTLWSTGSLSGPIPNGFYSIIPEKRLKECFDTIPSPDDLYSLGIEGFKAEIILVDIERDKKISALKQLCTALVKGLNSNPAAIXKKVAGLVSDFYKRPNPHLSPARTSSEDLSHFLENRGVQLLLQSSPFLNKPLLPYEEWCIEFSEITVGIRVGVGK

SEQ ID NO: 78407 - protein, 167 aa, Setaria italica
  Transcript Sequence Number=SeqID_12433
  Gene Ontology: Mol. function=phosphoprotein phosphatase activity; Cellular component=cytoplasm; Biological process=mitotic cell cycle spindle assembly checkpoint
  Homolog annotation: Hit_ID=Q9LKF8; Match level="QueryCoverage=80%, HitCoverage=43%, E-value=2e-71, Identity=94%"; Hit description =Serine/threonine protein phosphatase
  Pfam annotation: Domain name=Metallophos; Domain location=38-164; Score=94.7; E_value=3.1e-25; Accession=PF00149.20; Description =Calcineurin-like phosphoesterase
MVRRFPRSICNLMCYVLWRGYKYLSSSFCNFCMQPVKSPVTICGDIHGQFHDLVELFRIGGKCPDTNYLFMGDYVDRGYYSLFLIQLLVALKVRHPHRITILRGNHESRQITQVYGFYDECLRKYGNANVWKTFTDLFDYFPLTALVESEIFCLHGGLSPSIENLDS

SEQ ID NO: 78408 - protein, 559 aa, Setaria italica
  Transcript Sequence Number=SeqID_12434
  Gene Ontology: Mol. function=protein serine/threonine kinase activity; Biological process=protein amino acid phosphorylation
  Homolog annotation: Hit_ID=B6UHY8; Match level="QueryCoverage=100%, HitCoverage=70%, E-value=0.0, Identity=85%"; Hit description=ATP binding protein
  Pfam annotation: Domain name=Pkinase; Domain location=415-559; Score=- 29.1; E_value=9.3e-07; Accession=PF00069.17; Description=Protein kinase domain
  Pfam annotation: Domain name=Pkinase_Tyr; Domain location=415-559; Score=-10.7; E_value=5.2e-13; Accession=PF07714.9; Description =Protein tyrosine kinase
  Pfam module annotation: Pfam domain module=Pkinase::Pkinase_Tyr; Domain location=415-559::415-559
KRYTALKQLCTALVKGLNSNPAAIIKKVAGLVSDFYKRPNPHLSPARTSSEDLSHFLENRGVQLLGHIRHGSCRPRAILFKVLADSVGIDSKLLVGIPNEEPHGYDDSSKHMSVVVMLKSAEFLVDLMRFPGQLVPFSSKAVITSHISAAGESDSVDYDSCDSPLEPNSPLCAQRQEQDDSNRSFKVPSLRNIMLKSTNSMEGKMSSSHSDPNVANAFCGRSRKKIVDEHQRTASSSPEHPLSRVRGRSMLGDRQYGNSVAVSRSDGASTSNTRRARRRSIIITPEISDDIVRAVRAMSESMRQNRLSRGQNDGSLGPSNDSHKHETAGDSNDDEVSIRRPSALEGLRRQINSQKAVSLPSSPHRSSILASDLRGPSDFTEADLMSTWNKVLQSSPFLNKPLLPYEEWCIEFSEITVGIRVGVGFFGEVFRGLWNGTDVAIKVFLEQDLTPENMKDFCNEISILSRVRHPNVILFLGACMKPPHLSLVTEYMELGSLYSLIHSKMHKIKLHWKRRLKMLRDICRGLMCMHRLKIVHRDLKSANCLVNKYWTVKICDFGL

SEQ ID NO: 78409 - protein, 313 aa, Setaria italica
  Transcript Sequence Number=SeqID_12435
  Gene Ontology: Mol. function=phosphoprotein phosphatase activity; Cellular component=cytoplasm; Biological process=negative regulation of tyrosine phosphorylation of Stat3 protein
  Homolog annotation: Hit_ID=Q8S7U0; Match level="QueryCoverage=100%, HitCoverage=100%, E-value=1e-176, Identity=90%"; Hit description =Serine/threonine protein phosphatase
  Pfam annotation: Domain name=Metallophos; Domain location=54-249; Score=141.7; E_value=2.3e-39; Accession=PF00149.20; Description =Calcineurin-like phosphoesterase
MEPMNVDNGGCGGLDAQIEQLMQCRPLAEQEVKSLCEKAKEILMEESNVQPVKSPVTICGDIHGQFHDLVELFRIGGKCPDTNYLFMGDYVDRGYYSVETVTLLVALKVRHPHRITILRGNHESRQITQVYGFYDECLRKYGNANVWKTFTDLFDYFPLTALVESEIFCLHGGLSPSIENLDSVRSLDRVQEVPHEGPMCDLLWSDPDDRCGWGISPRGAGYTFGQDISEQFNHTNNLKLVARAHQLVMEGYNWAHEQKVVTIFSAPNYCYRCGNMASILEVDDCNSHTFIQFEPAPRRGEPDVTRRTPDYFL

SEQ ID NO: 78410 - protein, 211 aa, Setaria italica
  Transcript Sequence Number=SeqID_12436
  Gene Ontology: Mol. function=protein serine/threonine kinase activity; Cellular component=plasma membrane; Biological process =protein amino acid phosphorylation
  Homolog annotation: Hit_ID=B6UHY8; Match level="QueryCoverage=94%, HitCoverage=25%, E-value=1e-107, Identity=91%"; Hit description=ATP binding protein
  Pfam annotation: Domain name=Pkinase; Domain location=5-203; Score =68.1; E_value=3.3e-17; Accession=PF00069.17; Description=Protein kinase domain
  Pfam annotation: Domain name=Pkinase_Tyr; Domain location=1-203; Score=85.0; E_value=2.7e-22; Accession=PF07714.9; Description =Protein tyrosine kinase
  Pfam module annotation: Pfam domain module=Pkinase::Pkinase_Tyr; Domain location=5-203::1-203
MLNMFMLLWTAVILFLGACMKPPHLSLVTEYMELGSLYSLIHSKMHKIKLHWKRRLKMLRDICRGLMCMHRLKIVHRDLKSANCLVNKYWTVKICDFGLSRIMSDSSMDDNSSAGTPEWMAPELIRNEPFTEKCDIFSFGVIMWELCTLSRPWEGIPPVQIVYSVANDGARLEIPDGPLGSLIADCWAEPERRPSCQEILTRLLDCEYTLC

SEQ ID NO: 78411 - protein, 170 aa, Setaria italica
  Transcript Sequence Number=SeqID_12437
  Gene Ontology: Mol. function=transporter activity; Cellular component= integral to membrane; Biological process=oligopeptide transport
  Homolog annotation: Hit_ID=Q05085; Match level="QueryCoverage=100%, HitCoverage=28%, E-value=1e-54, Identity=65%"; Hit description =Nitrate/chlorate transporter
VNLVTYLTGTMHLPSAAAANVVTDFMGTSFLLCLLGGFLADSFLGRYLTIAIFALVQAIGTGLLAVSTEVRQLRPPPCGPGAAGPCEQATGLQMSVLYVCLYLIALGTGGLKSSVSGFGTDQFDERDARERAAMGLFFNRFFFFISVGTLLAVTILVYVQDHVGRSWAYG

SEQ ID NO: 78412 - protein, 245 aa, Setaria italica
  Transcript Sequence Number=SeqID_12438
  Homolog annotation: Hit_ID=B6TD00; Match level="QueryCoverage=100%, HitCoverage=52%, E-value=6e-77, Identity=63%"; Hit description=Fas -associated factor 1-like protein
  Pfam annotation: Domain name=UBX; Domain location=162-243; Score =92.3; E_value=1.6e-24; Accession=PF00789.12; Description=UBX domain
  Subcellular localization annotation: CTP_CleavageSite=32; ConfidenceScore=5.26e-01
FVAWGGSIRRTEGFKMSNSLNASRFPFCAVVMASTNQRIMLLQQVEGPKSPEEMITILQRVVEECATSLVAARIEAEERLNNQRLREEQDAAYRVALEADQARERERQEELERREREAAEAERKRKEEEEALARAAQEAAEKEAALARRRQEKAMALGAEPEKGPGVTRVLIRFPTGERKERRFHSSAAITSLYDYVDSLDLLKAEKYSLVSNFPRVTYGPEKHSLTLEEAGLHPQASLFIEIEQ

SEQ ID NO: 78413 - protein, 119 aa, Setaria italica
  misc_feature (97)..(97): Xaa can be any naturally occurring amino acid
  misc_feature (100)..(100): Xaa can be any naturally occurring amino acid
  Transcript Sequence Number=SeqID_12439
  Gene Ontology: Mol. function=microtubule motor activity; Cellular component=microtubule associated complex; Biological process =microtubule-based movement
  Homolog annotation: Hit_ID=Q2QMU6; Match level="QueryCoverage=97%, HitCoverage=4%, E-value=4e-36, Identity=67%"; Hit description =Kinesin motor domain containing protein, expressed
KRCYEARLKELEVKIQGNDASLISWNKEKEALELEISEAKLLVAQKSFESATLIAKFEEAQATISDADSTVKALVEANEKAKHQAESYQEKEALFMXEKXGMLSEISTLKTLLDTKEQS

SEQ ID NO: 78414 - protein, 301 aa, Setaria italica
  Transcript Sequence Number=SeqID_12440
  Gene Ontology: Mol. function=transporter activity; Cellular component= membrane; Biological process=oligopeptide transport
  Homolog annotation: Hit_ID=B6ST62; Match level="QueryCoverage=100%, HitCoverage=61%, E-value=1e-105, Identity=63%"; Hit description=POT family protein
  Pfam annotation: Domain name=PTR2; Domain location=1-233; Score= -41.1; E_value=6.4e-05; Accession=PF00854.13; Description=POT family
MAFSLAVFLLGARTYRAEEPVGDGRFLETVRAWAARVFRRKDATSTERLLDRQPEKGKGHVVKLLPIWLGAIVYAAVTSQVYTLFTKQGSTLDRRLGTGLVVPPAALQCLVSITFIAVLPVYDKAFVPLARRVTGHPAGVTTLQRIGAGMSMSCVAMVVAALVEGRRLRVATDAGIVDRPDLAVPMSLCWVVPQYVLMGLAMALADVGLEEFFYDQLPDAVRSVGLALCLSAMGAGSYASGVLVSAVDWATRGGGESWISDNLNRAHLDYFYWLLAGLVALDVAVFLYFSKRFVYRSKGEL

SEQ ID NO: 78415 - protein, 62 aa, Setaria italica
  Transcript Sequence Number=SeqID_12441
  Gene Ontology: Mol. function=translation initiation factor activity; Cellular component=cytoplasm; Biological process=regulation of translation
  Homolog annotation: Hit_ID=Q0D5W6; Match level="QueryCoverage=100%, HitCoverage=53%, E-value=2e-25, Identity=85%"; Hit description =Protein translation factor SUI1 homolog
MSDLDVQLPSAFDPFAEANAEDSSAGAGSKEYVHVRVQQRNGRKSLTTVQGLKKEYSYNKIL

SEQ ID NO: 78416 - protein, 70 aa, Setaria italica
  Transcript Sequence Number=SeqID_12442
  Gene Ontology: Mol. function=translation initiation factor activity; Cellular component=cytosol; Biological process=regulation of translation
  Homolog annotation: Hit_ID=Q0D5W6; Match level="QueryCoverage=92%, HitCoverage=56%, E-value=3e-28, Identity=90%"; Hit description =Protein translation factor SUI1 homolog
  Pfam annotation: Domain name=SUI1; Domain location=20-69; Score=41.6; E_value=3e-09; Accession=PF01253.14; Description=Translation initiation factor SUI1
YLFYVDPFAEANAEDSSAGAGSKEYVHVRVQQRNGRKSLTTVQGLKKEYSYNKILKDLKKEFCCNGTVVQ

SEQ ID NO: 78417 - protein, 83 aa, Setaria italica
  Transcript Sequence Number=SeqID_12443
  Gene Ontology: Mol. function=metalloendopeptidase activity; Cellular component=membrane; Biological process=proteolysis
  Homolog annotation: Hit_ID=Q6EPN8; Match level="QueryCoverage=100%, HitCoverage=19%, E-value=8e-41, Identity=95%"; Hit description=CAAX prenyl protease 1 homolog
  Pfam annotation: Domain name=Peptidase_M48; Domain location=1-83; Score=-35.7; E_value=0.0062; Accession=PF01435.10; Description =Peptidase family M48
IIPLQHLLSFCLNLVSRAFEFQADAFAKNLGYAPQLRAALVKLQEENLSAMNTDPWYSAYHYSHPPLVERLQALEDSDSKKED

SEQ ID NO: 78418 - protein, 422 aa, Setaria italica
  Transcript Sequence Number=SeqID_12444
  Gene Ontology: Mol. function=metalloendopeptidase activity; Cellular component=membrane; Biological process=proteolysis
  Homolog annotation: Hit_ID=Q6EPN8; Match level="QueryCoverage=100%, HitCoverage=99%, E-value=0.0, Identity=90%"; Hit description=CAAX prenyl protease 1 homolog
  Pfam annotation: Domain name=Peptidase_M48; Domain location=226-417; Score=207.9; E_value=2.7e-59; Accession=PF01435.10; Description =Peptidase family M48
MALPYLEAVLCFMILMYIFETYLDIRQHRALKLPTLPKPLLGVISDEKFKRSRDYSLDKSHFHFVHEAVTILMDTTILYYRVLPWFWKKSGELITNVGLNAENEIIHTLAFLAGAMVWSQITDLPFSLYSTFVIEARHGFNKQTIWLFIRDMVKGILLSMILGPPIVAAIIYIVQIGGPYLAIYLWGFMFVLALLMMTIYPIVIAPLFNKFTPLPEGVLREKIEKLAASLKFPLKKLFVVDGSTRSSHSNAYMYGFFKNKRIVLYDTLIQQCSNEDEIVSVIAHELGHWKLNHTVYSFIAVQLLMFLQFGGYTLVRNSKDLFESFGFEDQPIIIGLIIFQHTIIPLQHLLSFCLNLVSRAFEFQADAFAKNLGYAPQLRAALVKLQEENLSAMNTDPWYSAYHYSHPPLVERLQALEDSDSK

SEQ ID NO: 78419 - protein, 78 aa, Setaria italica
  misc_feature (68)..(68): Xaa can be any naturally occurring amino acid
  Transcript Sequence Number=SeqID_12445
  Gene Ontology: Mol. function=ribose-5-phosphate isomerase activity; Cellular component=chloroplast; Biological process=pentose-phosphate shunt, non-oxidative branch
  Homolog annotation: Hit_ID=B6U2Y8; Match level="QueryCoverage=100%, HitCoverage=26%, E-value=1e-32, Identity=88%"; Hit description =Ribose-5-phosphate isomerase
IDFAFTDAEVIEEGTLAAVIGRRKTESGEPSFMVEKAMVKSADKLAFITGNDKYLTGVEGSIPVIVKXGNWIDTAEEI

SEQ ID NO: 78420 - protein, 200 aa, Setaria italica
  misc_feature (171)..(171): Xaa can be any naturally occurring amino acid
  Transcript Sequence Number=SeqID_12446
  Pfam annotation: Domain name=TATA_RF; Domain location=2-193; Score =101.4; E_value=3.1e-27; Accession=PF08612.3; Description=TATA -binding related factor (TRF)
GAEVPRGAKDGRWKTSIIFYRAMTRDGGAAGPAGQQGQEHGDLPRELLGVALHERPGLYFSIVRLAKLVLQADATFPQVMEKLQSYKARVALNFEGFQYQLGDFCLRIGKCVPNNSEVLRGIMMEVEYYPLSSIEKSRAIMEDFFDVWQETVAKKSLPGHFIHVESNFSEXYGLSDQYSFQHTAVQYATCLQQLMAVVRG

SEQ ID NO: 78421 - protein, 74 aa, Setaria italica
  misc_feature (73)..(73): Xaa can be any naturally occurring amino acid
  Transcript Sequence Number=SeqID_12447
  Gene Ontology: Mol. function=transcription regulator activity; Cellular component=nucleus; Biological process=regulation of transcription
  Homolog annotation: Hit_ID=B6SZJ4; Match level="QueryCoverage=81%, HitCoverage=68%, E-value=2e-25, Identity=96%"; Hit description=DNA binding protein
  Pfam annotation: Domain name=HLH; Domain location=4-54; Score=22.6; E_ value=0.00068; Accession=PF00010.18; Description=Helix-loop-helix DNA- binding domain
MSSRRSRASVSEEEINELISRLQTLLPSARRRGGSQASTTKLLKETCSYIKSLHREVDDLSDRLSDLMATMDXN

SEQ ID NO: 78422 - protein, 131 aa, Setaria italica
  Transcript Sequence Number=SeqID_12448
  Gene Ontology: Mol. function=peptidase activity; Biological process =lipid transport
  Homolog annotation: Hit_ID=B6SIN6; Match level="QueryCoverage=64%, HitCoverage=63%, E-value=2e-33, Identity=83%"; Hit description =Cortical cell-delineating protein
  Pfam annotation: Domain name=Tryp_alpha_amyl; Domain location=49-130; Score=70.9; E_value=4.5e-18; Accession=PF00234.14; Description =Protease inhibitorseed storageLTP f
  Subcellular localization annotation: CTP_CleavageSite=78; ConfidenceScore=5.38e-01
MASKAVLFLALNLLLFTVANACGSCPTPTPPVVPPPPPPSSPPPSSGKCPVNALKFGVCANVDGLVKGEVGKVPAEPCCSLIGGLADFEAAVCLCTAIKANVLGAVIDIPIKLSALINYCGKCVPKGYTCA

SEQ ID NO: 78423 - protein, 152 aa, Setaria italica
  Transcript Sequence Number=SeqID_12449
  Gene Ontology: Mol. function=transporter activity; Biological process= transport
  Homolog annotation: Hit_ID=Q38JB7; Match level="QueryCoverage=100%, HitCoverage=44%, E-value=2e-62, Identity=76%"; Hit description =Chloroplast lipocalin
  Subcellular localization annotation: CTP_CleavageSite=34; ConfidenceScore=5.38e-01
MVLVVLGCSPASSLPACSPTSRRKCSTTRQKIVRCSLNEETPLNKYGVVSKQLISCLAASLVFISPPSQAIPAETFAQPGLCQIATLAAIDSASVPLKFDNPSDDGGAGMMMRGMTAKNFDPVRYSGRWFEVASLKRGFAGQGQEDCHCTQG

SEQ ID NO: 78424 - protein, 49 aa, Setaria italica
  Transcript Sequence Number=SeqID_12450
PPASGTDLLPEQKAIVLQNYFIVDRRIILPQQLAPIRITATRLTATEFF

SEQ ID NO: 78425 - protein, 115 aa, Setaria italica
  Transcript Sequence Number=SeqID_12451
TIIIEAPFSTYTHSNEHEWMDHVKFSDSMWLWMIDPIWISTFAAWQRILKCKQTAFKTVMLFAARLVGYLFGVCHSWGKVWSKSKRLLASFFASSHFRWWYASCNADSSQNYGWL

SEQ ID NO: 78426 - protein, 59 aa, Setaria italica
  Transcript Sequence Number=SeqID_12452
PRRSSFNRPNGVLTDRLPLRHNKSENYSLRPMKSAILVFLGQISGGVKRLIPSFVGHMQ

SEQ ID NO: 78427 - protein, 462 aa, Setaria italica
  misc_feature (31)..(31): Xaa can be any naturally occurring amino acid
  Transcript Sequence Number=SeqID_12453
  Homolog annotation: Hit_ID=B9RFQ6; Match level="QueryCoverage=53%, HitCoverage=39%, E-value=8e-49, Identity=41%"; Hit description =Nucleic acid binding protein, putative
  Subcellular localization annotation: CTP_CleavageSite=51; ConfidenceScore=5.05e-01
QVLNNIPFDQQKGGNGKGDKQYKVRQPRKNXQSDNVSKPTRTEENSVDGVPDSSKGSIASQPNQSLTPSSASLSSSDSQDGAQVDQLNTPKVQPFSLSKKPVKSALSHQKSAPHDFYHGKKPGMSTESSSKNGASDVNSHGHPKHQKPQSSQQPRPQNPVNHRPHGGSSNFQSSISHRSNSCPAPAGYNGIPTAPLQSWQGGPPYHGPPINYPDMSRLNISEYPRGIHNNQGLNVNYHPNHPGAPHMVQPGYSDHSYRPPTQPNMPSNMQNTGHWGANLGCPQPSLDPQGLVRYILGALEVLKTEKIPPTEQNIADCIHYGDANLPNFDVKKALQVAMQHQVVVTKKLGKMSFFLGKNENLWKCVNIMDDNAKYPKETLDSVHTFISSAHGYSAIKNSQSRYQAAAMLKKTCLKNLALGEVLQVLNIIINTKKWFVPNSSGWQPLSFNIIVADATTDASGNA

SEQ ID NO: 78428 - protein, 139 aa, Setaria italica
  Transcript Sequence Number=SeqID_12454
MPRVQKERPARAVANNAAPRHRATPSRLVKLYKHLTVDQRKAIEDVKFGGLLKIACSQIPSDFANWIMVQCFDHETSQLILPGRGRISLTAGAVAEKFGLPNRGDPVKYELDVDAINFIHEKYGIVRGTAQKIETIVQG

SEQ ID NO: 78429 - protein, 57 aa, Setaria italica
  Transcript Sequence Number=SeqID_12455
LAQSLCQDVNVKVLQVSDVGPAVLEVKEQFFHRNGMQTTVSSIQLYESRASQNITTF

SEQ ID NO: 78430 - protein, 52 aa, Setaria italica
  misc_feature (41)..(41): Xaa can be any naturally occurring amino acid
  Transcript Sequence Number=SeqID_12456
  Homolog annotation: Hit_ID=B6TQ79; Match level="QueryCoverage=100%, HitCoverage=13%, E-value=4e-16, Identity=76%"; Hit description=Zinc transporter 4
MALAGLRRHAGQFLSTSNELMAASLSTATCAEEMQKAEGGXCRDDAVALRLK

SEQ ID NO: 78431 - protein, 116 aa, Setaria italica
  Transcript Sequence Number=SeqID_12457
  Subcellular localization annotation: CTP_CleavageSite=72; ConfidenceScore=5.60e-01
RRGTSGRRPPPAPSSPRGSPLPEPPPPQPSPTPGKPAPRLASPSRPNHASIAAADPAPRRSPGSAPRDQPLRCAARLGSRHGFRDGQRPRAGGGGEEKGSGEAGREEEVGEGRAGD

SEQ ID NO: 78432 - protein, 345 aa, Setaria italica
  Transcript Sequence Number=SeqID_12458
  Homolog annotation: Hit_ID=B6SZ54; Match level="QueryCoverage=100%, HitCoverage=72%, E-value=1e-142, Identity=74%"; Hit description =Kelch motif family protein
  Pfam annotation: Domain name=F-box; Domain location=43-90; Score =40.0; E_value=9.5e-09; Accession=PF00646.25; Description=F-box domain
  Pfam annotation: Domain name=Kelch_1; Domain location=175-220; Score =53.3; E_value=9.4e-13; Accession=PF01344.17; Description=Kelch motif
  Pfam annotation: Domain name=Kelch_1; Domain location=222-271; Score =48.6; E_value=2.4e-11; Accession=PF01344.17; Description=Kelch motif
  Pfam annotation: Domain name=Kelch_2; Domain location=175-220; Score =21.7; E_value=0.0031; Accession=PF07646.7; Description=Kelch motif
  Pfam annotation: Domain name=Kelch_2; Domain location=222-271; Score =23.9; E_value=0.00065; Accession=PF07646.7; Description=Kelch motif
  Pfam module annotation: Pfam domain module=F-box::Kelch_1::Kelch _1::Kelch_2::Kelch_2; Domain location=43-90::175-220::222-271::175 -220::222-271
MGAFLSSPTSKNQPREHGEAPGPESTKKLRLSSIPPSGHDHPRLIPGLPDEISLQILARMPRMSYLKAKMVSRSWKTAITGAELYRLRKELGVAEEWLYILMKTADDQKLVWHAFDPVSNQWQRLPLMPGISHRRGDCRSGVPGLGLGDLVSAGIRISDVIRSWFGHKDLLGSIPFCGCAIGTVDGCLYVLGGFSRAFAMKCVWRYDPFVNSWQEVSPMSTGRAFCKTSLLNNKLYVVGGVSKGKDGLTPLQSAEVFDPATGVWAEVPDMTFSKAQALPTAFLAELLKPIATGMTSYRGKLYVPQSLYSWPFFVDVGGETFDPETNSWAEMPVGMGEGWPARQAG

SEQ ID NO: 78433 - protein, 150 aa, Setaria italica
  Transcript Sequence Number=SeqID_12459
  Gene Ontology: Mol. function=hydrolase activity, hydrolyzing O -glycosyl compounds; Biological process=carbohydrate metabolic process
  Homolog annotation: Hit_ID=Q10F03; Match level="QueryCoverage=89%, HitCoverage=26%, E-value=1e-29, Identity=49%"; Hit description =Isoamylase N-terminal domain containing protein, expressed
TYQPEMEETKEVTLKAGIEGMLTRLQRDRERARPPPRPEGRSDNGALAGNSGAPSHTAAGGRHSPRTPENGSVHGSHPQNGTLDGNNTLQSSSNDTWQTWTLGKSDLSDFEAAEVLPIESRRLSRHDEQDIALAQNDFHRSSNGVAVSDY

SEQ ID NO: 78434 - protein, 45 aa, Setaria italica
  Transcript Sequence Number=SeqID_12460
ELEQARIYTVHAMMTKWETNLCSTPLRLQSPSPTTSLSPRPRRIK

SEQ ID NO: 78435 - protein, 139 aa, Setaria italica
  Transcript Sequence Number=SeqID_12461
  Gene Ontology: Mol. function=translation initiation factor activity; Cellular component=nucleus; Biological process=translation
  Homolog annotation: Hit_ID=Q5VNM3; Match level="QueryCoverage=90%, HitCoverage=30%, E-value=1e-59, Identity=91%"; Hit description=DEAD -box ATP-dependent RNA helicase 2
MAAPTTSRRGPGAARNMDDDNLTFETSPGVEVVSSFDQMGIKDDLLRGIYGYGFEKPSAIQQRAVLPIINGRDVIAQAQSGTGKTSMISLTVCQIVDTAVREVQALILSPTRELASQTERVMLAIGCTYLLTIPKLSIV

SEQ ID NO: 78436 - protein, 737 aa, Setaria italica
  misc_feature (99)..(99): Xaa can be any naturally occurring amino acid
  Transcript Sequence Number=SeqID_12462
  Homolog annotation: Hit_ID=A7M6E7; Match level="QueryCoverage=99%, HitCoverage=98%, E-value=0.0, Identity=66%"; Hit description=Tm -1^GCR237 protein
  Pfam annotation: Domain name=TIM-br_sig_trns; Domain location=467 -734; Score=625.9; E_value=4.1e-185; Accession=PF09370.2; Description= TIM-barrel signal transduction protei
  Pfam annotation: Domain name=UPF0261; Domain location=2-420; Score =496.3; E_value=4.2e-146; Accession=PF06792.3; Description =Uncharacterised protein family (UPF02
  Pfam module annotation: Pfam domain module=TIM-br_sig_trns::UPF0261; Domain location=467-734::2-420
MEVLCIGTADTKLEELVFLAARLRSALAASGSDPKVQVSIVDVSTTEKTTAQDLKDITFIPRNTVLSCLLGVEQHNLPDNRSEAIALVSKALQNFLKKXYDSGTLVGAIGLGGSGGTALIAPALRSLPLGVPKLIVSTVASGHTAPYVGTSDLVLFPSVVDICGINSVSRVILSNTAAAFAGMVHGILSASNESDETAAKPTIGITMFGVTTPCVNAVKDRLNEEGYETLVFHATGVGGKAMEELVRGGFIQGVLDVTTTEVADHIVGGVMACDESRFDAIIDNKIPLVLSVGALDMVNFGARDTIPPAFADRKIHVHNEQVSLMRTTVEENKKFARFIADKINKSSSQVTVCLPQKGISAIDAPGMPFYDPEATSTLLGELNTLIQRTDIREVKLLPYHINDPEFANALVDAFLSMDVKACSTVQPQQDGKMKNSCSGQKSSDSSIVWRPPVDFPEAKPETLQKTLSILNKLKQHISEGIPVIGAGAGTGISAKFEEAGGVDLIVVYNSGRFRMAGRGSLAGLLPFADANAIVLEMANEVLPVVKGVPVLAGVCATDPFRRMEYFLKKLETIGFCGVQNFPTVGLFDGNFRQNLEETGMGYSLEVEMISRAHNMGFLTTPYAFNPEEAAAMAKVGAHIIVAHMGLTTAGSIGAKTAVTLDDSTVRVQAIADAALRVNPDIIILCHGGPISGPQEAEFILNNTKGVHGFYGASSMERLPVEQAITNTMRQYKRISLK

SEQ ID NO: 78437 - protein, 73 aa, Setaria italica
  Transcript Sequence Number=SeqID_12463
WNVLNLLQYNYGIVAVASHGNTMVILPTVSSLLILGFGFSEFKALPPTGIICGLLIFEFQNYSYIFLVKKIVY

SEQ ID NO: 78438 - protein, 376 aa, Setaria italica
  misc_feature (249)..(249): Xaa can be any naturally occurring amino acid
  Transcript Sequence Number=SeqID_12464
  Gene Ontology: Mol. function=ATP-dependent helicase activity; Cellular component=spliceosome; Biological process=mRNA processing
  Homolog annotation: Hit_ID=B9S958; Match level="QueryCoverage=98%, HitCoverage=53%, E-value=1e-167, Identity=73%"; Hit description=ATP -dependent RNA helicase, putative
  Pfam annotation: Domain name=DUF1605; Domain location=262-365; Score =128.3; E_value=2.4e-35; Accession=PF07717.8; Description=Domain of unknown function (DUF1605)
  Pfam annotation: Domain name=HA2; Domain location=137-228; Score =89.1; E_value=1.6e-23; Accession=PF04408.15; Description=Helicase associated domain (HA2)
  Pfam annotation: Domain name=Helicase_C; Domain location=1-76; Score =16.4; E_value=0.0019; Accession=PF00271.23; Description=Helicase conserved C-terminal domain
  Pfam module annotation: Pfam domain module=DUF1605::HA2::Helicase_C; Domain location=262-365::137-228::1-76
KESSIFAPTSKGKRKVVLSTNIAETSLTLEGVVYVVDSGFSKQKCYNPISDIESLVVAPISKASARQRAGRAGRVRPGKCFRLYTEEYYLNEMQSEGIPEMQRSNLVSCIIQLKALGIDNILGFDWPASPSPEAMIRALEVLFSLGILDEDAKLTVPIGFQVAEIPLDPMISKMILSANDFGCSDEILTIASFLSVQSVWVSVRGVKKEFDEAKLRFAAAEGDHVTFLNIYKGFHQSGKSSQWCYKNFXNYQALKKIVDIRGQLLRIVKSFGIPLKSCDRDMQAVRKAIIAGSFANACHLEEYSQNGMYKTIRTSQEVYIHPSSVLFRVNPKWVVYQSLVSTDKHYMRNVIAIEPSWLTEAAPHFYQFRTPNPALH

SEQ ID NO: 78439 - protein, 147 aa, Setaria italica
  Transcript Sequence Number=SeqID_12465
  Gene Ontology: Mol. function=transcription factor activity; Cellular component=transcription factor complex; Biological process =regulation of transcription, DNA-dependent
  Homolog annotation: Hit_ID=Q9ST55; Match level="QueryCoverage=100%, HitCoverage=32%, E-value=2e-58, Identity=76%"; Hit description=E2F protein
  Pfam annotation: Domain name=E2F_TDP; Domain location=58-123; Score =137.9; E_value=3.3e-38; Accession=PF02319.12; Description =Transcription factor E2Fdimerisation partner (TDP)
  Subcellular localization annotation: CTP_CleavageSite=40; ConfidenceScore=5.71e-01
ECIITSTGFTGSPMLTPVSGKTVKTSKSKAKNNKAGPQTPTSNVGSPLNPATPAGTCRYDSSLGLLTKKFINLLKQAPDGILDLNNAAETLEVQKRRIYDITNVLEGIGLIEKTLKNRIRWKGLDDSGVDLDNGISTLQAEVENLSL

SEQ ID NO: 78440 - protein, 331 aa, Setaria italica
  misc_feature (10)..(10): Xaa can be any naturally occurring amino acid
  misc_feature (24)..(24): Xaa can be any naturally occurring amino acid
  misc_feature (49)..(49): Xaa can be any naturally occurring amino acid
  Transcript Sequence Number=SeqID_12466
  Gene Ontology: Mol. function=transporter activity; Cellular component= integral to membrane; Biological process=transport
  Homolog annotation: Hit_ID=B9MYJ5; Match level="QueryCoverage=100%, HitCoverage=46%, E-value=1e-132, Identity=73%"; Hit description =Nucleobase ascorbate transporter
  Pfam annotation: Domain name=Xan_ur_permease; Domain location=2-307; Score=-1.1; E_value=5.3e-08; Accession=PF00860.12; Description =Permease family
SLFLRVINPXVVVSPTVAAVGLSXFFSYGFTKLGTCIEMGILQLLMVVXFALYLRKIKLFGYRVFLIYAVPLGLGITWAIAFVLTATGVYSYKGCDANIPASNNVSAFCRKHVLRMKSCRVDTSHALRSSPWFRFPYPLQWGTPVFSWKMGLVMCVVSIIASVDSVGSYHASSLFVATRPPTSGVVSRGIGVEGVSTILAGLWGTGVGSATITENVHTIAVTKMGSRRAVGFGAILLLLLSIVGKVGAFIASIPDVMVAALLCFMWAMLCALGLSNLRYSATGSSRNSIIVGLSLFLSLSVPSYFQQYGVHPSTNSSVPTYFQPYIVASHG

SEQ ID NO: 78441 - protein, 183 aa, Setaria italica
  Transcript Sequence Number=SeqID_12467
  Gene Ontology: Mol. function=transporter activity; Cellular component= membrane; Biological process=transport
  Homolog annotation: Hit_ID=B9SN96; Match level="QueryCoverage=80%, HitCoverage=21%, E-value=3e-60, Identity=78%"; Hit description =Purine permease, putative
VADPTPVPQRPANIVETPSTPIPLLTTPEVGSATITENVHTIAVTKMGSRRAVGFGAILLLLLSIVGKVGAFIASIPDVMVAALLCFMWAMLCALGLSNLRYSATGSSRNSIIVGLSLFLSLSVPSYFQQYGVHPSTNSSVPTYFQPYIVASHGPVHTGSGGVNYVLNTLLSLNMVIAFLVAL

SEQ ID NO: 78442 - protein, 340 aa, Setaria italica
  Transcript Sequence Number=SeqID_12468
  Gene Ontology: Mol. function=actin binding; Cellular component =cytoskeleton
  Homolog annotation: Hit_ID=Q84TX2; Match level="QueryCoverage=98%, HitCoverage=17%, E-value=3e-44, Identity=37%"; Hit description=SCAR -like protein 1
KELEGGSLDTDASPGILASWPDKNHVMCLNDVEMDKDNVIVPEEIAADMAPTGLDPHDNHDHQDGIAPEHSGMRNNLPYESYDDEIAEDMHSLLNDGLSTPFNKDVAEDNQIVVLEGGACPASLNSHKEDSEQAPAMARNLSDVQEFPVVIQGVPSQEETEAHAVETLAPVSCVFSADTEPVGISVLPAPNTSSLPDNSSSCVEQHALTEMEDIVEGGKVVVAEESTTSRFADDVVPPEDFIDDAIYTEKTQILATDSTEEASRHDLQLQHNSPLREGLEPVEATDRNLGEVDASREYISKERMLQTDNIPPLNEIEPTGEKCSDRDEVLSAGHFPVESD

SEQ ID NO: 78443 - protein, 62 aa, Setaria italica
  Transcript Sequence Number=SeqID_12469
TMIDALFQLGHPDKRNRYFNMLFLLLRRKCKTFFTDLAVDLPMQVRLKGGHQTPKGLKQFSV

SEQ ID NO: 78444 - protein, 285 aa, Setaria italica
  Transcript Sequence Number=SeqID_12470
  Gene Ontology: Mol. function=receptor activity; Cellular component =peroxisome; Biological process=protein import into peroxisome matrix
  Homolog annotation: Hit_ID=Q84XK6; Match level="QueryCoverage=91%, HitCoverage=82%, E-value=1e-105, Identity=66%"; Hit description =Peroxisomal targeting signal type 2 receptor
  Pfam annotation: Domain name=WD40; Domain location=107-146; Score =38.5; E_value=2.7e-08; Accession=PF00400.24; Description=WD domain, G-beta repeat
  Pfam annotation: Domain name=WD40; Domain location=150-189; Score =40.4; E_value=7e-09; Accession=PF00400.24; Description=WD domain, G -beta repeat
  Pfam annotation: Domain name=WD40; Domain location=19-57; Score=20.2; E_value=0.0084; Accession=PF00400.24; Description=WD domain, G-beta repeat
  Pfam annotation: Domain name=WD40; Domain location=194-233; Score =32.5; E_value=1.7e-06; Accession=PF00400.24; Description=WD domain, G-beta repeat
  Pfam annotation: Domain name=WD40; Domain location=238-277; Score =10.8; E_value=2.1; Accession=PF00400.24; Description=WD domain, G -beta repeat
  Pfam annotation: Domain name=WD40; Domain location=64-103; Score =28.0; E_value=3.7e-05; Accession=PF00400.24; Description=WD domain, G-beta repeat
  Pfam module annotation: Pfam domain module=WD40::WD40::WD40::WD40::WD4 0::WD40; Domain location=107-146::150-189::19-57::194-233::238 -277::64-103
GHLIVLDLAAAGPGPGAAPAPVFSFPTSDALFDCAWSESHESLCAAASGDGSVRLFDAALPPAQNPVRLLREHAREVHGLDWNPVRRDAFISASWDDTLKLWSPDRQASVRTFRGHEYCVYAAAWSARHPDVFASASGDRTARVWDVRDPAPTLILPAHDHEVLSLDWDKYDPSILATASVDKSIRVWDVRAPRAPITQLAGHGYAVKRVRFSPHRQGMLMSCSYDMTVCMWDYRAEDALLARYNHHTEFVAGIDMSVLVDGLLASTGWDEMVYIWPFGTDPRAM

SEQ ID NO: 78445 - protein, 313 aa, Setaria italica
  Transcript Sequence Number=SeqID_12471
  Gene Ontology: Mol. function=transporter activity; Cellular component= membrane; Biological process=sodium ion transport
  Homolog annotation: Hit_ID=Q768R2; Match level="QueryCoverage=99%, HitCoverage=56%, E-value=1e-142, Identity=84%"; Hit description =Plastidic general dicarboxylate transporter
  Pfam annotation: Domain name=Na_sulph_symp; Domain location=4-313; Score=146.2; E_value=1e-40; Accession=PF00939.11; Description =Sodium:sulfate symporter transmembrane region
  Subcellular localization annotation: CTP_CleavageSite=54; ConfidenceScore=5.15e-01
RRAGLVLGPLPVGAWAFLGLTATVATRTLPFTAAFGAFTNEVIWLIVISFFFARGFVKTGLGDRVATYFVKWLGRSTLGLSYGLAISEAFIAPAMPSTTARAGGVFLPIVKSLSLASGSKPNDPSAKKLGSYLVQSQLQASSNSSALFLTAAAQNLLCLKLAEELGVKIANPWVTWLKVASLPAIVGLLVTPYLLYKIFPPEIKDTPDAPALAAQKLKNMGPVTRNEWVMIGTMILAVSLWIFGEAIGVSSVVAAMIGLSILLLLGVLNWEDCLNEKSAWDTLAWFAILVGLAGQLTSVGIVSWMSNCVDQIV

SEQ ID NO: 78446 - protein, 131 aa, Setaria italica
  Transcript Sequence Number=SeqID_12472
  Gene Ontology: Mol. function=phosphoribosylaminoimidazolecarboxamide formyltransferase activity; Cellular component=chloroplast; Biological process=purine nucleotide biosynthetic process
  Homolog annotation: Hit_ID=Q8RWT5; Match level="QueryCoverage=49%, HitCoverage=10%, E-value=4e-22, Identity=80%"; Hit description =Putative phosphoribosylaminoimidazolecarboxamide formyltransferase
  Pfam annotation: Domain name=MGS; Domain location=83-131; Score=-7.4; E_value=0.024; Accession=PF02142.14; Description=MGS-like domain
  Subcellular localization annotation: CTP_CleavageSite=47; ConfidenceScore=5.40e-01
MPLHLLSSPAAAAKLAAGLRAAPLRRCHSFAPAPHHPDRVSLATSLSAAAAARSAGPAVVAAQTKLGVSGKKQVLISLSDKTDLAYLGNGLQGLGYSIISTGGTASSLEAAGVNVTKVEEITHFPEMLDGR

SEQ ID NO: 78447 - protein, 104 aa, Setaria italica
  Transcript Sequence Number=SeqID_12473
FIMERSKCDNSVRYVRIKFLSLNSPPDTSRIFVAKNVLQKYQHSCYLANFTISGNNIFSMDVHKSFKRSKIISLGMNMGLFIFQKMFMPTKFPSNSKSAPPCIT

SEQ ID NO: 78448 - protein, 72 aa, Setaria italica
  Transcript Sequence Number=SeqID_12474
CCCCCLGMHVNLQLHLHPYHLGREVVWLVAWLGREVVWLPASSLRISCKRLLVMRTHLLFDVRIPPSLLQKK

SEQ ID NO: 78449 - protein, 74 aa, Setaria italica
  Transcript Sequence Number=SeqID_12475
RLICLQIIQHSFQNFPDFRKRQVRGSCFYIIVIDAHKFIPTHKVPDDANYDLGYTTCKTTKAVIGGPLVDLDGN

SEQ ID NO: 78450 - protein, 80 aa, Setaria italica
  Transcript Sequence Number=SeqID_12476
VLFNWSCLSWGKFLLPTHKVPDDANYDLGYTTCKTTKAVIGGPLVDLDGKFVGINYYDIETGTPYLSFESGKFWKECWMI

SEQ ID NO: 78451 - protein, 194 aa, Setaria italica
  Transcript Sequence Number=SeqID_12477
  Gene Ontology: Mol. function=catalytic activity; Cellular component =nucleus; Biological process=ribosome biogenesis
  Homolog annotation: Hit_ID=Q8H7V4; Match level="QueryCoverage=99%, HitCoverage=11%, E-value=6e-31, Identity=39%"; Hit description =Putative polyprotein from transposon TNT
MQGGALFEFDGNFVGMNIFWNMKRPIFMPRDIIFDRLNDLWTSMEKILFPEMVKLARCANIFPVFLSMFAVAAFSHRKRSTSVELRSHPEGSMNVDTFEEHFGDKYPTGVWGEFKKEIYSNISDRVVALASFHDKSKFFACTGIFIDFYGCSIILTSASLVRDPDGANEIVSSLRIEVLLPNNKRTAGKLEHYN

SEQ ID NO: 78452 - protein, 119 aa, Setaria italica
  misc_feature (80)..(80): Xaa can be any naturally occurring amino acid
  Transcript Sequence Number=SeqID_12478
  Gene Ontology: Mol. function=catalytic activity; Cellular component =nucleus; Biological process=ribosome biogenesis
  Homolog annotation: Hit_ID=Q8H7V4; Match level="QueryCoverage=100%, HitCoverage=6%, E-value=5e-24, Identity=51%"; Hit description =Putative polyprotein from transposon TNT
MCCAFLQPCCPTNYYTMSRPPGSMNVDTFEEHFGDKYPTGVWGEFKKEIYSNISDRVVALASFHDKSKFFACTGIFIDFXGCSIILTSASLVRDPDGANEIVSSLRIEVLLPNNKRTAG

SEQ ID NO: 78453 - protein, 501 aa, Setaria italica
  Transcript Sequence Number=SeqID_12479
  Gene Ontology: Mol. function=catalytic activity; Cellular component =nucleus; Biological process=ribosome biogenesis
  Homolog annotation: Hit_ID=Q8H7V4; Match level="QueryCoverage=93%, HitCoverage=27%, E-value=3e-86, Identity=40%"; Hit description =Putative polyprotein from transposon TNT
MLPSKRGADDLTRFSTDSSIPGFWNELSDEIASKLSRSVVSIALSHGEYVLFASSGIAIECQSNFTKFVTSAALVRALDDERDVHDIEIKVRHEGHVAIGTVEEYDLDHVIAVVKVTPVLDVYCVPLSYAKELMPGSKVVAVGRDISGKLMARSGTLTASDRSEDSGHLMFSTCKLSEVMQGGALFEFDGNFVGMNIFWNMKRPIFMPRDIIFDRLNDLWTSMEKILFPEMVKLARKRSTSVELRSHPEGSMNVDTFEEHFGDKYPTGVWGEFKKEIYSNISDRVVALASFHDKSKFFACTGIFIDFYGCSIILTSASLVRDPDGANEIVSSLRIEVLLPNNKRTAGKLEHYNFQYNVALVRVKNYNVDGRGKLPMPEVVRYNQTVVAVGRCFESGLLMAASGKFIPTHKVPDDANYDLGYTTCKTTKAVIGGPLVDLDGKFVGINYYDIETGTPYLSFSEIWEILEGMLDDLKTNKATIGGHKARVGYDIEPQIIWVSPA

SEQ ID NO: 78454 - protein, 91 aa, Setaria italica
  Transcript Sequence Number=SeqID_12480
PVAVYVHLSTWFWILTSLNSSSLVILPAGHCEQVAATNETGDTAWWWGRGETGGGRGGGAAAELAAAAVASLSRGGGGGRSDGGGSGDWFS

SEQ ID NO: 78455 - protein, 72 aa, Setaria italica
  Transcript Sequence Number=SeqID_12481
EYARMSGEGSSDRSRASQKRHRSLSVTQDQFSDRYDPQNTYSDGVPLIDKLCDATEEAHHRRHHERKHGHHH

SEQ ID NO: 78456 - protein, 235 aa, Setaria italica
  misc_feature (157)..(157): Xaa can be any naturally occurring amino acid
  Transcript Sequence Number=SeqID_12482
  Homolog annotation: Hit_ID=Q7XKS8; Match level="QueryCoverage=91%, HitCoverage=36%, E-value=9e-20, Identity=34%"; Hit description =OSJNBa0038P21.3 protein
LNRRTKKVNRNPTEILRDIIDEHMEEIKQAGGIGCLVEGPADIAPNVLKSNSHGSTYQGSYDFSSSSSHDKAALGSRSSGCNKSPRSDSLGRFSSRSRDTRDSYKTSRYETHGKRYLSENENRWGVGSESEIDQKIMVIRRVSQTTVLNLVIVQHNXQRSSVTEYARMSGEGSSDRSRASQKRHRSLSVTQDQFSDRYDPQNTYSDGVPLIDKLCDATEEAHHRRHHERKHGHHH

SEQ ID NO: 78457 - protein, 64 aa, Setaria italica
  misc_feature (1)..(18): Xaa can be any naturally occurring amino acid
  Transcript Sequence Number=SeqID_12483
XXXXXXXXXXXXXXXXXXVEINNPVHLHYFECLSQQFKQSKKTSHLLHKVTVVLEQIVDCSKLA

SEQ ID NO: 78458 - protein, 376 aa, Setaria italica
  Transcript Sequence Number=SeqID_12484
  Homolog annotation: Hit_ID=Q25AI1; Match level="QueryCoverage=99%, HitCoverage=37%, E-value=1e-43, Identity=33%"; Hit description =H0702G05.12 protein
GRSICPKTVNLEKRNMQTPKQIMQKSQRQLPCNVTSPEHARTESSNRAIHVQEKQQEPGNEANHRENACTRLGDETIADNNNRRITRQLIDLNAMGAEKRQGLPNDATHQMRKEQSDSVIHRELDNQVTRVENEQPGHHRVHTRKRKGLMAASNSGLQLRRSRRLAKVSSAAIDRQPVIDDKLTESEPDEQWTASPGQCSPDPSDTDKIINNLSTSSSPLHEIRQTSSNELENLHSTPIPSSNPNMSNPEYFSSNPDMSDPKHFSSNPDMSDPEHFAHTYIPMDVRRALAKLSSKSLLHHMMSGPSSGESHLHDSMDSEGQKLQVASQNKGRRPRGLTLCLKLWTMPKGMRIPVSLNTSGLPIGKEAATLSSFLGT

SEQ ID NO: 78459 - protein, 71 aa, Setaria italica
  Transcript Sequence Number=SeqID_12485
KDSGFPKKQFLASPTKAKAANGKGGDGVAPLGDGFGDLKSKAEGEQQRAGFGPKSPDSCTRDESLLSLVVF

SEQ ID NO: 78460 - protein, 192 aa, Setaria italica
  misc_feature (30)..(30): Xaa can be any naturally occurring amino acid
  Transcript Sequence Number=SeqID_12486
  Gene Ontology: Mol. function=protein binding; Cellular component =plasma membrane
MGSCASVQNKDSGFPKKQFLASPTKAKAAXNGKGGDGVAPLGDGFGDLKSKAEGEQQRAGFGPKSPDSCSKDEVFFESRAWLDSDCEDDFYSVNGDFTPSRGSTPNYQPRMQTVMTNIFQLDNSDKSKSPEPSPTGRRKLAELLQEAMQNGPEERTDVSKNEKKQLQSVAADGKPVSESTSSSTCSSAGNST

SEQ ID NO: 78461 - protein, 262 aa, Setaria italica
  Transcript Sequence Number=SeqID_12487
  Gene Ontology: Mol. function=protein binding; Cellular component =plasma membrane
MGSCASVQNKDPGFPKKQFLASPTKAKAANGKGGGGGVAPLGDGFGDLKSKAEGEQQRVGFDPKSPDSGSKDEVFFESRAWLDSDCEDDFYSVNGGSKDEVFFESRAWLDSDCEDDFYSVNGDFTPSRGSTPNYQPRTQTVMTNIFQPDNSDKSKSPEPSPTGRRKLAELLQEAMQNGPEERTDVSKNEKQQLQSVAADGKPVSESTSSSACSTEPTPTVVAKSRKEKAWYSGRCCLPSFVHSLTLDESERGQKMSSRPCAI

SEQ ID NO: 78462 - protein, 182 aa, Setaria italica
  Transcript Sequence Number=SeqID_12488
  Gene Ontology: Mol. function=nucleic acid binding
  Homolog annotation: Hit_ID=Q6YYC0; Match level="QueryCoverage=69%, HitCoverage=16%, E-value=5e-30, Identity=52%"; Hit description=Zinc finger CCCH domain-containing protein 55
MAGDSRKQRSKWDAKEGPHDIVEISEDESLPDKTGGHRKGDVHPKPDTSMHHGGAGHEKEQADGFNKDTKELQPKAPSERPQLLRAADERDEWSKAAANQGMNRYADDRRRGDGWGTARNRGYSSRAPSDPDAWRPRSRSPSPRGVWNRSRRNRSRSRSRSRSRNRSRSRSRSIGRGRGRAE

SEQ ID NO: 78463 - protein, 139 aa, Setaria italica
  Transcript Sequence Number=SeqID_12489
  Subcellular localization annotation: CTP_CleavageSite=54; ConfidenceScore=5.06e-01
RSPRSPPPRRPAAETPPPPHAAAATALALALALRAIGRDPPRKWPSSSSPYSAGAASGGAEWRSARALTGAFARRWTVSGVRSHEFCQAIRRGLTYHLRDTAGYSFRKDFVNATFWSYWPFGLALKILASNYLKKQMKC

SEQ ID NO: 78464 - protein, 101 aa, Setaria italica
  Transcript Sequence Number=SeqID_12490
FVVTYRLLLCILMVKRSLLHVIISCMSLFVMGNLQKYYLLTDVLAPGRPIIFFIGRFVATLNNNYRNIKNQHLQHEDCNTFTCMKHLEPLRATFQNRHIAT

SEQ ID NO: 78465 - protein, 175 aa, Setaria italica
  misc_feature (14)..(14): Xaa can be any naturally occurring amino acid
  misc_feature (29)..(29): Xaa can be any naturally occurring amino acid
  Transcript Sequence Number=SeqID_12491
  Gene Ontology: Mol. function=protein serine/threonine kinase activity; Biological process=protein amino acid phosphorylation
  Homolog annotation: Hit_ID=Q84LF4; Match level="QueryCoverage=86%, HitCoverage=23%, E-value=4e-48, Identity=66%"; Hit description =Putative S_TKc, Serine/Threonine protein kinases, catalytic domain
HAPERTLSRSPSDXRDLPSSQSSQEDCMXFPLDDESSGQDESPVPESKSPMKSYGFPVGKRLDKTSGQSPSKHVGLFSRYVLGNNHAPSSQHHDHAGKKTKEGNVDQVQGRKGGYPEDSPMIDSLEFVDQEYVFVSGPEGSSSSTNASRQQNLPTKYDNSSVSPPKLTLLSSPMP

SEQ ID NO: 78466 - protein, 328 aa, Setaria italica
  Transcript Sequence Number=SeqID_12492
  Gene Ontology: Mol. function=protein serine/threonine kinase activity; Biological process=protein amino acid phosphorylation
  Homolog annotation: Hit_ID=Q84LF4; Match level="QueryCoverage=92%, HitCoverage=48%, E-value=1e-112, Identity=68%"; Hit description =Putative S_TKc, Serine/Threonine protein kinases, catalytic domain
AHSYYNYEYFVLNLLFLYFVNVDLQISDSLEFVDQEYVFVSGPEGSSSSTNASRQQNLPTKYDNSSVSPPKLTLLSSPMPINGLPINRQQSAGTGSLDSHCSPASGTSQGSADMSDAMDQPPSDHPARIRLLEQYASAISFLVKDEIKAGRHLEAFSIQLIVLATWKQAIHLCNTFVASTARDSPSQDIPMKGLSADAPHLLGNSQLADDACMQIERQFLSDVEYAEGLASTVGQIADGTEMPDAIEIIFQSALHIGRRGGVDEMFGKAADAMTGYTRAVSMLRFLLIEAPSLALNPPLTLTRSDRHRLRTYIEALNTRLGQMRSQRH

SEQ ID NO: 78467 - protein, 136 aa, Setaria italica
  Transcript Sequence Number=SeqID_12493
  Gene Ontology: Mol. function=protein serine/threonine kinase activity; Cellular component=cytoplasm; Biological process=protein amino acid phosphorylation
  Homolog annotation: Hit_ID=Q10NJ0; Match level="QueryCoverage=94%, HitCoverage=18%, E-value=3e-45, Identity=68%"; Hit description =Protein kinase domain containing protein, expressed
  Pfam annotation: Domain name=Pkinase; Domain location=4-136; Score= -50.8; E_value=1.8e-05; Accession=PF00069.17; Description=Protein kinase domain
  Pfam annotation: Domain name=Pkinase_Tyr; Domain location=4-136; Score=-92.1; E_value=1.3e-07; Accession=PF07714.9; Description =Protein tyrosine kinase
  Pfam module annotation: Pfam domain module=Pkinase::Pkinase_Tyr; Domain location=4-136::4-136
GEVTKLLRPIGSGAYSQVWLGRHRARGAEVAVKEIAMERLSSKLRESLLSEVDILRRIRHPNVIALHDSIKDHGRIYLILEYCRGGDLHGYLQRHKRVSGLVANPPIRPPASGLQMLRDNNVVHRDLKPQVILLDF

SEQ ID NO: 78468 - protein, 415 aa, Setaria italica
  misc_feature (166)..(166): Xaa can be any naturally occurring amino acid
  Transcript Sequence Number=SeqID_12494
  Gene Ontology: Mol. function=protein serine/threonine kinase activity; Cellular component=cytoplasm; Biological process=protein amino acid phosphorylation
  Homolog annotation: Hit_ID=Q10NJ0; Match level="QueryCoverage=90%, HitCoverage=54%, E-value=1e-170, Identity=74%"; Hit description =Protein kinase domain containing protein, expressed
  Pfam annotation: Domain name=Pkinase; Domain location=19-275; Score =335.0; E_value=1.5e-97; Accession=PF00069.17; Description=Protein kinase domain
  Pfam annotation: Domain name=Pkinase_Tyr; Domain location=19-255; Score=64.7; E_value=5e-18; Accession=PF07714.9; Description=Protein tyrosine kinase
  Pfam module annotation: Pfam domain module=Pkinase::Pkinase_Tyr; Domain location=19-275::19-255
DGASGRGGGGGGGRRVGEYELLRPIGSGAYSQVWLGRHRARGAEVAVKEIAMERLSSKLRESLLSEVDILRRIRHPNVIALHDSIKDHGRIYLILEYCRGGDLHGYLQRHKRVSETVAKHFIRQLASGLQMLRDNNVVHRDLKPQNILLVENNENSLLKIADFGFXKFLQPFALAETLCGSPLYMAPEVMQAQKYDAKADLWSVGVILYQLVTGIPPFNGDNQIQLLKNILRSREIQFPSDCELSHGCIDLCRKLLRLNSVERLTVEEFVHHPFLSEHAPERTLSRSPSDIRDLPSSQSSQEDCMPFPLDDESSGQDESPVPESKSPMKSYGFPVGKRLDKTSGQSPSKHVGLFSRYVLGNNHAPSSQHHDHAGKKTKEGNVDQVQGRKGGYPEGIVFGLDQRDHLPTNASRQQK

SEQ ID NO: 78469 - protein, 195 aa, Setaria italica
  Transcript Sequence Number=SeqID_12495
  Gene Ontology: Mol. function=transporter activity; Cellular component= membrane; Biological process=oligopeptide transport
  Homolog annotation: Hit_ID=B6TII9; Match level="QueryCoverage=76%, HitCoverage=27%, E-value=2e-36, Identity=48%"; Hit description =Peptide transporter PTR2
IADAFWGNYITILVSLTIYVLGMILVTTSAFLPTATVLGGGSVFGAHTVAFVGLYLVAIGSGGVRASLLPFGAEQFDDDNAVDRESKLSFFSWFYLCVDFGPIVSGLFIVWIQEKVSWGLGFGISTACIALAFGAFVLATPMFKRPMSTGKVSADAGMLDEVSDKVDIISESGFKDIAEEAGSSWNLRAMMQGEE

SEQ ID NO: 78470 - protein, 91 aa, Setaria italica
  Transcript Sequence Number=SeqID_12496
  Gene Ontology: Cellular component=chloroplast
  Homolog annotation: Hit_ID=Q8LCA1; Match level="QueryCoverage=85%, HitCoverage=44%, E-value=1e-19, Identity=50%"; Hit description =Thylakoid membrane phosphoprotein 14 kDa, chloroplastic
HVSLLALLLVQWDRIEDKYAVTTLAVAATLGMWSAGGVVSAIDRLPVVPGLMEAVGIGYSGWFAYRNLLFKSDRDAFFAKVREVYEDIISG

SEQ ID NO: 78471 - protein, 110 aa, Setaria italica
  Transcript Sequence Number=SeqID_12497
  Gene Ontology: Cellular component=chloroplast
  Homolog annotation: Hit_ID=Q8LCA1; Match level="QueryCoverage=78%, HitCoverage=49%, E-value=3e-20, Identity=46%"; Hit description =Thylakoid membrane phosphoprotein 14 kDa, chloroplastic
NVVAMAAGEPAAPNAANEEFTEFVNALKQEWDRIEDKYAVTTLAVAATLGMWSAGGVVSAIDRLPVVPGLMEAVGIGYSGWFAYRNLLFKSDRDAFFAKVREVYEDIISG

SEQ ID NO: 78472 - protein, 112 aa, Setaria italica
  Transcript Sequence Number=SeqID_12498
MRLSKYVVRKQKFGRAKALSTINYKIADMCGGLAFDFCPLAVICLSSAWAGHHDAEWDTWASHVLDDGFLSTPALKPLVQSLCLGFDDLPVQLRTCLLYCTIYPRRYKVDKG

SEQ ID NO: 78473 - protein, 142 aa, Setaria italica
  misc_feature (69)..(69): Xaa can be any naturally occurring amino acid
  Transcript Sequence Number=SeqID_12499
  Gene Ontology: Mol. function=metal ion binding
  Homolog annotation: Hit_ID=B6T6D5; Match level="QueryCoverage=85%, HitCoverage=47%, E-value=1e-60, Identity=89%"; Hit description =Protein binding protein
HKHAHADFALTDGFQDQGNPYWAMMHTNSYKYGYSAPGNYYSYAHVYDIDDYMHRADGGRRIWDNTAPXNNVDSANVVLQGGEAPRSTANSATEECIQQVHQSPGSPQVVWQDNIDPDNMTYEVSDFPAPIFCPCSHAGYLR

SEQ ID NO: 78474 - protein, 129 aa, Setaria italica
  misc_feature (82)..(82): Xaa can be any naturally occurring amino acid
  misc_feature (105)..(105): Xaa can be any naturally occurring amino acid
  Transcript Sequence Number=SeqID_12500
  Gene Ontology: Mol. function=triacylglycerol lipase activity; Biological process=lipid metabolic process
  Homolog annotation: Hit_ID=B6T3Y7; Match level="QueryCoverage=98%, HitCoverage=28%, E-value=3e-41, Identity=66%"; Hit description=Lipase
VNFGLKDVILMTFGQPRIGNAVFASNFKGHLPNAIRVTNAHDIVPHLPPYYRYFPQKTYHHFPREVCFLFVSLLSYITVSSXFIAHISSILFFQVWIHSVGLGSXVYSIEEICDGSGEDPACSRSVSKE

SEQ ID NO: 78475 - protein, 342 aa, Setaria italica
  Transcript Sequence Number=SeqID_12501
  Gene Ontology: Mol. function=triacylglycerol lipase activity; Biological process=lipid metabolic process
  Homolog annotation: Hit_ID=B6T3Y7; Match level="QueryCoverage=100%, HitCoverage=100%, E-value=1e-173, Identity=83%"; Hit description =Lipase
  Pfam annotation: Domain name=Lipase_3; Domain location=97-237; Score =132.6; E_value=1.2e-36; Accession=PF01764.17; Description=Lipase (class 3)
MEPRRWLAAAVLMCVLVLCGGRELKTKHAPIYDPALARTLAEYTSAVYTADLTQLFTWTCERCGDLTEGFEVIELIVDVKNCLQAYVGFARDMNAVIVVFRGTQENSIQNWIEDLFWKQLDLDYPGMPEAKVHSGFYSAYHNTTLRDGVVRGIQKTREVYGNIPIMVAGHSMGGAMASFCALDLVVNFGLKDVILMTFGQPRIGNAVFASNFKGHLPNAIRVTNAHDIVPHLPPYYRYFPQKTYHHFPREVWIHSVGLGSFVYSIEEICDGSGEDPACSRSVSGNSVQDHIHYLGISMHAESRGHCRIVTDDTSLQYKMDPNGNIVFSKQPGLSDDELHSAQ

SEQ ID NO: 78476 - protein, 133 aa, Setaria italica
  misc_feature (1)..(1): Xaa can be any naturally occurring amino acid
  misc_feature (10)..(10): Xaa can be any naturally occurring amino acid
  Transcript Sequence Number=SeqID_12502
  Gene Ontology: Mol. function=protein binding
  Homolog annotation: Hit_ID=Q9SSC7; Match level="QueryCoverage=84%, HitCoverage=47%, E-value=4e-14, Identity=43%"; Hit description =F18B13.20 protein
  Pfam annotation: Domain name=DUF567; Domain location=3-110; Score= -36.9; E_value=0.082; Accession=PF04525.4; Description=Protein of unknown function (DUF567)
XSRADGQKPXFSARRSLILGGAAAGAIVELLPPLSSSSGAPELLRVDGSFARRCCRVVAAPRAEGEKAKMVAEIKRKVDEGTRVVMGRDVFVLKVRPGFDAAFAMGIVLVLDQIAGDEVGADAGADVLDAKIW

SEQ ID NO: 78477 - protein, 45 aa, Setaria italica
  Transcript Sequence Number=SeqID_12503
  Pfam annotation: Domain name=ABA_WDS; Domain location=3-45; Score =26.8; E_value=8.7e-05; Accession=PF02496.8; Description=ABAWDS induced protein
LQHEKHKAKKDPENEHGHRIKEEVAAVAAVGSAGYAFHERHEKKD

SEQ ID NO: 78478 - protein, 58 aa, Setaria italica
  Transcript Sequence Number=SeqID_12504
VTCIEYTEFEKYGIPEPTVTAGSLQVSYPANTNILYVDLQAVEEVGSRKNASCLPGMV

SEQ ID NO: 78479 - protein, 136 aa, Setaria italica
  Transcript Sequence Number=SeqID_12505
  Gene Ontology: Mol. function=nucleotidyltransferase activity; Biological process=metabolic process
  Homolog annotation: Hit_ID=Q4VGM5; Match level="QueryCoverage=99%, HitCoverage=13%, E-value=1e-19, Identity=39%"; Hit description=Low photochemical bleaching 1 protein
LNLKKSVSYVDHLGFECSAAGGRLECTMQNIADNFMNTYNYKCSKGIESELDTFIVYNERKRVTSSAKKKLKSEGRSLHQTPEGSLLDIMRNAHDLLSGCSIDVPMVKDNSEYLHFLVPLPIFLHPALGPFWDIIH

SEQ ID NO: 78480 - protein, 457 aa, Setaria italica
  Transcript Sequence Number=SeqID_12506
  Gene Ontology: Mol. function=nucleotidyltransferase activity; Biological process=metabolic process
  Homolog annotation: Hit_ID=Q4VGM5; Match level="QueryCoverage=90%, HitCoverage=44%, E-value=1e-110, Identity=47%"; Hit description=Low photochemical bleaching 1 protein
LLKFLSDVEEFYDCIGGIIGYQIMALELLSASKDRMHRPSKDKFVDFHVPSGLNLLEDTEYASQAALWGIKGLPELGEIYPIGGAGDRLGLVDSDTGESLPAALLPYCGRSLLEGLIRDLQAREFLHFKIFGHQCITPVAIMTSSVKNNHEHIITICEKLDWFGRGRDNFRLFEQPLVPVVNSEDGKWLISKSLFPVGKPGGHGAIWKLAYDRGIFQWLQRRGRKGATVRQVSNVVAATDLTMMALAGIGLRCNKKLGFASCERRPGATEGVNVLIEKQNHEGLWSYGITCIEYTEFEKYGIPEPTVTAGSLQVSYPANTNILYVDLQAVEEVGSRKNASCLPGMVLNLKKSVSYVDHLGFECSAAGGRLECTMQNIADNFMNTYNYKCSKGIESELDTFIVYNERKRATSSAKKKLKSEGRSLHQVNVLLCEQCIDHMLSHAGLQIRDDDLLSVLL

SEQ ID NO: 78481 - protein, 248 aa, Setaria italica
  Transcript Sequence Number=SeqID_12507
  Gene Ontology: Mol. function=nucleotidyltransferase activity; Biological process=metabolic process
  Homolog annotation: Hit_ID=Q4VGM5; Match level="QueryCoverage=97%, HitCoverage=31%, E-value=1e-24, Identity=43%"; Hit description=Low photochemical bleaching 1 protein
MKGKEVTSSAKKKLKSEGRSLHQTPEGSLLDIMRNAHDLLSGCSIDVPMVKDNSEYLHSGPPFLIFLHPALGPFWDIIHQKFIGGSISKGSELQIEVAEFLWKNVELDGSLIILADNIMGSTKKNKNGEQILHYGARCGRCRLQNVKIVNEGINWISPSNVYWKHDVERSESVKIILHGNAEFEAKDVVLKGNHVFEVPDGQRMCIIQDRAGFVVNLDPISEDMMDSGTWHWKYTVDGAHVKLNLIEL

SEQ ID NO: 78482 - protein, 146 aa, Setaria italica
  Transcript Sequence Number=SeqID_12508
  Gene Ontology: Mol. function=electron carrier activity; Biological process=metabolic process
  Homolog annotation: Hit_ID=C1TCP7; Match level="QueryCoverage=91%, HitCoverage=22%, E-value=8e-28, Identity=43%"; Hit description=FAD -dependent dehydrogenase
VDGKPHLGTDKLVPLLRNFRHYLKELGVTIRFNARVDDLIVEEGQVKGIVVSDSELRPGSGSQKLSFDAVVLAVGHSARDTYNMLQQHNVDISPKSFAVGLRIEHPQELINSIQYSELAAEVQKGRGRIPVADYKIVKSLGEIDAG

SEQ ID NO: 78483 - protein, 72 aa, Setaria italica
  Transcript Sequence Number=SeqID_12509
  Gene Ontology: Cellular component=plasma membrane
  Homolog annotation: Hit_ID=Q53M64; Match level="QueryCoverage=90%, HitCoverage=20%, E-value=1e-15, Identity=70%"; Hit description =Similar to SAC domain protein 7
DASLEAKSFRLAFALVLVAVSFMIISLRQARNDARHLVLSLMWAGLCIGISRYVRTNGRMFCNRPRFYQSRH

SEQ ID NO: 78484 - protein, 78 aa, Setaria italica
  Transcript Sequence Number=SeqID_12510
  Gene Ontology: Cellular component=plasma membrane
  Homolog annotation: Hit_ID=Q53M64; Match level="QueryCoverage=83%, HitCoverage=20%, E-value=2e-15, Identity=70%"; Hit description =Similar to SAC domain protein 7
FRCSTIILRFALQSFRLAFALVLVAVSFMIISLRQARNDARHLVLSLMWAGLCIGISRYVRTNGRMFCNRPRFYQSRH

SEQ ID NO: 78485 - protein, 96 aa, Setaria italica
  Transcript Sequence Number=SeqID_12511
  Gene Ontology: Mol. function=fumarylacetoacetase activity; Cellular component=cytosol; Biological process=aromatic amino acid family metabolic process
  Homolog annotation: Hit_ID=B6T3P4; Match level="QueryCoverage=87%, HitCoverage=19%, E-value=8e-35, Identity=88%"; Hit description =Fumarylacetoacetase
PRLGISLALQSFIKARETIPLGPFLGKSFSTTISPWIVTLDALKPFTCEAPKQEPEPLPYLAEKNIIDYDIPLEVWIKPKDQSDASIVAKTNFKHL

SEQ ID NO: 78486 - protein, 101 aa, Setaria italica
  misc_feature (14)..(14): Xaa can be any naturally occurring amino acid
  Transcript Sequence Number=SeqID_12512
MPSGSGSRGRRAGXRAAAPPVVQVSSSGSGEEEGPSEEEEEEESEGSSEGARRRDGGGGKARVSATEGEAAASGGDAEGPNLPSCPICMIAWTADGAHRVR

SEQ ID NO: 78487 - protein, 53 aa, Setaria italica
  Transcript Sequence Number=SeqID_12513
CVPHIVNSDFKPLHCSSHLGCTPSVPVYKAHTHIKIQSFQSLTNNLANIFFIL

SEQ ID NO: 78488 - protein, 728 aa, Setaria italica
  misc_feature (244)..(244): Xaa can be any naturally occurring amino acid
  Transcript Sequence Number=SeqID_12514
  Gene Ontology: Cellular component=membrane; Biological process =intracellular protein transmembrane transport
  Homolog annotation: Hit_ID=A2A1E8; Match level="QueryCoverage=99%, HitCoverage=100%, E-value=0.0, Identity=57%"; Hit description =Nucleoporin
  Pfam annotation: Domain name=Nucleopor_Nup85; Domain location=91-688; Score=832.7; E_value=2.2e-247; Accession=PF07575.5; Description=Nup85 Nucleoporin
MPGMPTDGGGAIVPFRGEPGQGAPSPPPLRPIRHGVAPPIFRVYINWSSGNLLQVACLRPPNSEGCGGVEVAGSVVEVNLGSGGNGGAEVEEEIDEAEMRRIEYGSVPAFALLQSRKNALADAAAMSRMSSVPDYAEWWQYVLEYSKTIGNLLGNPDSPPAFMIEDPKTILKVREKPTSLRAAWELLEIFYVDKQLQSWLPERLVDWLADFDSLLSATESTVYSKLSNFQKKLINLQIVEDDPXYWNGLSAALSVGWLDIVVNMLRFHGSYQLDQMDNRETENGLVEAVAVLVSTMPRLRPNLPTGKLGQCCKTRPDFVKAWEKWRGQVTKLECSAFWIQCGHQKTRDGLKNLLHIMMGNIKELTASTSHWLELFASHFLYIRPFTVGFEGMHHLAQKCIQLKPSSSTTGLTGLVIGVLSENPEVVLAECTKHFGPWLVTHAMELLTADNDYADTMLHEERPNLGGISIEELHRLVYAQVLCSHSLTWQIAPTYLSSCLNQGLGLLEILLLKQPIQDNRLVLKTLEICRLYELDNISTNIMKVAGIYHWKHGRKGVGVYWFQQAHDKVRLDRIAQQLFEHIGKSVADDSFKQWEGLLELLGSDIGSAGGLEFLHRYRDFKRSLHQALDGRSGEAARQTVDFLIQLMRNPSTPQRFWLPLLHDSMELLNCKPSPLMNVAETNLLLNKLQELSLAKLRPDFSNNHLPSHALGSVRLALASNLARAILEDP

SEQ ID NO: 78489 - protein, 121 aa, Setaria italica
  misc_feature (19)..(19): Xaa can be any naturally occurring amino acid
  misc_feature (55)..(55): Xaa can be any naturally occurring amino acid
  misc_feature (108)..(108): Xaa can be any naturally occurring amino acid
  Transcript Sequence Number=SeqID_12515
  Gene Ontology: Mol. function=RNA-directed DNA polymerase activity; Biological process=RNA-dependent DNA replication
  Homolog annotation: Hit_ID=Q8H044; Match level="QueryCoverage=93%, HitCoverage=7%, E-value=1e-31, Identity=64%"; Hit description =Putative reverse transcriptase
QFISNIDFDKGCNFAAYVXPLEEDTPLQRAEWIKYLGTFTNSEDRANAVYDAIKXNYLCLSKAAANLSTRFKPIVAWIEYTHGMWTFVKDNYALQYITDAGAEIVDAXTITNKRFNSSDPE

SEQ ID NO: 78490 - protein, 96 aa, Setaria italica
  Transcript Sequence Number=SeqID_12516
  Gene Ontology: Mol. function=acetylglucosaminyltransferase activity; Cellular component=membrane
  Homolog annotation: Hit_ID=B4F8V3; Match level="QueryCoverage=100%, HitCoverage=22%, E-value=9e-47, Identity=88%"; Hit description=BGGP Beta-1-3-galactosyl-O-glycosyl-glycoprotein
SREHYGQMVDSGAPFARPFRENDPLLDQIDGNILKRWSRGPVPGAWCSGTKRWFSDPCSQWGNVNIVRPGPQAVKLHQYVNQTLEEAKSRSNSCRR

SEQ ID NO: 78491 - protein, 77 aa, Setaria italica
  Transcript Sequence Number=SeqID_12517
MAAEEHAPCTKPRPDKAKKRKKPKKDKWGQPLSAAAAEEDPSVGPEQEPPAVGAEESAAAAAAAGAEESEAAAAAAG

SEQ ID NO: 78492 - protein, 185 aa, Setaria italica
  Transcript Sequence Number=SeqID_12518
  Gene Ontology: Mol. function=hydrolase activity; Cellular component =anchored to membrane; Biological process=carbohydrate metabolic process
  Homolog annotation: Hit_ID=B6SMZ3; Match level="QueryCoverage=47%, HitCoverage=44%, E-value=2e-38, Identity=86%"; Hit description =Glucan endo-1,3-beta-glucosidase 4
  Pfam annotation: Domain name=X8; Domain location=22-108; Score=140.6; E_value=5e-39; Accession=PF07983.5; Description=X8 domain
MEVALALAAAVLLLSSTLAASEFCVCRSDQPTTVLQKAIDFSCGPQGNADCSAILLGGGCYNPNTVAAHCSWAANSYYQNNKAKGATCDFDGAATISTTDPSFSGCTFPSSASASGTTAGTTTVGGATTGTLSPGVGTGFNGTSTGMGSSLGPTGTMDGAAAGLLPGAQLAAFLAAAILSFLALH

SEQ ID NO: 78493 - protein, 189 aa, Setaria italica
  Transcript Sequence Number=SeqID_12519
  Gene Ontology: Mol. function=hydrolase activity
  Homolog annotation: Hit_ID=B6T2L0; Match level="QueryCoverage=48%, HitCoverage=46%, E-value=9e-44, Identity=91%"; Hit description =Glucan endo-1,3-beta-glucosidase 3
  Pfam annotation: Domain name=X8; Domain location=20-104; Score=151.9; E_value=2e-42; Accession=PF07983.5; Description=X8 domain
MKALVVAVVLLLSSSLVASQWCVCKQDAPQASMQKTIDYACGSGADCNSIHENGGCYNPNTVAAHCSWAANSYYQNNKAKGATCDFTGTATLTTSDPSSSGCSYPTSASAVGTMTPTTGGTMGGTPGTFTPGAGTTSTGMGTGTTTGTTGAGLGLGPAGTGMDTAAASLLPSAGVAAVLTVLLSAIAFA

SEQ ID NO: 78494 - protein, 80 aa, Setaria italica
  misc_feature (54)..(54): Xaa can be any naturally occurring amino acid
  Transcript Sequence Number=SeqID_12520
  Gene Ontology: Mol. function=cysteine protease inhibitor activity
  Homolog annotation: Hit_ID=Q4FZ48; Match level="QueryCoverage=85%, HitCoverage=39%, E-value=3e-18, Identity=61%"; Hit description =Putative cystatin
  Pfam annotation: Domain name=Cystatin; Domain location=1-78; Score =13.1; E_value=0.0069; Accession=PF00031.13; Description=Cystatin domain
GFYFLFLGLRWAVAEHNAKTGEKLQFRKVVRGQQQVVAGMNYMLDVETKEPSRXYGAFVFDPLPNSSEKRQLKYFKPLIG

SEQ ID NO: 78495 - protein, 147 aa, Setaria italica
  misc_feature (27)..(27): Xaa can be any naturally occurring amino acid
  Transcript Sequence Number=SeqID_12521
  Gene Ontology: Mol. function=oxidoreductase activity, acting on the CH-OH group of donors, NAD or NADP as acceptor; Cellular component =chloroplast; Biological process=L-serine biosynthetic process
  Homolog annotation: Hit_ID=B6SKK1; Match level="QueryCoverage=98%, HitCoverage=23%, E-value=9e-69, Identity=90%"; Hit description=D-3 -phosphoglycerate dehydrogenase
GALRGELAATAVNAPMVPAEVMSELLXLRSLAEKLGRLAVQLVAGESGIKGVKVVYTTARGPDDLDTRLLRAMVTKGLVEPVSSTFVNLVNADYTAKQRGLRITEERVSHDSPTAEAPLESIQVRLSQVQSKFASAISDGGDLSVPC

SEQ ID NO: 78496 - protein, 127 aa, Setaria italica
  Transcript Sequence Number=SeqID_12522
  Gene Ontology: Mol. function=oxidoreductase activity, acting on the CH-OH group of donors, NAD or NADP as acceptor; Cellular component =chloroplast; Biological process=L-serine biosynthetic process
  Homolog annotation: Hit_ID=B6SKK1; Match level="QueryCoverage=85%, HitCoverage=17%, E-value=2e-54, Identity=93%"; Hit description=D-3 -phosphoglycerate dehydrogenase
VNADYTAKQRGLRITGGRPVSSTFVNLVNADYTAKQRGLRITEERVSHDSPTAEAPLESIQVRLSQVQSKFASAISDGGDIVLEGRVKYGVPHLTLVGPYEVDVSLEGNLILCRQIDQPGMIGKVGN

SEQ ID NO: 78497 - protein, 88 aa, Setaria italica
  Transcript Sequence Number=SeqID_12523
  Gene Ontology: Mol. function=methyltransferase activity
  Homolog annotation: Hit_ID=B6TJD2; Match level="QueryCoverage=90%, HitCoverage=23%, E-value=1e-26, Identity=78%"; Hit description =Arginine N-methyltransferase 2
AGGHAAVARLLLECGAPWNALSPSGLSAGDLASEPDTYDLLLDHALRSELILGTVARRQAAPANASDSAPAESYLESRVSFSEERVMD

SEQ ID NO: 78498 - protein, 411 aa, Setaria italica
  Transcript Sequence Number=SeqID_12524
  Gene Ontology: Mol. function=serine-type carboxypeptidase activity; Cellular component=extracellular region; Biological process =proteolysis
  Homolog annotation: Hit_ID=B6TKD2; Match level="QueryCoverage=99%, HitCoverage=86%, E-value=0.0, Identity=94%"; Hit description=Serine carboxypeptidase K10B2.2
  Pfam annotation: Domain name=Peptidase_S10; Domain location=1-403; Score=519.1; E_value=5.5e-153; Accession=PF00450.14; Description =Serine carboxypeptidase
DAGKRSLFYYFAEAEADPAAKPLVLWLNGGPGCSSVGVGAFSENGPFRPSGNVLVRNEYSWNKEANMLYLESPAGVGFSYSTDPSFYQGVGDSMTARDNLKFLQGWFAKFPQYKGRDLYITGESYAGHYVPQLAQRMVEFNKKEKLFNLKGIALGNPVLEFSTDFNSRAEFFWSHGLISDSTYNIFTTVCNYSRYVSEYYHGSLSASCDRVMSQVTRETSRFVDKYDVTLDVCISSVLMQSQILSPQQGSRELDVCVEDETMSYLNRKDVQQAMHARLSGGVQRWTVCSSVLEYKQLDLQIPTINTVGALVKSGIPVLVYSGDQDSVIPLTGSRTLVSRLASRLRLNATAPYRAWFQGKQVGGWTRVFGGGALSFATVRGASHEAPFSQPERSLGLFRAFLAGRPLPEFVS

SEQ ID NO: 78499 - protein, 873 aa, Setaria italica
  misc_feature (571)..(571): Xaa can be any naturally occurring amino acid
  Transcript Sequence Number=SeqID_12525
  Gene Ontology: Mol. function=zinc ion binding
  Homolog annotation: Hit_ID=B9RYP2; Match level="QueryCoverage=93%, HitCoverage=85%, E-value=0.0, Identity=51%"; Hit description =Transcription factor, putative
  Pfam annotation: Domain name=PB1; Domain location=779-861; Score =87.8; E_value=3.7e-23; Accession=PF00564.16; Description=PB1 domain
  Pfam annotation: Domain name=RWP-RK; Domain location=525-577; Score =100.3; E_value=6.5e-27; Accession=PF02042.7; Description=RWP-RK domain
  Pfam module annotation: Pfam domain module=PB1::RWP-RK; Domain location=779-861::525-577
RHLLPLEAPQAPEAAVAAAVVEEVQRARSGNSDTTSKRVEQINPKWQFHLSLDGDGTDNSSLFKERLTQALRYFKESTDQHLLVQVWAPVKNGDRYVLTTSGQPFVLDHQSIGLIQYRAVSMMYMFSVDGGNVGELGLPGRVYKLKVPEWTPNVQYYSSTEYPRLNHAISYNVHGTVALPVFDPSAQSCIAVVELIMTSKKINYACEVDKVCKALEAVNLKSTEILDHPNVQICNEGRQTALVEILEILTVVCEEHKLPLAQTWVPCKYRSVLAHGGGLKKSCLSFDGSCMGEVCMSTSDVAFHVIDAHMWGFRDACVEHHLQRGQGVSGNAFITRKPCFSKDIRKFCKIKYPLVHYARMFGLAGCLAICLQSSYTGHDDYILEFFLPPDCIDEDEQNALLESIFTLMKQCLRSLKVVGDADSSWVSLQLSNVLKIENEELKTDAQFDNSDGSLNGSPEGDTHGGDHKFDNGNKKVSDMPEGHLLADDYSQDNGTSASRPNGSGASDSSVLHKTNKPTERRRGKAEKTISLEVLQQYFSGSLKNAAKSLGVCPTTMKRICRQHGISRWPSXRKINKVNRSLSKLKQVIESVQGSDAAFNLTSITGPLPIPVGPSSDSHNVEKVTQSKVAEPSNLAVDGDRDSSLQRSLENDGHFGIHMAQQGFIDNNNDAQLEADKASHSRSSSGEGSINSRTSEGSCQGSPANRTFVCKPIASTFAEPQLNPEEFHKEPFQEPQLPLSRMLIEDSGSSKDLKNLFTPAADQPFLAPPSNLVSMKHSGTVTIKASFKEDIVRFRFPCSGSVTVLKDEVAKRLRMDVGTFDIKYLDDDHEWVKLACNADLEECMEISRNSGSHVIRLLVSDITAHFGSSCGSSG

SEQ ID NO: 78500 - protein, 313 aa, Setaria italica
  Transcript Sequence Number=SeqID_12526
  Gene Ontology: Mol. function=hydrolase activity, acting on acid anhydrides, in phosphorus-containing anhydrides
  Homolog annotation: Hit_ID=B9S2H8; Match level="QueryCoverage=97%, HitCoverage=26%, E-value=1e-115, Identity=64%"; Hit description =Helicase, putative
  Pfam annotation: Domain name=DSHCT; Domain location=180-313; Score= -33.7; E_value=8e-07; Accession=PF08148.4; Description=DSHCT (NUC185) domain
WGTTYCPSYYVALSSDNSWYLFTEKWIKTVYKTGLPAVPSVEGGTLPRETLKQLLLREEMMWDKLAKSEYGSLLSMDGSLDTWSWSLNVPVLNSLSEDDEVERFSQEHQDAVECYKQQRRKVSHLKKTIKSTKGFKEFQKIIDMRNFTKEKIERLEARSRRLTRRIKQIEPTGWKEFLQISKVIQEARALDINTQVIYPLGETAAAIRGENELWLAMVLRNKVLLDLKPSQLAAVCGSLVSEVIKLRPWKNSSYVYEPSSVATGVISYLEEQRNSLIDLQEKHNVKIPCEIDAQFAGMVEAWASGLTWREINE

SEQ ID NO: 78501 - protein, 82 aa, Setaria italica
  Transcript Sequence Number=SeqID_12527
  Subcellular localization annotation: CTP_CleavageSite=55; ConfidenceScore=5.36e-01
NFAISSIGMDSVFFGSWSGALSWDGAPGFCWEVVVVVSVLFPACCDSSAMRIFCSSSRLRAVRQRMLELCCKSAGLPFTSRS

SEQ ID NO: 78502 - protein, 63 aa, Setaria italica
  Transcript Sequence Number=SeqID_12528
  Gene Ontology: Mol. function=heat shock protein binding; Biological process=protein folding
  Homolog annotation: Hit_ID=Q4VRW3; Match level="QueryCoverage=100%, HitCoverage=39%, E-value=7e-15, Identity=61%"; Hit description =Putative BY-2 cell cycle-related protein (Fragment)
  Pfam annotation: Domain name=DnaJ; Domain location=4-63; Score=116.9; E_value=6.4e-32; Accession=PF00226.23; Description=DnaJ domain
MGTDYYNVLKVNRNATEEDLKKSYRRLAMKWHPDKNPGDAKEEAEAKFKKISEAYEVLSDPQK

SEQ ID NO: 78503 - protein, 263 aa, Setaria italica
  Transcript Sequence Number=SeqID_12529
  Subcellular localization annotation: CTP_CleavageSite=74; ConfidenceScore=5.61e-01
PGAEQAKFSPPPTHYASPTPSPPTFGYLHSRFSGETAPMSIPQVGGGRGPVHHRNMSEPTRAFMFPPPSPKSVRGEAGMQESPTEANRSFKRADGIRMGDLYANLPSGSKIKDSRDESGRFSGVFSSSGSPRLGFSRSSSRLSMQDDTDDADFPFAVDDVDPDSRPGSSSGKDVGDQAGSSSHKSQDAAVGYLVHLLKSARPLRDSSYSTHTSRAESIEAGSTSSFMSRRTSDALEELESFREIKENLLARSRSRLQDSLDKP

SEQ ID NO: 78504 - protein, 71 aa, Setaria italica
  Transcript Sequence Number=SeqID_12530
ELLQVHSCWGLIRVAFSLSGKVSTDFRLERDGKPTAIAEVDYCLSHWQRSKLDNAKIRAAINSGSTSHMSS

SEQ ID NO: 78505 - protein, 110 aa, Setaria italica
  Transcript Sequence Number=SeqID_12531
GPREPPPPVRRRHGPGAALLHPTAGHHGRRPRRGCRHPLLQVGSQRRLLRAPQGVNRGGDGYSDGRPSPRWLAVCRQIILGCFCIGVQPPRHLPTNLSLSLKPIQVSGVL

SEQ ID NO: 78506 - protein, 43 aa, Setaria italica
  Transcript Sequence Number=SeqID_12532
KQGEKSYLYHPLQSKQYPEANLLMQAISHLSSNFTILTVDQSQ

SEQ ID NO: 78507 - protein, 41 aa, Setaria italica
  Transcript Sequence Number=SeqID_12533
WVVLTLYHPLQSKQYPEANLLMQAISHLSSNFTILTVDQSQ

SEQ ID NO: 78508 - protein, 66 aa, Setaria italica
  Transcript Sequence Number=SeqID_12534
  Gene Ontology: Mol. function=nucleic acid binding; Cellular component= ribonucleoprotein complex; Biological process=mRNA processing
  Homolog annotation: Hit_ID=B6T531; Match level="QueryCoverage=69%, HitCoverage=17%, E-value=1e-12, Identity=76%"; Hit description =Ribonucleoprotein A
LCIQGQHYPLSREQSSPGGSRGEADRGYICNLSWSVNNLALANLFNKQGEVLEARFIYDRESGRSR

SEQ ID NO: 78509 - protein, 135 aa, Setaria italica
  Transcript Sequence Number=SeqID_12535
  Gene Ontology: Mol. function=hydrolase activity; Biological process =lipid catabolic process
  Homolog annotation: Hit_ID=B6TPQ5; Match level="QueryCoverage=85%, HitCoverage=28%, E-value=7e-14, Identity=40%"; Hit description =Patatin-like protein 3
AISAACAGVAAMGNPAAAAITHVLHNKQEFPLATGVDDLLVLSIGAGAGASASVPGGSNTPMPTRSPSPRELARVTAAGVADMVDESVAMAFGHTCGSSYVRIQAGRAPTPLHADNAAAAAGAMLAQRNVESVLF

SEQ ID NO: 78510 - protein, 174 aa, Setaria italica
  misc_feature (154)..(154): Xaa can be any naturally occurring amino acid
  Transcript Sequence Number=SeqID_12536
  Gene Ontology: Mol. function=structural constituent of ribosome; Cellular component=ribonucleoprotein complex; Biological process =metabolic process
  Homolog annotation: Hit_ID=Q5JMT5; Match level="QueryCoverage=60%, HitCoverage=20%, E-value=2e-41, Identity=82%"; Hit description=CBS domain-containing protein-like
  Pfam annotation: Domain name=CBS; Domain location=79-174; Score=10.5; E_value=0.011; Accession=PF00571.20; Description=CBS domain
  Subcellular localization annotation: CTP_CleavageSite=52; ConfidenceScore=5.42e-01
NPPAASIATSPCCRLPILLLLRGSPQLAEAMSTRSASRTRRPPRRAPSPPPPAAANGKAAAASKPTSPVHPSLERTVKKLRLTRALTLPEATAVSEACRRMAAKRVDAALLTDANGMLSGILTAEDIAGRVIAEGLNPEETSVVKVMTRNPVFXMSNSSAIEALQKMVPRVFLL

SEQ ID NO: 78511 - protein, 148 aa, Setaria italica
  Transcript Sequence Number=SeqID_12537
LPVYREYDDEDLFETSSSISGDSDGEDQFSDGEGAGALDHQFMQQAASSPAQQSVRRLNSDSLYDLSSMMAQLPVKKGLSKFYDGKSQSFACMSEVRCLEDLRKKETPYKKIKPSRSYLALDEEQECHMPGPNSRGIAKKPTGKNVSK

SEQ ID NO: 78512 - protein, 183 aa, Setaria italica
  Transcript Sequence Number=SeqID_12538
MGGFSGATGLPVYREYDDEDLFETSSSISGDSDGEDQFSDGEGAGALDHQFMQQAASSPAQQSVRRLNSDSLYDLSSMMAQLPVKKGLSKFYDGKSQSFACMSEVRCLEDLRKKETPYKKIKPSRSYLALDEEQECHMPGPNSRGIAKKPSGGSCANLASRNNSNNMLYRPPPIPVNKGGYHQ

SEQ ID NO: 78513 - protein, 193 aa, Setaria italica
  misc_feature (39)..(39): Xaa can be any naturally occurring amino acid
  Transcript Sequence Number=SeqID_12539
  Gene Ontology: Mol. function=transporter activity; Cellular component= plasma membrane; Biological process=transport
  Homolog annotation: Hit_ID=Q38JE6; Match level="QueryCoverage=99%, HitCoverage=95%, E-value=1e-101, Identity=93%"; Hit description =Temperature-induced lipocalin-1
  Pfam annotation: Domain name=Lipocalin; Domain location=24-169; Score= 4.3; E_value=0.014; Accession=PF00061.15; Description=Lipocalin cytosolic fatty-acid binding
  Pfam annotation: Domain name=Lipocalin_2; Domain location=18-167; Score=265.8; E_value=9.8e-77; Accession=PF08212.4; Description =Lipocalin-like domain
  Pfam module annotation: Pfam domain module=Lipocalin::Lipocalin_2; Domain location=24-169::18-167
MAAAKKSGGGEMTVVRGLDVARYMGRWYEIASFPSFFQXPRDGRDTRATYKLLEDGATVHVLNETWSKGKRDYIEGTAYKADPSSDEAKLKVKFYLPPFLPIIPVVGDYWVLYVDDDYQYALVGEPRRKNLWILCRKTSIEEEVYSQLVERAKEEGYDVSKLHRTPQQDPPPESDAAPTDTKGVWWFKSLFGK

SEQ ID NO: 78514 - protein, 89 aa, Setaria italica
  Transcript Sequence Number=SeqID_12540
  Gene Ontology: Mol. function=RNA binding; Cellular component=nucleolus
  Homolog annotation: Hit_ID=B9RTB1; Match level="QueryCoverage=89%, HitCoverage=13%, E-value=1e-19, Identity=54%"; Hit description =Protein penguin, putative
MVLFANLKVAVGGKDNVLEGVTDRIHMLHDAIASDAAQPKTEDIEHAFENFFSSRVIRRMIIDCPAFAVTLWRKALKGKCKIWAEGHRY

SEQ ID NO: 78515 - protein, 666 aa, Setaria italica
  Transcript Sequence Number=SeqID_12541
  Gene Ontology: Mol. function=RNA binding; Cellular component =nucleolus; Biological process=regulation of transcription, mating -type specific
  Homolog annotation: Hit_ID=B9RTB1; Match level="QueryCoverage=90%, HitCoverage=89%, E-value=1e-159, Identity=48%"; Hit description =Protein penguin, putative
  Pfam annotation: Domain name=PUF; Domain location=120-154; Score=6.9; E_value=2.1; Accession=PF00806.11; Description=Pumilio-family RNA binding repeat
  Pfam annotation: Domain name=PUF; Domain location=156-190; Score=8.2; E_value=1.5; Accession=PF00806.11; Description=Pumilio-family RNA binding repeat
  Pfam annotation: Domain name=PUF; Domain location=192-226; Score =15.6; E_value=0.19; Accession=PF00806.11; Description=Pumilio-family RNA binding repeat
  Pfam annotation: Domain name=PUF; Domain location=376-411; Score=3.2; E_value=5.7; Accession=PF00806.11; Description=Pumilio-family RNA binding repeat
  Pfam module annotation: Pfam domain module=PUF::PUF::PUF::PUF; Domain location=120-154::156-190::192-226::376-411
MAGAGSDLQSPKKRKREHAEGKIKPRPQVKGGGDGAKRKKHPGAGGYAAHGGAGEAPAKKRPVTPKEKRLAAKEMSEARKMKRKRHYSLEKELAKLWEKMRCHDVSKEERSKLVSQAIRKMDGKYLDIAGSHVTARVLQTCVKWCSQSERDAIFDDLQPHLLTLSRKKYAVFLVKKLIELATKKQFASFISSLHGHVAKLLPHTIGAAVVDYAFQRATPPQKRQLLLELYSTELQLFKDLTVQSSFSLLETISKLGLQKSSVLQYMTIEIQKILEKGTVEYSIVHTAILEYFTIADKTSAMDVIHQLIPLLTQGASIIDGDEPSIATELPNKTKAKKKRLSEPLIVRIMQTREGLKLAISCLKHGSAKDRKKIIKSLKGQIMKLALNDFGCLFLISIISIVDDTKLVSKIVIQELAKHLKELIFDKNGRRPLLQLLHPLCSRYLSPADLACLSYNVPSLSAKEGEASEGATEVISENKVDAMTDKEPDDLEGMQIVSESKKDPSRRRHELLIKSDLAEALVQSCIENVGELLRSNFGKELLYEVAVGGKDNVLEGVTDRIHMLHDAIASDAAQPKTEDIEHAFENFFSSRVIRRMIIDCPAFAVTLWRKALKGKCKIWAEGHSSKVVAAFLESPSSEVRNLAKPELQPLIDTGILKVPDHKGAVEK

SEQ ID NO: 78516 - protein, 111 aa, Setaria italica
  Transcript Sequence Number=SeqID_12542
MNTRPVVLVLLLLVLIITSQFEWKQQIGDAANADPAAARRRQQLLAREDAVKEKIILSQEKNIQQLNQLIESLQRQLLHCRGSNNTVHTTTIPATGVGEVEEHETIDDENR

SEQ ID NO: 78517 - protein, 310 aa, Setaria italica
  Transcript Sequence Number=SeqID_12543
  Gene Ontology: Mol. function=RNA binding; Cellular component =chloroplast; Biological process=regulation of translation
  Homolog annotation: Hit_ID=A7XN92; Match level="QueryCoverage=88%, HitCoverage=32%, E-value=3e-59, Identity=45%"; Hit description=CRM family member 3
  Pfam annotation: Domain name=CRS1_YhbY; Domain location=72-155; Score= 108.7; E_value=2e-29; Accession=PF01985.13; Description=CRS1  YhbY domain
RRSSVNSIVKTLRSSMEESSPNVTIERSNAEDFVQKLGPVLLPWEREEEDDEVFGGGKAGRRSNTELAERTIPENELRRLRDAALRMKERIKVGSGGVTQDIVESIHRKWKVDEVVKMRFEGPPSLNMKRTHDLLEDRTGGIVIWRSGRSVVLYRGMNYNLQCVQSYAKSTQIDSDKEVADANSAIHGRHNLQKSRADGVKHSTSSGNFSLELEATEAFDIDSFLDQLGPRYKDWSGRSPIPVDADLLPGVVPGYKQPYRVLPYKIKSTLRDKEMTALRRLARQTAPHFALGRNREHQGLACLSYWLNLL

SEQ ID NO: 78518 - protein, 159 aa, Setaria italica
  misc_feature (152)..(152): Xaa can be any naturally occurring amino acid
  Transcript Sequence Number=SeqID_12544
  Gene Ontology: Mol. function=transferase activity, transferring glycosyl groups; Biological process=metabolic process
  Homolog annotation: Hit_ID=B6EWZ3; Match level="QueryCoverage=96%, HitCoverage=32%, E-value=5e-24, Identity=37%"; Hit description=UDP -glucose:glucosyltransferase
RRLPLDAHIVTRIITVVQRTLPHLRDMLRSLLGSPAGVTAFLTDMLCPAALAVAEELGVPRYVFCTSSLMCLATLLYTPELARTTTGECRDLPEPVLLPGCMPLRGVDLIEPIQDRTNPVYALMVDLGLDYLRADGFIVNTFDGMEHETLLXFKEHSDK

SEQ ID NO: 78519 - protein, 89 aa, Setaria italica
  Transcript Sequence Number=SeqID_12545
  Gene Ontology: Mol. function=oxidoreductase activity, acting on the CH-OH group of donors, NAD or NADP as acceptor; Biological process =oxidation reduction
  Homolog annotation: Hit_ID=B4FBW5; Match level="QueryCoverage=48%, HitCoverage=12%, E-value=1e-11, Identity=74%"; Hit description =Mannitol dehydrogenase
MASESGDGNCNAWAARDPSGVLSPYKFDRRAVPSGDVLLKIQFSFLLLSPCCVRLHGWNGIPIYGPNCSHAFMCTLCVWFSVCFFHACF

SEQ ID NO: 78520 - protein, 260 aa, Setaria italica
  misc_feature (79)..(79): Xaa can be any naturally occurring amino acid
  misc_feature (139)..(139): Xaa can be any naturally occurring amino acid
  misc_feature (242)..(242): Xaa can be any naturally occurring amino acid
  Transcript Sequence Number=SeqID_12546
  Gene Ontology: Mol. function=oxidoreductase activity, acting on the CH-OH group of donors, NAD or NADP as acceptor; Biological process =oxidation reduction
  Homolog annotation: Hit_ID=B4FBW5; Match level="QueryCoverage=95%, HitCoverage=68%, E-value=1e-110, Identity=81%"; Hit description =Mannitol dehydrogenase
  Pfam annotation: Domain name=ADH_N; Domain location=12-137; Score =91.3; E_value=3.5e-24; Accession=PF08240.4; Description=Alcohol dehydrogenase GroES-like doma
  Pfam annotation: Domain name=ADH_zinc_N; Domain location=164-257; Score=-15.0; E_value=0.013; Accession=PF00107.18; Description=Zinc -binding dehydrogenase
  Pfam module annotation: Pfam domain module=ADH_N::ADH_zinc_N; Domain location=12-137::164-257
MTSSYVFRAVQSGDVSLKITHCGVCYADVVWTQNMHNDSKYPLVPGHEIAGVVTEVGSDVKGFKVGDHIGIGTYVTSCXDCENCNSSLKTRSRGETSLENYCPKSVYTFNGIDKDGTVTKGGYSTHIVIHERYCFKIPXAKAAPLLCAGITMYTPMMRHNMNQPGKSLGVIGLGGLGHMAVKFGKDFGLKVTVFSTSESKRDEAINILGADNFVISSNTQQMESLKYSLHFIVDAALGDHPXDPYLSLLKVGAEVERWLV

SEQ ID NO: 78521 - protein, 66 aa, Setaria italica
  Transcript Sequence Number=SeqID_12547
HAEMSILGYSSYRAMIAPENCHICFFLLLSVLYCVVSACYFYPFQFRSRVPLSESTTVAVLSLVRI

SEQ ID NO: 78522 - protein, 240 aa, Setaria italica
  Transcript Sequence Number=SeqID_12548
  Gene Ontology: Mol. function=protein tyrosine kinase activity; Cellular component=plasma membrane; Biological process=protein amino acid phosphorylation
  Homolog annotation: Hit_ID=B9SX32; Match level="QueryCoverage=99%, HitCoverage=56%, E-value=4e-80, Identity=60%"; Hit description =Serine/threonine-protein kinase PBS1, putative
  Pfam annotation: Domain name=Pkinase; Domain location=3-229; Score= -42.6; E_value=5.9e-06; Accession=PF00069.17; Description=Protein kinase domain
  Pfam annotation: Domain name=Pkinase_Tyr; Domain location=3-240; Score=-40.7; E_value=5e-11; Accession=PF07714.9; Description=Protein tyrosine kinase
  Pfam module annotation: Pfam domain module=Pkinase::Pkinase_Tyr; Domain location=3-229::3-240
PSKHASNVIFLRQLSVASRLNHDNFVRLLGYTISNDLRVLVYEYATMGTLHDVLHGDREVLGQAAEQGAAGGRPVLSWIHRVHIALDAARGLEYLHETVRPAVTHKDVRSTNVLLFDGFRAKIADYNLFSQAADMARLNRSTHTLGSFGYQAPEYAMTGQMTDKSDVYSFGIVLLELLTGRKPLDRTLPQGQRSLVNWATPMLTEDRVQECIDPKLGDQYPPAGALKLGRIAVQCLHYDP

SEQ ID NO: 78523 - protein, 67 aa, Setaria italica
  Transcript Sequence Number=SeqID_12549
  Gene Ontology: Mol. function=nucleotide binding; Biological process =small GTPase mediated signal transduction
  Homolog annotation: Hit_ID=O65842; Match level="QueryCoverage=100%, HitCoverage=33%, E-value=7e-19, Identity=69%"; Hit description=Small GTP-binding protein
  Subcellular localization annotation: CTP_CleavageSite=8; ConfidenceScore=5.15e-01
MGCSSSVPARSTGGLNTVNNDSSSATDSKDLRAKLVLLGDSGVGKSCIVLRFVRGQFDPTSKVTVGA

SEQ ID NO: 78524 - protein, 95 aa, Setaria italica
  Transcript Sequence Number=SeqID_12550
  Gene Ontology: Mol. function=nucleotide binding; Cellular component =plasma membrane; Biological process=small GTPase mediated signal transduction
  Homolog annotation: Hit_ID=O65842; Match level="QueryCoverage=72%, HitCoverage=34%, E-value=4e-26, Identity=81%"; Hit description=Small GTP-binding protein
  Pfam annotation: Domain name=Ras; Domain location=5-91; Score=-22.5; E_value=1.2e-07; Accession=PF00071.14; Description=Ras family
MLPIKVPIIPGRISVRVCWMDELKELQKHGGPDMIMALVGNKADLHENRTVSSQEAQEYAERNNMFFIETSAKTADNINQLFEEIAKRLPRPTSS

SEQ ID NO: 78525 - protein, 227 aa, Setaria italica
  Transcript Sequence Number=SeqID_12551
  Gene Ontology: Mol. function=nucleotide binding; Cellular component =plasma membrane; Biological process=small GTPase mediated signal transduction
  Homolog annotation: Hit_ID=O65842; Match level="QueryCoverage=78%, HitCoverage=89%, E-value=2e-75, Identity=76%"; Hit description=Small GTP-binding protein
  Pfam annotation: Domain name=Arf; Domain location=68-226; Score= -94.7; E_value=0.027; Accession=PF00025.13; Description=ADP -ribosylation factor family
  Pfam annotation: Domain name=MMR_HSR1; Domain location=78-194; Score=- 17.3; E_value=0.04; Accession=PF01926.15; Description=GTPase of unknown function
  Pfam annotation: Domain name=Miro; Domain location=79-194; Score =60.9; E_value=4.8e-15; Accession=PF08477.5; Description=Miro-like protein
  Pfam annotation: Domain name=Ras; Domain location=79-227; Score =239.6; E_value=8e-69; Accession=PF00071.14; Description=Ras family
  Pfam module annotation: Pfam domain module=Arf::MMR_HSR1::Miro::Ras; Domain location=68-226::78-194::79-194::79-227
  Subcellular localization annotation: CTP_CleavageSite=54; ConfidenceScore=5.42e-01
EEFASQPKKPPTGFPPAVGNRRRPPPPAYHLPQSVPPANPHPRALPMGCSSSLPATNAGGLSNANSGDSDIDSKNFRVKLVLLGDSGVGKSCIVLRFVRGQFDPTSKVTVGASFLSQTLALEDSTTVKFEIWDTAGQERYAALAPLYYRGAGAAIVVYDITSLESFNKAQYWVKELQKHGGPDMIMALVGNKADLHENRTVSSQEAQEYAERNNMFFIETSAKNKTE

SEQ ID NO: 78526 - protein, 94 aa, Setaria italica
  Transcript Sequence Number=SeqID_12552
SSSIKMMLALVTSSRFPAIDIQYVKNDCAKDLSWEHHMNKLRQDDQTWEQMCLAFQCVGQNIHTERLLSCVVVKSTEKYQACYTFPTKKNLAFV

SEQ ID NO: 78527 - protein, 205 aa, Setaria italica
  Transcript Sequence Number=SeqID_12553
  Gene Ontology: Mol. function=nucleotide binding; Cellular component =plasma membrane; Biological process=small GTPase mediated signal transduction
  Homolog annotation: Hit_ID=O65842; Match level="QueryCoverage=89%, HitCoverage=91%, E-value=1e-86, Identity=81%"; Hit description=Small GTP-binding protein
  Pfam annotation: Domain name=Arf; Domain location=26-199; Score= -56.7; E_value=3.7e-05; Accession=PF00025.13; Description=ADP -ribosylation factor family
  Pfam annotation: Domain name=GTP_EFTU; Domain location=38-201; Score=- 83.2; E_value=0.0076; Accession=PF00009.19; Description=Elongation factor Tu GTP binding domain
  Pfam annotation: Domain name=MMR_HSR1; Domain location=38-154; Score=- 8.1; E_value=0.0056; Accession=PF01926.15; Description=GTPase of unknown function
  Pfam annotation: Domain name=Miro; Domain location=39-154; Score =82.0; E_value=2.1e-21; Accession=PF08477.5; Description=Miro-like protein
  Pfam annotation: Domain name=Ras; Domain location=39-201; Score =296.2; E_value=7.2e-86; Accession=PF00071.14; Description=Ras family
  Pfam module annotation: Pfam domain module=Arf::GTP_EFTU::MMR _HSR1::Miro::Ras; Domain location=26-199::38-201::38-154::39-154::39 -201
  Subcellular localization annotation: CTP_CleavageSite=28; ConfidenceScore=5.35e-01
SKLTYNTQFFLHSARSTGGLNTVNNDSSSATDSKDLRAKLVLLGDSGVGKSCIVLRFVRGQFDPTSKVTVGASFLSQTLALEDSTIVKFEIWDTAGQERYAALAPLYYRGAAAAIVVYDITSPESFSKAQYWVKELQKHGSPGIVMVLVGNKADLHENRSVSSQDAQEYAEKNNMFFIETSAKTADNINQLFEEIAKRLPRPTAS

SEQ ID NO: 78528 - protein, 147 aa, Setaria italica
  Transcript Sequence Number=SeqID_12554
  Gene Ontology: Mol. function=electron carrier activity; Cellular component=mitochondrion
  Homolog annotation: Hit_ID=B9SLS9; Match level="QueryCoverage=95%, HitCoverage=21%, E-value=2e-46, Identity=60%"; Hit description =Pentatricopeptide repeat-containing protein, putative
  Pfam annotation: Domain name=PPR; Domain location=23-57; Score=28.4; E_value=3e-05; Accession=PF01535.12; Description=PPR repeat
  Pfam annotation: Domain name=PPR; Domain location=58-92; Score=35.6; E_value=2e-07; Accession=PF01535.12; Description=PPR repeat
  Pfam annotation: Domain name=PPR; Domain location=93-127; Score=23.2; E_value=0.001; Accession=PF01535.12; Description=PPR repeat
  Pfam module annotation: Pfam domain module=PPR::PPR::PPR; Domain location=23-57::58-92::93-127
MLVASGRWVVIMEEQERGRAASKEWNAVLVACSRASETSAAVDVFKKMIEEGLKPDVVSYGALLSALEKGKLYDEALRVWEHMCKVGVKPNLYAYTILVSIYIGKGNHAMVDAVLHDMLSKQIEPTVVTFNAIISACVKNKMGGTAF

SEQ ID NO: 78529 - protein, 148 aa, Setaria italica
  Transcript Sequence Number=SeqID_12555
GGGEGSHALQASPARKRHCGPMLGPSVQPVGWHGMARKLTGLAGPVPYRAGWPGWTTLIELAASTHAADASIMPNQQPQQGRCGSHRHDRVVKRLVISALPVVFHSKVGMIGEQTRRSSTCKRPCNPSGRATSQGTAQHRATHWSRGT

SEQ ID NO: 78530 - protein, 50 aa, Setaria italica
  Transcript Sequence Number=SeqID_12556
GGGVHCMWGPLPWTPEIAWRGYVRRSVLYSRSFSLQRYWKRSAIFYLLMV

SEQ ID NO: 78531 - protein, 79 aa, Setaria italica
  Transcript Sequence Number=SeqID_12557
  Gene Ontology: Mol. function=catalytic activity; Cellular component =membrane
  Homolog annotation: Hit_ID=B6SSC1; Match level="QueryCoverage=55%, HitCoverage=14%, E-value=4e-13, Identity=68%"; Hit description=Lipid phosphate phosphatase 3
HWQDVCTGGLLGLTVASICYLQFFPLPSDKNGLWPHAYFRHMLEPGGENQVQPTSMSRRNSLQNGSFHGPDAVEMRSTR

SEQ ID NO: 78532 - protein, 212 aa, Setaria italica
  misc_feature (85)..(85): Xaa can be any naturally occurring amino acid
  Transcript Sequence Number=SeqID_12558
  Subcellular localization annotation: CTP_CleavageSite=40; ConfidenceScore=5.75e-01
PYFAALRGLFSHPSASRVLSVSFRQRPVASPFAGRSRLPSAARSSGDPAEINVDNVEGTRQSLGSFTGSGKDGKESTKSFSSKEXHISLLLEKLKRYGAAGVLSYGLLNTVYYVSAFLLVWFYFAPAPGRMGYGAAVERFVKLMAMVWAGSQVTKIFRAGGALALAPFVDRGLRWFTVKFNFKSEGRAFATIVGLCFGIAALLFFGLTILWA

SEQ ID NO: 78533 - protein, 118 aa, Setaria italica
  Transcript Sequence Number=SeqID_12559
  Subcellular localization annotation: CTP_CleavageSite=70; ConfidenceScore=5.89e-01
MPSPSPPSARFATGLRPAPAGVRSSPIGSSPYFAALRGLFSHPSASRVLSVSFRQRPVASPFAGRSRLPSAARSSGDPAEINVDNVEGTRQSLGSFTGMIFVTCTNLALSIHFFIGLN

SEQ ID NO: 78534 - protein, 595 aa, Setaria italica
  Transcript Sequence Number=SeqID_12560
  Gene Ontology: Mol. function=signal transducer activity; Cellular component=nucleus; Biological process=ubiquitin-dependent protein catabolic process
  Homolog annotation: Hit_ID=Q67UX0; Match level="QueryCoverage=96%, HitCoverage=90%, E-value=0.0, Identity=86%"; Hit description =Putative adagio-like protein 2
  Pfam annotation: Domain name=F-box; Domain location=179-227; Score =24.5; E_value=0.00043; Accession=PF00646.25; Description=F-box domain
  Pfam annotation: Domain name=Kelch_1; Domain location=276-326; Score =19.2; E_value=0.017; Accession=PF01344.17; Description=Kelch motif
  Pfam annotation: Domain name=Kelch_1; Domain location=329-376; Score =14.4; E_value=0.064; Accession=PF01344.17; Description=Kelch motif
  Pfam annotation: Domain name=Kelch_1; Domain location=381-429; Score =14.2; E_value=0.068; Accession=PF01344.17; Description=Kelch motif
  Pfam annotation: Domain name=Kelch_1; Domain location=433-485; Score =4.9; E_value=0.87; Accession=PF01344.17; Description=Kelch motif
  Pfam annotation: Domain name=Kelch_1; Domain location=500-548; Score =3.4; E_value=1.3; Accession=PF01344.17; Description=Kelch motif
  Pfam annotation: Domain name=Kelch_2; Domain location=276-324; Score =16.7; E_value=0.096; Accession=PF07646.7; Description=Kelch motif
  Pfam annotation: Domain name=Kelch_2; Domain location=329-376; Score =31.4; E_value=3.6e-06; Accession=PF07646.7; Description=Kelch motif
  Pfam annotation: Domain name=Kelch_2; Domain location=380-429; Score =12.9; E_value=0.85; Accession=PF07646.7; Description=Kelch motif
  Pfam annotation: Domain name=Kelch_2; Domain location=433-485; Score =25.8; E_value=0.00018; Accession=PF07646.7; Description=Kelch motif
  Pfam annotation: Domain name=Kelch_2; Domain location=500-548; Score =33.9; E_value=6.3e-07; Accession=PF07646.7; Description=Kelch motif
  Pfam annotation: Domain name=PAS_3; Domain location=38-133; Score =15.7; E_value=0.0029; Accession=PF08447.3; Description=PAS fold
  Pfam module annotation: Pfam domain module=F-box::Kelch_1::Kelch _1::Kelch_1::Kelch_1::Kelch_1::Kelch_2::Kelch_2::Kelch_2::Kelch _2::Kelch_2::PAS_3; Domain location=179-227::276-326::329-376::381 -429::433-485::500-548::...
  Pfam module annotation: Domain location=276-324::329-376::380 -429::433-485::500-548::38-133
GSGAGEGGASPGFALAIEGVLGACGMVVSDALEPDFPIIYVNRGFEDATGYRAEEVLGRNCRFLQCRGPFAQRRHPLVDTAVVSGIRRCLEEGTEFQGDLLNFRKDGSPYMAKLQITPIYGDDDMITHYMGIQFFNDSNVDLGPSPGSVTKELARSTWIAPDNTPPPTSVGKGNFWEHSSLFLLSDEVLCQKILSKLSPRDIAAVNSVCKRLYHMTKNDDLWRMVCQNAWGGEATRALEIVAGSRNLAWGRLARELTTLESVAWRKLTIGGTVEPSRCNFSACAVGNRVVLFGGEGVNMQPMNDTFVLDLSASKPEWRHINVSSAPPGRWGHTLSCLNGSRLILFGGCGGQGLLNDVFILDLDAQHPTWREIPGIAPPVPRSWHSSCTVDGTKLVVSGGCADSGVLLSDTYLLDVTMEKPVWREIPASWTPPSRLGHSLSVYDGKKILMFGGLAKSGPLRLRSSDVFTLDLSDDNPSWRCITGSGMPGAGNPAGVGPPPRLDHVAVSLPGGRVLIFGGSVAGLHSASQLHLLDPAEEKPTWRILNVPGRPPRFAWGHSTCVVGGTKAIVLGGQTGEEWTLTEIHELSLISSLVSR

SEQ ID NO: 78535 - protein, 101 aa, Setaria italica
  Transcript Sequence Number=SeqID_12561
  Subcellular localization annotation: CTP_CleavageSite=77; ConfidenceScore=5.52e-01
YIVDCKCPLSPNNSYMSFSLSSLSTMYNAVTCASPPVSQYTHGSICKNNSLSSNNRYMTLPPSIVQCQFMGFSSCVSCHSTTHRESLGTDNMEQNLYVRVT

SEQ ID NO: 78536 - protein, 313 aa, Setaria italica
  Transcript Sequence Number=SeqID_12562
  Gene Ontology: Mol. function=unfolded protein binding; Cellular component=myosin complex; Biological process=tubulin complex assembly
  Homolog annotation: Hit_ID=B6TIQ8; Match level="QueryCoverage=94%, HitCoverage=85%, E-value=1e-142, Identity=82%"; Hit description =ATP/GTP binding protein
ARGRGRRPKAPPKPKAETEYFPEKRNLEDLWLSAFPIGTEWENIDKIKEFNWNFENLEKTLEEGGELYGKTVYLFGSTEPQLLDVNGESKIVLIPVVVAVDCPFPPSDKIGINSVQRENEEIVPMKAMKMAWVPYVPLEDRLSRIDSLKTKIFTLGCTQRRSALKHLKTERVKKFDYCMPYYMPLNPPEDEDDTVVNIIYPLEPPIVCDFDWEMDDYEDFIEEKVKDEVLPEDEKEKFKEFLKEKVRERKRELKQAKEARKKAIDDMDPKTREAFENIKFYKFYPVKTPDTPDVSNVKAKYINRYYRNAHYLM

SEQ ID NO: 78537 - protein, 139 aa, Setaria italica
  Transcript Sequence Number=SeqID_12563
  Gene Ontology: Cellular component=chloroplast envelope
  Homolog annotation: Hit_ID=B6U6V2; Match level="QueryCoverage=91%, HitCoverage=34%, E-value=7e-59, Identity=92%"; Hit description=ABC -type transport system involved in resistance to organic solvents, periplasmic component
MVGIFTRLGRDMEEIGVSKSYKLAEKVASIMEEAQPLLKQIEALAEEIQPMLSEVRGSDLLKDVETIAKGLADASGDLRRLKSSMLTPENTDLIKQSIFTLIFTLKNIESISSDISGFTGDETTRRNIKLLIKSLSRLL

SEQ ID NO: 78538 - protein, 72 aa, Setaria italica
  misc_feature (42)..(42): Xaa can be any naturally occurring amino acid
  Transcript Sequence Number=SeqID_12564
ADDAQAITDDFSWLREFQGESSDLGPYDLFGSQMLGVQEGFXKGETDSLVSASREFKAMLEAALVNPYKFCT

SEQ ID NO: 78539 - protein, 382 aa, Setaria italica
  Transcript Sequence Number=SeqID_12565
MEAQGAHRWAGEIRGGGGSNYIAKHVGIQNQVLKWLQHFSDRVEERAKGAAAEVNGLLEEAGALELDMKTAVVAFDHLTRQRFTEHKVSDDDNIDLKTRDGVRSSTLPQVRAQDYERDILPRYKDALHIGLASCKDHFRKKGRSTTSVFRAMSTYNPLPHIIGSEEYNHDNSCGLADDAQAITDDFSWLREFQGESSDLGPYDLFGSQMLGVQEGFEKGETDSLVSASREFKAMLEAALVNPYKFYDDASNTARDASVENTGTSEVHHNTDPALSTRMDGAADEKSTEADNAEEAELLASLQNPDINVHDIYSALVREGLFDAGDEILAVDPASDSANPAVEDSAERASPVNETVLSEEEKSIEGDNTASPPEKNDGVPESS

SEQ ID NO: 78540 - protein, 92 aa, Setaria italica
  Transcript Sequence Number=SeqID_12566
  Gene Ontology: Mol. function=alpha-amylase activity; Cellular component=cellular_component; Biological process=carbohydrate metabolic process
  Homolog annotation: Hit_ID=Q41770; Match level="QueryCoverage=100%, HitCoverage=20%, E-value=6e-44, Identity=91%"; Hit description=Alpha- amylase
  Pfam annotation: Domain name=Alpha-amyl_C2; Domain location=30-90; Score=145.9; E_value=1.3e-40; Accession=PF07821.4; Description=Alpha- amylase C-terminal beta-sheet dom
THPGTPCIFYDHVFDWNLKQEISTLSTVRSRNGIHAGSKLDILAADGDLYVAKIDDKVIVKIGSRYDVGNLIPSDFHPIAHGNNYCVWEKTG

SEQ ID NO: 78541 - protein, 82 aa, Setaria italica
  Transcript Sequence Number=SeqID_12567
LEHKTGDVFILTGCVIPSYALSVYNLEIEHFLCRPANNNICISQLKIAHMPKTSTNCYSTSMSPISHAYSNIFTRNVYNCEA

SEQ ID NO: 78542 - protein, 116 aa, Setaria italica
  Transcript Sequence Number=SeqID_12568
KRVADPPHRTQKARTSPRQHETGRGPNLAGRIRGAAPADWASGDRRAPPHAARVRGRRARSDAARHQQLRRLAMEGGRSRVGGGQVGQGLLLVCGAPRRRREGGVKDAPPRNGHYS

SEQ ID NO: 78543 - protein, 58 aa, Setaria italica
  Transcript Sequence Number=SeqID_12569
SINLLCSPSSCCLSVEELDLDWFLIKLEFLDVLAHISAYCNKSYNFHLSGQTLVVVIL

SEQ ID NO: 78544 - protein, 120 aa, Setaria italica
  misc_feature (19)..(19): Xaa can be any naturally occurring amino acid
  Transcript Sequence Number=SeqID_12570
  Gene Ontology: Mol. function=isopentenyl-diphosphate delta-isomerase activity; Cellular component=peroxisome; Biological process =chlorophyll biosynthetic process
  Homolog annotation: Hit_ID=B4XU19; Match level="QueryCoverage=100%, HitCoverage=38%, E-value=2e-52, Identity=80%"; Hit description =Plastid isopentenyl pyrophosphate:dimethylallyl pyrophosphate isomerase isoform 1
LFDELGIVADELPVDQFIXLGGMLYKAPSDGKWGEHELDYLLFMVCDVKLNPNPEEVADVKYMNRNQLKELLRKADAGEDGVKLSPWFRLVVDNFLMSWWDHVEQGTLQEAADMKTIHRL

SEQ ID NO: 78545 - protein, 117 aa, Setaria italica
  misc_feature (37)..(37): Xaa can be any naturally occurring amino acid
  Transcript Sequence Number=SeqID_12571
  Gene Ontology: Mol. function=isopentenyl-diphosphate delta-isomerase activity; Biological process=chlorophyll biosynthetic process
  Homolog annotation: Hit_ID=Q6EJD1; Match level="QueryCoverage=95%, HitCoverage=37%, E-value=3e-53, Identity=84%"; Hit description =Isopentenyl pyrophosphate isomerase
MSYPLQQRSATKVTFPLVWTNTCCSHPLYRESELIEXNCVGVRNAAQRKLFDELGIVADELPVDQFIPLGRMLYKAPSDGKWGEHELDYLLFMVCDVKLNPNPEEVADVKYMNRNQD

SEQ ID NO: 78546 - protein, 236 aa, Setaria italica
  Transcript Sequence Number=SeqID_12572
  Gene Ontology: Mol. function=isopentenyl-diphosphate delta-isomerase activity; Cellular component=peroxisome; Biological process =chlorophyll biosynthetic process
  Homolog annotation: Hit_ID=Q6EJD1; Match level="QueryCoverage=94%, HitCoverage=73%, E-value=1e-113, Identity=85%"; Hit description =Isopentenyl pyrophosphate isomerase
  Pfam annotation: Domain name=NUDIX; Domain location=55-200; Score =80.0; E_value=8.3e-21; Accession=PF00293.20; Description=NUDIX domain
AGPGAVDADAGMDAVQRRLMFEDECILVDEQDNVIGHESKYNCHLMEKIEAGHVLHRAFSVFLFNSKYELLLQQRSATKVTFPLVWTNTCCSHPLYRESELIEENCVGVRNAAQRKLFDELGIVADELPVDQFIPLGRMLYKAPSDGKWGEHELDYLLFMVCDVKLNPNPEEVADVKYMNRNQLKELLRKADAGEDGVKLSPWFRLVVDNFLMSWWDHVEQGTLQEAADMKTIHRL

SEQ ID NO: 78547 - protein, 84 aa, Setaria italica
  misc_feature (7)..(7): Xaa can be any naturally occurring amino acid
  Transcript Sequence Number=SeqID_12573
  Gene Ontology: Mol. function=binding
RNKAEEXKDENETIDMQQNSNGRMETLPNEDKSGLSATEAENTSCNASPETECKENDVCITSSRKMKARKYRTKFTFLLSMIVI

SEQ ID NO: 78548 - protein, 65 aa, Setaria italica
  Transcript Sequence Number=SeqID_12574
  Gene Ontology: Mol. function=protein serine/threonine kinase activity; Biological process=protein amino acid phosphorylation
  Pfam annotation: Domain name=LRRNT_2; Domain location=25-62; Score =22.2; E_value=0.0022; Accession=PF08263.4; Description=Leucine rich repeat N-terminal domain
MGLSPWLLFLFSVLVQTSAILADTDPGDSAGLTAIAANWKNKPSNWNGDDPCRDKWIGIICTGNR

SEQ ID NO: 78549 - protein, 619 aa, Setaria italica
  Transcript Sequence Number=SeqID_12575
  Gene Ontology: Mol. function=catalytic activity; Biological process =metabolic process
  Homolog annotation: Hit_ID=B6U7M4; Match level="QueryCoverage=99%, HitCoverage=81%, E-value=0.0, Identity=84%"; Hit description =Cycloartenol synthase
  Pfam annotation: Domain name=Prenyltrans; Domain location=2-45; Score= 35.4; E_value=2.3e-07; Accession=PF00432.13; Description =Prenyltransferase and squalene oxidase re
  Pfam annotation: Domain name=Prenyltrans; Domain location=444-486; Score=30.2; E_value=8.5e-06; Accession=PF00432.13; Description =Prenyltransferase and squalene oxidase re
  Pfam annotation: Domain name=Prenyltrans; Domain location=493-548; Score=30.9; E_value=5.1e-06; Accession=PF00432.13; Description =Prenyltransferase and squalene oxidase re
  Pfam module annotation: Pfam domain module=Prenyltrans::Prenyltrans::P renyltrans; Domain location=2-45::444-486::493-548
PEHRCEICRYIYNHQNEDGGWGTLILGSSSMFGTCSNYITLRLLGEEPNDEDGALAKGRAWILSHGGATLVPQWGKIWLSILGVYDWSGNNPIFPELWLAPQFLPFHPGKFWCLTRMVYLPMAYLYGKKFVGPITPTILALREEIYGTCYVKIDWSKARNACAKEDLLCPRTELQSAVWTSLYWCVEPVLSSWPVNKLREKALDNLMEHIHYEDENTQYVCICSVSKALNMVCCWVEDPKSDAFKRHLARVPDFLWLSEDGMKAQVYDGCQSWETAFIIQAFCATDLVNEYIPTIQRAYEFMKHSQVLRNHPGDQSYWHRHRSKGSWTLSSADNGWAVSDTTGEALKAVLLLSNIASNHIGDPVGRERLHDAVDCLLSFVNKDGTFSTYECQRTSSWIEILSPCESFPNIVVDYPYPECTSSVLQALILFRELYPSYRTEEINKSVRNAATFIESRQKEDGSWLGTWGVCFTYGAFFSIKGLVASGRTYENSSSIRKACHFLLSKQLSTGGWGESHVSNVTKVYVNLEGSHAHAVNTAWAMLALINAGQFERDPAPLHHAAKEMINMQLETGEFPQQEHVGCFNCSLFFNYPNYRNIFPIWALGEYRRCLRANKSSGPV

SEQ ID NO: 78550 - protein, 300 aa, Setaria italica
  Transcript Sequence Number=SeqID_12576
  Gene Ontology: Mol. function=nucleotidyltransferase activity; Cellular component=endoplasmic reticulum; Biological process =biosynthetic process
  Homolog annotation: Hit_ID=B6TNE5; Match level="QueryCoverage=100%, HitCoverage=100%, E-value=1e-152, Identity=86%"; Hit description =Choline-phosphate cytidylyltransferase B
  Pfam annotation: Domain name=CTP_transf_2; Domain location=51-181; Score=146.4; E_value=8.6e-41; Accession=PF01467.18; Description =Cytidylyltransferase
  Subcellular localization annotation: CTP_CleavageSite=34; ConfidenceScore=5.24e-01
MARVSNARKRQGAKPAAAATPSSAADPAHNNTTSSSAKQAAGSGDRPVRVYADGIFDLFHFGHARALEQAKKLFPNTYLLVGCCNDELTKRYKGKTVMTQEERYESLRHCKWVDEVIPDAPWVLTQEFIDIHQIDYVAHDALPYADTSGAANDVYDFVKKIGKFKETKRTDGVSTSDLIMRILKDYNQYVMRNLARGYSRKDLGVSYVKEKQLQVNMKINKLRETVKAHQEKLQTVAKTAGLNHDEWLANADRWVAGFLEKFEQHCHNMETAIKDRIQERLGRQLSKGMSAGLVQQPVAA

SEQ ID NO: 78551 - protein, 70 aa, Setaria italica
  Transcript Sequence Number=SeqID_12577
  Gene Ontology: Mol. function=catalytic activity; Biological process =metabolic process
  Homolog annotation: Hit_ID=Q8S485; Match level="QueryCoverage=100%, HitCoverage=15%, E-value=4e-32, Identity=90%"; Hit description =Putative genetic modifier
NLTTESAHTSGMWCVAVAGRHPAYELQAANHVVRWLDQLSVVDLKRLVNGEVIGRRGRESDMDMEIVIEE

SEQ ID NO: 78552 - protein, 340 aa, Setaria italica
  Transcript Sequence Number=SeqID_12578
  Gene Ontology: Mol. function=catalytic activity; Biological process =metabolic process
  Homolog annotation: Hit_ID=Q8S485; Match level="QueryCoverage=98%, HitCoverage=73%, E-value=1e-151, Identity=78%"; Hit description =Putative genetic modifier
  Pfam annotation: Domain name=Hydrolase; Domain location=102-290; Score=38.4; E_value=2.9e-08; Accession=PF00702.18; Description =haloacid dehalogenase-like hydrolase
  Subcellular localization annotation: CTP_CleavageSite=33; ConfidenceScore=5.17e-01
MSFQISSQQPALKFYGKCLPNNPHFAVTMHSVAKSMGKAMIMKRARLKLHATDINRKPQTHELYKLVCRLPENLSWLLEPPEIPKRTASKKKKQKDEMVTGQFGVILEWEGVVVEDDDPDLEPRVWYVLSLEEAKSFPPDALLKEIEGMRTEQAISEVLCWSEDPEEIKRLAARKEVIYQILRGGYYQLRPGVLDFLNTLVDFEIPIAIAAPRSRESLEEGIKTVGLQGYFDAIIALEDFCLGKPDGEMFEVAAEQLGLEPDVCVVFGNSNLTTESAHTSGMWCVAVAGRHPAYELQAANHVVRWLDQLSVVDLKRLVNGEVIGRRGRESDMDMEIVIEE

SEQ ID NO: 78553 - protein, 103 aa, Setaria italica
  Transcript Sequence Number=SeqID_12579
MRSLCVSRVLLVTSARSGTWKMEQDKLEKAARKGPSSGEQASSTTSSAASDVKAAGGPTESASTGASTDKNRNYAVLAGTVAALSGLGWYLLSKPKKSEEVVD

SEQ ID NO: 78554 - protein, 118 aa, Setaria italica
  Transcript Sequence Number=SeqID_12580
  Gene Ontology: Cellular component=mitochondrion
MAARTAARFVQRRLLSSGGKVLGEEEKAAENVYIKKMEQDKLEKAARKGPSSGEQASSTTSSAASDVKAAGGPTESASTGASTDKNRNYAVLAGTVAALSGLGWYLLSKPKKSEEVVD

SEQ ID NO: 78555 - protein, 67 aa, Setaria italica
  Transcript Sequence Number=SeqID_12581
  Gene Ontology: Mol. function=3-beta-hydroxy-delta5-steroid dehydrogenase activity; Cellular component=endoplasmic reticulum; Biological process=steroid biosynthetic process
  Homolog annotation: Hit_ID=Q10JX3; Match level="QueryCoverage=77%, HitCoverage=19%, E-value=2e-17, Identity=82%"; Hit description=NAD dependent epimerase/dehydratase family protein, expressed
MGSQQPDGSCDGHPEPEARWCAVTGGRGFMARHLVAALLRSGKWRVRVTDLAPAIVLGPGEVEALLS

SEQ ID NO: 78556 - protein, 112 aa, Setaria italica
  Transcript Sequence Number=SeqID_12582
  Gene Ontology: Mol. function=catalytic activity; Cellular component =membrane
  Subcellular localization annotation: CTP_CleavageSite=43; ConfidenceScore=5.14e-01
LSWYYYLGTNYLTMILGPATLSMATYLSWLRVSRRLHTANQVMAGAALGSAFGALWFALWRSLVQEALLTSSLSARIAVILGSAVSCVGIVVYMRGRILHRGGRGSIPSYCC

SEQ ID NO: 78557 - protein, 83 aa, Setaria italica
  Transcript Sequence Number=SeqID_12583
HVRVAVLAGVRSPPKAAHSCYGDLVVKMPQHLLLRRRPRADDDAPVIASNYDAGVSLALEASGIHAMVRAAHVRVSFCKRELH

SEQ ID NO: 78558 - protein, 369 aa, Setaria italica
  Transcript Sequence Number=SeqID_12584
  Gene Ontology: Mol. function=triacylglycerol lipase activity; Biological process=lipid metabolic process
  Homolog annotation: Hit_ID=Q53LH1; Match level="QueryCoverage=94%, HitCoverage=52%, E-value=1e-127, Identity=63%"; Hit description =Lipase family protein, expressed
TAVTATARAADADRDALRQLVQTHVGAVAMDQKLADPAAPSGGPYRPFGTYVMCTPDGAVCVDNPTAAVQMLYATFASRCSPGSESPEAAHSCYGDLVVKMPQHLLLRRRPRADDDAPVIASNYDAGVSLALEASGIHAMATEASTARQWLRTSRRAGRRPSLNCAQLATKLGRITPHRAQIEWYKALFDGEMGYYDAFKQQRSPKKFGRANMCRFRLGLFWDGVLAMLDAGQLPHDFHRRAKWVNAARFYQLLVEPLDIADYHRRNLHRTQGRYMTHGRERRYELFDRWWQEKGCIGGGDVASSMSSAASRRRRSKNAGLTQDPCFWARVEEARERTESARSERDAAVLAMMLEELQEFEIYSRELVA

SEQ ID NO: 78559 - protein, 286 aa, Setaria italica
  misc_feature (269)..(269): Xaa can be any naturally occurring amino acid
  Transcript Sequence Number=SeqID_12585
  Homolog annotation: Hit_ID=Q8SAW5; Match level="QueryCoverage=96%, HitCoverage=23%, E-value=4e-75, Identity=55%"; Hit description =Putative myosin-like protein
  Pfam annotation: Domain name=DUF869; Domain location=1-286; Score= -176.4; E_value=6.5e-06; Accession=PF05911.3; Description=Plant protein of unknown function (DUF869)
QQEDTFEVTGNGSSTKEAKPLGLMDHRLTNAILNIHEFVKLFIRQTSELQGSSYYNVVSQKIEQFSRLVDEVLSDGNGLNEIVIALSEILLESGEFKLTLLRESANEAETNNLDCVDKSTLLENKAHHEPSQDSMSGASSLIPHSSSDPDFGGPSSGGAFDVKTTVRICTPEECEKLKLQKRNLDIELMKCNEMIETTNLKFSVMEKNLEDLTLKLAACENSNSLAETQLKCMAESYKTLETQKVKLEEEIRVLQTKIDTLSADLAEEXRSHQEDIAKYRDLKEKM

SEQ ID NO: 78560 - protein, 145 aa, Setaria italica
  Transcript Sequence Number=SeqID_12586
  Gene Ontology: Mol. function=sequence-specific DNA binding; Cellular component=microtubule associated complex; Biological process =microtubule-based movement
  Homolog annotation: Hit_ID=UPI0001739506; Match level="QueryCoverage =100%, HitCoverage=18%, E-value=4e-20, Identity=38%"; Hit description= ATP binding / microtubule motor
HLKGLSRVDIKSFEEFSDLCCGGSYMLKQTTKTSNQLQARGHQGFVIYISKVYKAGGECAVSKINFLDLAEYVDIKQKNYGGGVAPSNSNKSLYAIMNVVQALNNNQSFIPYRPYKVTRILQDSLCKTSGAVLICCLDEVSCQDA

SEQ ID NO: 78561 - protein, 230 aa, Setaria italica
  Transcript Sequence Number=SeqID_12587
  Gene Ontology: Mol. function=RNA binding; Cellular component =spliceosome; Biological process=nuclear mRNA splicing, via spliceosome
  Homolog annotation: Hit_ID=C1FGE2; Match level="QueryCoverage=100%, HitCoverage=100%, E-value=5e-34, Identity=38%"; Hit description =Cwf15/Cwc15 cell cycle control family protein
  Pfam annotation: Domain name=Cwf_Cwc_15; Domain location=1-230; Score= 427.0; E_value=3.1e-125; Accession=PF04889.4; Description=Cwf15Cwc15 cell cycle control protein
MTTAARPTWAPAKGGNEQGGTRIFGPSQKYSSRDLAAHTSLKPRKEGQQTTEELQKRNLREELEERERKHYSSKDKSYAEERDLRKSSIQLLLEGSKRDAEDKIVPREIDADDSDVEPKSDDESDEDDDDDDTEALMAELERIKKERAEEKLRKERQQAEEEAKMKEAELMRGNPLININNPGSFSVKRRWDDDVVFKNQARGETKTPKRFINDTIRSDFHRKFLQRYMK

SEQ ID NO: 78562 - protein, 407 aa, Setaria italica
  Transcript Sequence Number=SeqID_12588
  Gene Ontology: Mol. function=nucleotide binding; Cellular component =nucleus; Biological process=DNA replication initiation
  Homolog annotation: Hit_ID=O80786; Match level="QueryCoverage=99%, HitCoverage=55%, E-value=0.0, Identity=79%"; Hit description =Putative DNA replication licensing factor, mcm5
  Pfam annotation: Domain name=AAA_3; Domain location=49-180; Score= -1.1; E_value=0.00049; Accession=PF07726.3; Description=ATPase family associated with various
  Pfam annotation: Domain name=AAA_5; Domain location=49-196; Score= -3.0; E_value=0.0017; Accession=PF07728.6; Description=ATPase family associated with various
  Pfam annotation: Domain name=MCM; Domain location=1-324; Score=676.2; E_value=2.8e-200; Accession=PF00493.15; Description=MCM235 family
  Pfam annotation: Domain name=Mg_chelatase; Domain location=49-202; Score=-143.4; E_value=0.011; Accession=PF01078.13; Description =Magnesium chelatase, subunit ChlI
  Pfam module annotation: Pfam domain module=AAA_3::AAA_5::MCM::Mg _chelatase; Domain location=49-180::49-196::1-324::49-202
RPDAYAKLCSMIGPSIYGHSDVKKAIACLLFGGSKKRLPDGVRLRGDIHVLLLGDPSTAKSQFLKFVEKTAPLAVYTSGKGSSAAGLTASVTRDSSSREFYLEGGAMVLADGGVVCIDEFDKMRPEDRVAIHEAMEQQTISIAKAGITTVLNSRTSVLAAANPIAGRYDDLKTAQDNIDLQTTILSRFDLIFIVKDIRMYDQDKRIANHIIKVHASGAAASSKNTEASEGENWLKRYIEYCRATCKPRLSEKAAEMLQNKYVEIRQKMRQQAHETGRAAAIPITVRQLEAIIRLSESLAKMRLTSVATPEHVEEAFRLFNVSTVDAARSGINEHLNLSPEIANEIKQAEAQIKRRMGIGSHISERRLIDELTRMGMNESIIRRALLIMHQRDEVEYKRERHVIVRKA

SEQ ID NO: 78563 - protein, 106 aa, Setaria italica
  Transcript Sequence Number=SeqID_12589
  Gene Ontology: Mol. function=metal ion binding; Cellular component =integral to membrane
  Homolog annotation: Hit_ID=A7L5U6; Match level="QueryCoverage=100%, HitCoverage=38%, E-value=2e-38, Identity=71%"; Hit description=PHD zinc finger protein
MDPGYNPRTVEEVFRDFKGRRAGIIRALTTDVEDFYQQCDPEKENLCLYGFPNENWEVNLPAEEVPPELPEPALGINFARDGMLEKDWLSMIAVHSDAWLLSVAFY

SEQ ID NO: 78564 - protein, 164 aa, Setaria italica
  Transcript Sequence Number=SeqID_12590
  Gene Ontology: Mol. function=metal ion binding
  Homolog annotation: Hit_ID=A7L5U6; Match level="QueryCoverage=84%, HitCoverage=50%, E-value=3e-57, Identity=76%"; Hit description=PHD zinc finger protein
FRSNPSAPNGPRVQPRTVEEVFRDFKGRRAGIIRALTTDVEDFYQQCDPEKENLCLYGFPNENWEVNLPAEEVPPELPEPALGINFARDGMLEKDWLSMIAVHSDAWLLSVAFYFGARFGFDKNDRKRLFGMINELPTTFEVVSGKSKIKAPPTNNNHSNSKSK

SEQ ID NO: 78565 - protein, 85 aa, Setaria italica
  Transcript Sequence Number=SeqID_12591
  Gene Ontology: Mol. function=oxidoreductase activity, acting on single donors with incorporation of molecular oxygen, incorporation of two atoms of oxygen; Cellular component=cytoplasm; Biological process=fatty acid biosynthetic process
  Homolog annotation: Hit_ID=A1XCI7; Match level="QueryCoverage=100%, HitCoverage=10%, E-value=3e-39, Identity=83%"; Hit description =Lipoxygenase
YAMEMSSAIYSEWRFTEQSLPNELIKRGMASKDPSGGVTLHIEDYPYAVDGLDVWRAIEGWVQSYCAHFYHSDAAVVGDKELQAW

SEQ ID NO: 78566 - protein, 187 aa, Setaria italica
  misc_feature (127)..(127): Xaa can be any naturally occurring amino acid
  Transcript Sequence Number=SeqID_12592
  Gene Ontology: Mol. function=oxidoreductase activity, acting on single donors with incorporation of molecular oxygen, incorporation of two atoms of oxygen; Cellular component=cytoplasm; Biological process=fatty acid biosynthetic process
  Homolog annotation: Hit_ID=A1XCI7; Match level="QueryCoverage=91%, HitCoverage=20%, E-value=3e-85, Identity=85%"; Hit description =Lipoxygenase
  Pfam annotation: Domain name=Lipoxygenase; Domain location=2-187; Score=-318.2; E_value=0.00019; Accession=PF00305.11; Description =Lipoxygenase
GAPHVQSVHRVRIVLNVQSYCAHFYHSDAAVVGDKELQAWWDDVRLVGHGDRQHDPACWLKLDTVAHLVETLSTLIWIASALHAAVNFGQYGYAGFMPNRPTRCRRFVPLPGSPEMLQLEADPEKFXLEMVPDRFTTTLGLALIEVLSNHTSDELYLGQRATSSWTDDGEVLQLLDRFREELRRVEK

SEQ ID NO: 78567 - protein, 275 aa, Setaria italica
  Transcript Sequence Number=SeqID_12593
  Gene Ontology: Mol. function=signal transducer activity; Cellular component=plasma membrane; Biological process=response to light stimulus
  Homolog annotation: Hit_ID=B9S8R5; Match level="QueryCoverage=88%, HitCoverage=38%, E-value=7e-63, Identity=46%"; Hit description =Protein binding protein, putative
  Pfam annotation: Domain name=BTB; Domain location=36-166; Score=-2.0; E_value=0.02; Accession=PF00651.23; Description=BTBPOZ domain
MQGRRKSAREMARGEREQQQQPAAAASSKGQAWFCTTGLPSDVVIEVGDMTFHLHKFPLMSRSKKIHDLITNKESREATGGEQEEGAGEIREEETEVVLEEDEEADVHRIRLPEFPGGAEVFELAAKFCYGVKLDLTPATAAPLRCAAERLGMTDDHSDDNLVSRADRFISQTVLRNPRDAIRALKSCEGLLPLADSLGLVSRCVDAIAAKAAASTPTALFGWPIPDDARAGDRQRRKNSAAAGATWFDDLAGLSLATFTRVIAAMKERGVGPEV

SEQ ID NO: 78568 - protein, 159 aa, Setaria italica
  misc_feature (1)..(8): Xaa can be any naturally occurring amino acid
  Transcript Sequence Number=SeqID_12594
XXXXXXXXLQKPPTLSKLYQSEIRERVDGFCLPQAGGRNLGELVFLDPASQFICPPGSDVLSTHPPPTPPSSGWGARGQPSWEKLPARGNSVLPLVPGSSRGPHQGWSTRAWQWRRLLLGRVARELGPPPAVASPSMGPGRMDPPLPFSCPDGSTVWCH

SEQ ID NO: 78569 - protein, 153 aa, Setaria italica
  Transcript Sequence Number=SeqID_12595
  Gene Ontology: Mol. function=transcription regulator activity; Cellular component=nucleus; Biological process=regulation of transcription
  Homolog annotation: Hit_ID=B6TB86; Match level="QueryCoverage=99%, HitCoverage=48%, E-value=2e-40, Identity=58%"; Hit description =Amelogenin like protein
  Subcellular localization annotation: CTP_CleavageSite=59; ConfidenceScore=5.14e-01
EGNPIWSHDVTRSNRTVPHPATTVFALQHLSHPAVTTTMAPPLQQLAVLDQSYTAPAVSTTMAPPLQQLAVLDQSYTAPRRELQLFPEAASTEDTEPPQDQGISNHVMRPQARYPTTMATLPVHVYPILPRMEDEQCSSGTTGSGEEGGVGNH

SEQ ID NO: 78570 - protein, 62 aa, Setaria italica
  Transcript Sequence Number=SeqID_12596
  Gene Ontology: Mol. function=metal ion transmembrane transporter activity; Cellular component=integral to membrane; Biological process=metal ion transport
  Homolog annotation: Hit_ID=B6SUH7; Match level="QueryCoverage=100%, HitCoverage=15%, E-value=5e-24, Identity=93%"; Hit description=Zinc transporter 4
ALVVEGILNAMSAGILIYMALVDLIAADFLSKRMSCNPRLQVGSYIALFLGAMAMASLAIWA

SEQ ID NO: 78571 - protein, 93 aa, Setaria italica
  Transcript Sequence Number=SeqID_12597
  Subcellular localization annotation: CTP_CleavageSite=44; ConfidenceScore=5.62e-01
MASSVSFGTVAPAVASPAGGRSTLGRRAARPSTARTIPAATKMVAAAKQEQKGLFDAIFGALYKEEQLLETDPILNKVEGKAPAPRRRRRQPP

SEQ ID NO: 78572 - protein, 263 aa, Setaria italica
  Transcript Sequence Number=SeqID_12598
  Gene Ontology: Mol. function=nucleotide binding; Biological process =defense response
  Homolog annotation: Hit_ID=Q9ZNV6; Match level="QueryCoverage=98%, HitCoverage=21%, E-value=3e-62, Identity=53%"; Hit description=Pib
WQELAEELKGYVNEKSYHVVLNDLSTIEEWDDIKVCFPNNKKGSRIIVCTPQVEVASLCVGQESQVLELKQFSTDQTIYAFYEKDGTDSPTLLPSSDAATSTLNLVAPTNEILGNQSKGSKDREVFRNNLTGIKTMTNALEESKLIGREKEASDVAGLISDKLGQQFLVISIWGMGGLGKTTLIKDVYQNQHLIGMFEKCVFVTVMRPFMLKELLKSLIMQLDTESSEKRRSIMDLGSGKRKELATMGVEALVKEVARLLEGF

SEQ ID NO: 78573 - protein, 67 aa, Setaria italica
  Transcript Sequence Number=SeqID_12599
  Subcellular localization annotation: CTP_CleavageSite=31; ConfidenceScore=5.03e-01
LNSHWICRFIVNCVMPSCTSKAQDDSSFSFRQGTGHVLDCNSRLPFLGRIDTFCQFTSIYRTTSRIF

SEQ ID NO: 78574 - protein, 329 aa, Setaria italica
  Transcript Sequence Number=SeqID_12600
  Gene Ontology: Mol. function=carbohydrate binding; Biological process= carbohydrate metabolic process
  Homolog annotation: Hit_ID=Q40784; Match level="QueryCoverage=92%, HitCoverage=92%, E-value=1e-175, Identity=97%"; Hit description =Putative apospory-associated protein C
  Pfam annotation: Domain name=Aldose_epim; Domain location=34-310; Score=301.0; E_value=2.6e-87; Accession=PF01263.12; Description =Aldose 1-epimerase
  Subcellular localization annotation: CTP_CleavageSite=45; ConfidenceScore=5.23e-01
MAAPAPAGAAASPPPPPQLPSPFAEFVKSPSGLEKVVLRGARNCCAEVYLYGGQVTSWKNDNGEELLFLSSKAIFKPPKAIRGGIPICFPQFGTHGNLEQHGFARNRFWSIDNDPPPLPVNPAIKAFVDLILRPSEEDLKIWPHSFEFRLRVALGPSGDLSLTSRIRNTNTDGRPFSYTFAYHTYFSVSDISEVRVEGLETMDYLDNLKAKERFTEQGDAIVFESEVDKVYLAAPSKIAIIDHEKKKTFVVTKEGLPDAVVWNPWDKKAKAMQDFGDGEYKNMLCVEPAAVEKPITLKPGEEWKGRLALSAVPSSYCSGQLDPLKVLHG

SEQ ID NO: 78575 - protein, 153 aa, Setaria italica
  misc_feature (88)..(88): Xaa can be any naturally occurring amino acid
  Transcript Sequence Number=SeqID_12601
  Gene Ontology: Mol. function=transferase activity, transferring glycosyl groups; Cellular component=integral to membrane; Biological process=protein amino acid glycosylation
  Homolog annotation: Hit_ID=B9S8X5; Match level="QueryCoverage=90%, HitCoverage=22%, E-value=5e-50, Identity=66%"; Hit description =Transferase, transferring glycosyl groups, putative
GLEPWFITEVIISGDFKLVSAIASGLPTSEDLENSNVEMLKSPPIPDGKDVDLLIGIFSTANNFKRRMAIRRTWMQYDAVRQGAVAVXFFVGLMVNEELWNEARTYGDIQVLPFVDYYSLITWKTLAICIYGVNTIIIKLNFSIPWTYYVVYN

SEQ ID NO: 78576 - protein, 236 aa, Setaria italica
  Transcript Sequence Number=SeqID_12602
  Gene Ontology: Mol. function=transferase activity, transferring glycosyl groups; Cellular component=integral to membrane; Biological process=protein amino acid glycosylation
  Homolog annotation: Hit_ID=B9S8X5; Match level="QueryCoverage=80%, HitCoverage=26%, E-value=4e-59, Identity=59%"; Hit description =Transferase, transferring glycosyl groups, putative
  Pfam annotation: Domain name=Galactosyl_T; Domain location=46-232; Score=-47.6; E_value=0.0022; Accession=PF01762.13; Description =Galactosyltransferase
VAIASGLPTSEDLENSNVEMLKSPPIPDGKDVDLLIGIFSTANNFKRRMAIRRTWMQYDAVRQGAVAVRFFVGLMVNEELWNEARTYGDIQVLPFVDYYSLITWKTLAICIYGVNTIIIKLNFSIPCFSCFIVLNCDLFDQTTAVSAKYVMKTDDDAFVRVDEIQSTIKQLNVSNGLLYGRINSYSGPHRNPMFMEIHGCSSLPFVLQQLMHQAHSSTTASGGLVCCMYDTVQVIR

SEQ ID NO: 78577 - protein, 81 aa, Setaria italica
  Transcript Sequence Number=SeqID_12603
ELLLVSLCCYNGSIRIRCYLLLSSLPSISFIYKDGTSLSLHQEQEVSSRRRLLLWLARRRWWGPAPKGKLRKGSSPMSKSE

SEQ ID NO: 78578 - protein, 127 aa, Setaria italica
  Transcript Sequence Number=SeqID_12604
  Gene Ontology: Mol. function=ATP-dependent helicase activity; Cellular component=nucleus; Biological process=ribosome biogenesis
  Homolog annotation: Hit_ID=Q6ATJ8; Match level="QueryCoverage=100%, HitCoverage=18%, E-value=1e-62, Identity=90%"; Hit description=DEAD -box ATP-dependent RNA helicase 16
  Pfam annotation: Domain name=DEAD; Domain location=1-125; Score=17.2; E_value=2.5e-06; Accession=PF00270.21; Description=DEADDEAH box helicase
FILVPTRELCQQVYNEASSLLEFCTSKLKVVQVTASMSHKDITVALSGPPNILVSTPACVATCISKGIMRGSSIKESLSMMILDEADLLLSYRCEDDLKALIPHIPRSCQSILMSATSSSDVDKLTK

SEQ ID NO: 78579 - protein, 622 aa, Setaria italica
  misc_feature (202)..(202): Xaa can be any naturally occurring amino acid
  Transcript Sequence Number=SeqID_12605
  Gene Ontology: Mol. function=ATP-dependent helicase activity; Cellular component=nucleus; Biological process=ribosome biogenesis
  Homolog annotation: Hit_ID=Q6ATJ8; Match level="QueryCoverage=89%, HitCoverage=82%, E-value=0.0, Identity=82%"; Hit description=DEAD -box ATP-dependent RNA helicase 16
  Pfam annotation: Domain name=DEAD; Domain location=65-246; Score =116.4; E_value=9.7e-32; Accession=PF00270.21; Description=DEADDEAH box helicase
  Pfam annotation: Domain name=Helicase_C; Domain location=319-428; Score=53.4; E_value=8.7e-13; Accession=PF00271.23; Description =Helicase conserved C-terminal domain
  Pfam annotation: Domain name=ResIII; Domain location=61-171; Score= -29.0; E_value=0.014; Accession=PF04851.7; Description=Type III restriction enzyme, res subunit
  Pfam module annotation: Pfam domain module=DEAD::Helicase_C::ResIII; Domain location=65-246::319-428::61-171
MEEKAEEVRQEVEGAGGAEGSPDAVDAGFAGEEEEEEEKEVSFDELGLDEQLKRALRKKGIAKATPIQQEAIPLILEGKDVVAKAKTGSGKTFAYLLPLLHELLKLSSEGRIRKPAPNAFILVPTRELCQQVYNEASSLLEFCTSKLKVVQVTASMSHKDITVALSGPPNILVSTPACVATCISKGIMRGSSIKESLSMMSXQGEQIRPVHPYRCEDDLKALIPHIPRSCQSILMSATSSSDVDKLTKLLLHNPFILTLTEVGRAKDDVIPKNVQQFWISCDVKDKMLHILALLKFELIQKKVLIFVNSIDAAFRLRLFLEKFGIRSAVLNAELPQNSRLHIIEAFNARLFDYLIATDDAKTKEEKQTDKENKKDARVSRKHLQQTLDAEFGVVRGIDFKNVFTVVNFDMPPDPAGYVHRIGRTGRANKTGASISLVSAEENSIFEEIEHMLRDVEKKDTDCISPFPLLMKDAVESLRYRAQDVARSVTTRDIQEARRQDIKNEILNSKKLKSHFEENPRDLDLLKHDKLLSNKEIPAHLRDVPDYLIDPKTKEASNVVKLSRAAMGIDKPQRRKRQGFKGGSGKSRDPLRTFSAEGKSRRRGRKEREGEPDRRKKSKKAES

SEQ ID NO: 78580 - protein, 65 aa, Setaria italica
  Transcript Sequence Number=SeqID_12606
TQICYLSLLKSVSVYQGNLRCIFKLHSMAPAFFGLLFASFSPVDSGELGKSLHCFRVYWQKTEGT

SEQ ID NO: 78581 - protein, 136 aa, Setaria italica
  Transcript Sequence Number=SeqID_12607
  Gene Ontology: Cellular component=endoplasmic reticulum
  Homolog annotation: Hit_ID=B6TQ43; Match level="QueryCoverage=100%, HitCoverage=49%, E-value=7e-44, Identity=68%"; Hit description=Seed maturation protein
MAEQPHAEGGASPKHETLMEKLADKLHAGGGKGDSSSSDSDNDERPRPSAPAAEVKPSFSVSAAAAAAEARAKVFRLFGREQPIHKALGGGKPADVFLWRNRNISAGVLGGVTAIWILFECLGYHLLTFVCHGLIF

SEQ ID NO: 78582 - protein, 92 aa, Setaria italica
  Transcript Sequence Number=SeqID_12608
NTCYEKVKILDVACTSKLTVVFGSQSMQKLELLTVRCGSASAFKFFELKCLSKLKEVRLIGSQDGILKNDLETQLNEHPGRPALKLDGSSSS

SEQ ID NO: 78583 - protein, 91 aa, Setaria italica
  misc_feature (21)..(21): Xaa can be any naturally occurring amino acid
  Transcript Sequence Number=SeqID_12609
  Gene Ontology: Cellular component=endoplasmic reticulum
  Homolog annotation: Hit_ID=B6TQ43; Match level="QueryCoverage=48%, HitCoverage=15%, E-value=6e-16, Identity=90%"; Hit description=Seed maturation protein
RIPEVIIPEDLVVNIALSTRXEINRAFVNLRQIALGRDIKKFLMDAAAGGSTMEMRMRNSGCSQGRTRMSSLKKRSVNLGSSQWSQTMILS

SEQ ID NO: 78584 - protein, 163 aa, Setaria italica
  Transcript Sequence Number=SeqID_12610
  Gene Ontology: Mol. function=sequence-specific DNA binding; Cellular component=intracellular; Biological process=regulation of transcription, DNA-dependent
  Homolog annotation: Hit_ID=B6UBN3; Match level="QueryCoverage=90%, HitCoverage=90%, E-value=5e-82, Identity=97%"; Hit description =Nuclear transcription factor Y subunit B-3
  Pfam annotation: Domain name=CBFD_NFYB_HMF; Domain location=21-86; Score=131.0; E_value=3.9e-36; Accession=PF00808.15; Description =Histone-like transcription factor (CBFNF-Y) and archaeal histone
  Pfam annotation: Domain name=Histone; Domain location=15-89; Score= -0.2; E_value=0.094; Accession=PF00125.16; Description=Core histone H2AH2BH3H4
  Pfam module annotation: Pfam domain module=CBFD_NFYB_HMF::Histone; Domain location=21-86::15-89
MADDGGSHEGGGGGGVREQDRFLPIANISRIMKKAVPANGKIAKDAKETLQECVSEFISFVTSEASDKCQKEKRKTINGDDLLWAMATLGFEDYVDPLKIYLQKYREMEGDSKLSTKAGEGSVKKDAISPHGGTSSSSNQLVQHGVYNQGMGYMQPQYHNGDT

SEQ ID NO: 78585 - protein, 159 aa, Setaria italica
  Transcript Sequence Number=SeqID_12611
  Gene Ontology: Mol. function=transferase activity, transferring glycosyl groups; Cellular component=integral to membrane; Biological process=cell wall organization and biogenesis
  Homolog annotation: Hit_ID=Q7PC73; Match level="QueryCoverage=98%, HitCoverage=27%, E-value=6e-60, Identity=76%"; Hit description =Probable mannan synthase 5
GVRGAWAWVRSRAVAPALQAVVWACMVMSVMLVVEATYNCAVSVGVKLLGWKPERRFKWEPLAGDGDEEKGDAAAAAAAAYPMVMVQIPMYNELEVYKLSIGAACELKWPKERLIVQVLDDSTDPSIKNLVEKECENWSSKGVNVKYATRIGHKGFKAG

SEQ ID NO: 78586 - protein, 196 aa, Setaria italica
  misc_feature (191)..(191): Xaa can be any naturally occurring amino acid
  Transcript Sequence Number=SeqID_12612
  Homolog annotation: Hit_ID=B6TAD3; Match level="QueryCoverage=100%, HitCoverage=58%, E-value=5e-76, Identity=76%"; Hit description =Scramblase family protein
  Pfam annotation: Domain name=Scramblase; Domain location=100-195; Score=-81.8; E_value=0.00063; Accession=PF03803.7; Description =Scramblase
  Subcellular localization annotation: CTP_CleavageSite=18; ConfidenceScore=5.01e-01
MRWLPRLLSHAAAAGRAAAAARSTTSHVRGGSHGFASGGWDGSPAVPREWLRKLWGEELRKRKEAARVIGAFARSYRSVEAAGAAREAPSRSYQFDDRDLDPVEAKLAPLLARANLVIARDIEWASIMFAFEQESRYIIMDPLFPQSPVGFIREKSNVIFRQLLRTRRPFVAEITDAMGNEIFKVRRPFWXINSSI

SEQ ID NO: 78587 - protein, 319 aa, Setaria italica
  misc_feature (97)..(97): Xaa can be any naturally occurring amino acid
  Transcript Sequence Number=SeqID_12613
  Gene Ontology: Cellular component=mitochondrion; Biological process =cellular response to stress
  Homolog annotation: Hit_ID=B6TAD3; Match level="QueryCoverage=100%, HitCoverage=100%, E-value=1e-140, Identity=77%"; Hit description =Scramblase family protein
  Pfam annotation: Domain name=Scramblase; Domain location=79-306; Score=236.5; E_value=6.5e-68; Accession=PF03803.7; Description =Scramblase
  Subcellular localization annotation: CTP_CleavageSite=18; ConfidenceScore=5.01e-01
MRWLPRLLSHAAAAGRAAAAARSTTSHVRGGSHGFASGGWDGSPAVPREWLRKLWGEELRKRKEAARVIGAFARSYRSVEAAGAAREAPSRSYQFDXGTSIQSRDIEWASIMFAFEQESRYIIMDPLFPQSPVGFIREKSNVIFRQLLRTRRPFVAEITDAMGNEIFKVRRPFWFINSSIYAEVDGKEIGVVHRRWHLWRRIYDLYLGNRQFAVVENPGFWNWTFSLVDEDDKLLAQIDRNWRGIGFELFTDAGQYAIRFGDEGLRQKFALAADVEELHVARQLTLPERAVALALAISLDSDYFSRRRGWGLPFLIATE

SEQ ID NO: 78588 - protein, 84 aa, Setaria italica
  Transcript Sequence Number=SeqID_12614
DIVFCSGMLRSILSRTKDVIKLFLLGGSLAIATGTFDITSCHVVTYCYLGLEYKSLLTEGSDSKCLAHSFMLLIFIHHCPAASH

SEQ ID NO: 78589 - protein, 90 aa, Setaria italica
  Transcript Sequence Number=SeqID_12615
  Gene Ontology: Mol. function=ATP binding
  Homolog annotation: Hit_ID=Q7XHX3; Match level="QueryCoverage=98%, HitCoverage=18%, E-value=1e-27, Identity=72%"; Hit description =SNF2/SWI2 family transcription factor-like protein
LGVPIDDDANADFTPKSDSQFDLAAFYEAVKPSINAEQLEGGLPDLIPQLRPYQLRAAHWMVQREKGNTLHQEYVNSAPYCVPIDFIHKN

SEQ ID NO: 78590 - protein, 108 aa, Setaria italica
  misc_feature (39)..(39): Xaa can be any naturally occurring amino acid
  misc_feature (47)..(47): Xaa can be any naturally occurring amino acid
  misc_feature (53)..(53): Xaa can be any naturally occurring amino acid
  Transcript Sequence Number=SeqID_12616
  Subcellular localization annotation: CTP_CleavageSite=88; ConfidenceScore=5.44e-01
TNRWGPRVRPAGRRTGGGRASRGAPRRWPPRACRRRRGXRRRERADXRGSSRXGGEGGAPRGRRRPRRCWRHRRHHRCVSWRQPLLCWSASLRSFSPTLLETTSPQAP

SEQ ID NO: 78591 - protein, 236 aa, Setaria italica
  misc_feature (127)..(127): Xaa can be any naturally occurring amino acid
  misc_feature (139)..(139): Xaa can be any naturally occurring amino acid
  Transcript Sequence Number=SeqID_12617
  Subcellular localization annotation: CTP_CleavageSite=17; ConfidenceScore=5.59e-01
RRRPRPGRGCWPASSCRATRASGNVSRPTKQRLSPAHAPMMTPMTPAAARPAAAPWSSSLSTSPRRSSTGSARSRRRTSSPSASPGRPPSRSASRGPSPTCSSTCRRTTGPTAAGSSSPSRCTPATXAGGDPEPRALGXTRTASGASAPCPAAAWPSRTSAGARRASSSSTRSPARGRESTSRSCAGTRSSSSVECWPPRKTTARSCSAVTAPMSSSPSSASRCTGWTWRAGAGRR

SEQ ID NO: 78592 - protein, 90 aa, Setaria italica
  Transcript Sequence Number=SeqID_12618
  Subcellular localization annotation: CTP_CleavageSite=60; ConfidenceScore=5.03e-01
LSFLPNNERTITPNPKTIPNPAAASTDPLDPWPPPPPPLPATPLYPTGAWPSGGTTPPPSARTGGPSLPAPPPPALNSTSPSSSPSLPPP

SEQ ID NO: 78593 - protein, 113 aa, Setaria italica
  misc_feature (65)..(65): Xaa can be any naturally occurring amino acid
  Transcript Sequence Number=SeqID_12619
  Subcellular localization annotation: CTP_CleavageSite=35; ConfidenceScore=5.06e-01
IESIANSSRRPRLQIEAYPNPSHPQSGRRVYRSVRSMAAAAAAAAGDSAVPNWVMLERWAFRRDXDPASFREDRRTFASGTTSAGTQFDVSFILAEPPTPSRLYLSWPEGPRT

SEQ ID NO: 78594 - protein, 340 aa, Setaria italica
  Transcript Sequence Number=SeqID_12620
  Gene Ontology: Mol. function=receptor activity; Cellular component =endoplasmic reticulum lumen
  Pfam annotation: Domain name=DUF1618; Domain location=136-270; Score =18.7; E_value=6.6e-07; Accession=PF07762.6; Description=Protein of unknown function (DUF1618)
IDESDPFGEVVHDYFIYIADPSSQWTPLLRRLPPCTEYDDYFERQVTRVLPALAVGLLCHGEDEFAVAHLDIRVSQKKLPIQAELCVLRSSLSCSDDAKWETKILPIQYQYDDLSSDFLYWSVDGVVPFKNALCFVNYCRGILFCDGVFEDSPKVSYIRLPLDTYIRGADGEARKGMYHGLCVTEGGHRFGYVVCIVHDGKSYGPSMPNTGFTLTSRTFKMTGNCTTPWQWNEDAVVTSDELWHANTMESLPHDIVMLPLLSMDKANVAHLSLIDWDGGFSLVSIDLSNMQVMGPVITYLKGKDDTADADIVEEKKGLGAHFIPSEFPKFLDLRKRENHP

SEQ ID NO: 78595 - protein, 404 aa, Setaria italica
  Transcript Sequence Number=SeqID_12621
  Gene Ontology: Mol. function=receptor activity; Cellular component =endoplasmic reticulum lumen
  Pfam annotation: Domain name=DUF1618; Domain location=253-390; Score =36.5; E_value=2e-08; Accession=PF07762.6; Description=Protein of unknown function (DUF1618)
  Subcellular localization annotation: CTP_CleavageSite=18; ConfidenceScore=5.41e-01
TARSSTAAASPSTRPSPAAAAAAGDSAVPNWVMLERLAFRRDDPASFREDRRTFASGTTSAGTQFDVSFILAEPPTPSRLYLSWPEGPKQDSQGLVMAANRNLVLFRLDSLVDKSQPFGEVVHDYFIYIANPSSQQTPLLRRLPPCTEYNVYIEMQVTRVFPVLAVGLLCHGEDEFAVAHLAIRPRKKKSGSRIKKSAMQAELCVLRSSLSSSDDAKWETKVFPLQYQYDDLHYDFLNWEVDGVVPFKNALCWVNYCRGILFFDGVFEDRPKVSYIRLPLDTSFRGTGTDADSLKGMYRGLCVTEGGHRLVFVDVARHDGKCYGPRMPNTGFTLTSRTLKMTGNCTTPWEWNQDAVVTSDELWHANTMESLPRDIVMLPLLSMDKANVATTTFPDWETLSKLKG

SEQ ID NO: 78596 - protein, 313 aa, Setaria italica
  Transcript Sequence Number=SeqID_12622
  Gene Ontology: Mol. function=receptor activity; Cellular component =endoplasmic reticulum lumen
  Pfam annotation: Domain name=DUF1618; Domain location=128-265; Score =56.8; E_value=8.2e-14; Accession=PF07762.6; Description=Protein of unknown function (DUF1618)
LTIRADPSSQQTPLLRRLPPCTEYNVYFEMQDTRAFPVLAVGLLCHGEDEFAVAHLTIRSRQKKSGSRIKKSAMQAELCVLRSSLSCSDDAKWETKVVPLQYQYDDLYYDFLNWEVDGVVPFKNALCWVNYCRGILFCDGVFEDRPKVSYIRLPLDTSFRGTGTDADALKGMYRGLCVTEGGHRLVFVDVARHDGKCYGPRMPNTGFTLTSRTLKMTGNCTMPWEWNEDAVVTSDELWHANTMESLPHDIVMLPLLSMDKANVAHLSLLDWDSGRFSLVSIDLSNMQVMGSVITYLEGEDDPADADIVKAKVK

SEQ ID NO: 78597 - protein, 455 aa, Setaria italica
  misc_feature (251)..(251): Xaa can be any naturally occurring amino acid
  Transcript Sequence Number=SeqID_12623
  Gene Ontology: Mol. function=receptor activity; Cellular component =endoplasmic reticulum lumen
  Pfam annotation: Domain name=DUF1618; Domain location=244-384; Score =11.8; E_value=2.5e-06; Accession=PF07762.6; Description=Protein of unknown function (DUF1618)
TSVRSMAAAAAAAAGDSAVPNWVMLERWAFRRDDPASFREDRRTFASGTTSAGTQFDVSFILAEPPTPSRLYLSWPEGPKKRGQGLVMAANRNLVLFRLDSLVDESEPFGEVVHDYFIYIADPSSQQTPLLRRLPPCTEYNVYFEMQDTRAFPVLAVGLLCHGEDEFAVAHLTIRSRKKKSGSRIKKSAMQAELCVLRSSLSCSDDAKWETKVVPLQYQYDDLYYDFLNWEVDGVVPFQDALCWVNYCSRXSFSCDVVFEDRPKVSYIRLSWYYFLFRRVLGTDADALKGMYRGLCVTEGGHRLVFVDVARHDGKCYGPRMPNTGFTLTSRTLKMTGNCTMPWEWNEDAVVTSDELWHANTMESLPHDIVMLPLLSMDKANVAHLSLLDWDSGRFSLVSIDLSNMQVMGSVITYLEGEDDPADADIVKAKKELCAHFIPSEFPKFLGLRERENHP

SEQ ID NO: 78598 - protein, 44 aa, Setaria italica
  Transcript Sequence Number=SeqID_12624
LIATYDISRRNTITLLGVKVPYCNIRCYGWSATSPLQTSSYACH

SEQ ID NO: 78599 - protein, 68 aa, Setaria italica
  Transcript Sequence Number=SeqID_12625
CWLKGEQQSVSVCLRRGANQMCQQHVDSAMTKLARDNTDADQVCTSRHASRLPLATLINKTCLIASCL

SEQ ID NO: 78600 - protein, 110 aa, Setaria italica
  Transcript Sequence Number=SeqID_12626
VGRCVGAATLVLGRRSPRAGVTDEGRKRDLATVLDLTDGTDDESHGVTLLLDSKVYINSVLEHIWPPAGIVPLRVSPLPPSQITIYFDFSKYINFYCISGHFTVYLDILT

SEQ ID NO: 78601 - protein, 146 aa, Setaria italica
  Transcript Sequence Number=SeqID_12627
GSDARRAMPLNMLITGGLDVQMLLRNVESGQPNLFGNSRNWELPFLQGFLMAQNHTGASSSIPITAGSSRGSNRRYASRSVPGVGSSLLGPQIDEAEVHAASLGVGSEITAPMFTPGTELPCTVKLRIWRHNIKEPCRSLVTGRSY

SEQ ID NO: 78602 - protein, 509 aa, Setaria italica
  misc_feature (52)..(52): Xaa can be any naturally occurring amino acid
  misc_feature (316)..(316): Xaa can be any naturally occurring amino acid
  misc_feature (497)..(497): Xaa can be any naturally occurring amino acid
  Transcript Sequence Number=SeqID_12628
  Gene Ontology: Cellular component=cytoplasmic vesicle; Biological process=multicellular organismal development
  Homolog annotation: Hit_ID=B9T5V8; Match level="QueryCoverage=88%, HitCoverage=83%, E-value=8e-84, Identity=68%"; Hit description =Nucleotide binding protein, putative
  Pfam annotation: Domain name=WD40; Domain location=109-145; Score =15.6; E_value=0.2; Accession=PF00400.24; Description=WD domain, G -beta repeat
  Pfam annotation: Domain name=WD40; Domain location=66-105; Score =45.3; E_value=2.4e-10; Accession=PF00400.24; Description=WD domain, G-beta repeat
  Pfam module annotation: Pfam domain module=WD40::WD40; Domain location=109-145::66-105
NFGLRMLSTISFIGQNHSPCTAGVPNIALLCLLQGQPLQLRSVQMEESLHLXHGDHTVKIIDYQTGKCLKVLQGHQRTPWVVRFHPLHSDILASGSLDCEVRLWDAKTSHCTTVLGFYRPIASIAFHATGELMAVASGHKLFIWDYNSRALDPPMILRTRRSLRAVQFHPHAAPYLLTAEVHDRDSEDSTMTPALLKNYAFRDIPLLGSSGVDNLISELPYTHNFEHVGASSSVPVNADSFAGSMTSVPGVGGSLLGTHAVSFGVGSERATSLLDNGTELPCAVKLRIWRHNIKDPFIALEPEACLLTVPHALQLXIYCSEMGTHFSPCGRFLVACVACVLPQRDGDHGSQLHDNYDSTGAGTSPTRHTLPSRQIVYELRVYSLEKATFGTVLASRAVKAAHCLTSVQFSPTSEHILLAYGRQHNSLLRTILIDGETRIPLYRVLEVYRVSDMELVRVLPSAGDEVNVACFHPSPGAGLVYGTKEGKLRFLQHNSAXHGLEFLCWGQYS

SEQ ID NO: 78603 - protein, 436 aa, Setaria italica
  Transcript Sequence Number=SeqID_12629
  Homolog annotation: Hit_ID=B9T5V8; Match level="QueryCoverage=81%, HitCoverage=45%, E-value=1e-100, Identity=55%"; Hit description =Nucleotide binding protein, putative
QELQGSSSISNFERFGARDDLHVSSPSNTEPIPSTAGLSGSDARRAMPLNMLITGGLDVQMLLRNVESGQPNLFGNSRNWELPFLQGFLMAQNHTGLHPALVNNNVLEDLSIDGTAGTNNLTRESPHMHNFGRPGASSSIPITAGSSRGSNRRYASRSVPGVGSSLLGPQIDEAEVHAASLGVGSEITAPMFTPGTELPCTVKLRIWRHNIKEPCRSLEPEACRLTISHAVLCSEMGAHFSPCGRFLVACVACLLPQTEGDRGSQLPVPYDSAGAGSSPTRHPLPSHRVIYELRVYSLEEATFGNILASRAIRAAHCLTSIQFSPTSEHILLAYGRRHGSLLRSIVMEGDNGIPVYTILEVYRVSDMELVRVLPSAEDEVNVACFHPSPGGGLVYGTKEGKLRILQHNGADTTTMGMGCFVEENMLEAIQRYALEG

SEQ ID NO: 78604 - protein, 108 aa, Setaria italica
  Transcript Sequence Number=SeqID_12630
  Gene Ontology: Mol. function=drug transporter activity; Cellular component=membrane; Biological process=multidrug transport
  Homolog annotation: Hit_ID=B9R7N6; Match level="QueryCoverage=94%, HitCoverage=21%, E-value=1e-29, Identity=58%"; Hit description =Multidrug resistance pump, putative
VVFAFSLLLNSVQPVLSGVAVGAGWQWLVAYVNLGCYYLIGIPVGYLIAFPLRGGVTGMWGGMLSGVGLQTLILVAITMRTNWDREASEAHSRIQKWGGSAAVKALGE

SEQ ID NO: 78605 - protein, 119 aa, Setaria italica
  Transcript Sequence Number=SeqID_12631
  Gene Ontology: Mol. function=heat shock protein binding
  Homolog annotation: Hit_ID=Q8RYN2; Match level="QueryCoverage=98%, HitCoverage=7%, E-value=3e-22, Identity=47%"; Hit description =Auxilin-like protein
NPQEMMQNGSELEQLGNWTSDAEFYELVSNDQRCRPNEAACQGNNDLMTNSFTKLDQSEKEKAEGFAGEPRRFRKLWDSSNTTVLRMEHVNQVKDGMASLEAEQKAPRLPEVPFCDERV

SEQ ID NO: 78606 - protein, 317 aa, Setaria italica
  misc_feature (235)..(235): Xaa can be any naturally occurring amino acid
  Transcript Sequence Number=SeqID_12632
  Gene Ontology: Mol. function=4 iron, 4 sulfur cluster binding; Cellular component=integral to membrane; Biological process=protein -chromophore linkage
  Homolog annotation: Hit_ID=P56766; Match level="QueryCoverage=100%, HitCoverage=42%, E-value=1e-156, Identity=87%"; Hit description =Photosystem I P700 chlorophyll a apoprotein A1
  Pfam annotation: Domain name=PsaA_PsaB; Domain location=1-311; Score =186.8; E_value=6.3e-53; Accession=PF00223.11; Description =Photosystem I psaApsaB protein
ISHLNWVCIFLGFHSFGLYIHNDTMSALGRPQDMFSDTAIQLQPIFAQWIQNIHAGAPGVTAPGATTSTSLTWGGSELVAVGGKVALLPIPLGTADFLVHHIHAFTIHVTVLILLKGVLFARSSRLIPDKANLGFRFPCDGPGRGGTCQVSAWDHVFLGLFWMYNSISVVIFHFSWKMQSDVWGTISDQGIVTHITGGNFAQSSITINGWLRDFLWAQASQVIQSYGSSLSAYGXLFFLGAHFVWAFSLMFLFSGRGYWQELIESIVWAHNKLKVAPATQPRALSIIQGRAVGVTHYLLGGIATTWAFFLARIIAVG

SEQ ID NO: 78607 - protein, 308 aa, Setaria italica
  Transcript Sequence Number=SeqID_12633
  Subcellular localization annotation: CTP_CleavageSite=51; ConfidenceScore=5.05e-01
LLSTLSVRLGSKLKQIFVTKQQNTSNKAKRRPGACDLHSNLYRFSDQTSCHCFMSGHADGGVEVKQVPQSPISISTEPSNLLVKIAAPESSKENSGVMWSSSPDQLEDPRKPFQHSNCSGSPSVSESGSDIYTKREVIQKLRQQLKRRDEMIMEMQAQIADLKNSLTIQVTQNTNLQSQLDGTNRDLFESEREVQHLRKIVADYCVAEPLLHDKPFQDGQWQSNGTNGHVNGYSDSSIDDPVLHFNGVEKRKGEAERVELLKREVGELKEVIEGKDFLLQSYKEQKVELCSKVRELQEKLSAQVPNIL

SEQ ID NO: 78608 - protein, 804 aa, Setaria italica
  misc_feature (58)..(58): Xaa can be any naturally occurring amino acid
  misc_feature (496)..(496): Xaa can be any naturally occurring amino acid
  Transcript Sequence Number=SeqID_12634
  Gene Ontology: Mol. function=protein tyrosine phosphatase activity; Cellular component=vacuolar membrane; Biological process =dephosphorylation
  Homolog annotation: Hit_ID=B9T6R5; Match level="QueryCoverage=94%, HitCoverage=88%, E-value=0.0, Identity=54%"; Hit description =Phosphoprotein phosphatase, putative
  Pfam annotation: Domain name=Myotub-related; Domain location=132-254; Score=200.3; E_value=5.2e-57; Accession=PF06602.6; Description =Myotubularin-related
VMELGTIPLTTIERLNDDVKLQPLPHLSDKSRPLELLQVIGKDMRIIVFAFLPKQKRXVFDALRRCTKPANLWDLYAFSCDPSTIKNDSEPKWRLLREYFRLFRKSLPQLRGVEEVSLSNDWWRLTRVNSSYALCSTYPSELIVPRGISDEDLFQASTFRSGKRLPVISWCDPGTGAVLARSAQPMVGLMMNFRNNADEKLVCALSSRTTNDKVSPRKLYIIDARPRANALANGAKGGGSESSSNYPRSEVLFLGIQNIHTMRDSLSRLRDYVDAHGSISSNGTPSAVSVVGDRRNRGSTWGGGNLNSMTSFSSTLGEWLNHIQNILVGASWIAAQIAEEAASVLVHCSDGWDRTTQLVALACLLLDPYYRTFSGFQALVEKDWLAFGHPFAERMGVPTVAENGGSQYELLRQPSLGNLSSSPSRTPLGPSGPSSNASVQSQTSNNSSPILLQWLDCISQLLRLYPSAFQFSSKFLVDFMDCVLSCRFGNFLCNSXFLICNESEREREQSGVTNSCRCMWSYLADLRASGGSFHEHYNPFYDPVKHNGALLPPAAALAPTLWPQFYLRWTCPNESQGGDLESQWHAMNKKYAEAMKAKDIAEWRAKDIKMKMESVKQDLQRERHASNTASATAQSAQRENAAIKKAIESIGCTIKFSTSENQEDRTEVLSCSLRRGTDARGQEDENGDFSVSISAIEDSLVSEAPGDHFCESLCPFRTRDGCRWPDAPCAQLGSQFVGLKANFDAFDRLSIQDCYFGSRVVDHELFLLVLDALGSCQWNFFVVGTSRSASTVKGCVESNSMIHI

SEQ ID NO: 78609 - protein, 49 aa, Setaria italica
  misc_feature (49)..(49): Xaa can be any naturally occurring amino acid
  Transcript Sequence Number=SeqID_12635
  Gene Ontology: Mol. function=binding; Cellular component=endoplasmic reticulum; Biological process=intracellular protein transport
  Homolog annotation: Hit_ID=Q6X9T0; Match level="QueryCoverage=77%, HitCoverage=32%, E-value=2e-11, Identity=89%"; Hit description=Gamma- SNAP (Fragment)
LYNYPHFWLSDRYSDAAAFFLRLGSAADKCNAINSQCKAYLSAIIIYLX

SEQ ID NO: 78610 - protein, 83 aa, Setaria italica
  Transcript Sequence Number=SeqID_12636
  Gene Ontology: Mol. function=binding; Cellular component=endoplasmic reticulum; Biological process=intracellular protein transport
  Homolog annotation: Hit_ID=B9SV66; Match level="QueryCoverage=91%, HitCoverage=26%, E-value=2e-27, Identity=80%"; Hit description=Gamma- soluble nsf attachment protein, putative
IYSFFSRTKLSFTRWNADWKSATSLYEQAAIGFRKDNEKAKDAFEKASKGQEMISSPWDAAKHMESAAALAKELGRWNEVSDF

SEQ ID NO: 78611 - protein, 296 aa, Setaria italica
  Transcript Sequence Number=SeqID_12637
  Gene Ontology: Mol. function=binding; Cellular component=endoplasmic reticulum; Biological process=intracellular protein transport
  Homolog annotation: Hit_ID=B9SV66; Match level="QueryCoverage=94%, HitCoverage=95%, E-value=1e-121, Identity=73%"; Hit description =Gamma-soluble nsf attachment protein, putative
  Pfam annotation: Domain name=NSF; Domain location=131-142; Score=2.2; E_value=1.4e+02; Accession=PF02071.12; Description=Aromatic-di -Alanine (AdAR) repeat
  Pfam annotation: Domain name=NSF; Domain location=151-162; Score=2.7; E_value=1.2e+02; Accession=PF02071.12; Description=Aromatic-di -Alanine (AdAR) repeat
  Pfam annotation: Domain name=NSF; Domain location=32-43; Score=10.1; E_value=9.2; Accession=PF02071.12; Description=Aromatic-di-Alanine (AdAR) repeat
  Pfam annotation: Domain name=NSF; Domain location=72-83; Score=7.7; E_ value=22; Accession=PF02071.12; Description=Aromatic-di-Alanine (AdAR) repeat
  Pfam annotation: Domain name=NSF; Domain location=92-103; Score=3.9; E_value=82; Accession=PF02071.12; Description=Aromatic-di-Alanine (AdAR) repeat
  Pfam annotation: Domain name=TPR_2; Domain location=112-145; Score =9.7; E_value=2.1; Accession=PF07719.9; Description=Tetratricopeptide repeat
  Pfam annotation: Domain name=TPR_2; Domain location=152-185; Score =9.3; E_value=2.4; Accession=PF07719.9; Description=Tetratricopeptide repeat
  Pfam annotation: Domain name=TPR_2; Domain location=33-66; Score=3.6; E_value=12; Accession=PF07719.9; Description=Tetratricopeptide repeat
  Pfam annotation: Domain name=TPR_2; Domain location=73-106; Score =4.2; E_value=10; Accession=PF07719.9; Description=Tetratricopeptide repeat
  Pfam module annotation: Pfam domain module=NSF::NSF::NSF::NSF::NSF::TP R_2::TPR_2::TPR_2::TPR_2; Domain location=131-142::151-162::32-43::72- 83::92-103::112-145::152-185::33-66::73-106
MASSSDPDRLMTKADKLTKLSFTRWNADWKSATSLYEQAAIAYRFRKDNEKAKDAFEKASKGQEMISSPWDAAKHMESAAALAKELGRWNEVSDFYRRASELYRECGRPQPASDALAKGASALEEKSPEEAIKMYDEACSVLEEDGKEQMAFDLYRAAAALYIKMEKYSDAAAFFLRLGSAADKCNAINSQCKAYLSAIIIYLYAHDFQQAQKCYNDCSEVQAFLNSDQNRCAMKLLSAYEEGDAEEIKRLAQSSAFNHLDHVVIRLARQLPTGDLQAIKKAADDGEDSLDEDDLT

SEQ ID NO: 78612 - protein, 137 aa, Setaria italica
  Transcript Sequence Number=SeqID_12638
  Homolog annotation: Hit_ID=B9R7B4; Match level="QueryCoverage=98%, HitCoverage=17%, E-value=4e-31, Identity=52%"; Hit description=Fms interacting protein, putative
SKAMKNGPKVMLEAKVKISIEYPLRPPLFELRLLSEKSETLKWHNDLRAMETEVNLHILRSLPSSCEDYILTHQVMCLAMLFDMHFDEDYEKRKVTSVIDVGLCKPVSGTMLTRSVRGRDRRQTIYWRGADCSSSYL

SEQ ID NO: 78613 - protein, 352 aa, Setaria italica
  misc_feature (265)..(265): Xaa can be any naturally occurring amino acid
  Transcript Sequence Number=SeqID_12639
  Gene Ontology: Mol. function=ATP binding; Cellular component=nucleus
  Homolog annotation: Hit_ID=Q5JQR9; Match level="QueryCoverage=89%, HitCoverage=39%, E-value=2e-65, Identity=47%"; Hit description =OSJNba0093F12.23 protein
WPGRILGPEELPPSQIMSPRSGTPVKLLGREDASVDWYNLEKSKRVKAFRCGEFDACIEKAEATQGTLVKKREKYARREDAILHALELERKQLASKYQTQGFKPEPTGNISACTKHRKDLGSTRYKSKKSKKRKDASVPLEVKKEAGHCFVHAGSKRNFSECLAQGNVVSNHMGDFSHLRSSQGGSTLESKERSTIVKKNRSDGSDFEDSFVSKSDRRRPLAHVLQISEKSPHHLEQNDDYGTLLIGENNGPSLATSRARRSKYXYMASDSGETQSHSDLPSVQMTSTGADFENESYLQPGYFSEEQTSSDFVEKQITESSERECSESETEDDAELLQIVIICSNHGEGCVG

SEQ ID NO: 78614 - protein, 96 aa, Setaria italica
  Transcript Sequence Number=SeqID_12640
  Gene Ontology: Mol. function=sequence-specific DNA binding; Cellular component=nucleus; Biological process=regulation of transcription, DNA-dependent
  Homolog annotation: Hit_ID=Q94D89; Match level="QueryCoverage=100%, HitCoverage=62%, E-value=2e-46, Identity=80%"; Hit description=WRKY8
  Pfam annotation: Domain name=WRKY; Domain location=47-96; Score=99.3; E_value=1.3e-26; Accession=PF03106.7; Description=WRKY DNA -binding domain
DEFDEDEPDSKRWRRDGGDGEGISMAGNRTVREPRVVVQTMSDVDVLDDGYRWRKYGQKVVKGNPNPRSYYKCTTAGCPVRRHVERACHDTRAVVT

SEQ ID NO: 78615 - protein, 77 aa, Setaria italica
  misc_feature (1)..(23): Xaa can be any naturally occurring amino acid
  Transcript Sequence Number=SeqID_12641
XXXXXXXXXXXXXXXXXXXXXXXVKLDFLVMAATFLGVPSESGDYKKYGYGNFQMDQNPTKSRNDFSGLRKTTSTET

SEQ ID NO: 78616 - protein, 98 aa, Setaria italica
  Transcript Sequence Number=SeqID_12642
  Homolog annotation: Hit_ID=B9SSN6; Match level="QueryCoverage=54%, HitCoverage=15%, E-value=4e-16, Identity=77%"; Hit description=Non -imprinted in Prader-Willi/Angelman syndrome region protein, putative
YFVVSFCIFAQDWDRQNPTQIVTEMCGFVTILSGTFLLHKTKDMADGGTSFLPYRRLCLPLWIACSETIFVCECRAFDFIFLPSSYVFVSAVLQANRQ

SEQ ID NO: 78617 - protein, 357 aa, Setaria italica
  Transcript Sequence Number=SeqID_12643
  Homolog annotation: Hit_ID=B9SSN6; Match level="QueryCoverage=95%, HitCoverage=96%, E-value=1e-131, Identity=70%"; Hit description=Non -imprinted in Prader-Willi/Angelman syndrome region protein, putative
  Pfam annotation: Domain name=7TM_GPCR_Str; Domain location=120-302; Score=-181.8; E_value=0.098; Accession=PF10326.1; Description =Serpentine type 7TM GPCR chemorecepto
  Pfam annotation: Domain name=DUF6; Domain location=7-140; Score=4.0; E_value=0.045; Accession=PF00892.12; Description=Integral membrane protein DUF6
  Pfam annotation: Domain name=DUF803; Domain location=19-318; Score =690.4; E_value=1.5e-204; Accession=PF05653.6; Description=Protein of unknown function (DUF803)
  Pfam module annotation: Pfam domain module=7TM_GPCR_Str::DUF6::DUF803; Domain location=120-302::7-140::19-318
MDVASTASASGGGRWYTGMSADNIKGLVLALSSSLFIGASFIIKKKGLKKAASSGVRAGVGGYSYLYEPLWWVGMITMIVGEVANFAAYAFAPAILVTPLGALSIIISAVLAHVMLREKLHIFGILGCVLCVVGSTTIVLHAPPEREIESVTEVWDLATEPAFMCYAAVVIGIAVILVYRFVPLYGQTHVMVYIGVCSLVGSISVMSVKALGIALKLTFSGTNQLIYPQTWAFTLVVISCVITQMNYLNKALDTFNTAVVSPIYYTMFTSLTILASVIMFKDWDRQNPTQIVTEMCGFVTILSGTFLLHKTKDMADGGLSTSSSFRLPTSSSVRFSKQTDNDSEGIPLRSESFRAPH

SEQ ID NO: 78618 - protein, 64 aa, Setaria italica
  Transcript Sequence Number=SeqID_12644
EHRRWPATSPPPPKPKHLPVSPPPSPTPAREIVQQQRIWMLLPMHDVNYQRYRLVLGKLCSFGS

SEQ ID NO: 78619 - protein, 174 aa, Setaria italica
  misc_feature (10)..(10): Xaa can be any naturally occurring amino acid
  Transcript Sequence Number=SeqID_12645
  Gene Ontology: Mol. function=sucrose synthase activity; Cellular component=plasma membrane; Biological process=sucrose metabolic process
  Homolog annotation: Hit_ID=Q9FX32; Match level="QueryCoverage=100%, HitCoverage=18%, E-value=1e-75, Identity=77%"; Hit description =Sucrose synthase, putative
LIPDAKGTKXNVELEPVENTKHCSILRVPFKTEDGKDLRQWVSRFDIYPYLERYAQDSCAKILDILEGKPDLIIGNYTDGNLVASLMSSKLGVTQGTIAHALEKTKYEDSDVKWRDLDQKYHFSCQFTADMIAMNTSDFIITSTYQEIAGSKEKPGQYEHHYAFTMPGLCRYAT

SEQ ID NO: 78620 - protein, 109 aa, Setaria italica
  Transcript Sequence Number=SeqID_12646
  Gene Ontology: Mol. function=glutathione transferase activity
  Homolog annotation: Hit_ID=Q9FQ98; Match level="QueryCoverage=84%, HitCoverage=34%, E-value=8e-44, Identity=94%"; Hit description =Glutathione S-transferase GST 41
NLALIEAELRDGAFKGRRFFGGDEVGLLDVVLGCGSYWLAVFEEVTGVRLVDADAFPLFHAWLRNFEALDEVRETIPAVDRLLEYARGVRHMLLGLAGAGSAAASAATP

SEQ ID NO: 78621 - protein, 67 aa, Setaria italica
  Transcript Sequence Number=SeqID_12647
YSQRAKQIVQDNWNIYRHNLHKILSRTETLSKIIGSNLSNILPRIINSGNLISFTSQQRNTITIIYL

SEQ ID NO: 78622 - protein, 89 aa, Setaria italica
  misc_feature (6)..(6): Xaa can be any naturally occurring amino acid
  misc_feature (19)..(19): Xaa can be any naturally occurring amino acid
  Transcript Sequence Number=SeqID_12648
  Gene Ontology: Biological process=autophagy
  Homolog annotation: Hit_ID=Q4A192; Match level="QueryCoverage=100%, HitCoverage=18%, E-value=1e-31, Identity=76%"; Hit description =Beclin 1 protein (Fragment)
  Subcellular localization annotation: CTP_CleavageSite=72; ConfidenceScore=5.03e-01
LPRFRXQECRRALVVVGVXSYADRLPAHAASGNHASSVQGSVMGASRMENSYVVLSRQNRSQGPRIPPRPPSAAAPHTEPSQPTRAIEG

SEQ ID NO: 78623 - protein, 141 aa, Setaria italica
  Transcript Sequence Number=SeqID_12649
  Gene Ontology: Mol. function=hydrolase activity, acting on glycosyl bonds; Biological process=cell wall organization and biogenesis
  Homolog annotation: Hit_ID=B9RR75; Match level="QueryCoverage=81%, HitCoverage=22%, E-value=4e-15, Identity=42%"; Hit description =Polygalacturonase, putative
  Subcellular localization annotation: CTP_CleavageSite=60; ConfidenceScore=5.06e-01
VSSPRRGGGGAAHHHRRWAPAPYRACLVALWLVGFALVFLWQSTSVGRVRLYTRPPMPKRAASSSMGQWVASPPVYDLREFGAFGDGRTVNTAAFEAAVAAIAERGGGRLTVPVGRWLTAPFNLTSRMTLFLAAGAEILGV

SEQ ID NO: 78624 - protein, 92 aa, Setaria italica
  Transcript Sequence Number=SeqID_12650
PPPPPEALHPPYSPSRADLSPPPPEVYSPYNPEDSPVPDPHLYMPPPEPLVPGLQSMPPPEPLISGLRDELGYAFQPPPPPPPPPLVRASEL

SEQ ID NO: 78625 - protein, 515 aa, Setaria italica
  Transcript Sequence Number=SeqID_12651
  Gene Ontology: Mol. function=metal ion binding; Cellular component =integral to membrane; Biological process=ubiquitin-dependent protein catabolic process
  Homolog annotation: Hit_ID=B6UIK4; Match level="QueryCoverage=94%, HitCoverage=84%, E-value=1e-162, Identity=64%"; Hit description=Zinc finger, C3HC4 type family protein
  Pfam annotation: Domain name=zf-C3HC4; Domain location=193-233; Score= 38.7; E_value=2.2e-08; Accession=PF00097.17; Description=Zinc finger, C3HC4 type (RING finger)
RGEVSARGGVWRVQGLPPPPPEVYSPYNPEDSPVPDPHLYMPPPEPLVPGLQSMPPPEPLISGLRDELGYAFQPPPPPPPPPLVRASELLGWEDRPSSSTASSSFFPDTAVRYRRLLEQTGSRWLRPRRFRSDLPPLSSEARPSGMDAAMQVPQHEPAADTAAVNKVAANGSELGASEESTEERGKTAATFECNICFEMASEPVVTSCGHLFCWPCLYQWLNVYSNHKECPVCKGEVTESNITPIYGRGNSDGEKAVDDGKPQGPTIPPRPHGNRLESFRQQFHHMRPISRRLGEAHGILSSWRRLLDQQIMNSVSRFEGPSESAAQEINDSAQRATRLSRIALATRMRAMQMQREAESRPDGSSTASDTGLMENNVSESSRRGSTPRVSDRFELLEHLAYIGIANTERLASAMSDLRRMASPSQYGGSASSSNPRNNEPAVDGINVAGAPSADQASNSSTVAVIHGDAGISESAGEPSNAGSSRSLQRRGRSNALGSLDVDGGGSQRNKRRRMN

SEQ ID NO: 78626 - protein, 81 aa, Setaria italica
  Transcript Sequence Number=SeqID_12652
  Gene Ontology: Mol. function=3-methyl-2-oxobutanoate hydroxymethyltran sferase activity; Biological process=pantothenate biosynthetic process
  Homolog annotation: Hit_ID=B6TL59; Match level="QueryCoverage=100%, HitCoverage=24%, E-value=9e-34, Identity=89%"; Hit description=3 -methyl-2-oxobutanoate hydroxymethyltransferase
MRRSLIFRQLARRLLSNVPESTVYGGPRPQESSAARRVTVTTLRGKHRRGEPITVVTAYDYPSAVHVDSAGMDVCLVGDSA

SEQ ID NO: 78627 - protein, 160 aa, Setaria italica
  misc_feature (51)..(51): Xaa can be any naturally occurring amino acid
  Transcript Sequence Number=SeqID_12653
  Gene Ontology: Mol. function=methyltransferase activity; Biological process=metabolic process
  Homolog annotation: Hit_ID=B6U5Y8; Match level="QueryCoverage=100%, HitCoverage=64%, E-value=3e-77, Identity=87%"; Hit description=S -adenosylmethionine-dependent methyltransferase/ catalytic
MRDRLAAQGTKGVDVVVADMLDLPFEQESFDLVIEKGTMDVLFVDSGDPWXPNPTTVKNVMKMLECIHRVLKPEGIFVSITFGQPHFRRPIFEAPEFTWSVEYSTFGDGFHYFFYTLKKGKRSLESNSYQNIIPPAPRINMVHEELESEDFIFRTNVDEL

SEQ ID NO: 78628 - protein, 217 aa, Setaria italica
  misc_feature (51)..(51): Xaa can be any naturally occurring amino acid
  Transcript Sequence Number=SeqID_12654
  Gene Ontology: Mol. function=methyltransferase activity; Biological process=metabolic process
  Homolog annotation: Hit_ID=B6U5Y8; Match level="QueryCoverage=93%, HitCoverage=80%, E-value=1e-96, Identity=84%"; Hit description=S -adenosylmethionine-dependent methyltransferase/ catalytic
  Pfam annotation: Domain name=MTS; Domain location=32-163; Score= -87.2; E_value=0.034; Accession=PF05175.6; Description=Methyltransfera se small domain
  Pfam annotation: Domain name=Methyltransf_11; Domain location=57-170; Score=64.1; E_value=5.1e-16; Accession=PF08241.4; Description =Methyltransferase domain
  Pfam annotation: Domain name=Methyltransf_12; Domain location=57-168; Score=44.9; E_value=3.2e-10; Accession=PF08242.4; Description =Methyltransferase domain
  Pfam annotation: Domain name=Ubie_methyltran; Domain location=26-209; Score=-133.9; E_value=0.011; Accession=PF01209.10; Description =ubiECOQ5 methyltransferase family
  Pfam module annotation: Pfam domain module=MTS::Methyltransf _11::Methyltransf_12::Ubie_methyltran; Domain location=32-163::57 -170::57-168::26-209
MAATAADDVAPPTASGYLDPSYWDERFGKEEHYEWFKDFSHFRHLLAPLLXPSLSVLEVGCGNSQLGEELLREGVAGGITCVDLSSVAVQRMRDRLAAQGTKGVDVVVADMLDLPFEQESFDLVIEKGTMDVLFVDSGDPWNPNPTTVKNVMKMLECIHRVLKPEGIFVSITFGQPHFRRRFFEAPEFTWSVEYSTFGDGFHYFFYTLKKDAEEAES

SEQ ID NO: 78629 - protein, 148 aa, Setaria italica
  Transcript Sequence Number=SeqID_12655
  Gene Ontology: Mol. function=acid-amino acid ligase activity; Cellular component=intracellular; Biological process=ubiquitin -dependent protein catabolic process
  Homolog annotation: Hit_ID=B9SXV1; Match level="QueryCoverage=87%, HitCoverage=6%, E-value=1e-65, Identity=93%"; Hit description=Hect ubiquitin-protein ligase, putative
  Pfam annotation: Domain name=Arm; Domain location=41-81; Score=14.1; E_value=0.2; Accession=PF00514.15; Description=Armadillobeta-catenin- like repeat
  Pfam annotation: Domain name=Arm; Domain location=83-124; Score=6.3; E_value=2; Accession=PF00514.15; Description=Armadillobeta-catenin -like repeat
  Pfam annotation: Domain name=HEAT; Domain location=46-83; Score=19.8; E_value=0.011; Accession=PF02985.14; Description=HEAT repeat
  Pfam module annotation: Pfam domain module=Arm::Arm::HEAT; Domain location=41-81::83-124::46-83
ASGQLGGRLKKVLVGLRADGEDGRQVEALTQLCEMLSIGTEESLRAFSVDSFVPVLVGLLNHESNPDIMLLAARALTHLCDVLPSSCSAVVHYGAVPCFCARLLTIEYMDLAEQSLQALKKISLEHPTACLRAGALMAVLSYLDFFSY

SEQ ID NO: 78630 - protein, 64 aa, Setaria italica
  Transcript Sequence Number=SeqID_12656
  Subcellular localization annotation: CTP_CleavageSite=31; ConfidenceScore=5.63e-01
MDTPTAKAAWNANYGVVSSGDRRLAFSRQLSSNSATPRLARSDSSISMPMPMPPLYQAPKPSKS

SEQ ID NO: 78631 - protein, 98 aa, Setaria italica
  Transcript Sequence Number=SeqID_12657
TLQRSHLCPISHERESRLTCHLVDRDGDGIAGRSGDSPKYANDALGSPVAVTRHRFLPRITAGRWWRPSVAVRAGWRVAAAATVRCARWGGAEARATG

SEQ ID NO: 78632 - protein, 57 aa, Setaria italica
  Transcript Sequence Number=SeqID_12658
FLHCHHRIAGHHAPAAGCRTMFASCCSLGMPKKTAAAQFIFASWHAKSLADDSFAAA

SEQ ID NO: 78633 - protein, 85 aa, Setaria italica
  Transcript Sequence Number=SeqID_12659
LSHDEENKQQLNGTPKAWLTIRSCGLGATGAAARHILAATKQGCRISILTTFWFFSFIKTVCIYIPPYCRRFATLQVDLRYKHML

SEQ ID NO: 78634 - protein, 846 aa, Setaria italica
  Transcript Sequence Number=SeqID_12660
  Gene Ontology: Mol. function=metal ion binding; Cellular component =intracellular
  Homolog annotation: Hit_ID=Q75IH8; Match level="QueryCoverage=100%, HitCoverage=100%, E-value=0.0, Identity=64%"; Hit description =Putative zinc-finger protein
  Pfam annotation: Domain name=zf-C3HC4; Domain location=5-45; Score =5.3; E_value=0.025; Accession=PF00097.17; Description=Zinc finger, C3HC4 type (RING finger)
MDDTCAVCAETLEWVAYGPCGHRDVCSTCVVRLRFVMDDKKCCICKTVCPSVFVTKALGEYTRVVNDFSLFPAGVNEGKTGDFWYHEDTQAYFDDVDHYKMIRAMCRLSCSVCDNAEDQVALAAQAKRKSKFRSIDQLKGHLFHVHRLHMCNLCLEGRKVFICEQKLYLRSQLTQHMKTGDSEVDGSEVERSGFAGHPVCQFCKTSFYGDNELYTHMSREHYSCHICQRQHPAQYDYFRNYDDLELHFWKDHFLCEDEACLAKKFVVFPSEAELKRHNAMEHGGRMSRAQRNAALQIPTSFIYRRNEQDQRRGRGRGRNAHHDGTESHISSSAQNGRATADDGHVGRVDNVSGFLQSLSVGSSSAGAEVSSRTGRALEQLSFPPLSDPDIPDTRVDSVPDETSFPSLSEQQSRYALALNQSARGTARLGDESLFPPLPGSSNNRAPASAQQGLQSLARSTLAARLQQRSKGPVKVLNTARPRPSENPELLPSSTQTWPTPDQGLLLSGSSQLRIGTQTRENGFMPAVFSNSAWNPVAPNKMKHSVSTPNLVSGGSSGQASSSTAYGSNRSQEPPQGSQALPVAEDVRAANKSLVERMRSALGMDEDRYSAFKEIAGEYRQGIIDTSEYLSYVEQFGLSHLVPEMARLLPDPQKQRELADAYYTNIRFKSLQENGGGGTTSHEASRKKKGKGKAPVTESSAAKDVKDALADNFLDTVRRLQSNHQAQEGEAEVLSKDGYRPSKGVQLSAGSSSSLDSDTGFNSKASGAKDNAGKGGGNCSSKQPKKTSKFLRARLGDNSLATLDLSRPSASPERPERESQGPQMGLPVRGAWKNGGGQKLFSSNGRK

SEQ ID NO: 78635 - protein, 332 aa, Setaria italica
  Transcript Sequence Number=SeqID_12661
  Gene Ontology: Mol. function=RNA polymerase II transcription factor activity; Cellular component=nucleus; Biological process=regulation of transcription
  Homolog annotation: Hit_ID=Q7XM94; Match level="QueryCoverage=99%, HitCoverage=76%, E-value=1e-164, Identity=85%"; Hit description =OSJNBa0043L24.23 protein
  Pfam annotation: Domain name=C1_4; Domain location=277-325; Score =101.0; E_value=4.1e-27; Accession=PF07975.4; Description=TFIIH C1 -like domain
  Pfam annotation: Domain name=Ssl1; Domain location=1-195; Score =352.8; E_value=6.6e-103; Accession=PF04056.6; Description=Ssl1-like
  Pfam module annotation: Pfam domain module=C1_4::Ssl1; Domain location=277-325::1-195
YLYIVIDLSRAASEMDYRPSRMAVVAKHAEAFIREFFDQNPLSHVGLVTIKDGISHRLTEIGGSPESQINALMGKLECSGDSSLQNALELVNGYLDQVPSYGHKEVLILYSALNTCDPGDIMETIEKCKKSKIRCSVIGLAAEIFICKHLCEETGGSYTVALDESHFKELLLEHAPPPPAIAEYAAANLIKMGFPQRGVEDLISICSCHKKIKSGAEGYICPRCKVNVCELPTECRTCGLTLVSSPHLARSYHHLFPVAPFDEVSSVPNRIQRGVQNCFGCQQNLFNPDGQTSLHVRCPKCNQHFCLDCDIYIHESLHNCPGCESQRSFSSL

SEQ ID NO: 78636 - protein, 90 aa, Setaria italica
  Transcript Sequence Number=SeqID_12662
MRHTIALLCHFFQSIYLSIKHSSFNLKIDFHQKGFCLRLPYPYVPRRILLGMSFMHAQITNYAKLFCFKRSCIVSGEANDCVLEQDCSVI

SEQ ID NO: 78637 - protein, 35 aa, Setaria italica
  Transcript Sequence Number=SeqID_12663
PHSAIEFIKQDNYIELASAHHLRHRRGSPRAQKQQ

SEQ ID NO: 78638 - protein, 60 aa, Setaria italica
  Transcript Sequence Number=SeqID_12664
  Pfam annotation: Domain name=DUF1764; Domain location=1-60; Score =73.5; E_value=7.7e-19; Accession=PF08576.2; Description=Eukaryotic protein of unknown function (DUF1
KTPGSKGKGRVADDDDEFEEKRPRRRTADGLAIYSADELGFGKADAGGTALCPFDCDCCF

SEQ ID NO: 78639 - protein, 88 aa, Setaria italica
  Transcript Sequence Number=SeqID_12665
LMAQKTACYTCFKMNNWTKEKLKNGSDTTNISFLALLFFHISSTSDFYNDSSASCIGDEMAWLNTRTSAPMNNEHITQTDLGHKTKGS

SEQ ID NO: 78640 - protein, 47 aa, Setaria italica
  Transcript Sequence Number=SeqID_12666
CVHACRKYSSYFLNDMKMEVDLQEKYIPTYMDFLTTVTYILIWPATR

SEQ ID NO: 78641 - protein, 159 aa, Setaria italica
  Transcript Sequence Number=SeqID_12667
  Gene Ontology: Mol. function=structural constituent of ribosome; Cellular component=intracellular
  Homolog annotation: Hit_ID=B9SC18; Match level="QueryCoverage=74%, HitCoverage=73%, E-value=5e-42, Identity=64%"; Hit description =Structural constituent of ribosome, putative
  Pfam annotation: Domain name=Ribosomal_S6; Domain location=4-96; Score=-6.1; E_value=0.0014; Accession=PF01250.9; Description =Ribosomal protein S6
MPLYDCMLLVKPLVTREAMSELVARVARRAYQRNGVVTDVKSFGKVQLGYGIKKLDGRHYQGQLMQMTMMVPPTFTQELHYLNKEDRLLRWLVVKHRDAVYGLEFINEDDGRNEMSGFSLAHTKDDYDIEIGSDESESEFLTSSDDDSDGYKYDFEEEK

SEQ ID NO: 78642 - protein, 483 aa, Setaria italica
  Transcript Sequence Number=SeqID_12668
  Gene Ontology: Mol. function=protein binding
  Homolog annotation: Hit_ID=B6TCJ9; Match level="QueryCoverage=90%, HitCoverage=91%, E-value=1e-175, Identity=67%"; Hit description =Nucleotide binding protein
  Pfam annotation: Domain name=WD40; Domain location=127-166; Score =4.7; E_value=11; Accession=PF00400.24; Description=WD domain, G-beta repeat
  Pfam annotation: Domain name=WD40; Domain location=178-217; Score =12.8; E_value=1.2; Accession=PF00400.24; Description=WD domain, G -beta repeat
  Pfam annotation: Domain name=WD40; Domain location=236-273; Score =7.9; E_value=4.6; Accession=PF00400.24; Description=WD domain, G -beta repeat
  Pfam annotation: Domain name=WD40; Domain location=306-345; Score =9.5; E_value=3; Accession=PF00400.24; Description=WD domain, G-beta repeat
  Pfam annotation: Domain name=WD40; Domain location=349-387; Score =34.3; E_value=4.8e-07; Accession=PF00400.24; Description=WD domain, G-beta repeat
  Pfam annotation: Domain name=WD40; Domain location=38-76; Score=32.7; E_value=1.5e-06; Accession=PF00400.24; Description=WD domain, G-beta repeat
  Pfam annotation: Domain name=WD40; Domain location=80-121; Score=6.2; E_value=7.3; Accession=PF00400.24; Description=WD domain, G-beta repeat
  Pfam module annotation: Pfam domain module=WD40::WD40::WD40::WD40::WD4 0::WD40::WD40; Domain location=127-166::178-217::236-273::306 -345::349-387::38-76::80-121
MPPERKRMAGLWEREVGGLPPRHFANAVMASKDFVQSLSIQKRLRKHRGCVNTISFNSDGRFLLSGADDRNVVLWNWVEASPTFSFHSGHSNNVLHAQFMPFSDDRSVVTCAADGEVRHSQIREGGCATTDKLVELDFAVHRLAVEPGSPYTFYCCCEDSSVWLFDLRGKDAVELFRCRTADHFTADDIELFAIAIDPRKPCCFAVAGSDEYVRIYDTRKIGLDGNSNSGLATEHFCPPHLIGENKDGITGLAYSQTSELLASYSHDNIYLFSREHGLHFNNIEVDERLLMDETGPLPFCRDKLPIPKAFKGHTNQHTIKGVNFLGPNCDYVTSGSDCGRIFIWRKKDGELIRVMNGDRHIVNCVEQHPSGIVVASSGIDNDIKIWEPGEGETHSIATDDKVKEDMWLSTSSDSDGLIYNGDFDYVMDLDDIYLYGNADGHSSNEDEDGSSEEDDDGDISAEEMTMVTIVPKKVLMVKTVPEI

SEQ ID NO: 78643 - protein, 109 aa, Setaria italica
  Transcript Sequence Number=SeqID_12669
AGAIRIRHGLFLTVKADSRLLILFRCSPQKTANRGVQSSAGELEEHEREPETVAQGAIFSLPHPPSFHPHPHRALVIATEASAAGFLAAQFLGRLRVGWTATTPTLLPR

SEQ ID NO: 78644 - protein, 149 aa, Setaria italica
  Transcript Sequence Number=SeqID_12670
  Subcellular localization annotation: CTP_CleavageSite=18; ConfidenceScore=5.27e-01
SGSKCPAAKEGRIQSPCRCRSQPNMVLKVKVQPLLPSTTLTKVYPSGCTVGQGACATNGRPSRPALAAGFIRFRKRGLVEQLEGVSGRPVPGRDVDEVDGIGAGPRAEDDAPRAASGRRRRERGSRARDGCRRRGRRRRRRTDPRRAWP

SEQ ID NO: 78645 - protein, 134 aa, Setaria italica
  misc_feature (105)..(105): Xaa can be any naturally occurring amino acid
  Transcript Sequence Number=SeqID_12671
  Homolog annotation: Hit_ID=B4G1W8; Match level="QueryCoverage=66%, HitCoverage=28%, E-value=1e-20, Identity=60%"; Hit description =Myosin-like protein
MSERGRLPRRPIDDRRGYHEVRLVHPRGYPEVHDIRAVDERRGYPDNRLVDERRGYPGVRLIDDHRGYPATRADDRRAYPDIHEGPRMRGAPHPHPHPHPHPAVXEEELELQEVELRRLLADNRALAEERADLN

SEQ ID NO: 78646 - protein, 62 aa, Setaria italica
  Transcript Sequence Number=SeqID_12672
GLTCLNVSKNFNFYSSLLNFFHYYKLQNYYYKSRSILIKKKTKKQKNQKKLKENYDERTHEE

SEQ ID NO: 78647 - protein, 318 aa, Setaria italica
  Transcript Sequence Number=SeqID_12673
  Homolog annotation: Hit_ID=B4G1W8; Match level="QueryCoverage=100%, HitCoverage=100%, E-value=1e-101, Identity=58%"; Hit description =Myosin-like protein
MSERGRLPRRPIDDRRGYHEVRLVHPRGGYPGVRLIDDHRGYPATRADDRRAYPDIHEGPRMRGAPHPHPHPHPHPAVLEEELELQEVELRRLLADNRALAEERADLNRELQAGKDEVRHLNVIISDITAEKEAYISKLVDKKRKLEAELRANEHLRDEIMQLRGEIEKLIATRKELSAEAASLMEDLTREKSVKHQLPMLKEELDGLQLELIHVRTACELERKGNFELVEQRKAMEKNMISMAQEIEQMRAELAKFEVRPWGTGGAYGMQMGSPEVAFTKPYEDSYNIHAGVSEKGPLHPPESSSWGTYDKNRLQYR

SEQ ID NO: 78648 - protein, 95 aa, Setaria italica
  Transcript Sequence Number=SeqID_12674
  Subcellular localization annotation: CTP_CleavageSite=68; ConfidenceScore=5.64e-01
SWSTTTQYNIYNQRNKLSKQNNSYKSRKRTQILLTNPISTILQPPRRSKLFASYRSKLQHLRSAGTLRLASAKPHRLPSAESSCLHRPNLHDSIG

SEQ ID NO: 78649 - protein, 81 aa, Setaria italica
  Transcript Sequence Number=SeqID_12675
  Homolog annotation: Hit_ID=B6T6H0; Match level="QueryCoverage=100%, HitCoverage=39%, E-value=2e-16, Identity=59%"; Hit description =Agglutinin
MQQPQRKMVVSKKLMKVGPWGGTGGHPWDDGGHSGIRSITVSYDRFIDSISVEYDHDGLAVPGERHGGAGGNHTTQARSIY

SEQ ID NO: 78650 - protein, 65 aa, Setaria italica
  misc_feature (24)..(24): Xaa can be any naturally occurring amino acid
  Transcript Sequence Number=SeqID_12676
QRDMMKSKRQTVVLSTGLKDKKSXSDMMDDAEDEEDEEFEDEFEKFVDDEDDEDEEDEEVAHFGF

SEQ ID NO: 78651 - protein, 401 aa, Setaria italica
  Transcript Sequence Number=SeqID_12677
  Gene Ontology: Mol. function=nucleoside-triphosphatase activity; Cellular component=cytoplasm; Biological process=small GTPase mediated signal transduction
  Homolog annotation: Hit_ID=B6TCI7; Match level="QueryCoverage=100%, HitCoverage=100%, E-value=0.0, Identity=79%"; Hit description=XPA -binding protein 1
  Pfam annotation: Domain name=ATP_bind_1; Domain location=65-305; Score=345.2; E_value=1.3e-100; Accession=PF03029.9; Description =Conserved hypothetical ATP binding protein
  Pfam annotation: Domain name=CbiA; Domain location=62-266; Score= -28.2; E_value=0.013; Accession=PF01656.15; Description=Cobyrinic acid a,c-diamide synthase
  Pfam annotation: Domain name=GTP_EFTU; Domain location=58-305; Score=- 79.8; E_value=0.0041; Accession=PF00009.19; Description=Elongation factor Tu GTP binding domain
  Pfam annotation: Domain name=MMR_HSR1; Domain location=61-233; Score=- 14.5; E_value=0.022; Accession=PF01926.15; Description=GTPase of unknown function
  Pfam module annotation: Pfam domain module=ATP_bind_1::CbiA::GTP _EFTU::MMR_HSR1; Domain location=65-305::62-266::58-305::61-233
MDVDSDPAATSKPTQMDLEEQTDAKGKGKAEEGSMKSEELADSIGGLSIGPGRTNFKKKPVIIIVIGMAGTGKTTLMHRLVCDMQASDKRGYVVNLDPAVMTLPFGANIDIRDTVLYKDVMKEYGLGPNGGILTSLNLFATKFDEVVSVIERRADQLDYVLVDTPGQIEIFTWSASGAIITEAFASTFPTVVAYVVDTPRSTSPVTFMSNMLYACSILYKTRLPLVLTFNKVDVAKHEFAIEWMQDFEVFQTALESDKSYSATYTRSLSLVLDEFYKNLRSVGVSAVSGSGVNTFFEAIEASAKEYMETYRADLDKRIAEKERLEAERRKENMEKLQRDMMKSKGQTVVLSTGLKDKNPASDMMDDAEDEEDEEFEDEFEKFVDDEDDEDEEDEEVAHFGF

SEQ ID NO: 78652 - protein, 72 aa, Setaria italica
  misc_feature (63)..(63): Xaa can be any naturally occurring amino acid
  Transcript Sequence Number=SeqID_12678
MAIEADTVAAARAASVSVSETAPMSPAASAAAAAGTARPRVGWLKKLIPRDYLPRSRRWRLAXAPSAGGASR

SEQ ID NO: 78653 - protein, 152 aa, Setaria italica
  Transcript Sequence Number=SeqID_12679
  Gene Ontology: Mol. function=ubiquinol-cytochrome-c reductase activity; Cellular component=mitochondrial respiratory chain; Biological process=mitochondrial electron transport, ubiquinol to cytochrome c
  Homolog annotation: Hit_ID=B6TEX6; Match level="QueryCoverage=82%, HitCoverage=100%, E-value=4e-41, Identity=66%"; Hit description =Ubiquinol-cytochrome c reductase complex 14 kDa protein
  Pfam annotation: Domain name=UCR_14kD; Domain location=37-140; Score =152.7; E_value=1.1e-42; Accession=PF02271.8; Description=Ubiquinol -cytochrome C reductase complex 14kD subunit
RWEAKTLCNSGEHRNHAHEAEEPSGTFARMLSKLSAWFVNPRRNPLARAHRNAVASRLRKYGLRYDDLYDPYHDLDIKEALSRLPREVVDARNQRLKRAMDLSMKHKYLPDEVQAIQTPFRSYLSDMLALVKKEKAEREALGALPLYQRTIP

SEQ ID NO: 78654 - protein, 255 aa, Setaria italica
  Transcript Sequence Number=SeqID_12680
  Homolog annotation: Hit_ID=Q5ZA32; Match level="QueryCoverage=98%, HitCoverage=18%, E-value=8e-90, Identity=68%"; Hit description=WD-40 repeat protein-like
NLITAGPLNREIKIWASTNEDGWLLPSDSESWNCTQTLELVSSLEPRVEEAFFNQVAVLPQASLILLANAKKNAIYAVHVDYGPDPASTRLDYIADFTVAMPILSLTGTHESQPDGEQVVQVYCVQTMAIQQYGLELSLCSPPTADTTGFGRDPAISRVYEAPPEVAGTESSTTSFTDSYSVSASSKPPTADQSAEFDPKPSAPPLAYSEGDGSVHLPSAPPASKMELPGSGPAPGTRDIDKSVFCHTDKQKHGA

SEQ ID NO: 78655 - protein, 683 aa, Setaria italica
  misc_feature (197)..(197): Xaa can be any naturally occurring amino acid
  Transcript Sequence Number=SeqID_12681
  Gene Ontology: Mol. function=phosphatidylcholine-sterol O -acyltransferase activity; Cellular component=endoplasmic reticulum; Biological process=lipid metabolic process
  Homolog annotation: Hit_ID=B9S5T1; Match level="QueryCoverage=92%, HitCoverage=91%, E-value=0.0, Identity=75%"; Hit description =Phosphatidylcholine: Diacylglycerol Acyltransferase
  Pfam annotation: Domain name=LACT; Domain location=127-645; Score =154.1; E_value=4.4e-43; Accession=PF02450.7; Description =Lecithin:cholesterol acyltransferase
SLLRRRKQPQREQPPPPSDGNGSDHDDDDKGKKASASSSAAPESKEATRRTKAKWSCVDSCCWLVGCVCSAWWLLLFLYNAMPASFPQYVTEAITGPLPDPPGVKLQKEGLRVKHPVVFVPGIVTGGLELWEGHHCAEGLFRKRLWGGTFGDVYKRPLCWVEHMSLDNETGLDKPGIRVRPVTGLVAADYFVPGYFXWAVLIANLARIGYEEKTMYMAAYDWRLSFQNTEVRDQTLSRIKSNIELLVATNGGNRVVVIPHSMGVLYFLHFMKWVEAPPPMGGGGGPNWCEKHIKAVVNIGGPFLGVPKAVAGLFSSEAKDVAVARAIAPDVLDSDFLGLQTLRHLMRMTRTWDSTMSMIPKGGDTIWGGLDWSPEDGFECKAKKQKGNDTGVSSDINVEDVEVEPEPINYGRLVSFGKDVAEALSSEIERIEFRDAVKGNNIAHSNSSCRDIWTEYHELGWGGIKAVADYKAYTASSIIDLLRFVAPRMMQRGSVHFSYGIADNLDDPKYQHYKYWSNPLETKLPNAPDMEIFSMYGVGIPTERAYVYKLAPQAECYIPFRIDTSAEGGDENSCLKGGVYLADGDETVPVLSAGYMCAKGWRGKTRFNPAGSKTYVREYNHSPPSTLLEGRGTQSGAHVDIMGNFALIEDIIRIAAGATGEEIGGDQVYSDIFKWSEKIKLKL

SEQ ID NO: 78656 - protein, 44 aa, Setaria italica
  Transcript Sequence Number=SeqID_12682
MPGLAGRPGFCCLLVLRVGQAFFAAACIGVMGSSLGFASYTAFW

SEQ ID NO: 78657 - protein, 94 aa, Setaria italica
  Transcript Sequence Number=SeqID_12683
  Gene Ontology: Cellular component=integral to membrane
  Pfam annotation: Domain name=DUF588; Domain location=1-79; Score= -22.4; E_value=0.0079; Accession=PF04535.4; Description=Domain of unknown function (DUF588)
SCLDGYAIKVKKDLTSPILLSLFVVGDWVTAILSFAASSSAGGVVILFQKDVLFCRRYPQLPCGKYELATAFAFLSWALSATSALIMFWLLAAS

SEQ ID NO: 78658 - protein, 75 aa, Setaria italica
  Transcript Sequence Number=SeqID_12684
  Gene Ontology: Cellular component=integral to membrane
  Pfam annotation: Domain name=DUF588; Domain location=1-73; Score= -28.5; E_value=0.021; Accession=PF04535.4; Description=Domain of unknown function (DUF588)
FAAACIGVMGSSLGFASYTAFCYLVASMGLQMLWSSGLACLDGYAIKVKKDLTSPILLSLFVVGDWVMTKFVLKL

SEQ ID NO: 78659 - protein, 106 aa, Setaria italica
  Transcript Sequence Number=SeqID_12685
TLVEDEYSEESAVEHVRRLLDIVACTTSFGPAPPPPPPPSPKDADAAKEPSSSSATSKAAASGSSGGRRTASPPPASPSKESSAAKRKAAKESAAAAELEAEMSGA

SEQ ID NO: 78660 - protein, 62 aa, Setaria italica
  Transcript Sequence Number=SeqID_12686
GVKLTYGLQGHPHPALSRLCLRQANQNATNSTAKQQSIAKYSTCYNCVTQYVTILPYVVAKI

SEQ ID NO: 78661 - protein, 77 aa, Setaria italica
  Transcript Sequence Number=SeqID_12687
RVSFFFLLHTSLCEGERRYIAVFCLATCPHTLTRTGRSVSCYLLEPSPSVAVASGPNSTQVAHDPRLLLPTTSRPDG

SEQ ID NO: 78662 - protein, 68 aa, Setaria italica
  Transcript Sequence Number=SeqID_12688
  Gene Ontology: Mol. function=DNA binding
  Pfam annotation: Domain name=B3; Domain location=1-57; Score=5.2; E _value=0.023; Accession=PF02362.13; Description=B3 DNA binding domain
KPWQVNYVYYSDRSVASFSGGWGKFALGNNLEKFDVCVFELFKEDNIKVHIYRVVPEITPLLRASSRD

SEQ ID NO: 78663 - protein, 413 aa, Setaria italica
  Transcript Sequence Number=SeqID_12689
  Gene Ontology: Mol. function=DNA binding; Cellular component=nucleus; Biological process=regulation of transcription, DNA-dependent
  Homolog annotation: Hit_ID=B9R7K0; Match level="QueryCoverage=82%, HitCoverage=85%, E-value=3e-19, Identity=26%"; Hit description=DNA binding protein, putative
  Pfam annotation: Domain name=B3; Domain location=317-402; Score=48.8; E_value=2.1e-11; Accession=PF02362.13; Description=B3 DNA binding domain
  Pfam annotation: Domain name=B3; Domain location=44-138; Score=65.5; E_value=2e-16; Accession=PF02362.13; Description=B3 DNA binding domain
  Pfam module annotation: Pfam domain module=B3::B3; Domain location =317-402::44-138
KSAKEKQKQKGKQNEVREDGKGKEKAAAKVKQEAAAAAKSAGQQFFKIFFPDQSRERLKIPTAFHQHLKEQPTGLVSLKGPSGNTWQALLTSDSEGLFFEQGWKEFVTDHSVKQGHFLVFTYDGLSRFSVTVFGSFGVVDPPSLVAKRTNNVVIKIEDDEEEVHVDMDAGGTSETSILPPEEGNGITGKRTREVNDIVADGNASKRHSSVPKQAEKKSPEAIVRTSKDASTIVNTEKDTPFSILNESTAFNKTHVRDKNMPKLGKFIVRRARQPVVISQRRPVTEEEKGLALRRAKEFKSKNPFAVQTMMESYVYVGFFMNITCEFVRESLPRISKKMTLWDPLGKPWQVNYVYYSDRSVASFSGGWGKFALGNNLEKFDVCVFELFKEDNIKVHIYRVVPEITPLLRASSRD

SEQ ID NO: 78664 - protein, 78 aa, Setaria italica
  misc_feature (1)..(1): Xaa can be any naturally occurring amino acid
  Transcript Sequence Number=SeqID_12690
XLLKPEKNAASVHLKSRYRLQHNLLEVRANPMLPQHSATIGEALSWVLMKLPTLLGSPLCLLPRGRRVTSWLSASPAS

SEQ ID NO: 78665 - protein, 449 aa, Setaria italica
  Transcript Sequence Number=SeqID_12691
  Homolog annotation: Hit_ID=B9SYA4; Match level="QueryCoverage=53%, HitCoverage=30%, E-value=2e-21, Identity=31%"; Hit description =Phosphatidylinositol n-acetylglucosaminyltransferase subunit p, putative
QTNRSSSNSALSKIRRHAESAVGSKTLAEMFALSDSERLKLNSDLHSPIQRNKTNHGDGHSKDGCFIVLPKHAPLLSIRHSMDRNSCLEGSSQGKNNPIASNSHNNGKCQFDSFGDKARLLKQIGNGSEANLRNSSCSQNLTADNFSTPDCSNEKVLFTTDEDLVQQPAESEASGLNLQFSRKKRVKRLPFHCHEYESISVSDDTDGTKSCKGLKEVEQPSPVSILEPPTDEDSCFSGCFKYDLQEMTKKQSDGHQNHYEPEVSMCSDDEDHSSYQSLEAFQVEEDRDFSYLLDILICSGIIVADWQLICKSWYLPGYPVGPHVFDRLERNYNKIVTWAKPERRLLFDLVNSILSKVLAPCIDVHPWVQSSRHCVPLWGPEGPVEKVWQTVVRQREDCVTGHPDEMVLDTNWLELGNDINMLGKQIARMLLADLLEEDIVDFLGELVVS

SEQ ID NO: 78666 - protein, 63 aa, Setaria italica
  Transcript Sequence Number=SeqID_12692
KAEVESTTRHIISSWLQPTYHLLLTTPSTIYIFNIIFTMTDLLTIYDDLFVLNIIIYHKFTMV

SEQ ID NO: 78667 - protein, 211 aa, Setaria italica
  Transcript Sequence Number=SeqID_12693
  Gene Ontology: Mol. function=zinc ion binding
  Homolog annotation: Hit_ID=Q10DV6; Match level="QueryCoverage=96%, HitCoverage=44%, E-value=4e-42, Identity=44%"; Hit description =Transposon protein, putative, unclassified, expressed
  Pfam annotation: Domain name=FAR1; Domain location=7-98; Score=75.6; E_value=1.8e-19; Accession=PF03101.7; Description=FAR1 family
PVESAKTFYYSYASRAGFDARVRQSRKSQDESLKMLKLVCSRHRYHSGRENIGEDTKRVRALDPSRDGCDALFEIIRKGKDVWTVSKLILEHTHELNPAPASRVHCVRSQGEVLVIANNFADTRNLLLKGRDSQQPREMRYNDLGPEDAQSLFEYLKKRQDEDPSFFYAVQHGKNGQSANIFWADAKARMAYYHFGDAVRFETAYRKTSRS

SEQ ID NO: 78668 - protein, 62 aa, Setaria italica
  Transcript Sequence Number=SeqID_12694
NCRMDCLLSSAVEYIWQNGLPGLLYDRVELSGWTAELTASLSATSDRVCWLSVDLRHAAVDR

SEQ ID NO: 78669 - protein, 152 aa, Setaria italica
  Transcript Sequence Number=SeqID_12695
NDDALAKEEDDGSMNEDEQDSADADANADGSVKIVVEIKEEGKDDKKTKVGVTGVVDVVVEEKAETKKRKCDAETVTDGAPAKRVKNIAAVEEVTCTPVKRTRKSGDVDNEGNGSPVVSSGRRVTRSSANASEADDSPARRTRSRARADAGC

SEQ ID NO: 78670 - protein, 344 aa, Setaria italica
  Transcript Sequence Number=SeqID_12696
  Gene Ontology: Mol. function=RNA splicing factor activity, transesterification mechanism; Cellular component=small nucleolar ribonucleoprotein complex; Biological process=nuclear mRNA splicing, via spliceosome
  Homolog annotation: Hit_ID=Q96DI7; Match level="QueryCoverage=93%, HitCoverage=90%, E-value=1e-117, Identity=57%"; Hit description=U5 small nuclear ribonucleoprotein 40 kDa protein
  Pfam annotation: Domain name=WD40; Domain location=129-168; Score =39.3; E_value=1.5e-08; Accession=PF00400.24; Description=WD domain, G-beta repeat
  Pfam annotation: Domain name=WD40; Domain location=172-209; Score =17.3; E_value=0.066; Accession=PF00400.24; Description=WD domain, G -beta repeat
  Pfam annotation: Domain name=WD40; Domain location=213-251; Score =32.5; E_value=1.7e-06; Accession=PF00400.24; Description=WD domain, G-beta repeat
  Pfam annotation: Domain name=WD40; Domain location=263-301; Score =22.8; E_value=0.0014; Accession=PF00400.24; Description=WD domain, G- beta repeat
  Pfam annotation: Domain name=WD40; Domain location=305-343; Score =24.0; E_value=0.00063; Accession=PF00400.24; Description=WD domain, G-beta repeat
  Pfam annotation: Domain name=WD40; Domain location=44-82; Score=39.4; E_value=1.4e-08; Accession=PF00400.24; Description=WD domain, G-beta repeat
  Pfam annotation: Domain name=WD40; Domain location=87-125; Score =41.0; E_value=4.9e-09; Accession=PF00400.24; Description=WD domain, G-beta repeat
  Pfam module annotation: Pfam domain module=WD40::WD40::WD40::WD40::WD4 0::WD40::WD40; Domain location=129-168::172-209::213-251::263 -301::305-343::44-82::87-125
MFSAPGNNSLALAAPRPGMELANVQQHPNQALGPGGKQRTSSLEAPIMLLTGHQSAIYCMKFNPAGTVIASGSHDKDIFLWYVHGECKNFMVLRGHKNAILDLQWTTDGTQIISASPDKTVRVWDVETGKQVKKMAEHSSFVNSCCPARKWPPLVVSGSDDGTAKLWDLRQRGAIQTLPDKYQITAVSFSEAADKVFTGGLDNDVKWWDLRKNEVTEYLKGHQDMITGMQLSPDGSYLLTNAMDNELKIWDLRPYAPENRNIKTLTGHQHNFEKNLLKCSWSPDNRKVTAGSADRMVYIWDTTSRRILYKLPGHNGSVNETAFHPTEPIIGSCGSDKQIYLGEL

SEQ ID NO: 78671 - protein, 77 aa, Setaria italica
  Transcript Sequence Number=SeqID_12697
RARLLAHFRRPARRADRPGGQRGTDGCKYFLPATGDLEDHSPSRIRICVTFMVDLVWLPCLCFLQVQGVQDHGHGTS

SEQ ID NO: 78672 - protein, 89 aa, Setaria italica
  Transcript Sequence Number=SeqID_12698
  Gene Ontology: Mol. function=hydrolase activity; Cellular component =mRNA cleavage and polyadenylation specificity factor complex; Biological process=nuclear mRNA splicing, via spliceosome
  Homolog annotation: Hit_ID=B9REL7; Match level="QueryCoverage=75%, HitCoverage=18%, E-value=3e-25, Identity=77%"; Hit description =Cleavage and polyadenylation specificity factor 73 kDa subunit, putative
  Subcellular localization annotation: CTP_CleavageSite=41; ConfidenceScore=5.25e-01
GGQRRKGKTMASVAAPSASQAGKRPATGGREGDQMVVTPLGAGSEVGRSCVHLTFKGRTVLFDCGIHPAYSGMAALPYFDEIDPSTIDV

SEQ ID NO: 78673 - protein, 82 aa, Setaria italica
  misc_feature (9)..(9): Xaa can be any naturally occurring amino acid
  misc_feature (52)..(52): Xaa can be any naturally occurring amino acid
  Transcript Sequence Number=SeqID_12699
  Gene Ontology: Mol. function=phosphoglycolate phosphatase activity; Biological process=methionine salvage
  Homolog annotation: Hit_ID=B6T6D3; Match level="QueryCoverage=79%, HitCoverage=14%, E-value=8e-28, Identity=80%"; Hit description =Hydrolase
MSCGGCACXATASASEAYLQGEPVREARELVAELCRHFYAQGWVTGTGGSIXRLIVMSPSGVQKERMVAEDMYVMAADGKVL

SEQ ID NO: 78674 - protein, 68 aa, Setaria italica
  Transcript Sequence Number=SeqID_12700
RTSIYRELNFRALRLQVVIILLYLSVTILLYFRGSWSPAPGRSYRQLDHSPISEKDGSDEVKRCIEEY

SEQ ID NO: 78675 - protein, 154 aa, Setaria italica
  Transcript Sequence Number=SeqID_12701
  Gene Ontology: Mol. function=phosphoglycolate phosphatase activity; Cellular component=cellular_component; Biological process=methionine salvage
  Homolog annotation: Hit_ID=B6T6D3; Match level="QueryCoverage=98%, HitCoverage=29%, E-value=5e-74, Identity=88%"; Hit description =Hydrolase
LVCSIVLSCKSSKCVVLDIEGTTTPISFVTDVMFPYARDNVRKHLTSTFDSEETKEDIKLLRIQTEDDLRNGIAGAVPVPPDEAGKEEVINSLVANVESMIKADRKITPLKQLQGHIWRTGFEKKELQGVVFEDVPVALKNWHASGIKVYFHLK

SEQ ID NO: 78676 - protein, 522 aa, Setaria italica
  Transcript Sequence Number=SeqID_12702
  Gene Ontology: Mol. function=phosphoglycolate phosphatase activity; Cellular component=cellular_component; Biological process=methionine salvage
  Homolog annotation: Hit_ID=B6T6D3; Match level="QueryCoverage=95%, HitCoverage=96%, E-value=0.0, Identity=94%"; Hit description =Hydrolase
  Pfam annotation: Domain name=Aldolase_II; Domain location=36-239; Score=114.9; E_value=2.6e-31; Accession=PF00596.13; Description =Class II Aldolase and Adducin N-terminal domain
  Pfam annotation: Domain name=Hydrolase; Domain location=280-502; Score=30.3; E_value=7.8e-06; Accession=PF00702.18; Description =haloacid dehalogenase-like hydrolase
  Pfam module annotation: Pfam domain module=Aldolase_II::Hydrolase; Domain location=36-239::280-502
MSCGGCACDAAAAGTGATASASEAYLQGEPVREARELVAELCRHFYAQGWVTGTGGSITVKVNDPAVPLADRLIVMSPSGVQKERMVAEDMYVMAADGKVLSAPSAKPWPNKPPKCTDCAPLFLKAYLMRGAGAVIHSHGMETCIATMLNPGAKEFRMTHMEMIKGIKGHGYRDELVIPIIENTPYEYELTDSLSEAIAAYPKATAVLVRNHGIYVWGDSWINAKTQAECYHYLLDACIKLYQLGIDWATPEHGPINSAKRLRSILSPEIPNGCHAAESSKCVVLDIEGTTTPISFVTDVMFPYARDNVRKHLTSTFDSEETKEDIKLLRIQTEDDLRNGIAGAVPVPPDEAGKEEVINSLVANVESMIKADRKITPLKQLQGHIWRTGFEKKELQGVVFEDVPVALKNWHASGIKVYIYSSGSREAQRLLFGNTTHGDLRKFLCGYFDTTTGNKRETKSYFEISQSLGVDSPSQILFITDVFQEAVAAKNAGFDVIISIRPGNAPLPDNHGFRTIKSFSEI

SEQ ID NO: 78677 - protein, 116 aa, Setaria italica
  Transcript Sequence Number=SeqID_12703
HWSLRPRLLGDRRARQILVAKEEGEGNASAKLTANQRRRAEAHTDCMQRRQGVREECIDGQRTNKKMPSPASQAVPVRSLPATRTSQSLAQQDKQPNRRQKRTNKASTPACCLSVL

SEQ ID NO: 78678 - protein, 87 aa, Setaria italica
  misc_feature (83)..(83): Xaa can be any naturally occurring amino acid
  Transcript Sequence Number=SeqID_12704
  Gene Ontology: Mol. function=metal ion binding
  Homolog annotation: Hit_ID=Q7XK59; Match level="QueryCoverage=78%, HitCoverage=8%, E-value=2e-29, Identity=89%"; Hit description =OSJNBa0091C07.1 protein
  Subcellular localization annotation: CTP_CleavageSite=41; ConfidenceScore=5.13e-01
FPCALKKGCCAVKASSWASMGFLSLVGNSFGCSASGERLVSAARDGDLQEARALLEYNPRLARYSTFGGRNSPLHYAAAQGHXEVMS

SEQ ID NO: 78679 - protein, 488 aa, Setaria italica
  Transcript Sequence Number=SeqID_12705
  Gene Ontology: Mol. function=metal ion binding
  Homolog annotation: Hit_ID=A7L3A0; Match level="QueryCoverage=98%, HitCoverage=94%, E-value=0.0, Identity=65%"; Hit description=Ankyrin repeat-rich protein
  Pfam annotation: Domain name=Ank; Domain location=109-140; Score =16.4; E_value=0.12; Accession=PF00023.22; Description=Ankyrin repeat
  Pfam annotation: Domain name=Ank; Domain location=172-204; Score =43.1; E_value=1.1e-09; Accession=PF00023.22; Description=Ankyrin repeat
  Pfam annotation: Domain name=Ank; Domain location=215-247; Score =39.3; E_value=1.6e-08; Accession=PF00023.22; Description=Ankyrin repeat
  Pfam annotation: Domain name=Ank; Domain location=248-279; Score=5.3; E_value=6.3; Accession=PF00023.22; Description=Ankyrin repeat
  Pfam annotation: Domain name=Ank; Domain location=42-74; Score=36.6; E_value=9.7e-08; Accession=PF00023.22; Description=Ankyrin repeat
  Pfam annotation: Domain name=Ank; Domain location=75-107; Score=33.3; E_value=9.5e-07; Accession=PF00023.22; Description=Ankyrin repeat
  Pfam annotation: Domain name=zf-C3HC4; Domain location=313-359; Score= 16.9; E_value=0.0012; Accession=PF00097.17; Description=Zinc finger, C3HC4 type (RING finger)
  Pfam module annotation: Pfam domain module=Ank::Ank::Ank::Ank::Ank::An k::zf-C3HC4; Domain location=109-140::172-204::215-247::248-279::42 -74::75-107::313-359
VRNKGNKRQQRLVSAARDGDLQEARALLEYNPRLARYSTFGGRNSPLHYAAAQGHHEIVSLLLESGVEINLRNYRGQTALMQACQYGHWEVVQTLILFNANVHRTDYLNGGTALHFAALHGHARCLRLVLADYVPSIPNFCTLTNHRSSEEDSAADFDHEALVKMVNQKADGGLTPLHMAALNGHVECVQLLLDLGASVSEVTIEDGTTIDLIGAGSTPLHYAACGGNAVCCQLLIARGACITAQNASGWTPLMVARSWQRNSIEEILSKEPESRIRTLPSPYLCLPLMSIMNIARECGWRYLNQSPVCIDPCAVCLEGSCSVAAEGCKHEFCTRCALYLCSTSYTSVTPAGAIPCPLCRHPIISFITLPGTSPIRELPRNSLSLSFCTTCPAVNSDSSAWIAAHLYRTEFQCGRMPPMGSSSFRSLSCQRIPAMKLNPAFCMGAMDTNPCLIRCSRFGSSLRRSASQGETTRRSWPITFNPIVATGS

SEQ ID NO: 78680 - protein, 54 aa, Setaria italica
  Transcript Sequence Number=SeqID_12706
  Homolog annotation: Hit_ID=Q8RZ95; Match level="QueryCoverage=94%, HitCoverage=13%, E-value=1e-19, Identity=88%"; Hit description =Lipase class 3-like
MVLVSKGPTKFLDAHGLQQWWADDVELQVALNHSKLIDRQLRSLYAPPPAAPQM

SEQ ID NO: 78681 - protein, 236 aa, Setaria italica
  Transcript Sequence Number=SeqID_12707
  Gene Ontology: Mol. function=unfolded protein binding; Cellular component=mitochondrion; Biological process=response to stress
  Homolog annotation: Hit_ID=B6UGG5; Match level="QueryCoverage=100%, HitCoverage=34%, E-value=1e-118, Identity=88%"; Hit description=Heat shock 70 kDa protein
  Pfam annotation: Domain name=HSP70; Domain location=55-236; Score= -166.6; E_value=2.3e-08; Accession=PF00012.12; Description=Hsp70 protein
  Subcellular localization annotation: CTP_CleavageSite=68; ConfidenceScore=5.47e-01
MAFGALVASRLARSSRTLASAVAQAPVAQRTAPPLLSRLGAVARALSTKPAAADVIGIDLGTTNSCVSVMEGKTPRVIENAEGARTTPSIVAKNQNGDLLIGITASRQAVTNAQNTIRGSKRLIGRTFDDPQTQKEMKMVTYKIVRAPNGDAWVEMGGQKYSPSQIGAFVLTKMKETAESYLGKTVSKAVITVPAYFNDAQRQATKDAGRIAGLEVMRIINEPTAAALSYGMNNKE

SEQ ID NO: 78682 - protein, 242 aa, Setaria italica
  Transcript Sequence Number=SeqID_12708
  Gene Ontology: Mol. function=3'-5'-exoribonuclease activity; Cellular component=exosome (RNase complex); Biological process=RNA processing
  Homolog annotation: Hit_ID=B6T763; Match level="QueryCoverage=100%, HitCoverage=100%, E-value=1e-124, Identity=90%"; Hit description =Exosome complex exonuclease RRP41
  Pfam annotation: Domain name=RNase_PH; Domain location=19-150; Score =158.3; E_value=2.3e-44; Accession=PF01138.13; Description=3' exoribonuclease family, domain 1
  Pfam annotation: Domain name=RNase_PH_C; Domain location=153-218; Score=46.8; E_value=8.3e-11; Accession=PF03725.7; Description=3' exoribonuclease family, domain 2
  Pfam module annotation: Pfam domain module=RNase_PH::RNase_PH_C; Domain location=19-150::153-218
MEYVDPLTGFRVDGRRPNEMRKLKGEVGVVARADGSALFEMGNTRVIAAVYGPREVQNKGQQVNSKEALVRCEYRMAEFSTGDRRRKPKGDRRSTEISLVIRQTMEASILTHLMPRSQIDIFVQVLQADGGTRSACINAATLALADAGIPMRDIVTSCSAGYLCSTPLLDLNYLEDSAGGADVTVGILAKMDKVTLLQMDAKLAMDTFENVMGLAIEGCKAIATYIREVLLENTKRLECQRG

SEQ ID NO: 78683 - protein, 180 aa, Setaria italica
  misc_feature (60)..(60): Xaa can be any naturally occurring amino acid
  misc_feature (97)..(97): Xaa can be any naturally occurring amino acid
  Transcript Sequence Number=SeqID_12709
  Gene Ontology: Mol. function=palmitoyl-(protein) hydrolase activity; Biological process=protein modification process
NFISIGGPHAGTASVPLCGSGFLCILIDNLIKLEIYSDYVQVCITCAAMSQFLFCSYYCXALDSLFCSVTKLRVVKLQAHLAPSGYLKIPTDMEDYXKGCRFLPKLNNEIRSERNATYKERFSSLENLVLIMKILLKIAKSSHFVLLQFEDDAVLIPRETAIGFGLFTLVLVVLLTLVIC

SEQ ID NO: 78684 - protein, 148 aa, Setaria italica
  Transcript Sequence Number=SeqID_12710
  Gene Ontology: Mol. function=palmitoyl-(protein) hydrolase activity; Biological process=protein modification process
WTTGQESQYSITARAVIEYCDCGPPVKNFISIGGPHAGTASVPLCGSGFLCILIDNLIKLEIYSDYVQAHLAPSGYLKIPTDMEDYLKGCRFLPKLNNEIRSERNATYKERFSSLENLVLIMKILLKIAKSSHFVLLQFEDDAVLIPR

SEQ ID NO: 78685 - protein, 310 aa, Setaria italica
  Transcript Sequence Number=SeqID_12711
  Gene Ontology: Mol. function=palmitoyl-(protein) hydrolase activity; Biological process=protein modification process
  Pfam annotation: Domain name=Lipase_2; Domain location=26-250; Score=- 95.1; E_value=0.012; Accession=PF01674.10; Description=Lipase (class 2)
  Pfam annotation: Domain name=Palm_thioest; Domain location=24-295; Score=128.4; E_value=2.4e-35; Accession=PF02089.7; Description =Palmitoyl protein thioesterase
  Pfam module annotation: Pfam domain module=Lipase_2::Palm_thioest; Domain location=26-250::24-295
MAALAPRDVAVLLLLLFPVLAPVASAVPFIVLHGIGDECGNDGLASFTEMLGEWSGSKGYCIEIGRGAWDSWLMPLQEQANTVCKKVKKMKELSEGYNIVGLSQGNLIGRAVIEYCDCGPPVKNFISIGGPHAGTASVPLCGSGFLCILIDNLIKLEIYSDYVQAHLAPSGYLKIPTDMEDYLKGCRFLPKLNNEIRSERNATYKERFSSLENLVLIMFEDDAVLIPRETAWFGYYPDGAFNPVLPPQETKLYTEDWIGLKTLDEAGRVKFVSVPGGHLRISRSDMKKYIVPYLKPDASPKQSIRRILSV

SEQ ID NO: 78686 - protein, 55 aa, Setaria italica
  Transcript Sequence Number=SeqID_12712
SYQTASSQMCRTANSRAATAESLKKEQTGAARRMFAHALGLSAAQGNYGAPPKPK

SEQ ID NO: 78687 - protein, 233 aa, Setaria italica
  Transcript Sequence Number=SeqID_12713
  Gene Ontology: Mol. function=metal ion binding
  Homolog annotation: Hit_ID=B6U0S2; Match level="QueryCoverage=98%, HitCoverage=30%, E-value=2e-73, Identity=64%"; Hit description=PHD -finger family protein
  Pfam annotation: Domain name=C1_3; Domain location=38-67; Score=12.4; E_value=0.02; Accession=PF07649.4; Description=C1-like domain
  Pfam annotation: Domain name=PHD; Domain location=39-86; Score=50.5; E_value=6.4e-12; Accession=PF00628.21; Description=PHD-finger
  Pfam module annotation: Pfam domain module=C1_3::PHD; Domain location= 38-67::39-86
PSRLFPDERIVTVPERNQVYHPQGNGSSTVGVDPYAETICTVCNGSTDDELLLLCELCDAAAHTYCAGLGTTVPEGDWFCKDCATVREEQLRWLAENEGRGAQDEFEVSIDVLRAEPVAAPSVRDVVDELECDPDRAGVGNGRLSMDDQVPSIYDIVDDDFPTVGGIGRRPGKNTEDLPSQGASSAGSQHPGLTKGRDNGLGAYHACIRLEVERARTLRNSRNLDKRIRELRE

SEQ ID NO: 78688 - protein, 135 aa, Setaria italica
  Transcript Sequence Number=SeqID_12714
  Gene Ontology: Mol. function=protein tyrosine kinase activity; Cellular component=membrane; Biological process=protein amino acid phosphorylation
  Homolog annotation: Hit_ID=B6SXL6; Match level="QueryCoverage=91%, HitCoverage=32%, E-value=2e-38, Identity=82%"; Hit description =Senescence-induced receptor-like serine/threonine-protein kinase
LTVRYVVSVVPNVLLDGRGLGARLCDLGSACEGFSAAVAPTRAAVGSPGYADPFFLRTGIVSKKSDVYSFGVLLLEAVTGLPAAGEPGSENLAARILPRVRARGVAGLVDARLGEGYDEEEAGEVARIAVECAAA

SEQ ID NO: 78689 - protein, 136 aa, Setaria italica
  Transcript Sequence Number=SeqID_12715
  Gene Ontology: Biological process=protein modification process
EEDSALRELRLKKQEFAKFAESAHDILQELDATTKKQVGPKEPPEQIVLDEESEPEVEKARGKIVISIQDKDGKQQFRVYKDEKFDKLLKAYAKKAKLNPSNLVFVFDGEKINPSSTPEDLDLEDDDMIEVCHKRR

SEQ ID NO: 78690 - protein, 116 aa, Setaria italica
  Transcript Sequence Number=SeqID_12716
  Gene Ontology: Mol. function=transcription factor activity; Cellular component=nucleus; Biological process=regulation of transcription, DNA-dependent
  Homolog annotation: Hit_ID=Q7XAD6; Match level="QueryCoverage=58%, HitCoverage=19%, E-value=2e-19, Identity=64%"; Hit description=Ap25
  Pfam annotation: Domain name=AP2; Domain location=7-59; Score=76.9; E_ value=7.5e-20; Accession=PF00847.12; Description=AP2 domain
PEEDDFRRYRGVRQRPWGKYAAEIRDPARKGARVWLGTYDTAVEAARAYDRAAFLLRGSKAILNFPNEVAFGTAARWGPPAAAPRPSAATAGSNKRARSPEPALREQDAGCMVREV

SEQ ID NO: 78691 - protein, 69 aa, Setaria italica
  Transcript Sequence Number=SeqID_12717
  Gene Ontology: Mol. function=serine-type endopeptidase inhibitor activity; Cellular component=extracellular region; Biological process=response to wounding
  Homolog annotation: Hit_ID=B6SLR8; Match level="QueryCoverage=94%, HitCoverage=92%, E-value=2e-16, Identity=64%"; Hit description =Subtilisin-chymotrypsin inhibitor CI-1C
  Pfam annotation: Domain name=potato_inhibit; Domain location=7-69; Score=106.2; E_value=1.1e-28; Accession=PF00280.10; Description =Potato inhibitor I family
MSGDSGKSSWPEVVGLSGDAAKQKILADRPDVQVFLVPVGSMVTTDFDTKRVRVFVNTAGYVAEVPNIG

SEQ ID NO: 78692 - protein, 290 aa, Setaria italica
  Transcript Sequence Number=SeqID_12718
  Gene Ontology: Mol. function=RNA binding
  Homolog annotation: Hit_ID=Q208U9; Match level="QueryCoverage=52%, HitCoverage=44%, E-value=2e-27, Identity=44%"; Hit description=CFM6
  Pfam annotation: Domain name=CRS1_YhbY; Domain location=22-106; Score= 114.3; E_value=4e-31; Accession=PF01985.13; Description=CRS1  YhbY domain
LQKLKKYELPELPAPRHDPELLTAEQLQAYKKIGFRNRNYVPVGVRGVFGGVVQNMHMHWKFHETVQVCCDNFPKEKIKEMAAMLTRLSGGIVINIHNTKTIIMFRGRNYRQPKNLIPFNTLTKRKALFKARFEQALESQKLNIKKIETQLRRKGINPEDPVAMASIQRVASTFFRAIDEQQGTPYVFRGDTDHSAGTTEIKEPHDQPSEDSDQEELDRFISEIESAAEKQWEEEEAAEKEESSRMRYLERDEVGERRGFNRSYENSDYEDRGQGRYRRENKQQKASDAR

SEQ ID NO: 78693 - protein, 339 aa, Setaria italica
  Transcript Sequence Number=SeqID_12719
  Gene Ontology: Mol. function=microtubule motor activity; Cellular component=microtubule associated complex; Biological process =microtubule-based movement
  Homolog annotation: Hit_ID=B6SY02; Match level="QueryCoverage=98%, HitCoverage=42%, E-value=1e-165, Identity=87%"; Hit description =Kinesin-1
SRRAVPAVEFSGREDVERLLAEKMKGKSKNDYKGRVEQMSDYIKKLRACIRWYMELEDGYLVEQEKLRGAMDAENTRHTDLEAQLSTAIEELKAANLDLTRRCEFIEESLNREKSEKLIAVESYEKEKQERESAESSRDVLTVDLERVTHDAKRFSEQLKMVQDTNKRLQEYNTSLQQYNSNLQADASKSGETISKLQKEKSAMMETMAALRECNNSMSSQLESSRASQQESIRVKEELRKEVECLRAELKQVRDDRDHSVAQLNNLNLELANCKEQIGKSSKECEGLSTKVSALEETCNTQKEQIQTFRKQLAVATQKLKLADVTAIEAMTGYEEQKE

SEQ ID NO: 78694 - protein, 140 aa, Setaria italica
  Transcript Sequence Number=SeqID_12720
  Gene Ontology: Mol. function=microtubule motor activity; Cellular component=microtubule associated complex; Biological process =microtubule-based movement
  Homolog annotation: Hit_ID=Q25A41; Match level="QueryCoverage=89%, HitCoverage=16%, E-value=2e-58, Identity=84%"; Hit description =H0303G06.20 protein
  Pfam annotation: Domain name=Kinesin; Domain location=1-139; Score= -118.5; E_value=1.5e-07; Accession=PF00225.15; Description=Kinesin motor domain
DGYKVCIFAYGQTGSGNSYTMMGRPGIDQKGIIPRSLEQIFKTSQSLESQGWEYSMQASMLEIYNETIRDLLAPGRPNSFEMTPSKQYTIKHDSHGNTTVSDLTIIDVFGIADVTTLLEKASQSRWSSLIAHVYMALISC

SEQ ID NO: 78695 - protein, 164 aa, Setaria italica
  Transcript Sequence Number=SeqID_12721
  Gene Ontology: Mol. function=microtubule motor activity; Cellular component=microtubule associated complex; Biological process =microtubule-based movement
  Homolog annotation: Hit_ID=B6SY02; Match level="QueryCoverage=88%, HitCoverage=18%, E-value=2e-78, Identity=97%"; Hit description =Kinesin-1
  Pfam annotation: Domain name=Kinesin; Domain location=1-144; Score =65.0; E_value=6.9e-20; Accession=PF00225.15; Description=Kinesin motor domain
CCLLHLNRSVGKTQMNEQSSRSHFVFTLKISGSNENTGQHVQGVLNLIDLAGSERLAKSGSTGDRLKETQSINKSLSALSDVIFAIAKGDDHVPFRNSKLTYLLQPCLGGDSKTLMFVNISPEASSVGETICSLRFASRVNACEIGIPRRQTQARSFDSRLSYG

SEQ ID NO: 78696 - protein, 467 aa, Setaria italica
  Transcript Sequence Number=SeqID_12722
  Gene Ontology: Mol. function=microtubule motor activity; Cellular component=microtubule associated complex; Biological process =microtubule-based movement
  Homolog annotation: Hit_ID=B6SY02; Match level="QueryCoverage=97%, HitCoverage=57%, E-value=0.0, Identity=88%"; Hit description=Kinesin- 1
  Pfam annotation: Domain name=Kinesin; Domain location=148-462; Score =457.6; E_value=1.8e-134; Accession=PF00225.15; Description=Kinesin motor domain
VLFRRTQEEVECLRAELKQVRDDRDHSVAQLNNLNLELANCKEQIGKSSKECEGLSTKVSALEETCNTQKEQIQTFRKQLAVATQKLKLADVTAIEAMTGYEEQKEKIKYLEERLAHAESQIVEGDELRKKLHNTILELKGNIRVFCRVRPLLRFDGDSNGPEGASISFPTSVESNGRAIDLMNQGQKLSFSYDKVFDHNASQEDVFVEISQLVQSALDGYKVCIFAYGQTGSGKTYTMMGRPGIDQKGIIPRSLEQIFKTSQSLESQGWEYSMQASMLEIYNETIRDLLAPGRPNSFEMTPSKQYTIKHDSHGNTTVSDLTIIDVFGIADVTTLLEKASQSRSVGKTQMNEQSSRSHFVFTLKISGSNENTGQHVQGVLNLIDLAGSERLAKSGSTGDRLKETQSINKSLSALSDVIFAIAKGDDHVPFRNSKLTYLLQPCLGGDSKTLMFVTIVPKGYLKLRIRI

SEQ ID NO: 78697 - protein, 241 aa, Setaria italica
  misc_feature (120)..(120): Xaa can be any naturally occurring amino acid
  misc_feature (195)..(195): Xaa can be any naturally occurring amino acid
  Transcript Sequence Number=SeqID_12723
  Gene Ontology: Mol. function=magnesium ion binding; Cellular component=chloroplast; Biological process=metabolic process
  Homolog annotation: Hit_ID=C0SSW5; Match level="QueryCoverage=97%, HitCoverage=29%, E-value=2e-67, Identity=54%"; Hit description=Ent -copalyl diphosphate synthase
  Pfam annotation: Domain name=Terpene_synth_C; Domain location=45-235; Score=-22.7; E_value=2.2e-05; Accession=PF03936.8; Description =Terpene synthase family, metal binding domain
ALDFPWRASLPRIEARMYLEQYGGSADVWIGKVLYRMPLVSNELFLETAREDFRSFQKLCRLEWNGLRKWYDRNKLAAFGVEPKCVLRAYFQAAASIFEPDRAAERLAWARTAVIAEAVXLHLRGKASDVSTRVHGAISELENHGRDALTRVNEDPKKALLGAIGELIDQSSSENASHCLREAWKQWLRSWTAKXGFESCGGNTALLIVRTVEIASGRYSLKEHDVNRSEYTQLRGSRLPS

SEQ ID NO: 78698 - protein, 353 aa, Setaria italica
  Transcript Sequence Number=SeqID_12724
  Gene Ontology: Mol. function=L-ascorbate peroxidase activity; Cellular component=chloroplast; Biological process=hydrogen peroxide catabolic process
  Homolog annotation: Hit_ID=Q9THX6; Match level="QueryCoverage=89%, HitCoverage=90%, E-value=1e-127, Identity=71%"; Hit description =Putative L-ascorbate peroxidase, chloroplastic
  Pfam annotation: Domain name=peroxidase; Domain location=104-307; Score=38.7; E_value=6.9e-13; Accession=PF00141.15; Description =Peroxidase
  Subcellular localization annotation: CTP_CleavageSite=21; ConfidenceScore=5.42e-01
MAGAAFLSTALLGARGVAASSSSSVSSPARRHAHIQVCCKGNVEGLEAAGHDERLRFRRRDFIGSCVGTAIGLEMIEGSSKFTGEATAADLIERRQRSEFQSSIKDTLYTAIKAKPELVPSLLTLALNDAITYDKATKTGGANGSIRLEISRPENSGLSAALDLLTEAKKEIDSNSKGGPISFADLIQFAAQSALKRSFLDAAIAKCGGNEDKGRTLYSAYGSNGQWGLFDRTFGRTDAQDADPEGRVPDWSKASVQEMKDRFVAVGLGPRQLAVMSAFLGPDQAATEERLIADPDCRPWVEKYQRSRETVSRTDYEVDLITALTKLGSLGQKINYEAYTYPKQKIDLGKLKL

SEQ ID NO: 78699 - protein, 130 aa, Setaria italica
  Transcript Sequence Number=SeqID_12725
RAYRRKKYPESTYFQKKKGIGINTAKRTSHKRQFQRKNNRQHLCHKSWRLEDTTLHTLCFISIPLDPSRRSTDPTASCVCCRVLSGYFFLRYARLLLPSLKKTRVVVGDLEKAPLHGLCVLEAVQTSCSI

SEQ ID NO: 78700 - protein, 102 aa, Setaria italica
  Transcript Sequence Number=SeqID_12726
  Subcellular localization annotation: CTP_CleavageSite=53; ConfidenceScore=5.40e-01
LVISYSHGPIFFYLLSLILFKPILAQSLQPSNRPISTNSVCQNTCSANRPIPNCSTNRPIPNRNLLIHRIGQFFPPLTPIQFTASRTKAKAKRGRPDIILSL

SEQ ID NO: 78701 - protein, 114 aa, Setaria italica
  Transcript Sequence Number=SeqID_12727
  Gene Ontology: Mol. function=calcium ion binding; Cellular component =plasma membrane
  Homolog annotation: Hit_ID=Q3HRP0; Match level="QueryCoverage=66%, HitCoverage=35%, E-value=1e-32, Identity=89%"; Hit description =Calcineurin B-like protein 7
  Pfam annotation: Domain name=efhand; Domain location=28-56; Score =23.2; E_value=0.0011; Accession=PF00036.24; Description=EF hand
LKRNGVIEFGEFVRSLNIFHPDTPMAEKIAFAFRLYDLRGTGFIEHEELKEMVLAILNESDLILSDDAVEQIVDQVQYIKINGYFHLIPSACLVQVCPPPSYKVYYDPFVWLHT

SEQ ID NO: 78702 - protein, 213 aa, Setaria italica
  Transcript Sequence Number=SeqID_12728
  Gene Ontology: Mol. function=calcium ion binding; Cellular component =plasma membrane; Biological process=abscisic acid mediated signaling
  Homolog annotation: Hit_ID=Q3HRP0; Match level="QueryCoverage=100%, HitCoverage=100%, E-value=1e-109, Identity=90%"; Hit description =Calcineurin B-like protein 7
  Pfam annotation: Domain name=efhand; Domain location=108-136; Score =23.2; E_value=0.0011; Accession=PF00036.24; Description=EF hand
  Pfam annotation: Domain name=efhand; Domain location=152-180; Score =27.4; E_value=5.7e-05; Accession=PF00036.24; Description=EF hand
  Pfam annotation: Domain name=efhand; Domain location=71-99; Score =20.4; E_value=0.0073; Accession=PF00036.24; Description=EF hand
  Pfam module annotation: Pfam domain module=efhand::efhand::efhand; Domain location=108-136::152-180::71-99
MGCVSSKQFKRAAAYEDSSILAKETTFSVNEVEALRELYKKISHSIFKDGLIHKEEFQLALFRNSNKKNLFADRIFDLFDLKRNGVIEFGEFVRSLNIFHPDTPMAEKIAFAFRLYDLRGTGFIEHEELKEMVLAILNESDLILSDDAVEQIVDQTFKQADLNDDGKIDPEEWKAFASKNPGLLKNMTLPYLKDITMAFPSFVLNSGATDEEL

SEQ ID NO: 78703 - protein, 239 aa, Setaria italica
  Transcript Sequence Number=SeqID_12729
  Gene Ontology: Mol. function=protein serine/threonine kinase activity; Cellular component=mitochondrion; Biological process =protein amino acid phosphorylation
  Homolog annotation: Hit_ID=B9RLV3; Match level="QueryCoverage=99%, HitCoverage=46%, E-value=9e-57, Identity=48%"; Hit description =Pentatricopeptide repeat-containing protein, putative
  Pfam annotation: Domain name=PPR; Domain location=118-152; Score =20.1; E_value=0.0091; Accession=PF01535.12; Description=PPR repeat
  Pfam annotation: Domain name=PPR; Domain location=195-229; Score =20.4; E_value=0.0074; Accession=PF01535.12; Description=PPR repeat
  Pfam annotation: Domain name=PPR; Domain location=36-70; Score=21.4; E_value=0.0037; Accession=PF01535.12; Description=PPR repeat
  Pfam module annotation: Pfam domain module=PPR::PPR::PPR; Domain location=118-152::195-229::36-70
GALDRAIGVLARAGDLTAMRIAIADVEKDGRRMAPETFTTVVEALVDAGNEDEAVRLFRGLERQKLLPERGDSVRGDGVWSSSLATVQALCKRGHAREAQGVVWHHKSELSVEPMVSIVERSLLHGWCVHGNAKEARRVLDEMKSAGVPLGLPSFNDFLHCVCHRNLKFNPSALVPEAMDILAEMRSYGVAPAASSFNILLSCLGRARRVKEAYRILYLMIEGKAGCSPDWVSYYLVGR

SEQ ID NO: 78704 - protein, 361 aa, Setaria italica
  misc_feature (91)..(91): Xaa can be any naturally occurring amino acid
  Transcript Sequence Number=SeqID_12730
  Gene Ontology: Mol. function=protein binding; Cellular component =membrane; Biological process=vesicle-mediated transport
  Homolog annotation: Hit_ID=Q2HRK3; Match level="QueryCoverage=98%, HitCoverage=98%, E-value=2e-56, Identity=39%"; Hit description=T -snare
  Pfam annotation: Domain name=Syntaxin-6_N; Domain location=11-114; Score=114.7; E_value=3e-31; Accession=PF09177.3; Description =Syntaxin 6, N-terminal
MATSFDRWEKDPFFLAAEEVQESADRMESVYRIWVQERSGGGGDSEAAGISEGPTAAELRRELHTALGTAKWQLDELERAIRSNDHVISAXGKDTRARHDDFVAAIGYRILEVENNLKQSNVAEGRGPLSWVHLDEDERDDLAAFLSAGPFQQKDKVVTTLAGDIEVGSNATRMKNDISTDSSKDSAGSTDLISGRAKDDLHRGHRRAVSASADIGSWSMSIPNECEEALEQSSDGPHKAPLLKIVKTCALASALQSKPRTKCKNGAVRWAGVNPQDVEEAIPLNTSQLTQGLDGCFERNKSCLSACDEDTYNKKLYGWLGALHRQLQRSQYQIRYGHPVQFVVLALAALVIFVCILRTIW

SEQ ID NO: 78705 - protein, 361 aa, Setaria italica
  Transcript Sequence Number=SeqID_12731
  Gene Ontology: Mol. function=protein serine/threonine kinase activity; Cellular component=plasma membrane; Biological process =protein amino acid phosphorylation
  Homolog annotation: Hit_ID=C5IYF1; Match level="QueryCoverage=93%, HitCoverage=95%, E-value=2e-78, Identity=36%"; Hit description =Putative serine-threonine protein kinase
  Pfam annotation: Domain name=LRRNT_2; Domain location=29-68; Score =46.9; E_value=7.7e-11; Accession=PF08263.4; Description=Leucine rich repeat N-terminal domain
  Pfam annotation: Domain name=LRR_1; Domain location=119-141; Score =15.1; E_value=0.29; Accession=PF00560.25; Description=Leucine Rich Repeat
  Pfam annotation: Domain name=LRR_1; Domain location=144-166; Score =11.8; E_value=1.7; Accession=PF00560.25; Description=Leucine Rich Repeat
  Pfam annotation: Domain name=LRR_1; Domain location=168-191; Score =8.4; E_value=7.4; Accession=PF00560.25; Description=Leucine Rich Repeat
  Pfam annotation: Domain name=LRR_1; Domain location=193-216; Score =10.5; E_value=2.9; Accession=PF00560.25; Description=Leucine Rich Repeat
  Pfam annotation: Domain name=LRR_1; Domain location=218-240; Score =13.6; E_value=0.77; Accession=PF00560.25; Description=Leucine Rich Repeat
  Pfam annotation: Domain name=LRR_1; Domain location=242-264; Score =7.3; E_value=12; Accession=PF00560.25; Description=Leucine Rich Repeat
  Pfam annotation: Domain name=LRR_1; Domain location=266-288; Score =8.9; E_value=6; Accession=PF00560.25; Description=Leucine Rich Repeat
  Pfam annotation: Domain name=LRR_1; Domain location=289-311; Score =16.1; E_value=0.14; Accession=PF00560.25; Description=Leucine Rich Repeat
  Pfam annotation: Domain name=LRR_1; Domain location=313-335; Score =19.2; E_value=0.017; Accession=PF00560.25; Description=Leucine Rich Repeat
  Pfam annotation: Domain name=LRR_1; Domain location=337-359; Score =7.6; E_value=10; Accession=PF00560.25; Description=Leucine Rich Repeat
  Pfam annotation: Domain name=LRR_1; Domain location=95-117; Score =14.4; E_value=0.48; Accession=PF00560.25; Description=Leucine Rich Repeat
  Pfam module annotation: Pfam domain module=LRRNT_2::LRR_1::LRR_1::LRR_ 1::LRR_1::LRR_1::LRR_1::LRR_1::LRR_1::LRR_1::LRR_1::LRR_1; Domain location=29-68::119-141::144-166::168-191::193-216::218-240::242 -264::266-288::...
  Pfam module annotation: Domain location=289-311::313-335::337-359::95- 117
  Subcellular localization annotation: CTP_CleavageSite=66; ConfidenceScore=5.26e-01
HSQKWLHSYLLLLVFLSFISSSPSMAQINSSDYETLLTVKKAWGSPSALSSWTSQNSSYCSWAGVSCNNGRVTKLSFPNFNITNPIPASICSLKNLSYLDLSYNNLTDHFPIVIYGCSALSYLDLSNNLFSGALPADIDKLSSEMEHLNLSSNGFTGSVPSAIAVFPKLKSLVLDTNSFNGTYPASAIAKLNELETLTLADNPFAPGLIPDEFSKLTNLKMLWLSGMNLTGGIPDKLSSLTELTTLALYSNKLHGEIPAWVWKLPKLERLYLYANSFTGGIGPEVTFFNLQELDLSANLFTGTIPEAIGKMKNLTTLNLYYNKLTGSIPPSIGLLPNLLDIRLFNNKLSGLLPPELGKHFA

SEQ ID NO: 78706 - protein, 63 aa, Setaria italica
  Transcript Sequence Number=SeqID_12732
  Subcellular localization annotation: CTP_CleavageSite=31; ConfidenceScore=5.45e-01
ASTGGFDGHARPDPPSLGSEAPPPPSWRPARASGRPLRRQRGEGRGGGGRSGRSSGTNDGRTV

SEQ ID NO: 78707 - protein, 96 aa, Setaria italica
  misc_feature (72)..(72): Xaa can be any naturally occurring amino acid
  Transcript Sequence Number=SeqID_12733
  Gene Ontology: Mol. function=phosphoribosylaminoimidazole carboxylase activity; Cellular component=phosphoribosylaminoimidazole carboxylase complex; Biological process='de novo' IMP biosynthetic process
  Homolog annotation: Hit_ID=A7HM08; Match level="QueryCoverage=87%, HitCoverage=47%, E-value=8e-22, Identity=60%"; Hit description =Phosphoribosylaminoimidazole carboxylase, catalytic subunit
  Pfam annotation: Domain name=AIRC; Domain location=17-95; Score=74.5; E_value=3.8e-19; Accession=PF00731.12; Description=AIR carboxylase
LDKLLQSDTYDPKKASPRVSIIMGSDSDLDVMKDAEKILKKFNIPVETTIVSAHRTPERMYDFAKSAKDRGXEVIIAGAGGAAHLPGKYQLTKTLP

SEQ ID NO: 78708 - protein, 128 aa, Setaria italica
  Transcript Sequence Number=SeqID_12734
  Gene Ontology: Mol. function=phosphoribosylaminoimidazole carboxylase activity; Cellular component=phosphoribosylaminoimidazole carboxylase complex; Biological process='de novo' IMP biosynthetic process
  Homolog annotation: Hit_ID=O80937; Match level="QueryCoverage=99%, HitCoverage=19%, E-value=2e-50, Identity=72%"; Hit description =Putative phosphoribosylaminoimidazole carboxylase
  Pfam annotation: Domain name=ATP-grasp; Domain location=1-128; Score =91.6; E_value=2.8e-24; Accession=PF02222.14; Description=ATP-grasp domain
DKYRQKNHFSKFGIPLPDFMEVDTFPCFLYTSGKGERFGYPLMVKSKRLAYDGRGNAVAQNQEELSSVVASLGGFERGLYVERWAPFIKELSVIVARSRDGSTVCYPVVETIHEDNICHVVEAPADVS

SEQ ID NO: 78709 - protein, 489 aa, Setaria italica
  Transcript Sequence Number=SeqID_12735
  Gene Ontology: Mol. function=phosphoribosylaminoimidazole carboxylase activity; Cellular component=phosphoribosylaminoimidazole carboxylase complex; Biological process='de novo' IMP biosynthetic process
  Homolog annotation: Hit_ID=B9S7H9; Match level="QueryCoverage=99%, HitCoverage=77%, E-value=0.0, Identity=70%"; Hit description =Phosphoribosylaminoimidazole carboxylase atpase-subunit, putative
  Pfam annotation: Domain name=AIRC; Domain location=323-472; Score =360.0; E_value=4.3e-105; Accession=PF00731.12; Description=AIR carboxylase
  Pfam annotation: Domain name=ATP-grasp; Domain location=36-216; Score= 318.4; E_value=1.5e-92; Accession=PF02222.14; Description=ATP-grasp domain
  Pfam annotation: Domain name=ATP-grasp_3; Domain location=34-208; Score=-45.8; E_value=0.021; Accession=PF02655.6; Description=ATP -grasp domain
  Pfam annotation: Domain name=CPSase_L_D2; Domain location=36-245; Score=-93.0; E_value=0.00017; Accession=PF02786.9; Description =Carbamoyl-phosphate synthase L chain, ATP binding domain
  Pfam annotation: Domain name=Dala_Dala_lig_C; Domain location=36-214; Score=-37.7; E_value=2.9e-07; Accession=PF07478.5; Description=D-ala D-ala ligase C-terminus
  Pfam annotation: Domain name=RimK; Domain location=34-216; Score= -71.5; E_value=0.079; Accession=PF08443.3; Description=RimK-like ATP -grasp domain
  Pfam module annotation: Pfam domain module=AIRC::ATP-grasp::ATP-grasp_ 3::CPSase_L_D2::Dala_Dala_lig_C::RimK; Domain location=323-472::36 -216::34-208::36-245::36-214::34-216
VLTVEIEHVDAVTLEKLEKQGVDCEPKASTIMIIQDKYRQKNHFSKFGIPLPDFMEVDTLHSIEEAGERFGYPLMVKSKRLAYDGRGNAVAQNKEELSSVVASLGGFERGLYVERWAPFIKELSVIVARSRDGSTVCYPVVETIHEDNICHVVEAPADVSDKIKKSATGVAEKAIKSLEGAGVFAVELFLTENDQILLNEVAPRPHNSGHQTIESCYTSQYEQHLRAILGIPLGDPSMKTPAAIMYNILGVDEGEAGFLLAHQLIGRALNIPGASVHWYAKPEMRKQRKMGHITIVGPSKMSVKSRLDKLLQSDTYDPKKASPRVSIIMGSDSDLDVMKDAEKILKKFNIPVETTIVSAHRTPERMYDFAKSAKDRGVEVIIAGAGGAAHLPGMVASLTSLPVIGVPIKTQSLLGLDSLLSIVQMPKGIPVATVAIGNAENAGLLAVRMLASRDPELYDRAIKYQDDLRDMVLEKAERLENIGWEEYLK

SEQ ID NO: 78710 - protein, 105 aa, Setaria italica
  misc_feature (53)..(53): Xaa can be any naturally occurring amino acid
  misc_feature (65)..(65): Xaa can be any naturally occurring amino acid
  Transcript Sequence Number=SeqID_12736
  Subcellular localization annotation: CTP_CleavageSite=66; ConfidenceScore=5.60e-01
MSTAKFPFFVSFDLAPPFFLRASSPPPPPPLRPPPPALPTPGHRINAGRAPTXPLLESAPAPAPXSANRRHAPAPPPPSIPNLSRAPAPPPQSTPALARPPSLVP

SEQ ID NO: 78711 - protein, 70 aa, Setaria italica
  Transcript Sequence Number=SeqID_12737
NQSSKRIETLTKYKSLVEVRVSGFPAVGDSAIRRRRMDWSWRLSLATANRQRRGSRRRRVGFPISGDGEV

SEQ ID NO: 78712 - protein, 236 aa, Setaria italica
  Transcript Sequence Number=SeqID_12738
  Gene Ontology: Mol. function=ATP binding; Biological process=apoptosis
  Homolog annotation: Hit_ID=Q53PM4; Match level="QueryCoverage=81%, HitCoverage=39%, E-value=2e-27, Identity=34%"; Hit description=NB -ARC domain containing protein
TSLPLCSINGDSICRMDEEKFRNGRMLAVVEFVTDVDDDDWEKFYSTARHKAIDGSKVIIISRIENLARFGTVKTVFLNSLTHEEYRYLFKMLAFGSTDEKDYPHLAAIANEIAIQLGGSLITANVIADLLRRNHDFQFWLCILQRFKRMVHKNLSMYGEHPKDILDNERPIDITTFNSCSSLRMMPPRVERDGDSSERKLDHVPFGDLITGSISLPNNQFVLVAWESRLPPYYVS

SEQ ID NO: 78713 - protein, 93 aa, Setaria italica
  misc_feature (56)..(56): Xaa can be any naturally occurring amino acid
  misc_feature (69)..(69): Xaa can be any naturally occurring amino acid
  Transcript Sequence Number=SeqID_12739
  Gene Ontology: Mol. function=protein binding
EGGGWTACDPMPDALRDSASATWLSAAATDQRVYLVERATGWASWFDPAKRRWGPXRRLGPDPAVTTWXVAPGRAGADERLVLFGANRADKEA

SEQ ID NO: 78714 - protein, 84 aa, Setaria italica
  Transcript Sequence Number=SeqID_12740
MEGGRAAAGGAYPSPVAAPPHPAALSNTPVDASSFIHTPFYCEENIYMLCKEMIGGIHSFFPYSRSIVSRRRFRQAWFPPGIIT

SEQ ID NO: 78715 - protein, 96 aa, Setaria italica
  misc_feature (90)..(90): Xaa can be any naturally occurring amino acid
  Transcript Sequence Number=SeqID_12741
  Gene Ontology: Mol. function=transferase activity, transferring glycosyl groups; Cellular component=1,3-beta-glucan synthase complex; Biological process=cell wall organization and biogenesis
  Homolog annotation: Hit_ID=Q9SHJ3; Match level="QueryCoverage=100%, HitCoverage=4%, E-value=3e-44, Identity=87%"; Hit description =Callose synthase 7
EFESRKYGKRKPTILGLREHIFTGSVSSLAWFMSNQETSFVTIGQRVLANPLKVRFHYGHPDIFDRLFHITRGGISKASKTINLSEDIFXGFNSTM

SEQ ID NO: 78716 - protein, 205 aa, Setaria italica
  Transcript Sequence Number=SeqID_12742
  Subcellular localization annotation: CTP_CleavageSite=37; ConfidenceScore=5.40e-01
SAHAHHPSSHITVGTWSTHQPSSNVIVGDGNRSNATSQATVGHWRRHQPNSHATIGDRSLSNSNSQDTVGNGSTHKPNSHVTVGDGSPVDANFQASVGHGSAHMSLAAVGDGSTNNTDSEVGVGGGSISKGNSQGTLVDGNTNCPNSTVSVGDGRSHYPNSKVTVGDGSTPSAEDSNPKYASCTVVEQGEIRRDGCEALAGGGLT

SEQ ID NO: 78717 - protein, 200 aa, Setaria italica
  misc_feature (75)..(75): Xaa can be any naturally occurring amino acid
  Transcript Sequence Number=SeqID_12743
  Gene Ontology: Mol. function=transferase activity, transferring glycosyl groups
  Homolog annotation: Hit_ID=Q10QT2; Match level="QueryCoverage=100%, HitCoverage=34%, E-value=5e-54, Identity=65%"; Hit description =Glycogenin glucosyltransferase, putative, expressed
MGVTTAGEAVKSPGRASVIVKLNAAFLAFFLLAYMALLLHPKYSYLLDSGATSLVRCTFRDDACPPSTQLSRKVXLGGVAANKVVAAERIVNAGRAPAMFDELRGRLRMGLVNIVHEDLLALGVEGEAVRVEFERVSDVFRWSDLFPEWIDEEEDDEGPSCPELPMPDLSLYGGDVDVVVASLPCNRTAPGGWNRDVFRL

SEQ ID NO: 78718 - protein, 121 aa, Setaria italica
  Transcript Sequence Number=SeqID_12744
  Gene Ontology: Mol. function=protein binding; Cellular component =nucleus; Biological process=cell division
  Homolog annotation: Hit_ID=Q8S521; Match level="QueryCoverage=100%, HitCoverage=61%, E-value=2e-41, Identity=74%"; Hit description=D -type cyclin (Fragment)
YEMAASILLCAEDSSSILGLGAECEEEEVMARSRTRGEPCVDFPVPSEECVASFVEAETAHMPREDYAERLRLRGGGLDLRIRMDAIDWIWKVHSYYNFRPLTACLAVNYLDRFLSLYQLP

SEQ ID NO: 78719 - protein, 63 aa, Setaria italica
  Transcript Sequence Number=SeqID_12745
  Gene Ontology: Mol. function=protein binding; Cellular component =spliceosome; Biological process=nuclear mRNA splicing, via spliceosome
MATLKDLLPAPKTTASTFYDHSSDPWFKERYGGEPAQGSAAARPAAATRAIPPYGKRAGFVPR

SEQ ID NO: 78720 - protein, 80 aa, Setaria italica
  Transcript Sequence Number=SeqID_12746
DNCPCFKKMVGSPYVSMFRAVDPACNYGFILCPDSETAQFLRAHYVTVSLEKIYFDVVSSVKLMPFDDDINQHRRVLKWI

SEQ ID NO: 78721 - protein, 93 aa, Setaria italica
  Transcript Sequence Number=SeqID_12747
SIFVSKVISTYRQNRVDPGEVRRDHTSLGQPNGWGARICACADSEKAGRGSGQAVVGSLRRCEVGKGKREMGRSRRRRFAGSPPGEARIFSGS

SEQ ID NO: 78722 - protein, 38 aa, Setaria italica
  Transcript Sequence Number=SeqID_12748
ILRVHDFICIIDLMLVPLSICAPYEFLRGYNSTITSMF

SEQ ID NO: 78723 - protein, 65 aa, Setaria italica
  Transcript Sequence Number=SeqID_12749
  Gene Ontology: Mol. function=catalytic activity; Biological process =nucleoside metabolic process
  Homolog annotation: Hit_ID=B9S216; Match level="QueryCoverage=81%, HitCoverage=13%, E-value=2e-09, Identity=66%"; Hit description =Mta/sah nucleosidase, putative
  Subcellular localization annotation: CTP_CleavageSite=43; ConfidenceScore=5.13e-01
DSSAIKRVTLLIQQTTTSPGVPVIVFRGVSDLAGGEPTWSSTSLMNLASINALKVAVEFIATVGK

SEQ ID NO: 78724 - protein, 48 aa, Setaria italica
  Transcript Sequence Number=SeqID_12750
  Gene Ontology: Mol. function=catalytic activity; Biological process =nucleoside metabolic process
VHYGTAGSSNDSMSFGDVSVPKLVAYTGAWTWKVPVQLESPSLTHLKM

SEQ ID NO: 78725 - protein, 92 aa, Setaria italica
  Transcript Sequence Number=SeqID_12751
  Gene Ontology: Mol. function=catalytic activity; Biological process =nucleoside metabolic process
  Homolog annotation: Hit_ID=B9S216; Match level="QueryCoverage=83%, HitCoverage=19%, E-value=3e-23, Identity=63%"; Hit description =Mta/sah nucleosidase, putative
FLGRRFHIGSIRGVNVIYALTGQRRLNAAVTVQTLIDVFSVSGIVHYGTAGSSNDSMSFGDVSVPKLVAYTGAWTWKVPVQLESPSLTHLKM

SEQ ID NO: 78726 - protein, 337 aa, Setaria italica
  Transcript Sequence Number=SeqID_12752
  Gene Ontology: Mol. function=catalytic activity; Biological process =nucleoside metabolic process
  Homolog annotation: Hit_ID=B9S216; Match level="QueryCoverage=75%, HitCoverage=64%, E-value=2e-88, Identity=60%"; Hit description =Mta/sah nucleosidase, putative
  Pfam annotation: Domain name=PNP_UDP_1; Domain location=45-321; Score= 59.1; E_value=1.7e-14; Accession=PF01048.12; Description =Phosphorylase family
  Subcellular localization annotation: CTP_CleavageSite=22; ConfidenceScore=5.06e-01
MAMALFSLQVLLFSLLLTGSAMAAALPAMDRVRWQVDRVNRRGPSLGLVMSYVDEATALQASGYFTPWRVQPFLDLYGRRFHIGSIRGVNVIYALTGQRRLNAAVTVQTLIDVFSVSGIVHYGTAGSSNDSMSFGDVSVPKLVAYTGAWTWKKFRSPKESSAELSFGEYNIPNGGDNLLGSLKFRNEELYSVGKPMEEVFWLPVDSAWFKIAEQLKVKLERCNDTFCLPTTPQVVYGLKGSSADMFLDNAEYRKFLFREFGVSTVDEESAAVVMTTTSPGVPVIVFRGVSDLAGGEPTWSSTSLMNLASINALKVAVEFIATVGKQKPIVSVQRSNN

SEQ ID NO: 78727 - protein, 131 aa, Setaria italica
  Transcript Sequence Number=SeqID_12753
  Gene Ontology: Mol. function=nucleotide binding; Biological process =defense response
  Homolog annotation: Hit_ID=Q53Q39; Match level="QueryCoverage=100%, HitCoverage=14%, E-value=3e-45, Identity=70%"; Hit description=NB -ARC domain containing protein, expressed
NLEELQTLETVEANKDLAEQLIKLTKLRSVWIDNISAGDCANLFSILSKMPLLSSLLLSASDENETLHLEDLKPASENFHRLIIRGCWADKTLECPVFRDSGRNLKYLAISWCHLQEDPLQLLAPYVPNLT

SEQ ID NO: 78728 - protein, 80 aa, Setaria italica
  Transcript Sequence Number=SeqID_12754
  Subcellular localization annotation: CTP_CleavageSite=27; ConfidenceScore=5.09e-01
MVSPNRPAAAAALLLVVAAAALLLSTSSSEDGYLGRLVTPWGASLTALPFSPTDVLPLLPRGVAMAALRALRGVSDIFPV

SEQ ID NO: 78729 - protein, 125 aa, Setaria italica
  Transcript Sequence Number=SeqID_12755
  Gene Ontology: Mol. function=oxidoreductase activity; Biological process=cell redox homeostasis
  Homolog annotation: Hit_ID=Q9ZR86; Match level="QueryCoverage=71%, HitCoverage=15%, E-value=3e-27, Identity=67%"; Hit description=PDI -like protein
MLFNYVRNIGVHCLLIGTNKKTMNTNVADIIEEHGFEAWEGFPFSAEKLETLAEKAKAKAASQTLESLLISGDLDFVIGKGGAKVPVSELVGKTVLLYFSSKELWSLSLEMKTISNHCCLSTFVI

SEQ ID NO: 78730 - protein, 311 aa, Setaria italica
  Transcript Sequence Number=SeqID_12756
  Gene Ontology: Mol. function=oxidoreductase activity; Cellular component=cytoplasm; Biological process=cell redox homeostasis
  Homolog annotation: Hit_ID=Q9ZR86; Match level="QueryCoverage=90%, HitCoverage=83%, E-value=1e-136, Identity=55%"; Hit description=PDI -like protein
  Pfam annotation: Domain name=AhpC-TSA; Domain location=15-140; Score =10.0; E_value=0.00013; Accession=PF00578.13; Description=AhpCTSA family
  Pfam annotation: Domain name=Redoxin; Domain location=20-169; Score= -7.2; E_value=0.016; Accession=PF08534.2; Description=Redoxin
  Pfam annotation: Domain name=Thioredoxin; Domain location=26-164; Score=-24.2; E_value=0.02; Accession=PF00085.12; Description =Thioredoxin
  Pfam module annotation: Pfam domain module=AhpC-TSA::Redoxin::Thioredo xin; Domain location=15-140::20-169::26-164
MAEAAPTTNGGGGGIGTILAAGDRDFLVRNSGEQVKISSIEASPVALYFSASWCPPCRRFTPKLIEAYKELASQGKSFEVVFVSGDQDEEAFNEYFAKMPWLAVPFSDSEGREALDGRFKVSGIPHLVILDAKTGEVYTEDGVGLVSEYGVEAYPFTPERINELKEQEKAAKENQTIKSVLGTSTRDYLITSKGDKVPISELEGKYVGLCFVVPGYGPVDEFISVLAKIYEKLKEVGEKFEVVAVSLDSDESSFNESLAKMPWLAIPQGDKMCEKLVRYFELRTLPTLVLIGTDGNKCRKSPKLKVTNQLL

SEQ ID NO: 78731 - protein, 144 aa, Setaria italica
  Transcript Sequence Number=SeqID_12757
  Gene Ontology: Mol. function=oxidoreductase activity; Cellular component=cytoplasm; Biological process=cell redox homeostasis
  Homolog annotation: Hit_ID=Q9ZR86; Match level="QueryCoverage=98%, HitCoverage=81%, E-value=5e-59, Identity=50%"; Hit description=PDI -like protein
  Pfam annotation: Domain name=AhpC-TSA; Domain location=2-108; Score= -0.8; E_value=0.00097; Accession=PF00578.13; Description=AhpCTSA family
  Pfam annotation: Domain name=Redoxin; Domain location=3-132; Score= -15.8; E_value=0.072; Accession=PF08534.2; Description=Redoxin
  Pfam module annotation: Pfam domain module=AhpC-TSA::Redoxin; Domain location=2-108::3-132
CISQVPVSELVGKTVLLYFSAKWCGPCRAFLPMLVKEYNKIKVKHSDFEIVFISSDSDQSSFDEFFTEMPWLALPLEDERKAFLEKTFRIRGIPSLVAIGPNGQTVSRDAKAQLMIHGAEAFPFTEERLEELQKELDEMAKGWP

SEQ ID NO: 78732 - protein, 87 aa, Setaria italica
  Transcript Sequence Number=SeqID_12758
  Gene Ontology: Mol. function=oxidoreductase activity; Biological process=cell redox homeostasis
  Homolog annotation: Hit_ID=Q9ZR86; Match level="QueryCoverage=74%, HitCoverage=10%, E-value=2e-18, Identity=61%"; Hit description=PDI -like protein
  Pfam annotation: Domain name=C1_2; Domain location=28-55; Score=29.5; E_value=1.3e-05; Accession=PF03107.8; Description=C1 domain
  Pfam annotation: Domain name=C1_3; Domain location=27-55; Score=35.2; E_value=2.6e-07; Accession=PF07649.4; Description=C1-like domain
  Pfam module annotation: Pfam domain module=C1_2::C1_3; Domain location=28-55::27-55
KGKRKQIEEKHELHEEHELVLERRGTFCCDGCEEMGNTWSYSCNKCDFDLHPKCALAEEEKKGEEDGKAAEETPAGYVCEGGVCRKA

SEQ ID NO: 78733 - protein, 499 aa, Setaria italica
  Transcript Sequence Number=SeqID_12759
  Gene Ontology: Mol. function=oxidoreductase activity; Cellular component=cytoplasm; Biological process=cell redox homeostasis
  Homolog annotation: Hit_ID=Q9ZR86; Match level="QueryCoverage=92%, HitCoverage=97%, E-value=0.0, Identity=58%"; Hit description=PDI -like protein
  Pfam annotation: Domain name=AhpC-TSA; Domain location=215-347; Score= 17.2; E_value=3.3e-05; Accession=PF00578.13; Description=AhpCTSA family
  Pfam annotation: Domain name=AhpC-TSA; Domain location=65-184; Score =9.5; E_value=0.00014; Accession=PF00578.13; Description=AhpCTSA family
  Pfam annotation: Domain name=C1_2; Domain location=405-432; Score =29.5; E_value=1.3e-05; Accession=PF03107.8; Description=C1 domain
  Pfam annotation: Domain name=C1_3; Domain location=404-432; Score =35.2; E_value=2.6e-07; Accession=PF07649.4; Description=C1-like domain
  Pfam annotation: Domain name=Redoxin; Domain location=214-371; Score=- 2.7; E_value=0.0075; Accession=PF08534.2; Description=Redoxin
  Pfam module annotation: Pfam domain module=AhpC-TSA::AhpC-TSA::C1 _2::C1_3::Redoxin; Domain location=215-347::65-184::405-432::404 -432::214-371
KVKQTNGIPHLVILDAKTGEVYTEDGVGLVSEYGVEAYPFTPERINELKEQEKAAKENQTIKSVLGTSTRDYLITSKGDKVPISELEGKYVGLCFVVPGYGPVDEFISVLAKIYEKLKEVGEKFEVVAVSLDSDESSFNESLAKMPWLAIPQGDKMCEKLVRYFELRTLPTLVLIGTDGKTMNTNVADIIEEHGFEAWEGFPFSAEKLETLAEKAKAKAASQTLESLLISGDLDFVIGKGGAKVPVSELVGKTVLLYFSAKWCGPCRAFLPMLVKEYNKIKVKHSDFEIVFISSDSDQSSFDEFFTEMPWLALPLEDERKAFLEKTFRIRGIPSLVAIGPNGQTVSRDAKAQLMIHGAEAFPFTEERLEELQKELDEMAKGWPEKLKHELHEEHELVLERRGTFCCDGCEEMGNTWSYSCNKCDFDLHPKCALAEEEKKGEEDGKAAEETPAGYVCEGGVCRKAESRIPLGIPFLTVSFLIWFFFVLFGKRLVVLKGFL

SEQ ID NO: 78734 - protein, 67 aa, Setaria italica
  Transcript Sequence Number=SeqID_12760
PSMPLSFLVARIWLWRPEVANLGVARDLSGAGGDPQVLGMQDTAMDNRVGEPCGSIQDLARNVYSAR

SEQ ID NO: 78735 - protein, 77 aa, Setaria italica
  Transcript Sequence Number=SeqID_12761
MAPPGSRRWAYVRLMAGTILGGVLGFYVMHRIETSYKERMEERLRRYEAHMLAKAQEAQQLQDEAQREDKAQLLPDS

SEQ ID NO: 78736 - protein, 130 aa, Setaria italica
  misc_feature (46)..(46): Xaa can be any naturally occurring amino acid
  Transcript Sequence Number=SeqID_12762
  Gene Ontology: Mol. function=neuropeptide hormone activity; Cellular component=extracellular region; Biological process=neuropeptide signaling pathway
RTVYRKSTIFEENRKSPVSKTLKPSFLHQSSKKSRAIKEHKRTEEXSCSDEELPTSTMSVSPSNPVEDKASGEAPRTSENLTIRIARDKGKRRKRKVGGAGLAGKFEVSSSHSGNSTPSSPLSQSSTQTV

SEQ ID NO: 78737 - protein, 1019 aa, Setaria italica
  misc_feature (751)..(751): Xaa can be any naturally occurring amino acid
  misc_feature (991)..(991): Xaa can be any naturally occurring amino acid
  Transcript Sequence Number=SeqID_12763
  Gene Ontology: Mol. function=neuropeptide hormone activity; Cellular component=extracellular region; Biological process=neuropeptide signaling pathway
  Homolog annotation: Hit_ID=A2VDJ0-3; Match level="QueryCoverage=21%, HitCoverage=14%, E-value=4e-16, Identity=30%"; Hit description =Isoform 3 of Transmembrane protein 131-like
CRRRRRRIAPRRVNGRTYSSCSSAFRDACADQSAFCFSSSLSQTLLASADGIKAPDLEVPREWGPSSPPLGFPMSGGGGVVTCSSVDTTLTRARNGLGRDSDAGVRYNAEPCQAPLVPDNWMRASAGVPMELDVPAADVDPSGLQSSLSMNVAIDPPVLDWGRRDLYAASMATLTVVNLNNDSALRLYEPFSTDPQFYVYGYEDLELQPGDNATVTFIFLPKLLGSSSAHLVVQTNFGGFIIHAKGMAVSSPYQILPLTGIDVLIGGQVGRNLSIYNPHDDTLYVEEVAVWMSSLESTRYSSHLVCQLGPFDGALELSSSSNWYTASSDESGWPVMYIRPSEQWEVLPSRRNTVIEFKLQALSEGKVFGAICLKMRNCTPGTMHTFVTPIELEVHTRTYYDSSGLIAVTFEHISTCGESGSIFSLSLRNGAPKLLRIVGISEDDRNGPMIFQVKYLNGLILFPDTVTDIALVRYTSSVPEDISFDSCNIVVETNSTLGSSVIIPCKDLVRASLSYASTAVVAESDGPFTRPLHEEATSANARTGTLGSMLQIEDLHNVKPTIMRAVKADDTILRQWRSHGTSDGISILMDHEIMFPIVQIGSQFSKWIKVHNPSLEHAAMQLVVNSEEIIDQCKTVTDVCELTFSSKSPEINSTETRFGFSLSDVAITEAHVGPSETALLGPIVFRPSNRCMWSSMVLIRNNLSGVELLPLRAYGGRQSIVLLEESKPAWKLEFNLGSNIQNVQNKSTMTXQEVPSSLCSQQLTKEIHVKNSGDLPLQVTKVKISGADCGVDGFAVDNCKGFSLAPSESIRMLISFQADFSSAMVKRDLELVMTTGIFPIPMTANIPVCMLNQCRKSYLRSAHWKLLVLFFGALTLLVLVFVRYPPHSLAGGSQDHYIKIDDRKSTIFEENRKSPVSKTLKPSFLHQSSKKSRAIKEHKRTEEALAEKYPASVIDSSKSTDDKNNPDEELPTSTMSVSPSNPVEDKASGEXLPRTSENLTIRIARDKGKRRKRKVGGAG

SEQ ID NO: 78738 - protein, 288 aa, Setaria italica
  Transcript Sequence Number=SeqID_12764
  Gene Ontology: Mol. function=neuropeptide hormone activity; Cellular component=extracellular region; Biological process=neuropeptide signaling pathway
EEALAEKYPASVIDSSKSTDDKNNPDEELPTSTMSVSPSNPVEDKASGEAPRTSENLTIRIARDKGKRRKRKVGGAGLAGKFEVSSSHSGNSTPSSPLSQSSTPKQGWSFSGAPSELKHGNRHETGFDVEATTSSTGTNREKKTWSQVAKEQPRSRSASPGTPSPSASALTTTTWLSPMLSTSSPIAPHARAPGSNLVKDKAVKRGEGARLKKDFTYDIWGDHFPANLLGIVRNGAPCKMPVASEGASYSLFAREPQTLMMKPSSSAPPVSRGRGSPPSDVATGYGIK

SEQ ID NO: 78739 - protein, 877 aa, Setaria italica
  misc_feature (21)..(21): Xaa can be any naturally occurring amino acid
  misc_feature (29)..(29): Xaa can be any naturally occurring amino acid
  Transcript Sequence Number=SeqID_12765
  Homolog annotation: Hit_ID=B0BL98; Match level="QueryCoverage=11%, HitCoverage=14%, E-value=8e-28, Identity=59%"; Hit description =CM0216.530.nc protein
  Pfam annotation: Domain name=CaM_binding; Domain location=743-858; Score=214.9; E_value=2.1e-61; Accession=PF07839.3; Description=Plant calmodulin-binding domain
GGSGGGGAKIAPLIDEEAVGXFFVEVYAXPRVSTDMSCSDMSLDEMDATVRKMEFVMFDRCGAEEDSEKGKDPTVCDEGEPEPHLRLEKHGAFRDNLSECSGADTGSDFVEELPWMRYHGYEYDDSLDDEISEEQRIREEEAGGAEISVEQEEEQGTSGRLGDDFKEDAAEEQENDDDENTSNLVQETEIIADQGVACRVETCQEPDGRDEDNILDTSCCGEASTGQGTAEEQLSEDVYKSEILNEEVTGWAGTILEECCKEEISADRGANDDEYSVQSDDESEVTREQDKDEESTPDDGSEMEISEDTISGDGCRADFSEEVTSRAIPEDDSTVDYAFEQYVGTVDDAFEQDGSPTNGHNDARKGFCITRSKLEVISEGIATGQETYQDGSMDGMVPKKLEITACRLEEASEESGNSEESNQGGISTCVDDAQVELDITTCKLKDAYEESNTTEESGLNSNAENVTDGAEMGPEIAKCNLEDASEESDIDQDTAEDDYSTCNSGDTQNADQSDRSANVSSDAQEAMGDDGSAYVSDDVQYDLEIKYSLEDASKESVIAQEADQGHSSADVSSDAQNESELTTSELAVIAITDDHENEFKISTCKSEDIFEESVIGEEADHDESSAYVGDGTQNEYEVTTCHSEGAQVESDVIKEDEDGINTAGGQKKYEITACESGGASLKPAMPQETDGDINNVYASDGSQNDTTMPKLDACEAVHVTEEADQSLQIPAEFSDAKEPSIDDICGAFSGMNLKGDVYFDPAESATCPGNKLIISRRRRTPEEEEYLRGFNPRAPNFLPLELDPDAEKVDLKHQMMDERKNAEEWMIDYALRQAVTNLAPARKKKVELLVQAFETVLPHDEEDKKSISPTRPVQACN

SEQ ID NO: 78740 - protein, 86 aa, Setaria italica
  Transcript Sequence Number=SeqID_12766
  Gene Ontology: Mol. function=protein serine/threonine kinase activity; Biological process=protein amino acid phosphorylation
MALVRQRRQLPHLTLPLDHFALRLPPQPAAAPSTSASDARLSDYERISVLGHGNGGTVYKARHRRSSQPLALKIFAAGDPSAAREA

SEQ ID NO: 78741 - protein, 151 aa, Setaria italica
  Transcript Sequence Number=SeqID_12767
  Homolog annotation: Hit_ID=Q7XQ05; Match level="QueryCoverage=100%, HitCoverage=21%, E-value=1e-17, Identity=42%"; Hit description =OSJNBa0036B21.17 protein
RLVLGLGTTPEVNSADQHPAGVDKSRAPVTLFGQSFSFTDPGTLSLGVRQGCNAGAIQHKEMPTGHIISFGAVDEGSTSARRSAGGFMPSTVLAPRPDYVAVEEAQGLVDHTDNSYDSTVRDHDGFRLSTEPSASTTEASFGVSSDVVTVV

SEQ ID NO: 78742 - protein, 138 aa, Setaria italica
  Transcript Sequence Number=SeqID_12768
  Gene Ontology: Cellular component=chromosome, centromeric region; Biological process=chromosome segregation
  Homolog annotation: Hit_ID=Q4QSC8; Match level="QueryCoverage=100%, HitCoverage=28%, E-value=6e-43, Identity=66%"; Hit description =Shugoshin-1
TKVIELSRVEMHKLRIALQVSRQQNMQLAQTNSQMLAELNMGKDRIKTLQHELSCTTALLKVKDSELERKNKTANQRRKEVNSQEVLKAISSKGAAVEAHQIHGSITSGVEHQLLKSQSAVPSRTDCQKPPQDATIKR

SEQ ID NO: 78743 - protein, 116 aa, Setaria italica
  Transcript Sequence Number=SeqID_12769
  Subcellular localization annotation: CTP_CleavageSite=43; ConfidenceScore=5.22e-01
RGRRKTGRPASAAGARLPQHPRPHHWAGSPRPHTCNRQEPSVRSPPQPAPRPRRDRSINQSIDRLAIRGCPIRGRRWSRWLLRLTARVVLVGIGEGGEEGGGGRGREEQRNAPKSI

SEQ ID NO: 78744 - protein, 102 aa, Setaria italica
  Transcript Sequence Number=SeqID_12770
  Gene Ontology: Mol. function=peptidyl-prolyl cis-trans isomerase activity; Cellular component=ubiquitin ligase complex; Biological process=protein ubiquitination
  Homolog annotation: Hit_ID=Q10QD1; Match level="QueryCoverage=99%, HitCoverage=16%, E-value=4e-15, Identity=45%"; Hit description =Peptidylprolyl isomerase, putative, expressed
KRILRISIFVNPYTEPDEEEEKAKEEEEKKQDEDYDKVGSWYSNPGTGVAGSTSTGGGVGKYLKARTAGSVDVTVNAGAPDDSSKKRKATASSVEFKDFSGW

SEQ ID NO: 78745 - protein, 85 aa, Setaria italica
  Transcript Sequence Number=SeqID_12771
  Gene Ontology: Mol. function=oxidoreductase activity, acting on single donors with incorporation of molecular oxygen, incorporation of two atoms of oxygen; Cellular component=chloroplast; Biological process=fatty acid biosynthetic process
  Homolog annotation: Hit_ID=Q53HZ3; Match level="QueryCoverage=98%, HitCoverage=9%, E-value=2e-44, Identity=96%"; Hit description =Lipoxygenase
SNDAGVHQLINHWLRTHACMEPFIIAAHRQMSAMHPIFKLLKPHMRYTLKINALARQILIAGDGVIESGFTPGPYCMEMSAFAYG

SEQ ID NO: 78746 - protein, 167 aa, Setaria italica
  misc_feature (155)..(155): Xaa can be any naturally occurring amino acid
  Transcript Sequence Number=SeqID_12772
  Gene Ontology: Mol. function=acid-amino acid ligase activity; Cellular component=cytoplasm; Biological process=peptidoglycan-based cell wall biogenesis
  Homolog annotation: Hit_ID=C4WRH2; Match level="QueryCoverage=100%, HitCoverage=19%, E-value=2e-77, Identity=83%"; Hit description =Putative UDP-N-acetylmuranoylanalyl-D-2-6-diaminoligase
  Pfam annotation: Domain name=Mur_ligase_C; Domain location=48-134; Score=55.6; E_value=1.9e-13; Accession=PF02875.13; Description=Mur ligase family, glutamate ligase domain
SPHGILEISSGLLGRANIYNILATVAVGIAVGAPLEDIVRGIEEVDAIPGQCELIDEEQAFGVIVDHARTPEALSRLLDGVRELGPRRIITVVGCCGEKERGKRPVMTKVAADKSDVVMLTSDNPANEDPLDILDDMLAGVGWTMEEYLKYGTNXSYYPPLPNGHRL

SEQ ID NO: 78747 - protein, 73 aa, Setaria italica
  Transcript Sequence Number=SeqID_12773
APRDCARLPGRSSLPLFSEQLASKWSDRNYGPARCSPPRVAAIYAYFFSGMHFSPSGFPVRYHSIGNLLGRAI

SEQ ID NO: 78748 - protein, 41 aa, Setaria italica
  Transcript Sequence Number=SeqID_12774
VEIFICLYGFEMWDADATVGYRAMLTLKMDRPLYVRASLRR

SEQ ID NO: 78749 - protein, 72 aa, Setaria italica
  Transcript Sequence Number=SeqID_12775
  Gene Ontology: Mol. function=electron carrier activity; Biological process=oxidation reduction
  Homolog annotation: Hit_ID=Q7G231; Match level="QueryCoverage=54%, HitCoverage=7%, E-value=2e-13, Identity=84%"; Hit description =Cytochrome P450 family protein
MGRMEFLWGADAEEFRPERWLDGDGVFVTESPFKFTAFQVRSHVVTHVQPINNLSVIFSAPTSGVSSVLRLP

SEQ ID NO: 78750 - protein, 152 aa, Setaria italica
  misc_feature (84)..(84): Xaa can be any naturally occurring amino acid
  Transcript Sequence Number=SeqID_12776
  Gene Ontology: Mol. function=electron carrier activity; Cellular component=integral to membrane; Biological process=oxidation reduction
  Homolog annotation: Hit_ID=B3RFK0; Match level="QueryCoverage=98%, HitCoverage=23%, E-value=1e-27, Identity=47%"; Hit description =Cytochrome P450 monooxygenase
FDNASEQVLHRFLDPFWKAKRLLNFSSEAAMKRWLRTINAFIYAVIDRKIEQMGRDQQEFVSSLQRAASPWCARAFSYHFLTQXVSLRQAKKEDILSRFLLERERDPGCFDNKYIRDIILNFVIAGRDTTAGTLSWFLYVLCRNQAIQERTR

SEQ ID NO: 78751 - protein, 507 aa, Setaria italica
  Transcript Sequence Number=SeqID_12777
  Gene Ontology: Mol. function=electron carrier activity; Cellular component=integral to membrane; Biological process=oxidation reduction
  Homolog annotation: Hit_ID=B9IC23; Match level="QueryCoverage=92%, HitCoverage=91%, E-value=1e-150, Identity=56%"; Hit description =Cytochrome P450
  Pfam annotation: Domain name=p450; Domain location=37-502; Score =153.8; E_value=5.1e-43; Accession=PF00067.14; Description=Cytochrome P450
  Subcellular localization annotation: CTP_CleavageSite=39; ConfidenceScore=5.23e-01
MDSPLSQPALLALSLLFLLALHLARRRRGRGRNRNYPPVAGTVLHQLLNFGRLVEYQTELARRYRTFRMLTPTCNYVYTVEPANVEYMLKTNFANYGKGATMHDVLEDLLGDGIFNVDGARWRHQRKVASHEFSTRVLRDYSSAVFGDTAAELAGIVAAAARGAGERLDISDLLMRSTLDSIFKVGFGVSLGVLSGSSEEGVAFARAFDNASEQVLHRFLDPFWKAKRLLNVSSEAAMKHSVRTINDFVYAVIDRKIEQMGRNHQEFAKKEDILSRFLLERERDPGCFDNKYLRDIILNFVIAGRDTTAGTLSWFLYVLCRNQAIQDRIAEEVRAAATGGRDVGAQELVACLTEDAIGKMHYLHAALTETLRLYPAVPVDVKCCFSDDTLPDGYAVNKGDMVNYQPFPMGRMEFLWGADAEEFRPERWLDGDGVFVTESPFKFTAFQAGPRVCLGKEFAYRQMKIFAAVLLYLFRFEMWDASAIMGYRPMLTLKMDGPLYVRASLRR

SEQ ID NO: 78752 - protein, 82 aa, Setaria italica
  Transcript Sequence Number=SeqID_12778
  Subcellular localization annotation: CTP_CleavageSite=45; ConfidenceScore=5.01e-01
ESTNAAAASREGKEESSESTTTGGSPWPQLVAALRGIQSSLPHSSSSSSSSPARGFINRFPRHDRPPLGSDSTHLPTTPSIP

SEQ ID NO: 78753 - protein, 71 aa, Setaria italica
  Transcript Sequence Number=SeqID_12779
LTSYSINLRIHSLIRRPDHQATIAHPNRAPARQTKAHLKYPGPYVRRPHTTTRCFFSRRPTRPGWGGPEGR

SEQ ID NO: 78754 - protein, 96 aa, Setaria italica
  misc_feature (27)..(27): Xaa can be any naturally occurring amino acid
  misc_feature (51)..(51): Xaa can be any naturally occurring amino acid
  Transcript Sequence Number=SeqID_12780
  Subcellular localization annotation: CTP_CleavageSite=55; ConfidenceScore=5.81e-01
GGRSSFYSFFSLPPSLPAPAPPSPSPXTLPPFAGLRSGPAAPPPPSALTGXPPPRAPQTGPISRGWRQATSPELRVVSPPPPHPTPTHVLRLLPLP

SEQ ID NO: 78755 - protein, 183 aa, Setaria italica
  Transcript Sequence Number=SeqID_12781
  Homolog annotation: Hit_ID=Q6YUB8; Match level="QueryCoverage=99%, HitCoverage=46%, E-value=5e-50, Identity=60%"; Hit description =Protein Brevis radix-like 1
  Pfam annotation: Domain name=DZC; Domain location=147-182; Score =77.9; E_value=3.6e-20; Accession=PF08381.3; Description=Disease resistancezinc fingerchromosome co
APLPCTPMSDNESSKEDNPATAPHNKGHLPHTLHRPLKGTGAKGYSSSDSLEHKTNHLGNGYRHDRYLGQQCYDSVGLASTPKLSSISGAKTETSSVDASVRTSSSPEEVDRSDELSASVSNGSDEEREWVEEDEPGVYITIRALPGGIRELRRVRFSRERFSEMHARLWWEENRARIHDQYL

SEQ ID NO: 78756 - protein, 466 aa, Setaria italica
  misc_feature (154)..(154): Xaa can be any naturally occurring amino acid
  misc_feature (213)..(213): Xaa can be any naturally occurring amino acid
  Transcript Sequence Number=SeqID_12782
  Homolog annotation: Hit_ID=Q9FZ97; Match level="QueryCoverage=78%, HitCoverage=62%, E-value=1e-156, Identity=69%"; Hit description =F3H9.11 protein
  Pfam annotation: Domain name=DUF616; Domain location=76-390; Score =649.9; E_value=2.3e-192; Accession=PF04765.5; Description=Protein of unknown function (DUF616)
MEKQSDSSRKQVQSPMRRFPPAVVLNHHPCENFSLSPPPIDRKRTGPRPCPVCYLPVEQALALRPAQLSASPVLQSLNYISEANLVSEESNGGSLFGGYPSLEERDKSYDIKDLTTVHCGFVRGKIPGLNTGFDIDEADRSEMQQCERTVVASXIFGNYDILQQPENISDFSKDTVCFFMFLDEETEAALKNSTTIDHTKRIGLWRVVVGRVXPYLLARRNGKVPKLLLHRLFPNVRYSIWIDGKLKLVRDPYQVLERFLWRKNVSFAVSRHYRRFDVFEEAEANKAGGKYDNASIDYQIEFYKSEGLTHYSSAKLPITSDVPEGCVIIREHIPITNLFTCLWFNEVDRFTSRDQLSFSTVRDKIRSRVNWTADMFLDCERRDFVVQSYHRELLEQRQATLRSRPPLRPPMVQIQPRKMLPDNAAKEPGKASSAKKLPGKRTRDKKSSSKRAHQTKVIGGKEAIQL

SEQ ID NO: 78757 - protein, 358 aa, Setaria italica
  misc_feature (8)..(8): Xaa can be any naturally occurring amino acid
  Transcript Sequence Number=SeqID_12783
  Gene Ontology: Mol. function=protein binding; Cellular component =cytoplasm; Biological process=ubiquitin-dependent protein catabolic process
  Homolog annotation: Hit_ID=B9RRB4; Match level="QueryCoverage=93%, HitCoverage=43%, E-value=8e-83, Identity=48%"; Hit description=Rad7, putative
KILCHSRXMNTHLLNELMCDSPTELHLSECSWLSDDDFEKTFGKCNTDSLQDLQLDISGRCMPDYILPTTLAKAPNCMPLLRKISLKGNYRLSDNGLDTIISAAPSLSSLNLCQCSLLTSSGIVILADKLHSVLRELYIDDCTNVEAMTILPALQKINHLEVLSMSGIQSVCDKFVNELIPVHGSNMKELAFAGCLKLTSSSIKTIGENCPQLISLDLRNLNRLRDSAMRHLRNGCRQIRKLKLQRNTFSDEAMSRYLEESGGCLTELMLNSVEKVGDLTALAISRKCSVRLEALDLSFCRQLTNEALGLIVDSCPSLRILKLFGCTQITDFFLKGHSNTSVKIIGIEGSILEQIDSR

SEQ ID NO: 78758 - protein, 96 aa, Setaria italica
  Transcript Sequence Number=SeqID_12784
MQEEGEESSSKIINGKSCLISELYAEQSLLPFSCAFFSRLPRKIPHVAKACCIELNWLFHHTEYLILGSFVSKQVPRLFLRNEHPESMTVKRRRPS

SEQ ID NO: 78759 - protein, 220 aa, Setaria italica
  Transcript Sequence Number=SeqID_12785
  Gene Ontology: Mol. function=metal ion binding; Cellular component =cell wall; Biological process=metal ion transport
  Homolog annotation: Hit_ID=B6SLA8; Match level="QueryCoverage=90%, HitCoverage=60%, E-value=6e-34, Identity=44%"; Hit description=Heavy metal-associated domain containing protein
  Pfam annotation: Domain name=HMA; Domain location=34-96; Score=53.2; E_value=9.8e-13; Accession=PF00403.18; Description=Heavy-metal -associated domain
TTTTLPLPTSSLASCEHLRLALMASEPIECQVVVLRVSIHCEGCKKKVKKVLQNINGVYRCEIDARSNKVSVTASTKLDPYIIVAKLRKSGKQADLWPEQPQPQPPAESQEPKNQPDEQSKHSEPAEKPGADNNEAAAAEPSNPQPPPELKQSAAGETPKPAPESKEASGANANAGGEAAPAAEPQHHHQPSEVKGKARQQPPPPELEKQPVDARVTVEY

SEQ ID NO: 78760 - protein, 68 aa, Setaria italica
  misc_feature (1)..(33): Xaa can be any naturally occurring amino acid
  Transcript Sequence Number=SeqID_12786
XXXXXXXXXXXXXXXXXXXXXXXXXXXXXXXXXFFFFFDQNNEQTDAVNLPYVHTELPSYKSSCSSAQ

SEQ ID NO: 78761 - protein, 143 aa, Setaria italica
  Transcript Sequence Number=SeqID_12787
  Homolog annotation: Hit_ID=B6SIS9; Match level="QueryCoverage=59%, HitCoverage=34%, E-value=2e-11, Identity=47%"; Hit description =Inositol hexaphosphate kinase
SPSLLLYPLIFQSTNRAFLIFSTAQATTTSYALLQCYCYLTPPPPPQAACTLLLLFRCPLKHQVAGQRAFPNKLGPLVDDTGLLDKPLHCSRQRTTRGARARPLRGVRLLHTEVRHGERHPHRYQVLDDLLAGLEAPSVADIK

SEQ ID NO: 78762 - protein, 209 aa, Setaria italica
  Transcript Sequence Number=SeqID_12788
  Subcellular localization annotation: CTP_CleavageSite=54; ConfidenceScore=5.08e-01
TGVLPCQSPHRNDSCDSHTVSCEPAESNGAKAVVGFNSAVTFFFFVVPMIRVLRLERNSRTKSDTQFWWYLCCGFSGYIVWVYYFSDCSSLHQAAVFPIYMVSILGAIVHFILLCIATYLTLGVRDKRPYALIFVLGSSLIGATLLWVFKVKWIGWLGFSLTALSHCFRFGATNYRDKFTFWLFDVSIPIWVVNAFISVVGSITGFFVA

SEQ ID NO: 78763 - protein, 88 aa, Setaria italica
  Transcript Sequence Number=SeqID_12789
HKLLRSGWRITSQNQEKLLFPAPSLLVRIRESLYRIGRESLLLERLFGRTPARISSGSSAKRTLKVLVNQTDIPNYVLRFLKCFSIFS

SEQ ID NO: 78764 - protein, 80 aa, Setaria italica
  Transcript Sequence Number=SeqID_12790
  Gene Ontology: Cellular component=nucleus
  Homolog annotation: Hit_ID=B6T8M4; Match level="QueryCoverage=66%, HitCoverage=41%, E-value=2e-21, Identity=88%"; Hit description =Protein yippee-like
  Pfam annotation: Domain name=Yippee; Domain location=1-80; Score =54.9; E_value=7.9e-15; Accession=PF03226.6; Description=Yippee putative zinc-binding protein
MSYTLQYSVSQQMFHSLMYAVPSVNVTPGVKEDRLMMTGMHTVSDIFCVGCGSIVGWKYEAAHEKSQRYKEGKYYFWSRF

SEQ ID NO: 78765 - protein, 129 aa, Setaria italica
  Transcript Sequence Number=SeqID_12791
  Homolog annotation: Hit_ID=B6T8M4; Match level="QueryCoverage=100%, HitCoverage=100%, E-value=3e-63, Identity=87%"; Hit description =Protein yippee-like
  Pfam annotation: Domain name=Yippee; Domain location=1-108; Score =255.9; E_value=9.8e-74; Accession=PF03226.6; Description=Yippee putative zinc-binding protein
MGRLFLMHLDGNVYSCKHCKTHLGLAGDIISKAFHCKHGKAYLFHKVVNVTPGVKEDRLMMTGMHTVSDIFCVGCGSIVGWKYEAAHEKSQRYKEGKYILERFKVSGPDGSQYWIAPDAHLVGSDADDV

SEQ ID NO: 78766 - protein, 172 aa, Setaria italica
  Transcript Sequence Number=SeqID_12792
  Gene Ontology: Mol. function=protein serine/threonine kinase activity; Cellular component=cytoplasm; Biological process=protein amino acid phosphorylation
  Homolog annotation: Hit_ID=B6SI45; Match level="QueryCoverage=100%, HitCoverage=60%, E-value=1e-87, Identity=88%"; Hit description =Serine/threonine-protein kinase 12
  Pfam annotation: Domain name=Pkinase; Domain location=12-171; Score =65.9; E_value=1.5e-16; Accession=PF00069.17; Description=Protein kinase domain
  Pfam annotation: Domain name=Pkinase_Tyr; Domain location=12-171; Score=-74.2; E_value=8.6e-09; Accession=PF07714.9; Description =Protein tyrosine kinase
  Pfam module annotation: Pfam domain module=Pkinase::Pkinase_Tyr; Domain location=12-171::12-171
MAARQEWSMSDFEIGRYIGEGKFGKVYLAREKKSGYVVALKVTYKAKLEKYRFHAHLRREIEIQRGLDHPNVLRLFAWFHDEERVVLVLEYAARGELYKVLRAAGRFTERTAATYVASLAGALAYCHKKQVIHRDIKPENLLLDIEGRLKIADFGWAARSNAKRHTLCGTID

SEQ ID NO: 78767 - protein, 114 aa, Setaria italica
  Transcript Sequence Number=SeqID_12793
  Gene Ontology: Mol. function=protein serine/threonine kinase activity; Cellular component=cytoplasm; Biological process=protein amino acid phosphorylation
  Homolog annotation: Hit_ID=B6SI45; Match level="QueryCoverage=85%, HitCoverage=33%, E-value=1e-45, Identity=88%"; Hit description =Serine/threonine-protein kinase 12
SSFCTVHTISSDRTTAGRLKIADFGCAARSNAKRHTLCGTIDYLAPEMIDKKAHDHAVDNWTLGILCYEFLYGSPPFEADKQADTFRSKIVRVDLTFPSTPSVSSEAKDLISKL

SEQ ID NO: 78768 - protein, 123 aa, Setaria italica
  misc_feature (106)..(106): Xaa can be any naturally occurring amino acid
  Transcript Sequence Number=SeqID_12794
  Gene Ontology: Mol. function=protein serine/threonine kinase activity; Cellular component=cytoplasm; Biological process=protein amino acid phosphorylation
  Homolog annotation: Hit_ID=B6SI45; Match level="QueryCoverage=97%, HitCoverage=42%, E-value=8e-59, Identity=87%"; Hit description =Serine/threonine-protein kinase 12
  Pfam annotation: Domain name=Pkinase; Domain location=1-123; Score= -60.9; E_value=7.2e-05; Accession=PF00069.17; Description=Protein kinase domain
RLNAASLAGALAHCHRKQVIHRDIKPENLLLDIEGRLKIADFGWAARSNAKRHTLCGTIDYLAPEMIDKKAHDHAVDNWTLGILCYEFLYGSPPFEADKQADTFRXRVDLTFPSTPSVSSEAK

SEQ ID NO: 78769 - protein, 272 aa, Setaria italica
  misc_feature (47)..(47): Xaa can be any naturally occurring amino acid
  misc_feature (129)..(129): Xaa can be any naturally occurring amino acid
  misc_feature (233)..(233): Xaa can be any naturally occurring amino acid
  Transcript Sequence Number=SeqID_12795
  Gene Ontology: Mol. function=protein serine/threonine kinase activity; Cellular component=cytoplasm; Biological process=protein amino acid phosphorylation
  Homolog annotation: Hit_ID=B6SI45; Match level="QueryCoverage=100%, HitCoverage=97%, E-value=1e-116, Identity=71%"; Hit description =Serine/threonine-protein kinase 12
  Pfam annotation: Domain name=Pkinase; Domain location=12-256; Score =184.5; E_value=2.9e-52; Accession=PF00069.17; Description=Protein kinase domain
  Pfam annotation: Domain name=Pkinase_Tyr; Domain location=12-272; Score=-36.9; E_value=2.8e-11; Accession=PF07714.9; Description =Protein tyrosine kinase
  Pfam module annotation: Pfam domain module=Pkinase::Pkinase_Tyr; Domain location=12-256::12-272
MAARKEWSMSDFEIGRYIGEAARASFAREKKSGYVVALKVTYKAKLXYQFHSHLRREIEIQKGLDHPNVLRLFAWFHDEERVVLVLEYAARGELYKVLRTAGRFTERTAATIRTPCPCSFCFTVNFAFXRLNAASLAGALAHCHRKQVIHRDIKPENLLLDIEGRLKIADFGWAARSNAKRHTLCGTIDYLAPEMIDKKAHDHAVDNWTLGILCYEFLYGSPPFEADKQADTXQKLLVKDSSKRLSLEDIMKHPWIKKNAEPSGSCIKQKDL

SEQ ID NO: 78770 - protein, 83 aa, Setaria italica
  Transcript Sequence Number=SeqID_12796
  Gene Ontology: Mol. function=nucleic acid binding; Cellular component= cytoplasm; Biological process=stem cell maintenance
  Homolog annotation: Hit_ID=Q69VD5; Match level="QueryCoverage=97%, HitCoverage=8%, E-value=7e-37, Identity=91%"; Hit description =Protein argonaute PNH1
CVSFQGTSRPAHYHVLWDENNFTADEMQTLTNNLCYTYARCTRSVSVGIPPAYYAHLAAFRARFYMEPEMSENQTSKSSNGMN

SEQ ID NO: 78771 - protein, 205 aa, Setaria italica
  misc_feature (77)..(77): Xaa can be any naturally occurring amino acid
  misc_feature (93)..(93): Xaa can be any naturally occurring amino acid
  misc_feature (183)..(183): Xaa can be any naturally occurring amino acid
  Transcript Sequence Number=SeqID_12797
  Gene Ontology: Mol. function=nucleic acid binding; Cellular component= cytoplasm; Biological process=stem cell maintenance
  Homolog annotation: Hit_ID=Q69VD5; Match level="QueryCoverage=97%, HitCoverage=20%, E-value=1e-100, Identity=89%"; Hit description =Protein argonaute PNH1
  Pfam annotation: Domain name=Piwi; Domain location=1-166; Score=71.4; E_value=3.2e-18; Accession=PF02171.9; Description=Piwi domain
MHMLSPLNFSFRDGVSEGQFYQVLLYELDAIRKVGYTLEPNYQPPVTFVVVQKRHHTRLFANNHKDRSSMDKSGNIXLPGTVVDSKICHPTEXFDFYLCSHAGIQGTSRPAHYHVLWDENNFTADEMQTLTNNLCYTYARCTRSVSVVPPAYYAHLAAFRARFYMEPEMSENQTSKRLPNGQXNGASVKPLPAVKEKVKRVMFYC

SEQ ID NO: 78772 - protein, 300 aa, Setaria italica
  Transcript Sequence Number=SeqID_12798
  Gene Ontology: Mol. function=nucleic acid binding; Cellular component= cytoplasm; Biological process=stem cell maintenance
  Homolog annotation: Hit_ID=Q69VD5; Match level="QueryCoverage=98%, HitCoverage=30%, E-value=1e-173, Identity=97%"; Hit description =Protein argonaute PNH1
  Pfam annotation: Domain name=Piwi; Domain location=1-263; Score =363.3; E_value=4.6e-106; Accession=PF02171.9; Description=Piwi domain
LVRNLGAISWRIPLVSDIPTIIFGADVTHPETGEDSSPSIAAVVASQDWPEVTKYAGLVCAQAHRQELIQDLYKTWHDPQRGTVTGGMIRELLISFRKATGQKPLRIIFYRDGVSEGQFYQVLLYELDAIRKACASLEPNYQPPVTFVVVQKRHHTRLFANNHKDRSSMDKSGNILPGTVVDSKICHPTEFDFYLCSHAGIQGTSRPAHYHVLWDENNFTADEMQTLTNNLCYTYARCTRSVSVVPPAYYAHLAAFRARFYMEPEMSENQTSKSSNGMNGASVKPLPAVKEKVKRVMFYC

SEQ ID NO: 78773 - protein, 609 aa, Setaria italica
  Transcript Sequence Number=SeqID_12799
  Gene Ontology: Mol. function=nucleic acid binding; Cellular component= cytoplasm; Biological process=stem cell maintenance
  Homolog annotation: Hit_ID=Q69VD5; Match level="QueryCoverage=97%, HitCoverage=60%, E-value=0.0, Identity=94%"; Hit description=Protein argonaute PNH1
  Pfam annotation: Domain name=DUF1785; Domain location=93-145; Score =101.2; E_value=3.5e-27; Accession=PF08699.2; Description=Domain of unknown function (DUF1785)
  Pfam annotation: Domain name=PAZ; Domain location=146-283; Score =186.1; E_value=9.9e-53; Accession=PF02170.14; Description=PAZ domain
  Pfam annotation: Domain name=Piwi; Domain location=434-609; Score =22.0; E_value=2.2e-10; Accession=PF02171.9; Description=Piwi domain
  Pfam module annotation: Pfam domain module=DUF1785::PAZ::Piwi; Domain location=93-145::146-283::434-609
GMRLPAYDGRKNLYTAGTLPFDAREFVVRLTDEDDGTGVPPREREFRVAIKFAARADLHHLRQFIAGRQADAPQEALQVLDIVLRELANQKYVSIGRSFYSPDIRKPQRLGDGLQSWCGFYQSIRPTQMGLSLNIDMSSTAFIEPLPVIEFVAQILGKDVISRPLSDANRIKIKKALRGVKVEVTHRGNVRRKYRISGLTTQPTHELIFPIDDQMNMKSVVEYFKEMYGFTIQHRHLPCLQVGNQKKANYLPMEACKIVEGQRYTKRLNEKQITSLLKVTCQRPREQEMDILQTVQQNGYEQDPYAKEFGINISEKLTSVEARVLPAPWLKYHDTGKEKECLPQVGQWNMVNKKVINGCKVSHWACINFSRSVPEATARGFCQELSQMCQISGMEFNSEPVIPIYSARPDQVVKALKHVYNIALNKLKGKELELLLVILPDNNGPLYGDIKRICETDLGLISQCCLTKHVFKISKQYLANVSLKINVKMGGRNTVLLDAISWRIPLVSDIPTIIFGADVTHPETGEDSSPSIAAVVASQDWPEVTKYAGLVCAQAHRQELIQDLYKTWHDPQRGTVTGGMIRELLISFRKATGRKNNNERRTRNSKNTH

SEQ ID NO: 78774 - protein, 706 aa, Setaria italica
  Transcript Sequence Number=SeqID_12800
  Gene Ontology: Mol. function=protein serine/threonine kinase activity; Biological process=protein amino acid phosphorylation
  Homolog annotation: Hit_ID=Q0D598; Match level="QueryCoverage=100%, HitCoverage=100%, E-value=0.0, Identity=82%"; Hit description =Probable serine/threonine-protein kinase WNK1
  Pfam annotation: Domain name=Pkinase; Domain location=24-281; Score =187.4; E_value=4.1e-53; Accession=PF00069.17; Description=Protein kinase domain
  Pfam annotation: Domain name=Pkinase_Tyr; Domain location=25-279; Score=5.5; E_value=4.3e-14; Accession=PF07714.9; Description=Protein tyrosine kinase
  Pfam module annotation: Pfam domain module=Pkinase::Pkinase_Tyr; Domain location=24-281::25-279
MMGARIDAADCPEYAEVDPTGRYGRFTDVLGKGASKTVYRAFDEYQGMEVAWNQVKLHDFLQSPEDLERLYCEIHLLKTLKHRNIMKFYTSWVDVSRRNINFITEMFTSGTLRQYRQRHKRVNIWAVKHWCRQILSGLLYLHSHNPPIIHRDLKCDNIFVNGNQGEVKIGDLGLAAILRKSHAVHCVGTPEFMAPEVYEEEYNELVDIYSFGMCVLEMVTFEYPYSECTHPVQIYKKVISGTKPEALYKLKDPMVRRFVEKCLASASQRLSARELLEDPFLRIDDMAFSSEDGDYNVTTRYIRQPSSLGHTYSNGSMMSNGFSDSIDEDALTEDRWDCEDDDMKGQDGIDLFNEHEDEPLGNVDITIKGRKSEDGGIFLRLRIADNDGRVRNIYFPFDVEADTALSVATEMVAELDIIDHEVTRIADMIDGEVSALVPDWRPGPGIEEAPDTSYCHNCGSNVSSCGSLYAYMSSARRGCQCAELHGRFEEITFQADGEQCDLQESAGSSDDGGGQTEHYVKSKDSTHTNGFVQMGRRNHSNQLCFSSFQEQSCSSNHYENDTNPHMNGFDMKHEVKIAKYKARKMAQLKRAIHPSLDFDNAYGVSRMKPSLNKLQSFHVGKNHNFRVPTCDRSPDKGSSDYHSNMIKQAWQSKHPDPGAQRARHCEVDTAGSNPDCTFTARRYYTGAQLPPNLPRTRSVPLNAVDA

SEQ ID NO: 78775 - protein, 321 aa, Setaria italica
  misc_feature (51)..(51): Xaa can be any naturally occurring amino acid
  Transcript Sequence Number=SeqID_12801
  Gene Ontology: Mol. function=binding; Cellular component=nucleus; Biological process=cell cycle
  Homolog annotation: Hit_ID=B9SQY5; Match level="QueryCoverage=97%, HitCoverage=67%, E-value=1e-106, Identity=39%"; Hit description =Pentatricopeptide repeat-containing protein, putative
  Pfam annotation: Domain name=PPR; Domain location=110-143; Score =19.3; E_value=0.016; Accession=PF01535.12; Description=PPR repeat
  Pfam annotation: Domain name=PPR; Domain location=144-178; Score =28.8; E_value=2.2e-05; Accession=PF01535.12; Description=PPR repeat
  Pfam annotation: Domain name=PPR; Domain location=179-213; Score =35.1; E_value=2.9e-07; Accession=PF01535.12; Description=PPR repeat
  Pfam annotation: Domain name=PPR; Domain location=214-248; Score =39.5; E_value=1.3e-08; Accession=PF01535.12; Description=PPR repeat
  Pfam annotation: Domain name=PPR; Domain location=249-283; Score =46.4; E_value=1.2e-10; Accession=PF01535.12; Description=PPR repeat
  Pfam annotation: Domain name=PPR; Domain location=284-318; Score=7.4; E_value=1.2; Accession=PF01535.12; Description=PPR repeat
  Pfam annotation: Domain name=PPR; Domain location=4-38; Score=17.9; E_ value=0.042; Accession=PF01535.12; Description=PPR repeat
  Pfam annotation: Domain name=PPR; Domain location=75-109; Score=23.7; E_value=0.00078; Accession=PF01535.12; Description=PPR repeat
  Pfam module annotation: Pfam domain module=PPR::PPR::PPR::PPR::PPR::PP R::PPR::PPR; Domain location=110-143::144-178::179-213::214-248::249 -283::284-318::4-38::75-109
LDMIAYSVIVRMYIKAERLEDACSVLAEMEKQNEIVPDKYLFLDMLRTYQXCGLLEKLADTYYWILKSQVECDEVMYNCIINCCGRAIPVDELSRIFDEMIQQGHLTNTVTLNVLLDIYGKAGLFTRAEKVFLMARKQGLVDIITYNTIIAAYAKSGNFRSMNYFIQKMQDAGFPVSLEAYNCMLDAYGKAGQLEEFAAVLQKMKRAKCKFDHYTYNIMINIYGRRGWIEDVANVLAELKSRGVEPDLYSYNTLIKAYGIARMPEDAVKLMQEMRIKGISPDRVTYTNLIAALQRNENFLEAVKWSFWMKQTGVVGSGARA

SEQ ID NO: 78776 - protein, 50 aa, Setaria italica
  Transcript Sequence Number=SeqID_12802
GRIHAMMYSTLHICIGPTTFYRKERNNDRLTAEHKNYMEMFSPQFLPSQS

SEQ ID NO: 78777 - protein, 96 aa, Setaria italica
  misc_feature (13)..(13): Xaa can be any naturally occurring amino acid
  misc_feature (68)..(68): Xaa can be any naturally occurring amino acid
  Transcript Sequence Number=SeqID_12803
  Gene Ontology: Mol. function=protein serine/threonine kinase activity; Biological process=protein amino acid phosphorylation
  Homolog annotation: Hit_ID=Q5N7S6; Match level="QueryCoverage=100%, HitCoverage=10%, E-value=4e-42, Identity=82%"; Hit description =Receptor serine/threonine kinase PR5K-like
GMMVLELVGARDXNINADSESSSQYFPQWIYEHVDEYCISASEINGETTELVRKMIVVGLWCIQVIPXDRPTMTRVVEMLEGSTSNLELPPKVLLS

SEQ ID NO: 78778 - protein, 147 aa, Setaria italica
  Transcript Sequence Number=SeqID_12804
  Homolog annotation: Hit_ID=B4FAJ5; Match level="QueryCoverage=81%, HitCoverage=24%, E-value=1e-47, Identity=80%"; Hit description =Avr9/Cf-9 rapidly elicited protein 137
SSGPDPAEPQAAAAAAAAAAAQQQQAGDSPEAESLRQELKMQRLKVKRLKEESLWNQSYEKAVGLMARAACAVFVRICSIFGPFVPGLPPPLPSATTDSVQTRLSKLLHPRSARAKASSGPITRRDGPSRVHPPMSNSCPIIGLRPS

SEQ ID NO: 78779 - protein, 138 aa, Setaria italica
  Transcript Sequence Number=SeqID_12805
  Gene Ontology: Mol. function=structural molecule activity; Cellular component=membrane coat; Biological process=intracellular protein transport
  Homolog annotation: Hit_ID=Q9MAY9; Match level="QueryCoverage=72%, HitCoverage=56%, E-value=4e-51, Identity=96%"; Hit description =Nonclathrin coat protein zeta1-COP
  Pfam annotation: Domain name=Clat_adaptor_s; Domain location=13-133; Score=-20.4; E_value=1.8e-05; Accession=PF01217.12; Description =Clathrin adaptor complex small chain
MVEPLLVQDTCPSVKNILLLDSEGKRVAVKYYSDDWPTLSAKLAFEKSVFAKTQKANAGTEAEIVMFDGQIVVYKFIQDLHFFVTGGEEENELILASVLQGFSDAVDRLLKFIFSLLKFIFSTTVCSVTCSYVNADYI

SEQ ID NO: 78780 - protein, 169 aa, Setaria italica
  misc_feature (66)..(66): Xaa can be any naturally occurring amino acid
  Transcript Sequence Number=SeqID_12806
  Gene Ontology: Mol. function=structural molecule activity; Cellular component=membrane coat
  Homolog annotation: Hit_ID=Q9MAY9; Match level="QueryCoverage=93%, HitCoverage=68%, E-value=1e-43, Identity=63%"; Hit description =Nonclathrin coat protein zeta1-COP
MSYFICFSLTAEIVMFDGQIVVYKFIQDLHFFVTGGEEENELILASVLQGFSDAVDRLLKLFSLYXSLSFQPLFVLLHALMLMLITYECGPNLGGFRNMVDKRTALENLDLILLCLDEIVDGGIVLETEGREIAEKVTGHGLESASSAEQTLVNALTQAREHLAKSLLM

SEQ ID NO: 78781 - protein, 176 aa, Setaria italica
  Transcript Sequence Number=SeqID_12807
  Gene Ontology: Mol. function=structural molecule activity; Cellular component=membrane coat; Biological process=intracellular protein transport
  Homolog annotation: Hit_ID=Q9MAY9; Match level="QueryCoverage=100%, HitCoverage=100%, E-value=2e-84, Identity=88%"; Hit description =Nonclathrin coat protein zeta1-COP
  Pfam annotation: Domain name=Clat_adaptor_s; Domain location=6-151; Score=43.8; E_value=8.3e-11; Accession=PF01217.12; Description =Clathrin adaptor complex small chain
METCPSVKNILLLDSEGKRVAVKYYSDDWPTLSAKLAFEKSVFAKTQKANAGTEAEIVMFDGQIVVYKFIQDLHFFVTGGEEENELILASVLQGFSDAVDRLLKNMVDKRTALENLDLILLCLDEIVDGGIVLETEGREIAEKVTGHGLESASSAEQTLVNALTQAREHLAKSLLM

SEQ ID NO: 78782 - protein, 124 aa, Setaria italica
  Transcript Sequence Number=SeqID_12808
  Gene Ontology: Mol. function=ubiquitin-protein ligase activity; Cellular component=ubiquitin ligase complex; Biological process =ubiquitin-dependent protein catabolic process
  Homolog annotation: Hit_ID=B6SVE7; Match level="QueryCoverage=100%, HitCoverage=19%, E-value=2e-61, Identity=93%"; Hit description =Spotted leaf protein 11
  Pfam annotation: Domain name=Arm; Domain location=1-37; Score=0.2; E _value=12; Accession=PF00514.15; Description=Armadillobeta-catenin -like repeat
  Pfam annotation: Domain name=Arm; Domain location=38-78; Score=23.9; E_value=0.00067; Accession=PF00514.15; Description=Armadillobeta -catenin-like repeat
  Pfam annotation: Domain name=Arm; Domain location=80-120; Score=4.8; E_value=3.1; Accession=PF00514.15; Description=Armadillobeta-catenin- like repeat
  Pfam module annotation: Pfam domain module=Arm::Arm::Arm; Domain location=1-37::38-78::80-120
VRAVRAGILVPLMRMLQDSSRSGAIDEALTILSVLVSHHECKTAISKAHAIPFLIDLLRSGQARNKENAAAILLALCKKDAENLACIGRLGAQIPLTELAKTGTDRAKRKATSLLEHLSKLQVL

SEQ ID NO: 78783 - protein, 480 aa, Setaria italica
  Transcript Sequence Number=SeqID_12809
  Gene Ontology: Mol. function=ubiquitin-protein ligase activity; Cellular component=ubiquitin ligase complex; Biological process =ubiquitin-dependent protein catabolic process
  Homolog annotation: Hit_ID=B6SVE7; Match level="QueryCoverage=96%, HitCoverage=83%, E-value=0.0, Identity=69%"; Hit description=Spotted leaf protein 11
  Pfam annotation: Domain name=Arm; Domain location=283-323; Score =46.4; E_value=1.1e-10; Accession=PF00514.15; Description =Armadillobeta-catenin-like repeat
  Pfam annotation: Domain name=Arm; Domain location=324-364; Score =23.3; E_value=0.001; Accession=PF00514.15; Description=Armadillobeta- catenin-like repeat
  Pfam annotation: Domain name=Arm; Domain location=365-406; Score =33.7; E_value=7.4e-07; Accession=PF00514.15; Description =Armadillobeta-catenin-like repeat
  Pfam annotation: Domain name=Arm; Domain location=407-448; Score =12.3; E_value=0.34; Accession=PF00514.15; Description=Armadillobeta -catenin-like repeat
  Pfam annotation: Domain name=U-box; Domain location=159-233; Score =84.7; E_value=3.4e-22; Accession=PF04564.7; Description=U-box domain
  Pfam module annotation: Pfam domain module=Arm::Arm::Arm::Arm::U-box; Domain location=283-323::324-364::365-406::407-448::159-233
DLQFKYVTWQLQVALANLPHSCFRISDEVQEEVDLVRAQLRREMEKKGALDVNVFTKVHDILTQIDNAGSQSQQPHQQPEQSQMEKFSKDHLELQNTVLLVSEISGLSKSDMTKITSELIEGLENVGTPDSPKPANVDSQSSDETKSSSEEVKKPDSVAIPEDFRCPISLELMRDPVIVSTGQTYERAFIQRWIDCGNRTCPKTQQKLQNLTLTPNYVLRSLIMQWCEEKGIEPPSRSKSDGSSLEVGGNRLAIEALVRNLSSSSLDERKSAAAEIRSLAKKSTDNRIILAESSAIPALVKLLSSKDQKTQEHAVTALLNLSIYDQNKELIVVAGAIVPIIQVLRTSSMEARENAAAAIFSLSLIDDNKIMIGSTPGAIEALVELLQSGSSRGKKDAATALFNLCIYQANKVRAVRAGILVPLMRMLQDSSRSGAIDEALTILSVLVSHHECKTAISKARLRPFFVLVFCLYGFGFLRFL

SEQ ID NO: 78784 - protein, 660 aa, Setaria italica
  misc_feature (26)..(26): Xaa can be any naturally occurring amino acid
  Transcript Sequence Number=SeqID_12810
  Gene Ontology: Mol. function=metal ion binding; Cellular component =late endosome membrane; Biological process=protein transport
  Homolog annotation: Hit_ID=Q4G0A0; Match level="QueryCoverage=94%, HitCoverage=66%, E-value=1e-122, Identity=41%"; Hit description =Zgc:112329
  Pfam annotation: Domain name=Clathrin; Domain location=398-539; Score= -11.7; E_value=0.039; Accession=PF00637.12; Description=Region in Clathrin and VPS
MYQWRKFEFFEEKAVSRGGGGRRPSXVPAEIARRVTCSSGGRGRVAVGCDDGTVGLLDRGFRLSYGFQAHASSVLFLQQLKQKNVLVTVGDDDQSSSQSSAICLKVFDLDKVQEEGSSTTAPFCVQILRVFTDQFPQAKITSFMVLEEAPPILLIAIGLDNGFIYCIKGDIARERITRFKLQVEADGSTSLPITGLGFRVEGQAHQLFAVTPSSVSLFSLHVQPPRRQTLDQIGCQTNAVAMSDRMDLIIGRPEAVYFYEVDGRGPCWAFDGEKKFVGWFRGYLLCIIEDQRTQKGTLNVYDLKNRLIAHSMPVGDVSHLVCEWGYIILIMADKKILCIGEKDMESKLDMLFKKNLYTVAINLVQSQQADPASTAEVLRKYGDHLYGKQEYDEAMSQYIHTIGHLEPSYVIQKFLDAKRIYNLTNYLEKLHDRGLASKDHTTLLLNCYTKLKDVEKLNDFIKDEDGIGEIKFDVETAIRVCRAAGYHEHAMFVAKKAGRHELYLKILLEDLGRYDEALQYISSLEANQAGLTVKEYGKILVEHRPAETVEILLRLCTDVGDPTTRRGSNSMHLLMIPSPMDFVNIFVHSPQYLMEFLENYIKAVKDSPAQTEIHNTLLELYISNDLSFPSISQENGFDNHNNKETKGKETANGYKSGTRE

SEQ ID NO: 78785 - protein, 247 aa, Setaria italica
  misc_feature (104)..(104): Xaa can be any naturally occurring amino acid
  misc_feature (178)..(178): Xaa can be any naturally occurring amino acid
  misc_feature (181)..(181): Xaa can be any naturally occurring amino acid
  Transcript Sequence Number=SeqID_12811
  Gene Ontology: Mol. function=strictosidine synthase activity; Cellular component=plasma membrane; Biological process=biosynthetic process
  Homolog annotation: Hit_ID=B6TK54; Match level="QueryCoverage=99%, HitCoverage=62%, E-value=1e-97, Identity=71%"; Hit description =Strictosidine synthase
SPRWTQELCGGPRASPLEYLPNEHICGRPLGLRFDKRTGDLYIADAYFGLLKVGPEGGLATPLATEAEGVRLNFTNDLDLDDEGNVYFTDSSIHYQRRSVMPCXLPSSALLSCCLPVSFSSHCVGWLVIDLTPVWSASSTVIHYRSQGELQITGLKGEKAGTVDLFAILPGFPDNVRXTTXKGEFWVAIHCRRSLYARLMSRHVKLRKFLLSLPIPAKYHYLSQIGGRLHAVIIKYSPDGEVLDILG

SEQ ID NO: 78786 - protein, 317 aa, Setaria italica
  misc_feature (270)..(270): Xaa can be any naturally occurring amino acid
  Transcript Sequence Number=SeqID_12812
  Gene Ontology: Mol. function=strictosidine synthase activity; Cellular component=plasma membrane; Biological process=biosynthetic process
  Homolog annotation: Hit_ID=B6TK54; Match level="QueryCoverage=100%, HitCoverage=79%, E-value=1e-180, Identity=96%"; Hit description =Strictosidine synthase
  Pfam annotation: Domain name=SGL; Domain location=2-266; Score=-73.7; E_value=0.00013; Accession=PF08450.4; Description=SMP-30Gluconolaconas eLRE-like region
  Pfam annotation: Domain name=Str_synth; Domain location=103-190; Score=142.4; E_value=1.4e-39; Accession=PF03088.8; Description =Strictosidine synthase
  Pfam module annotation: Pfam domain module=SGL::Str_synth; Domain location=2-266::103-190
GRGPYTGVADGRVVFWDGERWAHFATASPRWTQELCGGPRASPLEYLPNEHICGRPLGLRFDKRTGDLYIADAYFGLLKVGPEGGLATPLATEAEGVRLNFTNDLDLDDEGNVYFTDSSIHYQRRNFMQLVFSGDPSGRLLKYNPQTKETTVLHRNLQFPNGVSMSKDGSFFVFCEGSRGRLSRYWLKGEKAGTVDLFAILPGFPDNVRTNEKGEFWVAIHCRRSLYARLMSRHVKLRKFLLSLPIPAKYHYLSQIGGRLHAVIIKYSPXGEVLDILEDTKGEVVRAVSEVEEKDGKLWIGSVLMPFIAVFDLTKAS

SEQ ID NO: 78787 - protein, 250 aa, Setaria italica
  Transcript Sequence Number=SeqID_12813
  Homolog annotation: Hit_ID=B6T5S3; Match level="QueryCoverage=100%, HitCoverage=100%, E-value=9e-93, Identity=67%"; Hit description =Harpin-induced protein
  Pfam annotation: Domain name=Hin1; Domain location=94-230; Score =117.3; E_value=5.2e-32; Accession=PF07320.5; Description=Harpin -induced protein 1 (Hin1)
MGTPYHLQSPRTILSKLVNMRQLPPGLPPPPPPEPPSKTIRQPEVLPQRLPAAPSKIILQPRDRTSPAMWFAAIVCFAFSIILIVAGMVILIVFLAVKPRAPSFDTANASLNSVYIDSPAYFNGDMTLVANFSNPNQKIDVIFRSATVELFFRDRPMAVQVLPPFAQRRGQSQVLNLHMVSSRVLLPPEVAMELVNQVRSNRVVYTIRGAFKVEARVWFSHYSYWMNTICELELTAPPTGVLVARRCRTK

SEQ ID NO: 78788 - protein, 182 aa, Setaria italica
  Transcript Sequence Number=SeqID_12814
  Homolog annotation: Hit_ID=Q9SS78; Match level="QueryCoverage=86%, HitCoverage=18%, E-value=5e-35, Identity=47%"; Hit description =MZB10.12 protein
  Pfam annotation: Domain name=FG-GAP; Domain location=131-155; Score =16.3; E_value=0.062; Accession=PF01839.15; Description=FG-GAP repeat
VSDSVYTIENAELLNNVNNTHSGNISSVTTAAENISHAQRRLLQTDDKSDDKTGSSKTHESDSGADTVENNESLEEDGDASFDLFRDPEDLPDEYNYDYDDYVDESMWGDEDWKELEHEKAENYVSIDAHILSTPVIADIDKDGVQEMVIAVSYFFDPEYYDNPEHAKELEGIDVEYTSARK

SEQ ID NO: 78789 - protein, 350 aa, Setaria italica
  misc_feature (88)..(88): Xaa can be any naturally occurring amino acid
  Transcript Sequence Number=SeqID_12815
  Homolog annotation: Hit_ID=Q9SS78; Match level="QueryCoverage=46%, HitCoverage=17%, E-value=3e-78, Identity=82%"; Hit description =MZB10.12 protein
  Pfam annotation: Domain name=FG-GAP; Domain location=125-154; Score =21.7; E_value=0.0031; Accession=PF01839.15; Description=FG-GAP repeat
  Pfam annotation: Domain name=FG-GAP; Domain location=77-102; Score =18.0; E_value=0.037; Accession=PF01839.15; Description=FG-GAP repeat
  Pfam module annotation: Pfam domain module=FG-GAP::FG-GAP; Domain location=125-154::77-102
MRPLLALAAACALLVAAGAGVTGATAEEAKNSTNKFRQREASDDMLGYPHLDEDALLKSKCPKHVELRWQTEVSSSIYATPLIADINXDGKLEVVVPSFVHYLEVLEGTDGDKMPGWPAFHQSNAHSSPLLYDIDKDGVREIALATYNGVVNFFRVSGYVMMDKLEVPRRKVHKDWYVGLNPDPVDRSNPDVHDSSIAKEAASKESPPIDQNKSGSMQGGEALKIASEQHSVETKPNSTQAQENAELLNNVNNTHSGNISSVTTAAENISHAQRRLLQTDDKSDDKTGSSKTHESDSGADTVENNESLEEDADASFDLFRDPEDLPDEYNYNFPLSHVLALSSPHHPTWI

SEQ ID NO: 78790 - protein, 566 aa, Setaria italica
  misc_feature (11)..(11): Xaa can be any naturally occurring amino acid
  Transcript Sequence Number=SeqID_12816
  Homolog annotation: Hit_ID=Q9SS78; Match level="QueryCoverage=95%, HitCoverage=60%, E-value=0.0, Identity=70%"; Hit description =MZB10.12 protein
  Pfam annotation: Domain name=FG-GAP; Domain location=174-203; Score =29.6; E_value=1.3e-05; Accession=PF01839.15; Description=FG-GAP repeat
  Pfam annotation: Domain name=FG-GAP; Domain location=220-249; Score =25.2; E_value=0.00027; Accession=PF01839.15; Description=FG-GAP repeat
  Pfam annotation: Domain name=FG-GAP; Domain location=265-294; Score =26.1; E_value=0.00015; Accession=PF01839.15; Description=FG-GAP repeat
  Pfam annotation: Domain name=FG-GAP; Domain location=361-391; Score =4.3; E_value=2.5; Accession=PF01839.15; Description=FG-GAP repeat
  Pfam annotation: Domain name=FG-GAP; Domain location=93-117; Score =16.3; E_value=0.062; Accession=PF01839.15; Description=FG-GAP repeat
  Pfam module annotation: Pfam domain module=FG-GAP::FG-GAP::FG-GAP::FG- GAP::FG-GAP; Domain location=174-203::220-249::265-294::361-391::93 -117
QRRLLQTDDKXDDKTGSSKTHESDSGADTVENNESLEEDGDASFDLFRDPEDLPDEYNYDYDDYVDESMWGDEDWKELEHEKAENYVSIDAHILSTPVIADIDKDGVQEMVIAVSYFFDPEYYDNPEHAKELEGIDVEKYVASSIVVFNLDTRQVKWTAELDLSTKSVNFRALVYSSPSVVDLDGDGYLDILVGTGYGLFYVIDHRGKVRNKFPLEMAEIHAPVIAADINDDGKIEMVTTDSHGNVAAWTADGEEIWEVHLKSSIPQRPTVGDVNGDGHTDVVVPTVSGNIYVLSGKDGSKIQPFPYRAHGRIMSPVLLLDMSKHGENTKGLTLATTSFDGYLYLIEGSSGCADVVDIGETSYTMVLADNVDGGDDLDLIVTTMNGNVFCFSTPSPHHPLKEWRSSNQGRNNAAYRYNREGIYVKHGSRTFRDEEGKNFWLEFEIVDKYRVPYGNQAPYNVTVTLLVPGNYQGDRRIVVSSMYHQPGKQRMMLPTVPVRTTGTVLVEMVDKNGLYFSDEFSLTFHMHYYKLLKWLVLLPMLGMFGVLVILRPQEGAPLPSFSRNID

SEQ ID NO: 78791 - protein, 141 aa, Setaria italica
  misc_feature (40)..(40): Xaa can be any naturally occurring amino acid
  Transcript Sequence Number=SeqID_12817
  Gene Ontology: Cellular component=chloroplast
AAAAAVDPKPVVLFNPAWSFDDEEGEAFGAGTRLLLGSFXVVYSFTGLEVRGLLSKKRGCCSGASTAGGFGGESWVLMVENDGGAPEGQEFKVVSRLKKRPTIGEVETMLYNLMAANSPVTKSARFLREMVSNVTGGKAKQ

SEQ ID NO: 78792 - protein, 209 aa, Setaria italica
  Transcript Sequence Number=SeqID_12818
  Gene Ontology: Mol. function=double-stranded RNA binding; Cellular component=intracellular
  Homolog annotation: Hit_ID=Q7XUL7; Match level="QueryCoverage=98%, HitCoverage=21%, E-value=1e-64, Identity=61%"; Hit description =OSJNBa0074L08.12 protein
QGSPAREEGEVPESELDPDTRRRLLILQHGQDTREAAQPFPDRPPAQVSVPPVQSHGNWLSLEDEMNPRNLNKASTEFHLESDSVNYDNKQPQHPSYFPDGDNPISADRHSYKNQRYPPRPLHNEDHRMLHNHAPATYRSFSGEDIATRHAPSRQRSRQMESGRYFIQHGGILGVLEEIAVKCGFKVEYRSTLCDTTDLQFSIEVWKLC

SEQ ID NO: 78793 - protein, 54 aa, Setaria italica
  Transcript Sequence Number=SeqID_12819
  Gene Ontology: Mol. function=double-stranded RNA binding; Cellular component=intracellular
  Homolog annotation: Hit_ID=Q7XUL7; Match level="QueryCoverage=90%, HitCoverage=5%, E-value=6e-12, Identity=67%"; Hit description =OSJNBa0074L08.12 protein
CLAFQVEIGGQILGKGVGVTWEEAKLQAADEAYGTLKSMLGQLAQPNRPTNYNN

SEQ ID NO: 78794 - protein, 298 aa, Setaria italica
  Transcript Sequence Number=SeqID_12820
  Gene Ontology: Mol. function=double-stranded RNA binding; Cellular component=intracellular
  Homolog annotation: Hit_ID=Q7XUL7; Match level="QueryCoverage=90%, HitCoverage=28%, E-value=3e-94, Identity=66%"; Hit description =OSJNBa0074L08.12 protein
  Pfam annotation: Domain name=dsrm; Domain location=183-248; Score =35.8; E_value=1.7e-07; Accession=PF00035.17; Description=Double -stranded RNA binding motif
  Pfam annotation: Domain name=dsrm; Domain location=57-120; Score =42.8; E_value=1.4e-09; Accession=PF00035.17; Description=Double -stranded RNA binding motif
  Pfam module annotation: Pfam domain module=dsrm::dsrm; Domain location=183-248::57-120
LSYVTPFLECCGCVLSLEYSELDLQCEGEDIATRHAPSRQRSRQMESGRYFIQHGGILGVLEEIAVKCGFKVEYRSTLCDTTDLQFSIEVWIFGEKIGEGFGKTRKEAQCQAADTSLRNLADKFLSWDPDKMTVAKENGFNSNPNSHRYPGSNRDDMLPAASTSDESRYTNDRIDNLRKPGGSVAALKELCKVEGYNLAFQDQPSIDGSAGKEVCAQVEIGGQILGKGVGVTWEEAKLQAADEAYGTLKSMLGQLAQRQSASPRSLVPNFNKRFKPDFSQRIQRIPSGRYSRDDSRFP

SEQ ID NO: 78795 - protein, 67 aa, Setaria italica
  Transcript Sequence Number=SeqID_12821
MGHSDGEHELEGDDLSADDTSWSDGVWSEDADEESVSFEDSGSGSGSDADSDEAAAAEESDSSEDEV

SEQ ID NO: 78796 - protein, 144 aa, Setaria italica
  Transcript Sequence Number=SeqID_12822
  Gene Ontology: Mol. function=protein serine/threonine kinase activity; Cellular component=ubiquitin ligase complex; Biological process=ubiquitin-dependent protein catabolic process
  Homolog annotation: Hit_ID=Q8GUH1; Match level="QueryCoverage=98%, HitCoverage=16%, E-value=2e-41, Identity=55%"; Hit description =Serine/threonine-protein kinase
  Pfam annotation: Domain name=Pkinase; Domain location=3-144; Score= -74.9; E_value=0.00049; Accession=PF00069.17; Description=Protein kinase domain
  Pfam annotation: Domain name=Pkinase_Tyr; Domain location=9-144; Score=-109.4; E_value=1.9e-06; Accession=PF07714.9; Description =Protein tyrosine kinase
  Pfam module annotation: Pfam domain module=Pkinase::Pkinase_Tyr; Domain location=3-144::9-144
  Subcellular localization annotation: CTP_CleavageSite=75; ConfidenceScore=5.29e-01
NLKVGQGGIKVVSTNKGFLRNTTVAIKMLSSTGVQGQSDFKHEVTFMNTVRHPNVVTLVGACPEALALVYEFMPNGSLEGCLERVAGAPALSWQARTRIITEICSALSFLHKNTPYGIVHGDIKPANILLDGNLASKLCDFGTS

SEQ ID NO: 78797 - protein, 73 aa, Setaria italica
  Transcript Sequence Number=SeqID_12823
  Homolog annotation: Hit_ID=B6T6H0; Match level="QueryCoverage=63%, HitCoverage=22%, E-value=5e-09, Identity=63%"; Hit description =Agglutinin
MEGAVVVGFMGRSGWHLDALGLYVAALRAETLCDVVQERGLSAYRSFVYGGDDGARPRHHHQSKKKPFEWCYK

SEQ ID NO: 78798 - protein, 159 aa, Setaria italica
  Transcript Sequence Number=SeqID_12824
  Homolog annotation: Hit_ID=Q8RVQ6; Match level="QueryCoverage=99%, HitCoverage=20%, E-value=9e-63, Identity=74%"; Hit description=SEC6
TEYLVATFADYFGDVKMYIEERSFRRFVEACIEETIVVYVDHLLSQKNYIKEETIDRMRLDEEVLMDFFREHINVTKVESRVRILADMRELASAESFGLALLSFTQIYNLCPDGGETTLPEVVEKLVAMREGIPRKEAKEVVQECKEIYENSLVDGNPT

SEQ ID NO: 78799 - protein, 113 aa, Setaria italica
  misc_feature (43)..(43): Xaa can be any naturally occurring amino acid
  Transcript Sequence Number=SeqID_12825
  Homolog annotation: Hit_ID=Q8RVQ6; Match level="QueryCoverage=90%, HitCoverage=9%, E-value=2e-22, Identity=53%"; Hit description=SEC6
LLQKVESRVRILADMRELASAESLDSFTLIYTNILEHQPDCPXNFSRCLTIHQTVCSFLVMLCNLTSLFCSLRSLRSLVAMREGIPRKEAKEVVQECKEIYENSLRWYWSNPS

SEQ ID NO: 78800 - protein, 108 aa, Setaria italica
  Transcript Sequence Number=SeqID_12826
  Homolog annotation: Hit_ID=Q8RVQ6; Match level="QueryCoverage=98%, HitCoverage=14%, E-value=6e-45, Identity=76%"; Hit description=SEC6
HINVTKVESRVRILADMRELASAESLDSFTLIYTNILEHQPDCPPEVVEKLVAMREGIPRKEAKEVVQECKEIYENSLVDGNPQKSGFVFGKLKCLTAKKGIWRKLGQ

SEQ ID NO: 78801 - protein, 745 aa, Setaria italica
  Transcript Sequence Number=SeqID_12827
  Gene Ontology: Biological process=protein transport
  Homolog annotation: Hit_ID=Q8RVQ6; Match level="QueryCoverage=99%, HitCoverage=98%, E-value=0.0, Identity=77%"; Hit description=SEC6
  Pfam annotation: Domain name=Sec6; Domain location=140-738; Score =605.6; E_value=5.2e-179; Accession=PF06046.5; Description=Exocyst complex component Sec6
MEDLGIEAKEAAVREVAKLLPLPELLSSIASIKSDYLARQQTNDAQLSTMVAEQVEQAHAGISALALSQETINKLRENFIDIDKLCQECQTLIENHDKIKLLSNARNNLNTTLKDMGGMMSISVEAAAARDSLSNDKELIHTYERLTALDGKRRFALAAAASHKEEVGRLREYFEDVDRTWETFEKTLWGHITNFFKLAKESPQTLVRALRVVEMQEIIDQQVAEEAAEAEGAGAMATITNQRRTAKKGAAATPRKGTQEKSKVQGKGYKDKCYECIRMAVEARFNKLLTELVFSEDLMEALEEAKAIGDELGDIYDYVAPCFPPRYEIFQLMVNLYTERFIQMLRLLSDRANDIQNINILKVTGWVVQYQENLIGLGVDESLAQVCSESGALDPLMNMYVERMQATTKKWYSNILEADKTQPPKTKEDGKLYTPAAVDLFRILTEQVQIVRDNSTDVMLYRIALAVIQVMLDFQAAERQRLEEPASDVGLESLCALINNNLHCYELSTELSSSTLEALPPNYAEQVNFEDTCKGFLEVAKEAVLQTVSVIFEDPGVQDLLVKLYQKDWLEGMVTEYLVATFADYFGDVKMYIEERSFRRFVEACIEETIVVYVDHLLSQKNYIKEETIDRMRLDEEVLMDFFREHINVTKVESRVRILADMRELASAESLDSFTLIYTNILEHQPDCPPEVVEKLVAMREGIPRKEAKEVVQECKEIYENSLVDGNPQKSGFVFGKLKCLTAKN

SEQ ID NO: 78802 - protein, 73 aa, Setaria italica
  Transcript Sequence Number=SeqID_12828
  Homolog annotation: Hit_ID=B6U4T9; Match level="QueryCoverage=98%, HitCoverage=15%, E-value=6e-33, Identity=91%"; Hit description =EMB2756
VIVRDHGPSTNLFMCLWFNEVVRFTSRDQLSFPYVLRRLRPPGVHLFPVCARKDLVNSFGHRRKVKPLVKDAR

SEQ ID NO: 78803 - protein, 344 aa, Setaria italica
  Transcript Sequence Number=SeqID_12829
  Gene Ontology: Mol. function=transferase activity
  Homolog annotation: Hit_ID=B9JAE3; Match level="QueryCoverage=83%, HitCoverage=75%, E-value=8e-73, Identity=49%"; Hit description =Rhodanese-related sulfurtransferase protein
  Pfam annotation: Domain name=Rhodanese; Domain location=108-233; Score=42.0; E_value=2.3e-09; Accession=PF00581.12; Description =Rhodanese-like domain
RRKLRVSGGIILAPEGINGSICGTPAAVDKVLNFIQEDNRLKGLRMIQSPVTPEDEAIHHGHTCQSPVGAGDDAPFRWDHVRVKLKKEIVTFGDPGVMPTKMVGKYVKPKDWNALISDPDTVVIDVRNMYEIRIGKFKRAVDPCTNSFREFPTWVDDQFELVESDTQESGVNNDNGAGQPAQDLNANKSKQLPRVAMYCTGGIRCEKASSFLLSKGFKEVYHLEGGILKYLEEIPKAESLWDGECFVFDKRVSVEHGLAQGTHKLCYGCKQPVSDEDMESPEWEYGVSCPYCFATKSEEEKERARARQRQFETWGVIGGPDKGRNPKRLDAKNAAEDKQLPNSI

SEQ ID NO: 78804 - protein, 94 aa, Setaria italica
  Transcript Sequence Number=SeqID_12830
KIKTYKSQKVLKGDIVHAHTNVGYLVLICMVIHICFIAHAHTTIVFNLFWRNCFFPMQFFIWYAGICGSRGGFDSAGVTDLLMTLTINILLSFY

SEQ ID NO: 78805 - protein, 70 aa, Setaria italica
  misc_feature (10)..(10): Xaa can be any naturally occurring amino acid
  misc_feature (54)..(54): Xaa can be any naturally occurring amino acid
  Transcript Sequence Number=SeqID_12831
  Gene Ontology: Mol. function=RNA binding
PHRDGRHSKXVDRGSLRLAEKGRGCRLVKHPSIGSCRWRSLPHGLQCDKCGDIXPSNFHWSSRVRIAVPN

SEQ ID NO: 78806 - protein, 119 aa, Setaria italica
  Transcript Sequence Number=SeqID_12832
  Homolog annotation: Hit_ID=B6U2V9; Match level="QueryCoverage=90%, HitCoverage=38%, E-value=2e-36, Identity=69%"; Hit description=ENT domain containing protein
MAPENIRWGSAYQALPNQVGWLASDGAMPGMGRRGRFHETPNGISLFNFNHIDVPNTGILVKKVEMVLSHPDVYAIQKAKKLLIDQEQSLLDAIAKLDEASDGESDDIGLVEGQIGVVG

SEQ ID NO: 78807 - protein, 289 aa, Setaria italica
  Transcript Sequence Number=SeqID_12833
  Gene Ontology: Mol. function=protein binding; Cellular component =nucleus; Biological process=negative regulation of amyloid precursor protein biosynthetic process
  Homolog annotation: Hit_ID=B6TMZ1; Match level="QueryCoverage=100%, HitCoverage=100%, E-value=1e-140, Identity=83%"; Hit description =Protein AATF
  Pfam annotation: Domain name=TRAUB; Domain location=210-285; Score =133.7; E_value=5.9e-37; Accession=PF08164.4; Description=TRAUB (NUC102) domain
MMNQHREEDALRGCAVKNQKAIWDKTLEMRFLLQKAFSTSNKLPQEPIKTRFCNHDKEIEQAYENLVTSSKQTLASMTELQEALLESNQAVKDANEIPSAPNGENDEWSEVQRSQTRITTFRNTEIDKWQRKIQVTTGAAALKGKLHAFNQNISDQVAGYMRDPSRMINRMYLTKSAVGVFGEDVGEHGAADEGRIVEGDSELIDDSEFYQQLLKEFLESCDRGASESAFYALRKQQVKKRKLVDRRASKSRKIRYNVHEKITNFMAPVPMALPPMAPKLFENLFGTSN

SEQ ID NO: 78808 - protein, 192 aa, Setaria italica
  misc_feature (62)..(62): Xaa can be any naturally occurring amino acid
  Transcript Sequence Number=SeqID_12834
  Gene Ontology: Mol. function=binding
  Homolog annotation: Hit_ID=Q9LML9; Match level="QueryCoverage=57%, HitCoverage=34%, E-value=7e-20, Identity=46%"; Hit description =F10K1.1 protein (Fragment)
CPPLLGGGCAGLARSRGVMVWRPRPARTTARSALSASLDGDGAGDAEFLRRIEELAAAAGVXQPAGAAGCGWPASVERSASSVGLPLSLRMLKRKKKQQQQRQVVARQSRWDEGLLGSAGESVGRAFSSMVLIVRELQSFALQQMRDALLCDDLQGVLAHVQGEMHASFVWLFQHIFAGTPALMLSLMLLLA

SEQ ID NO: 78809 - protein, 61 aa, Setaria italica
  Transcript Sequence Number=SeqID_12835
  Gene Ontology: Mol. function=phosphotransferase activity, phosphate group as acceptor; Cellular component=chloroplast; Biological process=nucleobase, nucleoside, nucleotide and nucleic acid metabolic process
  Homolog annotation: Hit_ID=B4FL09; Match level="QueryCoverage=91%, HitCoverage=19%, E-value=5e-20, Identity=82%"; Hit description =Adenylate kinase
  Pfam annotation: Domain name=ADK; Domain location=8-61; Score=-43.9; E_value=8.9e-05; Accession=PF00406.14; Description=Adenylate kinase
RKPWAATAERRQKKTKEYMEKGQLVPDEIVVNMVKERLLQPDAQENGWLLDGYPRSYSQAM

SEQ ID NO: 78810 - protein, 292 aa, Setaria italica
  misc_feature (183)..(183): Xaa can be any naturally occurring amino acid
  misc_feature (237)..(237): Xaa can be any naturally occurring amino acid
  Transcript Sequence Number=SeqID_12836
  Gene Ontology: Mol. function=phosphotransferase activity, phosphate group as acceptor; Cellular component=chloroplast; Biological process=nucleobase, nucleoside, nucleotide and nucleic acid metabolic process
  Homolog annotation: Hit_ID=B4FL09; Match level="QueryCoverage=93%, HitCoverage=94%, E-value=1e-114, Identity=79%"; Hit description =Adenylate kinase
  Pfam annotation: Domain name=ADK; Domain location=78-259; Score =281.8; E_value=1.5e-81; Accession=PF00406.14; Description=Adenylate kinase
  Pfam annotation: Domain name=ADK_lid; Domain location=198-229; Score =11.6; E_value=0.025; Accession=PF05191.6; Description=Adenylate kinase, active site lid
  Pfam module annotation: Pfam domain module=ADK::ADK_lid; Domain location=78-259::198-229
  Subcellular localization annotation: CTP_CleavageSite=67; ConfidenceScore=5.93e-01
MASSMAAACAAAAASLSPPQSTAQRPGSQGRLLFPGAPASSRTLRLRTAGRRSPATRSLRRASKAVVAALADPLKVMISGAPASGKGTQCELIKAKYGLVHISAGDLLRAEIAAGSENGKQAKEYMEKGQLVPDEIVVNMVKERLLQPDAQENGWLLDGYPRSYSQAMALETLEIRPDTFILXLDVPDELLVERVVGRRLDPVTGKIYHLKYSPPENEEIASRLTQRFDDTEEKVKXLRLQTYYQNVESLLSTYDNVIVKVKGDVTVDEVFAEIDKQLSSILDKKTETVASA

SEQ ID NO: 78811 - protein, 87 aa, Setaria italica
  Transcript Sequence Number=SeqID_12837
RRRRGRGRRVRQVLLVPPVLPLTVRSPWRWSGGLAGASDRCCSAYLLVEQGVLSCCLVDTVEKSWWWWLFVRCGYYARIMILHTSLA

SEQ ID NO: 78812 - protein, 51 aa, Setaria italica
  Transcript Sequence Number=SeqID_12838
GHRPTTNLGLATTNFLLGHDARNILKKRHARRSPKQKLVDRCTKSRTGAVI

SEQ ID NO: 78813 - protein, 197 aa, Setaria italica
  misc_feature (38)..(38): Xaa can be any naturally occurring amino acid
  Transcript Sequence Number=SeqID_12839
  Gene Ontology: Mol. function=oxidoreductase activity, acting on single donors with incorporation of molecular oxygen, incorporation of two atoms of oxygen; Cellular component=chloroplast; Biological process=fatty acid biosynthetic process
  Homolog annotation: Hit_ID=A3BUP8; Match level="QueryCoverage=90%, HitCoverage=20%, E-value=3e-83, Identity=84%"; Hit description =Lipoxygenase
  Pfam annotation: Domain name=Lipoxygenase; Domain location=1-197; Score=-317.8; E_value=0.00018; Accession=PF00305.11; Description =Lipoxygenase
VLRAAVAGRAVHRSSTPTGLPTFFVIDKLFEDGGQAPXEAEDLGFLRGVLPRLLQRLRDSPGDQVLLFDTPANVKKDKFAWLRDEEFARETLAGINPYAIELVREFPLKSKLDPAVYGPAESAITADMLEVQMRRVMTVAEAVKQKRLFMLDYHDLFLPYVHKIRAQEHTTMYGSRTVFFLTDDGTLRLLAIELTRP

SEQ ID NO: 78814 - protein, 301 aa, Setaria italica
  misc_feature (124)..(124): Xaa can be any naturally occurring amino acid
  Transcript Sequence Number=SeqID_12840
  Gene Ontology: Mol. function=catalytic activity; Cellular component =chloroplast envelope; Biological process=metabolic process
  Homolog annotation: Hit_ID=B4FN64; Match level="QueryCoverage=100%, HitCoverage=100%, E-value=1e-159, Identity=93%"; Hit description=C-4 methylsterol oxidase
  Pfam annotation: Domain name=FA_hydroxylase; Domain location=130-243; Score=109.5; E_value=1.1e-29; Accession=PF04116.5; Description=Fatty acid hydroxylase
MLPYATAAVAEAALGRAMTPAEALWFRYTAGVPDYHLYCLNILFLFVVFTLAPLPVALLELRAPAAVSPYKLQPRVRLSRAEFVRCYKNVLRIFFLVIGPLQLVSYPAVKMVGIHTQLPLPSLXEMAAQLLVYFLVEDYLNYWIHRLLHGEWGYQKIHRVHHEFTAPIGFAAPYAHWAEVLILGIPSFVGPAIAPGHMITFWLWIILRQVEAIETHSGFDFPFTPTKYIPFYGGAEYHDYHHYVGGQSQSNFASVFTYCDYLYGTDRGYRFHKAYLAKLKDLGQNDGEKGDGNGQSYAKLD

SEQ ID NO: 78815 - protein, 55 aa, Setaria italica
  Transcript Sequence Number=SeqID_12841
ILLFSRAYITAFQSTQIIYYLCRHPCVFILGISNITIQPSTPDCILFLGTQLYHY

SEQ ID NO: 78816 - protein, 475 aa, Setaria italica
  misc_feature (107)..(107): Xaa can be any naturally occurring amino acid
  misc_feature (330)..(330): Xaa can be any naturally occurring amino acid
  Transcript Sequence Number=SeqID_12842
  Gene Ontology: Mol. function=oxidoreductase activity; Cellular component=chloroplast; Biological process=cell redox homeostasis
  Homolog annotation: Hit_ID=B9S538; Match level="QueryCoverage=98%, HitCoverage=62%, E-value=1e-109, Identity=43%"; Hit description =Catalytic, putative
VDEDGNRIFISDSNHHRIIISNSDGMILDCIGSSPGFEDGEFESAKFLRPASSFYHADEDCLYIVDSENHAVRKADLGRRTLETVYPVSNKSSGIWSWITDKLGLRXEIAPTIQDFDADSVALPWHLIQISEDDLLVADRSFESPWILRISTGEKQDIGRAEVMESYQQTVNERFALLKDIHTNRSSTAKELSDLLEKVTSKELVSSVSRFHNYIIFEVTDGQRVLKHDLDTKNTSNINFSNCEVLGLPYWSICNLERVSTWGRSTEQFEEHVRQVDVLPGRCNITVYIDIPADTELAAPLAENCICRQVRGSGAEVSGSDANNAPTEKXVGIAQQWYDELDNLAFSEVAQEPTTAHGGDDKPADQSYQDQRRVQFTCAVNVSPGTCELVASAALYLKLARATNDRADQEALVKQIMCCQRREEHACVELLMGSRGDARDLVVMKPVHLRLRLECGDHPAGATNKETISTESRLK

SEQ ID NO: 78817 - protein, 77 aa, Setaria italica
  Transcript Sequence Number=SeqID_12843
  Homolog annotation: Hit_ID=Q852E1; Match level="QueryCoverage=51%, HitCoverage=10%, E-value=2e-10, Identity=82%"; Hit description =Putative regulatory protein
  Subcellular localization annotation: CTP_CleavageSite=42; ConfidenceScore=5.54e-01
MKGGDVSSISPLVSFVLGAAMATVCVLFFMSASPTRRLADISAFSTGNSTASTDDLRLASSADSGVADGDGDGDVVS

SEQ ID NO: 78818 - protein, 641 aa, Setaria italica
  Transcript Sequence Number=SeqID_12844
  Gene Ontology: Cellular component=integral to membrane; Biological process=phagocytosis, engulfment
  Homolog annotation: Hit_ID=B6SXZ2; Match level="QueryCoverage=96%, HitCoverage=96%, E-value=0.0, Identity=77%"; Hit description =Transmembrane 9 superfamily protein member 4
  Pfam annotation: Domain name=EMP70; Domain location=57-599; Score =1097.3; E_value=0; Accession=PF02990.8; Description=Endomembrane protein 70
MATTRPVMALLLVAVAVLAGAGAARGFYLPGVAPADFRKKDPLAVKVNQLSSIKTQLPYSYYSLPFCRPGTIVDSAENLGEVLRGDRIENSLYVFEMMEPKLCQIVCKVAPNQDEAKDLKEKIDDEYRINMILDNLPLVVPIKRLDQDVPTVYQQGVHVGVKGQYSGSKEEKHFIHNHFTFLVKYHKDANTDLARIVAFEVKPYSVKHEYDGDWKETATPLKTCDPHSRRLVVDSNSPQEVEANKEIVFTYDVNFEESPIKWASRWDTYLLMADDQIHWFSIVNSLMIVLFLSGMVAMIMLRTLYRDISKYNQLEDQEDAQEETGWKLVHGDVFRPPVNADLLCVYVGTGVQFFGMLLVTLLFAILGLLSPSNRGGLMTAMLLLWVFMGLFAGYSSSRLYKMFKGSEWKNITIKTALMFPGIVFAIFFVLNALIWGEKSSGAVPFTTMFALVLLWFGISVPLVFVGSYLGFKKPAMEDPVRTNKIPRAIPEQPWYMNPVVSVLIGGILPFGAVFIELFFILTSIWLHQFYYIFGFLFLVFVILILTCAEITIVLCYFQLCGEDYQWWWRSYLTAGSSALYLFLYATFYFFTKLEITKTVSGVLYFGYMLIASYAFFVLTGTIGFYACFWFTRLIYSSVKID

SEQ ID NO: 78819 - protein, 62 aa, Setaria italica
  Transcript Sequence Number=SeqID_12845
YLEARSHSLIKLSAYGYANVLRDTWKVSLTTRTGYNSTGLFGRGHCLAIQKEQGYNKGVVWI

SEQ ID NO: 78820 - protein, 205 aa, Setaria italica
  misc_feature (24)..(24): Xaa can be any naturally occurring amino acid
  Transcript Sequence Number=SeqID_12846
  Gene Ontology: Mol. function=5'-3' exoribonuclease activity; Cellular component=intracellular; Biological process=nucleobase, nucleoside, nucleotide and nucleic acid metabolic process
  Homolog annotation: Hit_ID=B9R871; Match level="QueryCoverage=100%, HitCoverage=20%, E-value=4e-76, Identity=63%"; Hit description=5' ->3' exoribonuclease, putative
DFIFMCFFVGNDFLPHMPTLEIRXGAINLLMAVYKKEFPSMGGYLTDSCTPDLDRVEHFIQAVGSYEDKIFQKRARLHQRQAERIKREKAQAKRGDDLDPHVREDLIVPVANFRGSRLASGAVPSPYEQNGAHSQAWKAARVSSPGSSIATAIVEAENDLGSQERENKEDLKSRLKDALREKSDVFNSENAEEDKVKLGEPGWRD

SEQ ID NO: 78821 - protein, 55 aa, Setaria italica
  misc_feature (20)..(20): Xaa can be any naturally occurring amino acid
  Transcript Sequence Number=SeqID_12847
  Subcellular localization annotation: CTP_CleavageSite=26; ConfidenceScore=5.18e-01
AQQWQQQPYSSYAGRGPYGXGPPPTRADSRSQQSQNRYGALDRSSNRRPPSGYGR

SEQ ID NO: 78822 - protein, 109 aa, Setaria italica
  Transcript Sequence Number=SeqID_12848
  Gene Ontology: Mol. function=5'-3' exoribonuclease activity; Cellular component=intracellular; Biological process=nucleobase, nucleoside, nucleotide and nucleic acid metabolic process
  Homolog annotation: Hit_ID=B9R871; Match level="QueryCoverage=80%, HitCoverage=7%, E-value=2e-31, Identity=75%"; Hit description=5'->3' exoribonuclease, putative
GLCAYDDPEACRSSISLDYPCPPIFRSPVDGLEDIMDNQVICSIYKLPDHHKHIARPPAGVIIPKKTVEAGDLKPPPVLWHEDSGRRPHDNSNRHNPPGAISGRQLGEA

SEQ ID NO: 78823 - protein, 324 aa, Setaria italica
  misc_feature (11)..(11): Xaa can be any naturally occurring amino acid
  misc_feature (18)..(18): Xaa can be any naturally occurring amino acid
  misc_feature (24)..(24): Xaa can be any naturally occurring amino acid
  misc_feature (43)..(43): Xaa can be any naturally occurring amino acid
  Transcript Sequence Number=SeqID_12849
  Gene Ontology: Mol. function=5'-3' exoribonuclease activity; Cellular component=intracellular; Biological process=nucleobase, nucleoside, nucleotide and nucleic acid metabolic process
  Homolog annotation: Hit_ID=B9R871; Match level="QueryCoverage=75%, HitCoverage=22%, E-value=4e-45, Identity=46%"; Hit description=5' ->3' exoribonuclease, putative
YIYSLNSKFGXHLPDKEXRNEIKXKRLDPSASGGMNGYITLCXSGESMPPIFRSPVDGLEDIMDNQVICSIYKLPDHHKHIARPPAGVIIPKKTVEAGDLKPPPVLWHEDSGRRPHDNSNRHNPPGAISGRQLGEAAHRLVINSLNAHGRGQHNGPSMPYQTIMNGMHHLNVVHPIGNQGMPPRVEQSAGRPGWNVPRDGVPDGQIPAYASSGSGHYQYDRSGQYEQGNRGRQQNHPYARDGYHDARGRVPPAYGYQQTGGNMYSSQPVALPPGPGLYGQQPPSAYPGVRGGGYQPPPYGGAQQWQQQPYSSYAGRGPYGGGPP

SEQ ID NO: 78824 - protein, 226 aa, Setaria italica
  Transcript Sequence Number=SeqID_12850
  Gene Ontology: Mol. function=5'-3' exoribonuclease activity; Cellular component=intracellular; Biological process=nucleobase, nucleoside, nucleotide and nucleic acid metabolic process
LKELPKEDKIVVSNISSRQNPAGALSGHQLGEAAHRLVVNSLNVRGGGQHNAPSMPYQTIMNGTNYPNGRHHMGNQGVPPRMEQPAGQGWYVPGDNLTNGQAAYGHYQHERPGPSRYERDNHGRQHYSPYARDNHHDSRGRVPPPPGCHQNHGNSHSAASSAGPGRYGQPPPAYGGGYQPAPYGAQQWQQRPYGGGAPPTRPNSQQSQNRYGTLDKGSNKRSHGRH

SEQ ID NO: 78825 - protein, 832 aa, Setaria italica
  Transcript Sequence Number=SeqID_12851
  Gene Ontology: Mol. function=5'-3' exoribonuclease activity; Cellular component=intracellular; Biological process=nucleobase, nucleoside, nucleotide and nucleic acid metabolic process
  Homolog annotation: Hit_ID=B9R871; Match level="QueryCoverage=98%, HitCoverage=73%, E-value=0.0, Identity=65%"; Hit description=5'->3' exoribonuclease, putative
  Pfam annotation: Domain name=XRN_N; Domain location=1-122; Score =101.8; E_value=2.4e-27; Accession=PF03159.10; Description=XRN 5'-3' exonuclease N-terminus
  Pfam annotation: Domain name=zf-CCHC; Domain location=129-146; Score =24.0; E_value=5.9e-05; Accession=PF00098.15; Description=Zinc knuckle
  Pfam module annotation: Pfam domain module=XRN_N::zf-CCHC; Domain location=1-122::129-146
RLREEFEREGRRLPAKQQSQTCDSNVITPGTEFMAVLSVALQYYIHLRLNYDPGWKQIKVILSDANVPGEGEHKIMSYIRGQRNLSGFNPNTRHCLYGLDADLIMLALATHEVHFSILREVVYTPGQQDKCFLCGQVGHLAANCEGKGKRKAGEYDEKGDPIVPKKPYQFLNIWTLREYLEYEFRMPNPPFQIDFERIVDDFIFMCFFVGNDFLPHMPTLEISEGAINLLMAVYKKEFPSMGGYLTDSCTPDLDRVEHFIQAVGSYEDKIFQKRARLHQRQAERIKREKAQAKRGDDLDPHVREDLIVPVANFRGSRLASGAVPAPYEQNGSHKDNKEMNNRARKAARVSTSGSSIAAAIVEAENDLGSQERENKEELKSMLKDALREKSDIFNSENAEEDKVKLGEPGWRDRYYEEKFGARTSDQMEEIRRDVALKYAEGLCWVMHYYYEGVCSWQWFYPYHYAPFASDLKSLSQLNITFELGSPFKPFDQLMGVFPAASAHALPLQYRQLMTDPSSPIIDFYPTDFEVDMNGKRFSWQGIAKLPFIDEDRLLAEIKKVEHTLTPEEARRNSTMCNMLFVNGSHPLSPYIYSLNSKFGNLPDKERNEIKEKLDPSHSGGMNGYIALCYGDPSPPVFRSPVDGLEDIMDNQVICSIYKLPDPHKHIARPPAGVIIPKKSVEAGDLKPPPVLWHEDSGRRPHDNNNRRPYDNNNRRPYDNNNRRPSDNSSRQNPAGALSGHQLGEAAHRLVVNSLNVRGGGQHNAPSMPYQTIMNGTNYPNGRHHMGNQGVPPRMEQPAGQGWYVPGDNLTNGQAAYGHYQHEGQGLLASSIW

SEQ ID NO: 78826 - protein, 201 aa, Setaria italica
  misc_feature (45)..(45): Xaa can be any naturally occurring amino acid
  Transcript Sequence Number=SeqID_12852
  Subcellular localization annotation: CTP_CleavageSite=54; ConfidenceScore=5.11e-01
LVLLALLLLSAPSPSASASLSFLADSFNASVSTFADPELEDPAPXPTFLEEVIDAVSEKYDWDSDAEVRVWPLDADAVRVGAVQRYDFRARAGGVAALARFSDEAVEWRRPTSPAVEEVDGPDGIDVVPGDGAFGFSRGVRDVELVGPVELKLAGDEDGGLVELQLPSGNVTYTRLKKILVADGVGLEVIGAQKVSLSHPH

SEQ ID NO: 78827 - protein, 153 aa, Setaria italica
  Transcript Sequence Number=SeqID_12853
  Gene Ontology: Mol. function=sulfotransferase activity; Cellular component=cytoplasm
  Homolog annotation: Hit_ID=B6TRN9; Match level="QueryCoverage=96%, HitCoverage=44%, E-value=1e-52, Identity=62%"; Hit description =Flavonol 4-sulfotransferase
  Pfam annotation: Domain name=Sulfotransfer_1; Domain location=1-152; Score=33.3; E_value=9.2e-10; Accession=PF00685.19; Description =Sulfotransferase domain
PPRLVSTHMPMSLLPGSIASHGCRIVYICREPKDAFVSLWHFLKRIHGGHAPDLDSMFNRFCEGSLPSGPFWNHCLEYWKESIASPDRILFLKYEDMMSDPVRYVKKLALFLGVPFTGEEEEDGVHEQVVRLCSFEMLSGLEANRAGNIPHRI

SEQ ID NO: 78828 - protein, 65 aa, Setaria italica
  Transcript Sequence Number=SeqID_12854
  Gene Ontology: Cellular component=membrane
  Homolog annotation: Hit_ID=B6U3D7; Match level="QueryCoverage=89%, HitCoverage=16%, E-value=1e-20, Identity=82%"; Hit description =Nodulin protein
MWGMARIDEWKPVIAMLVFDLISAVTTALIKKALQEGLDRLVLITLRQLVATVFLAPIAYFKERS

SEQ ID NO: 78829 - protein, 151 aa, Setaria italica
  misc_feature (133)..(133): Xaa can be any naturally occurring amino acid
  Transcript Sequence Number=SeqID_12855
  Gene Ontology: Mol. function=ATPase activity, coupled to transmembrane movement of substances; Cellular component=integral to membrane; Biological process=transport
  Homolog annotation: Hit_ID=Q9M3B9; Match level="QueryCoverage=100%, HitCoverage=10%, E-value=2e-42, Identity=60%"; Hit description=ABC transporter B family member 20
EDEVEPPPAAVSVLEAFEFADGFDWALMAAGALAAAAHGAALVVYLHYFGRALNLLDSERVESALYGHSDELLHRFKEHALYIVYIAAGVFVAGWIEVSCWILTGERQTAVIRSKYVQVLLNQDMSFFDTYGXNNGDIVSQVLSDVLLIQS

SEQ ID NO: 78830 - protein, 178 aa, Setaria italica
  Transcript Sequence Number=SeqID_12856
  Gene Ontology: Mol. function=(+)-abscisic acid 8'-hydroxylase activity; Cellular component=integral to membrane; Biological process=oxidation reduction
  Homolog annotation: Hit_ID=Q0J185; Match level="QueryCoverage=100%, HitCoverage=35%, E-value=9e-89, Identity=89%"; Hit description =Abscisic acid 8'-hydroxylase 3
FHQGDYHLRLRKLVQGALGPDALRALVPEVEAAVRSTLAAWDGRVMSTFQAMKRLSFEVGIVTIFGGRLDERRKAELRKNYSIVEKGYNSFPNSLPGTLYYKAMQARRRLHGVLSDIMRERRERGEPSSDLLGCLMQSRGDDGAPLLTDEQISDNIIGVLFAAQDTTASVLTWMVKYL

SEQ ID NO: 78831 - protein, 93 aa, Setaria italica
  Transcript Sequence Number=SeqID_12857
  Homolog annotation: Hit_ID=B9RUS0; Match level="QueryCoverage=96%, HitCoverage=2%, E-value=7e-13, Identity=47%"; Hit description =Vacuolar protein sorting-associated protein, putative
PRQQSARTCAAAGEHSSQNIRKVNWNEMFFFKVESEDSYILELLVLDAGRGQPVGIYSAPLKQVVQKLPPTSNSDSAKFDLTLGDLMSTKTVE

SEQ ID NO: 78832 - protein, 210 aa, Setaria italica
  Transcript Sequence Number=SeqID_12858
  Homolog annotation: Hit_ID=B9RUS0; Match level="QueryCoverage=73%, HitCoverage=3%, E-value=2e-32, Identity=48%"; Hit description =Vacuolar protein sorting-associated protein, putative
ELLVLDAGRGQPVGIYSAPLKQVVQKLPPTSNSDSAKFDLTLGDLMSTKTVEPETVKPSGKIRFAVLVSGRASVQQGKTTSSGRSKTGYIQISPSKEGPWTDMKLNYAVPAACWRFGNCVIASEATVKEGNRYLSIRSLVSVTNTTNFVVDLRLKGRFAQSARSDEQGKDSSVKEDQILIGMLEPNSAVPVPLPGLSHPVAPYMLQLRPV

SEQ ID NO: 78833 - protein, 77 aa, Setaria italica
  Transcript Sequence Number=SeqID_12859
  Gene Ontology: Mol. function=transition metal ion binding; Cellular component=endoplasmic reticulum membrane; Biological process =electron transport chain
  Homolog annotation: Hit_ID=Q84KI3; Match level="QueryCoverage=100%, HitCoverage=57%, E-value=4e-37, Identity=96%"; Hit description =Cytochrome b5
  Pfam annotation: Domain name=Cyt-b5; Domain location=7-77; Score =67.2; E_value=6.3e-17; Accession=PF00173.20; Description=Cytochrome b5-like HemeSteroid binding doma
MPTLTKLYSMKEAALHNTPEDCWVVVDGKIYDVTKYLEDHPGGADVLLEATGKDAKEEFDDAGHSKSAKELMQDYFI

SEQ ID NO: 78834 - protein, 48 aa, Setaria italica
  Transcript Sequence Number=SeqID_12860
VIPHVLLLLVHLVAWPLCFSGIHRWKYFRTSLIFVGKTQKNMHNGNIN

SEQ ID NO: 78835 - protein, 83 aa, Setaria italica
  Transcript Sequence Number=SeqID_12861
  Gene Ontology: Mol. function=oxidoreductase activity; Biological process=oxidation reduction
  Homolog annotation: Hit_ID=B6SUN2; Match level="QueryCoverage=62%, HitCoverage=13%, E-value=1e-16, Identity=88%"; Hit description=1 -aminocyclopropane-1-carboxylate oxidase
RSSERLPLHAIPRASAMASPSAPAAQSDRAALLKAFDEACTGVRGLVESGVSSVPALFVHPDPYASAPLAPPGVSIPVVDLSL

SEQ ID NO: 78836 - protein, 97 aa, Setaria italica
  Transcript Sequence Number=SeqID_12862
GSRGAGARLSLSPLTRMVFRRGIFMPRGSLGWKGRLEREFCGQRLAGKGKGKEAAFSPGWHGRGGLADGRGVEETRTRRTTEAHGRSARGRSGFADR

SEQ ID NO: 78837 - protein, 271 aa, Setaria italica
  Transcript Sequence Number=SeqID_12863
  Pfam annotation: Domain name=ATG13; Domain location=4-271; Score= -18.9; E_value=1.1e-09; Accession=PF10033.1; Description=Autophagy -related protein 13
PRPLAAAAAPSAASFRRRDRWFHLPLHDPPPPPEAADRLEPLAPGEPLVLDVLLSPAGGGAGARAGGEVVERWTVACEPWPDAAVGEEVAVNRAYKHCFTLLRSVYAVLRVLPAYRVFRLLCANHSYNYEMVHRVDTFAEPFWRDQEAAMRSHRFVPVETQLGRLVVSVQYLPSLAAFNLEITSLSIIPDYVGSPAAEPMRAFPASLTEATGSAFPPSNQLQRPHSWAPPVFCPHSPAQQAMFSPPPVIYASPTPSPPHFPGGYLQSRRLV

SEQ ID NO: 78838 - protein, 86 aa, Setaria italica
  Transcript Sequence Number=SeqID_12864
  Subcellular localization annotation: CTP_CleavageSite=39; ConfidenceScore=5.56e-01
SPSSPRRGTNAGPGGGDARLAAALQRLSRRRTRRLVAFPAASISSVHLLDEMVNSLAGSLVRRQNPHRQEDDQAVLPFHRILALHL

SEQ ID NO: 78839 - protein, 655 aa, Setaria italica
  Transcript Sequence Number=SeqID_12865
  Homolog annotation: Hit_ID=Q7F2I6; Match level="QueryCoverage=99%, HitCoverage=41%, E-value=0.0, Identity=61%"; Hit description =P0432B10.2 protein
KDSGVPVHDNLNAGESGTSPRRDMIFRRHESFNFGRTDAIQERRFSRLRPYFVPETVEWNASNFQRQFSDKSESKLSSVTESDVASSVADQEDHKDHDEKDLHMEHESPALVRQDSDLADVGSDCSDGINSIDVELDNSDIDDREIALHHFVFERSQEREAHLASTKGKGHEEDYSKMPFHPVPDLLSWEDGDGDSILGAKPSFQLNTEEKCSEWISSSRPTVEGESHSRDLPKYLDTDVASSSNTVVLGASNTAEKDGNVDLMSYSNNEMPLDNLIHGSVELPSELVTETLPVISRDLHPIPEERVVENFSMQEKHETAIFTESDASLTGLHVIEEHFDVGFDKSLSSVSSYPRASDAIQSPSIEHAEVLNPFVSMAAEPNKVDIGDMNDETTVGYLLDSDDEAGKIYPEPMEESGIDESFLSELDTVGDFGVEPMRLDQRVPDQGSHDENLTNGVAADSMISPQTSDNVSLTMSEPSAEDSREQSPVVDDLNGPEFSWSFGASHGDPEQTVYNPRRRILEASPSEAINMELKPPCNESEVPSDDTPSAAILAAASSEPEIATNELVTTTTNPEMTILDAKSLEDIETAFKLVSDGVVSEPTMDTEILHTSGVNVDSEPKESGELHVIDAKSVDDIHAAFKEHCDSVVNRSAES

SEQ ID NO: 78840 - protein, 159 aa, Setaria italica
  misc_feature (21)..(21): Xaa can be any naturally occurring amino acid
  Transcript Sequence Number=SeqID_12866
  Homolog annotation: Hit_ID=Q7F2I6; Match level="QueryCoverage=96%, HitCoverage=15%, E-value=9e-17, Identity=39%"; Hit description =P0432B10.2 protein
TILDAKSLEDIETAFKTKLSXNGVVSEPTMDTEILHTSGVNVDSEPKESGELHVIDAKSVDDIHAAFKEHCDSVVNRSAESTKQDALTEALHPESPHNVGDAGDALAVESKSNMVSNEAKTHDDIDAVFSKVSDSSAKSTAQAVESEDYRERGEENEHQ

SEQ ID NO: 78841 - protein, 212 aa, Setaria italica
  misc_feature (198)..(198): Xaa can be any naturally occurring amino acid
  Transcript Sequence Number=SeqID_12867
  Gene Ontology: Mol. function=[ribulose-bisphosphate carboxylase] -lysine N-methyltransferase activity; Cellular component=chloroplast
  Homolog annotation: Hit_ID=Q9XI84; Match level="QueryCoverage=97%, HitCoverage=42%, E-value=2e-76, Identity=65%"; Hit description =Probable ribulose-1,5 bisphosphate carboxylase/oxygenase large subunit N-methyltransferase, chloroplastic
  Pfam annotation: Domain name=SET; Domain location=1-159; Score=60.1; E_value=8.2e-15; Accession=PF00856.20; Description=SET domain
ARGADSPWAPYLAILPRQTDSTIFWSEEELLEIQGTQLLSTTMGVKEYVQSEFESVEAEIINANKDIFPGAITFDDFLWAFGILRSRVFPELRGDKLALIPFADLVNHSPFITSEGSSWEIKGKGLFGREAMFSLRTPVDVKSGEQIYIQYDLDKSNAELALDYGFIESNPSRDSYTVTLEISESDPFYGDKLDIAEXTGLGVLRYFDIILD

SEQ ID NO: 78842 - protein, 83 aa, Setaria italica
  misc_feature (47)..(47): Xaa can be any naturally occurring amino acid
  Transcript Sequence Number=SeqID_12868
  Gene Ontology: Mol. function=pyridoxal phosphate binding; Biological process=amino acid metabolic process
  Homolog annotation: Hit_ID=Q5N1T2; Match level="QueryCoverage=100%, HitCoverage=20%, E-value=1e-24, Identity=67%"; Hit description =Aluminum resistance protein homolog
FALLRPGHELLAVAGPPYDTLEEVIGIRGSANVGSLKDFGVAYREAXDGGLDWEALACAIRPETGCAFIQRSCGYSWRKSLSV

SEQ ID NO: 78843 - protein, 47 aa, Setaria italica
  Transcript Sequence Number=SeqID_12869
  Gene Ontology: Mol. function=protein dimerization activity; Cellular component=nucleus; Biological process=regulation of transcription, DNA-dependent
  Homolog annotation: Hit_ID=B6TVC2; Match level="QueryCoverage=100%, HitCoverage=13%, E-value=2e-09, Identity=68%"; Hit description=BZIP transcription factor ABI5
MDFPGGSGRRQQQQPEPEHLPPMTPLPLARQGSVYSLTFDEFQTALG

SEQ ID NO: 78844 - protein, 148 aa, Setaria italica
  Transcript Sequence Number=SeqID_12870
REHSEQEELLLCFCLVSSGGESVCVAVVVAMEGLLPFLYRAILHLASGGETPLGNPFRNESPSESPLAPYYVRLAGAGAPDRAGLPLLRGARLLRSRLIDRTSQLISSSSSMAWMRHAARYEYTIRGLQIRRRILVSFFFNLVVCESL

SEQ ID NO: 78845 - protein, 86 aa, Setaria italica
  misc_feature (9)..(9): Xaa can be any naturally occurring amino acid
  Transcript Sequence Number=SeqID_12871
  Gene Ontology: Mol. function=transferase activity, transferring glycosyl groups; Biological process=metabolic process
  Homolog annotation: Hit_ID=B6SQA3; Match level="QueryCoverage=90%, HitCoverage=15%, E-value=2e-28, Identity=81%"; Hit description =Cytokinin-O-glucosyltransferase 2
FAEQQTNCXKRTEWGIGMEIGDDVRRGEVEALIREAMEGEKGKEMHRRVTELRESAVAAARPGGRSIRNLDRLIDEVLAPGLNTQH

SEQ ID NO: 78846 - protein, 78 aa, Setaria italica
  Transcript Sequence Number=SeqID_12872
NRQLAILLREWKLLFKNVFRSWKICFLDTVKIHLFSIDTRRPGHEEATPPGGHPAAMQQRTGNLPQPVDVVIKANMQY

SEQ ID NO: 78847 - protein, 68 aa, Setaria italica
  Transcript Sequence Number=SeqID_12873
IVKRTKQSQWCHIFKNEVVYEIQYHSTKFPQRKNIEWHSSFPLDMKSLLSLSATSSYKFFHQLLVNHN

SEQ ID NO: 78848 - protein, 49 aa, Setaria italica
  Transcript Sequence Number=SeqID_12874
QVIDGTIYKRTLLIVTTMNSCLEEMKNDIPFFFEGNAVRESPTVVFYFI

SEQ ID NO: 78849 - protein, 149 aa, Setaria italica
  misc_feature (30)..(30): Xaa can be any naturally occurring amino acid
  misc_feature (118)..(118): Xaa can be any naturally occurring amino acid
  Transcript Sequence Number=SeqID_12875
  Gene Ontology: Mol. function=RNA-directed DNA polymerase activity; Cellular component=integral to membrane; Biological process=RNA -dependent DNA replication
  Homolog annotation: Hit_ID=Q7G6D1; Match level="QueryCoverage=93%, HitCoverage=38%, E-value=3e-16, Identity=32%"; Hit description =Putative non-LTR retroelement reverse transcriptase
QYCCENGNYSSRMYYLLSFRSITPPTPFNXTWKAKVTKKLKKFMWLIFKDRLNSRNLHRRRNYKIDGDNYNCVLCNLNLEETTYHLFFECPFSSRCWNLVGTSSDHSIRFFATIKKAXDECQHQFFMEIFIISAWEIWKQRNAQIFKRP

SEQ ID NO: 78850 - protein, 206 aa, Setaria italica
  misc_feature (96)..(96): Xaa can be any naturally occurring amino acid
  Transcript Sequence Number=SeqID_12876
  Gene Ontology: Mol. function=RNA-directed DNA polymerase activity; Cellular component=integral to membrane; Biological process=RNA -dependent DNA replication
  Homolog annotation: Hit_ID=Q7XMF5; Match level="QueryCoverage=66%, HitCoverage=21%, E-value=8e-18, Identity=36%"; Hit description =OSJNBa0061G20.4 protein
STPQTHFHIPLSQQASEELQILQSKVEQIQQPSNETDSWQYSLGNRNYSSRKYYLLSFRSITPRTPFDWILKAKMTKKLKIFMWLIFKDRVSSRNXLRRRNYKIDGENCHCMLCNLNLEETTYHLFFERPFSSRCWNFVGISWDHYKILCLVSIQILENLLSGYCKDSPFFPLTRADLDMKRPRHQAAILQQCSNEQATCHNQSTW

SEQ ID NO: 78851 - protein, 75 aa, Setaria italica
  Transcript Sequence Number=SeqID_12877
HSTDTLSLYHYPSRHWRNWKAKVTKKLKIFMWLIFKDRLNSRSLHRRRNCSLNVLSAVDAGTLLVHHRITLSDSL

SEQ ID NO: 78852 - protein, 699 aa, Setaria italica
  Transcript Sequence Number=SeqID_12878
  Homolog annotation: Hit_ID=Q8W563; Match level="QueryCoverage=91%, HitCoverage=95%, E-value=1e-101, Identity=35%"; Hit description =Putative transcription factor X1
  Pfam annotation: Domain name=XH; Domain location=563-697; Score =222.9; E_value=8.5e-64; Accession=PF03469.6; Description=XH domain
  Pfam annotation: Domain name=XS; Domain location=177-295; Score=37.1; E_value=1.5e-09; Accession=PF03468.6; Description=XS domain
  Pfam annotation: Domain name=zf-XS; Domain location=72-115; Score =67.4; E_value=5.4e-17; Accession=PF03470.6; Description=XS zinc finger domain
  Pfam module annotation: Pfam domain module=XH::XS::zf-XS; Domain location=563-697::177-295::72-115
MDLDMDDYIDPYEEAEAEAAAEAAGLADPKSEDSDDDSEDDSDAESDYEEQSFRLLTSGKHRVRNPDGTFRCPFCPGKKKQGYKIKDLLQHADGIGVSSKHCRHGRERASHRAFARFVRTDPSFAEDLVGITGILGAIKPAPANANGSGSATAEAKANVGPTGSSSAPAENVGPPREVERYAWPWACVLAAGAGFNAEEFAGRVAMFSFVEVVPLFIDEIEGMETFAIVRFTNDWSGFNDALTLENHFSVNKLGKKEFETRNSGLGAAEGEGGEGEVKVYGWVAREGDYNGGTVVGRFLRKRTILKTIDEVSKTELEKSGEMVARLASQIEEKNRYLQDLETKKNATELSISRLEEDNRKLHEAYNEEMRNLHRRARENALRIFQENDNLRQELENKRRELNSRAKQLEKLSAENANDWKTLDDEKQKAKDDNSELELASIEQQRADFDVLKLLDDQKREKEDVFARMLQLEKELHEKQQLELEVARLNGTLQVMKHLEGDDDGDIHEKMEKLSERLEREKKRLEDLSGDLVRKERESNDELQQARKELIMGLEDELNGRAAIGIKRMGELDGKPFQNACRRKFGNDDYQVKAAELITNWQEELKKPSWHPFKVVQVNGEDKEVLDDDDAKLKFLWIEYGDDVCNAVKTALMEINEYNPSGRYVVPELWNFRKGRKATTKEVLKYLFGQMETTTKRRRG

SEQ ID NO: 78853 - protein, 1169 aa, Setaria italica
  Transcript Sequence Number=SeqID_12879
  Gene Ontology: Mol. function=ATPase activity, coupled to transmembrane movement of ions, phosphorylative mechanism; Cellular component=integral to membrane; Biological process=phospholipid transport
  Homolog annotation: Hit_ID=Q5Z656; Match level="QueryCoverage=97%, HitCoverage=93%, E-value=0.0, Identity=91%"; Hit description =Putative ATPase, aminophospholipid transporter (APLT), class I, type 8A, member 1
  Pfam annotation: Domain name=E1-E2_ATPase; Domain location=72-349; Score=-5.9; E_value=0.00016; Accession=PF00122.12; Description=E1-E2 ATPase
  Pfam annotation: Domain name=Hydrolase; Domain location=376-851; Score=3.4; E_value=0.021; Accession=PF00702.18; Description=haloacid dehalogenase-like hydrolase
  Pfam module annotation: Pfam domain module=E1-E2_ATPase::Hydrolase; Domain location=72-349::376-851
  Subcellular localization annotation: CTP_CleavageSite=7; ConfidenceScore=5.07e-01
TNKPDPRQERPTTSTPTNYITTTKYNIITFFPKAIFEQFRRVANLYFLLTAILSLTPVCPFSAVSMIAPLAFVVGLSMLKEGLEDWRRFIQDMKVNNRKVAVHKGDGEFVYRHWEELCVGDVVKVEKDQFFPADLLLLSSSYEDGICYVETMNLDGETNLKVKRSLEVTLPLEEDESFKDFQAVIRCEDPNPSLYTFTGNFEYERQVYALDPFQILLRDSKLRNTSFIYGVVIFTGHDSKVMQNSTESPSKRSRIERKMDLIIYILFTVLVLISLISSIGFAVRIKLDLPHWWYLQPQNSNKLDDPSRPALSGIFHLITALILYGYLIPISLYVSIELVKVLQAHFINQDIHMFDEDTGNTAQARTSNLNEELGQVHTVLSDKTGTLTCNQMDFLKCSIAGVSYGVGSSEVEIAAAKQMASGDEDNDMPLQDIWEENNEDEIELVEGVTFSVGNNRKPSIKGFSFEDDRLMQGNWTKEPNSSTILLFFRILALCHTAIPETNEATGSIAYEAESPDEGAFLVAAREFGFEFFKRTQSSVFVREKHTSSKGTTEREFKILNLLEFNSKRKRMTVILKDEDGQILLFCKGADSIIFERLAKNGRMYEVDTTRHLNDYGEAGLRTLALSYRVLEESEYSSWNAEFLKAKTSIGPDRELQLERVSDLIERELILVGATAVEDKLQKGVPQCIDRLAQAGLKIWVLTGDKMETAINIGYACSLLRQGMKQICLSIPTGDQVAQDAKKAAKESLLSQIANGSQMVKLEKDPDAAFALVIDGKALVFALEDDMKHMFLNLAIECASVICCRVSPKQKALVTRLVKEGIGQTTLAIGDGANDVGMIQEADIGVGISGVEGMQAVMASDFSISQFRFLERLLVVHGHWCYKRIAQMICYFFYKNIAFGLTIFYFEAFAGFSGQSVYDDWFMLLFNVVLTSLPVISLGVFEQDVSSEICLQFPALYQQGPKNLFFDWYRILGWMGNGLYSSLAIFFLNLCIFYDQAIRAGGQTADMAAVGTTMFTCIIWAVNMQIALTMSHFTWIQHLFVWGSITTWYLFILAYGMTLRSRDNYQILLEVLGPAPIYWAATLLVTAACNIPYLIHISYQRSCNPLDHHVIQEIKYLKKDVEDQTMWKRERSKARQKTKIGFTARVDAKIKQIRGKLHKKGPSLTIHTVP

SEQ ID NO: 78854 - protein, 139 aa, Setaria italica
  misc_feature (16)..(16): Xaa can be any naturally occurring amino acid
  Transcript Sequence Number=SeqID_12880
  Gene Ontology: Mol. function=metal ion binding
  Homolog annotation: Hit_ID=B6TKC7; Match level="QueryCoverage=100%, HitCoverage=46%, E-value=3e-69, Identity=89%"; Hit description=DHHC zinc finger domain containing protein
  Pfam annotation: Domain name=zf-DHHC; Domain location=2-47; Score =11.5; E_value=2.1e-05; Accession=PF01529.12; Description=DHHC zinc finger domain
MLSRVRQCNWCKATIXGYDHHCPAFGTCIGQKNHRLFMALLTGFVVAESTYTMCSTKYITRCINSGTLRSENPVSLNLVISTMLFSILQVVWQVVFLMWHIYCICFNIKTDEWVISNFPCFGLFLHQLQVVFSLAVSCS

SEQ ID NO: 78855 - protein, 116 aa, Setaria italica
  Transcript Sequence Number=SeqID_12881
  Gene Ontology: Mol. function=metal ion binding
  Homolog annotation: Hit_ID=B6T3T2; Match level="QueryCoverage=79%, HitCoverage=29%, E-value=5e-42, Identity=84%"; Hit description=DHHC zinc finger domain containing protein
SIISDLQFDNFIYVLCSDITRCINSGTLRSENPVSLNLVISTMLFSILQVVWQVVFLMWHIYCICFNIKTDEWINWKKYPEFQMREQPQSDLEVKFVNPYDKGLSNCKGKLSYLYL

SEQ ID NO: 78856 - protein, 213 aa, Setaria italica
  Transcript Sequence Number=SeqID_12882
  Gene Ontology: Mol. function=metal ion binding
  Homolog annotation: Hit_ID=B6T3T2; Match level="QueryCoverage=100%, HitCoverage=67%, E-value=1e-115, Identity=91%"; Hit description=DHHC zinc finger domain containing protein
  Pfam annotation: Domain name=zf-DHHC; Domain location=43-105; Score =24.7; E_value=7e-07; Accession=PF01529.12; Description=DHHC zinc finger domain
RDTSSLLDMLLNAECALLLWGLYRILSGDPGIVACDSSYLEEAGCKDFVEAIYPSELPMLSRVRQCNWCKATIRGYDHHCPAFGTCIGQKNHRLFMALLTGFVVAESTYTMCSTKYITRCINSGTLRSENPVSLNLVISTMLFSILQVVWQVVFLMWHIYCICFNIKTDEWINWKKYPEFQMREQPQSDLEVKFVNPYDKGMLCNIREFLTPK

SEQ ID NO: 78857 - protein, 92 aa, Setaria italica
  Transcript Sequence Number=SeqID_12883
ENSHSLVVLISIVSCLLAELNLSDKPNGTGISSHDSGSANNKISNTWDMIISAFSIVEDILCKIASSMTEDLWQSVIVVLRKVMDFVTARNL

SEQ ID NO: 78858 - protein, 68 aa, Setaria italica
  Transcript Sequence Number=SeqID_12884
MSPRPHFLVLTFPFQGHIAPALRLARRLLAAAPDALVTFSTTEAAHSRMFPAKPDDGGAEVPDDDEVG

SEQ ID NO: 78859 - protein, 173 aa, Setaria italica
  Transcript Sequence Number=SeqID_12885
  Gene Ontology: Mol. function=protein serine/threonine kinase activity; Biological process=protein amino acid phosphorylation
  Homolog annotation: Hit_ID=Q9M1P3; Match level="QueryCoverage=76%, HitCoverage=27%, E-value=4e-54, Identity=71%"; Hit description =Protein kinase-like protein
  Pfam annotation: Domain name=Pkinase; Domain location=2-162; Score= -29.0; E_value=9.1e-07; Accession=PF00069.17; Description=Protein kinase domain
  Pfam annotation: Domain name=Pkinase_Tyr; Domain location=2-163; Score=-160.8; E_value=0.0049; Accession=PF07714.9; Description =Protein tyrosine kinase
  Pfam module annotation: Pfam domain module=Pkinase::Pkinase_Tyr; Domain location=2-162::2-163
EVRAKKEKPNGGGGAGVGAVLVAAKVMDRKELEGRNKEGRARTEREILEAVDHPFLPRLYGVAEGDRWSCLLTEFCPGGDLHVLRQRQPHRRFSEAAVRFYAAEVVAALEYIHMVDIVYRDLKPENVLVRADGHIMLTDFDLSLKCDPTAPTPAHVISDPLSLAGRSTAASTS

SEQ ID NO: 78860 - protein, 57 aa, Setaria italica
  Transcript Sequence Number=SeqID_12886
AKLTASELFIRRRRWQVSTNILCGGSARLLGCSLRWFGCLHCHVNLAQLMQKAPLSL

SEQ ID NO: 78861 - protein, 144 aa, Setaria italica
  Transcript Sequence Number=SeqID_12887
NGPNHRKPQVIYFLEGSRTNLLCSRAQTVCNPVVEYETRKKTLSKVAQLNKVHLFIHRPLELLCCGEKQYTDLLKQTKELETAVATYTYKKPQKEIIVIDPPDRCLRMKHKVKKTKEVWITRFNSPRWLFELNLTKRKKGCATR

SEQ ID NO: 78862 - protein, 216 aa, Setaria italica
  Transcript Sequence Number=SeqID_12888
  Gene Ontology: Mol. function=protein dimerization activity; Cellular component=nucleus; Biological process=regulation of transcription, DNA-dependent
  Homolog annotation: Hit_ID=B6TXJ4; Match level="QueryCoverage=92%, HitCoverage=92%, E-value=4e-66, Identity=66%"; Hit description=IAA15- auxin-responsive Aux/IAA family member
  Pfam annotation: Domain name=AUX_IAA; Domain location=18-214; Score =231.8; E_value=1.8e-66; Accession=PF02309.8; Description=AUXIAA family
MSVETERSSTESSAASGLDFEDTALTLTLRLPGSASSSSSSSSSAFPDPDHKRPSSDADADRSSPIPAAAESSDAPPAPKARVVGWPPVRSYRKNALADVAGSCKAKQAAKFVKVAVDGAPYLRKVDLEAYAGYDQLLRALQDKFFSHFTIRKFADDERKLVDAVNGTEYVPTYEDKDGDWMLVGDVPWKMFVETCQRLRLMKSSEAVNLAPRAAR

SEQ ID NO: 78863 - protein, 66 aa, Setaria italica
  Transcript Sequence Number=SeqID_12889
PYQFIHVYVSYKLLHKKFTVGSRDTMQVRSLTQINRLHNRNYHWIFRPAALIGLVGRAAYARQLLH

SEQ ID NO: 78864 - protein, 133 aa, Setaria italica
  Transcript Sequence Number=SeqID_12890
  Gene Ontology: Mol. function=kinase activity; Cellular component =chloroplast; Biological process=carbohydrate metabolic process
  Homolog annotation: Hit_ID=Q8H407; Match level="QueryCoverage=82%, HitCoverage=25%, E-value=1e-44, Identity=80%"; Hit description =Xylulose kinase-like protein
SWLVVLSRRIDPAVASPLEYYPLPRKGERFPVSDPDMAPRLQPRPESDAEYLHGILESIARIEAKGYNLLRELGATAVEEVFTAGGGAQNDRWTAIRERVLGVPVRKAEQTEAAYGAALLALKGADRRVGVPS

SEQ ID NO: 78865 - protein, 241 aa, Setaria italica
  Transcript Sequence Number=SeqID_12891
  Homolog annotation: Hit_ID=Q6K5K0; Match level="QueryCoverage=100%, HitCoverage=57%, E-value=3e-88, Identity=69%"; Hit description =Myosin-like protein
EATFPEDLLSLEMTDRLGWLVEQKISADMIFSEHHKVKDILSSVDIPHSVLTGELDSQISWLVSSLNQAKDDVVRLHSESADMLGRLAAHESKLVSMHEEIDRLTIVLLEEKQEKDMLVNEHSELLSLYNAAVDKLSVVSSQNNELIKTFAEFSDVTLEGNEPLDTAKLVLQSLSNIQQRTKSSPMETDSFEKLQTFLYTINQESSLCKIILEEDMIDRSVKTDELQRMAEEIHVLKNEKD

SEQ ID NO: 78866 - protein, 298 aa, Setaria italica
  Transcript Sequence Number=SeqID_12892
  Gene Ontology: Mol. function=phosphatase activity; Cellular component= nucleus; Biological process=biological_process
  Homolog annotation: Hit_ID=B6T776; Match level="QueryCoverage=91%, HitCoverage=89%, E-value=1e-106, Identity=69%"; Hit description=CTD small phosphatase-like protein
  Pfam annotation: Domain name=NIF; Domain location=82-278; Score=84.9; E_value=2.9e-22; Accession=PF03031.10; Description=NLI interacting factor-like phosphatase
AATEVAPVQQRGHAAAAVWRAVAGWLGLLFQILLRIVRGTPSSWAQLLSFVGLRHPLLPVAAQAQPSPEVAFVQLPSEAPADASPPPLRRLTVVLDLDETLVSAYESSSLPATLRTQAVEAGLRCFDMECTSAEKDAEGRQRVNRVTVFERPGLHEFLQRTSEFADLVLFTAGLEGYAKPLVDRIDAHNRFIHRLYRPSTVTTEYRDHVKDLSCLSKDFQRIVLVDNNPYSFLLQPLNGIPCITFSAGQPIDDQLMGTIFPLLKHLSLQKDVRPALYETFHMPEWFQGQGIPQIEQAV

SEQ ID NO: 78867 - protein, 107 aa, Setaria italica
  misc_feature (34)..(34): Xaa can be any naturally occurring amino acid
  misc_feature (100)..(100): Xaa can be any naturally occurring amino acid
  Transcript Sequence Number=SeqID_12893
  Gene Ontology: Mol. function=ubiquitin-protein ligase activity; Cellular component=cytoplasm; Biological process=ubiquitin-dependent protein catabolic process
  Homolog annotation: Hit_ID=B3F0L0; Match level="QueryCoverage=65%, HitCoverage=20%, E-value=6e-33, Identity=98%"; Hit description=SINA3
  Pfam annotation: Domain name=DUF1272; Domain location=49-95; Score= -8.0; E_value=0.097; Accession=PF06906.3; Description=Protein of unknown function (DUF1272)
  Subcellular localization annotation: CTP_CleavageSite=30; ConfidenceScore=5.28e-01
LKSASSAGSAAAAAVNVVVVSDRAGGPGCRAGRXAGPLVISPATGVHELLECPVCTNSMYPPIHQCQNGHTLCSTCKTRVHNRCPTCRQELGDIRCLALXEKVAESL

SEQ ID NO: 78868 - protein, 94 aa, Setaria italica
  Transcript Sequence Number=SeqID_12894
  Homolog annotation: Hit_ID=B6TE83; Match level="QueryCoverage=62%, HitCoverage=34%, E-value=4e-15, Identity=81%"; Hit description =Ribosomal protein L35 containing protein
  Subcellular localization annotation: CTP_CleavageSite=39; ConfidenceScore=5.68e-01
AGLGRRVLSSSSSASASAVASHARPLPPPLLPKPPSFTVAFSLSCRRHHSLHAPLPQGFFHPAIASSFRPPSALQQQVRHYAKKEGRSRAPLTP

SEQ ID NO: 78869 - protein, 81 aa, Setaria italica
  Transcript Sequence Number=SeqID_12895
  Gene Ontology: Mol. function=transferase activity, transferring hexosyl groups; Biological process=metabolic process
  Homolog annotation: Hit_ID=Q852C2; Match level="QueryCoverage=67%, HitCoverage=11%, E-value=1e-17, Identity=72%"; Hit description =Putative UDP-glucosyltransferase
MDSVHTSTGGRRRRVLFFPLPYQGHLNPMFQLAGILHSRGFAVTIFHTHFNALDASLHPAYDFVPVPDGCPPADTPGTLQV

SEQ ID NO: 78870 - protein, 79 aa, Setaria italica
  Transcript Sequence Number=SeqID_12896
  Subcellular localization annotation: CTP_CleavageSite=41; ConfidenceScore=5.56e-01
AMSPSSLLLQHCNQDLLATPCYDPTTTLSSAMTMPALASVVVSTPKSSSPTTAESPASAPVAVDNGLLDDMVPPAMRHG

SEQ ID NO: 78871 - protein, 79 aa, Setaria italica
  Transcript Sequence Number=SeqID_12897
  Homolog annotation: Hit_ID=Q2QX94; Match level="QueryCoverage=100%, HitCoverage=9%, E-value=1e-22, Identity=67%"; Hit description=ZW18 protein, putative, expressed
MFGRMRCLVGGGVQDSPRSAAKRVSPASWRSDTAAAEAAAVAGGKGPVICFRPPDVMETVHEVAIYIHRFHNLDLFQQG

SEQ ID NO: 78872 - protein, 144 aa, Setaria italica
  Transcript Sequence Number=SeqID_12898
GGGFLGGEKGSVGGFMDIGGDGGAILDMFLPPSGVCHRKHRRPVRAPSACRSSTARYRDAALPGARPLAALPGARPRAARRRPELRGWYSLRGEKGKGHPRRGRPPGRAACRESKSAAAWPSRGWSIGVRGCERFCVNTPPWVI

SEQ ID NO: 78873 - protein, 81 aa, Setaria italica
  Transcript Sequence Number=SeqID_12899
  Homolog annotation: Hit_ID=B6TUU3; Match level="QueryCoverage=85%, HitCoverage=45%, E-value=2e-30, Identity=97%"; Hit description =Surfeit locus protein 5
  Pfam annotation: Domain name=SURF5; Domain location=1-73; Score=14.9; E_value=0.00026; Accession=PF06179.4; Description=Surfeit locus protein 5
AARMVHSADSLLKLVSELKRTAIFSGLASLNENVDRRIEVLGQQVEGTERMLERIGQEAATSLKELEAHYYSSVVRSSSYD

SEQ ID NO: 78874 - protein, 85 aa, Setaria italica
  Transcript Sequence Number=SeqID_12900
PMMPWPTLSVISNPTCSSIGVFTTEQYNGEWICHDFTPLDVWFLKTYVEPSVPSCKLHNQSSMVLPRKPGMTKYQISVILKFFNI

SEQ ID NO: 78875 - protein, 357 aa, Setaria italica
  misc_feature (316)..(316): Xaa can be any naturally occurring amino acid
  misc_feature (324)..(324): Xaa can be any naturally occurring amino acid
  Transcript Sequence Number=SeqID_12901
  Gene Ontology: Mol. function=transferase activity
  Homolog annotation: Hit_ID=B6T7B6; Match level="QueryCoverage=91%, HitCoverage=99%, E-value=1e-158, Identity=80%"; Hit description =Glutathione S-transferase, C-terminal-like
  Pfam annotation: Domain name=GST_C; Domain location=214-309; Score =22.9; E_value=0.00043; Accession=PF00043.17; Description=Glutathione S-transferase, C-terminal domain
  Subcellular localization annotation: CTP_CleavageSite=34; ConfidenceScore=5.23e-01
EGRRQSTRFPSRRTSTATAARTLSTTFVDVKMARSGHEEVTDSGAFDPSPSTFRSFVSRDSSARFPAAPGRYHLYVAYSCPWACRCLAFLKLKGLDHAIGFTSVKPVFERTKETDDHMGWVFPATKDEEPGAEPDPFNGAKSIRELYEIASRNYAGKPSVPVLWDKQLKTIVNNESAEIIRMLNSEFNEFAKNPDLDLYPAHLQASIDEINELVYEAINIGVYKCGFAKQQGPYDEAVTKLYEALDKCEDILSKQRFLCGNQLTEADVRLFTTLIRFDEVYSVYFKCNKKLIREYPNLFNYTKDIYQIPGISSTVXNMEYIKKXYYGGYSPINPYGIIPVGPNIDYNAPHDREKFNA

SEQ ID NO: 78876 - protein, 59 aa, Setaria italica
  Transcript Sequence Number=SeqID_12902
  Gene Ontology: Mol. function=transferase activity
  Homolog annotation: Hit_ID=B6T7B6; Match level="QueryCoverage=96%, HitCoverage=17%, E-value=1e-21, Identity=82%"; Hit description =Glutathione S-transferase, C-terminal-like
MLVYSVYFKCNKKLIREYPNLFNYTKDIYQIPGISSTVNMEYIKKSYYGGYSPINPYGI

SEQ ID NO: 78877 - protein, 83 aa, Setaria italica
  Transcript Sequence Number=SeqID_12903
  Gene Ontology: Mol. function=transferase activity
  Homolog annotation: Hit_ID=B6T7B6; Match level="QueryCoverage=100%, HitCoverage=25%, E-value=1e-33, Identity=78%"; Hit description =Glutathione S-transferase, C-terminal-like
IFLFLQVYSVYFKCNKKLIREYPNLFNYTKDIYQIPGISSTVNMEYIKKSYYGGYSPINPYGIIPVGPNIDYNAPHDREKFNA

SEQ ID NO: 78878 - protein, 63 aa, Setaria italica
  Transcript Sequence Number=SeqID_12904
  Gene Ontology: Mol. function=heat shock protein binding
AIMGNADWKPLQFLCFAFFYRILQKLRATEPPITPIYNVRLFPILHVCHLVSLQFVHFYGSVI

SEQ ID NO: 78879 - protein, 39 aa, Setaria italica
  Transcript Sequence Number=SeqID_12905
AKKIPYITLLLKYAREMFSSAISSYGFTGTMLMADEICT

SEQ ID NO: 78880 - protein, 102 aa, Setaria italica
  Transcript Sequence Number=SeqID_12906
GLDGPEMFGHAKFQSEANLTGSALSIEGKSRIHKFCSILYQHLSGVRQRVFSAGFYVSSYGFTGTMLMADENISRAYFNSSVMYGIFIRCPYTQILAMHLIN

SEQ ID NO: 78881 - protein, 108 aa, Setaria italica
  Transcript Sequence Number=SeqID_12907
  Gene Ontology: Mol. function=heat shock protein binding
  Subcellular localization annotation: CTP_CleavageSite=55; ConfidenceScore=5.76e-01
MATATAAAAAPAFALTPSLSRRGFLPLPRRAGRPIPHSLRLVASAVRRPRGAVVVAANAAAAAGSGEFGDEENPYELLGIRPLDSFDQMKMAYKKKRKDAEETADDEF

SEQ ID NO: 78882 - protein, 254 aa, Setaria italica
  Transcript Sequence Number=SeqID_12908
  Gene Ontology: Mol. function=heat shock protein binding
  Homolog annotation: Hit_ID=Q9FRS1; Match level="QueryCoverage=79%, HitCoverage=63%, E-value=3e-61, Identity=53%"; Hit description =F22O13.12
  Pfam annotation: Domain name=DnaJ; Domain location=34-88; Score=-8.9; E_value=0.033; Accession=PF00226.23; Description=DnaJ domain
RKGTEPRTEARGGSVDAANAAAAAGSGEFGDEENPYELLGIRPLDSFDQMKMAYKKKRKDAEETADDEFLAKLDRAFDTVMMQQLQYRKKGVTYGSVQVSKDIKYADNQPVVPWGPRFSRSTVKDMRINMAISAAFVVWIAIMGNADWKPLQFLCFAFFYRILQKLRATEPPITPIYNEYGEVEGRGIRMAKRVVRALGLIFGCVFTASLGYTAAINLIELSWQYTPRIVYYYQEMIVTAAAAFLLYITASYYR

SEQ ID NO: 78883 - protein, 36 aa, Setaria italica
  Transcript Sequence Number=SeqID_12909
FSFTVSSASKLLKGYMASSYSFVSTQRHMYGIVYFS

SEQ ID NO: 78884 - protein, 59 aa, Setaria italica
  Transcript Sequence Number=SeqID_12910
GDDYTIDAAKRMKYEELFPVEAKKFGYDPANAARAAARNRSVEEALDDRVRKKADRYCK

SEQ ID NO: 78885 - protein, 151 aa, Setaria italica
  Transcript Sequence Number=SeqID_12911
  Gene Ontology: Mol. function=dolichyl-diphosphooligosaccharide -protein glycotransferase activity; Cellular component=endoplasmic reticulum; Biological process=protein amino acid glycosylation
  Homolog annotation: Hit_ID=B6U2F8; Match level="QueryCoverage=84%, HitCoverage=20%, E-value=5e-67, Identity=96%"; Hit description =Dolichyl-diphosphooligosaccharide--protein glycosyltransferase 67 kDasubunit
  Pfam annotation: Domain name=Ribophorin_I; Domain location=1-124; Score=-215.3; E_value=0.0049; Accession=PF04597.6; Description =Ribophorin I
LNLKPLSIRIENKVLKRFLNITFGSPMEEILIEKLIVKVVLPEGSKDIEVSAPFPTKQWQEVKYSHLDIVGRPVVVLEKPDVIPEHNLYFQVYYKFNNISLLREPLMLITGFFLLFVACIVYMRTDMSISKSSPSYLAKLQWMRCKPCSEI

SEQ ID NO: 78886 - protein, 111 aa, Setaria italica
  Transcript Sequence Number=SeqID_12912
  Gene Ontology: Mol. function=dolichyl-diphosphooligosaccharide -protein glycotransferase activity; Cellular component=endoplasmic reticulum; Biological process=protein amino acid glycosylation
  Homolog annotation: Hit_ID=B6U2F8; Match level="QueryCoverage=72%, HitCoverage=12%, E-value=5e-37, Identity=92%"; Hit description =Dolichyl-diphosphooligosaccharide--protein glycosyltransferase 67 kDasubunit
MIQPFPEEITQAEAQLVVYQDSAHYLSPYPVKVQTLTIRLPGGRVESYTRHPSAKLVDSELKYGQFEDLPPFSYLPVIVHFGTTMGNVVVFSNLYISPVRYLNLPYNFLRD

SEQ ID NO: 78887 - protein, 637 aa, Setaria italica
  Transcript Sequence Number=SeqID_12913
  Gene Ontology: Mol. function=dolichyl-diphosphooligosaccharide -protein glycotransferase activity; Cellular component=endoplasmic reticulum; Biological process=protein amino acid glycosylation
  Homolog annotation: Hit_ID=B6U2F8; Match level="QueryCoverage=97%, HitCoverage=99%, E-value=0.0, Identity=86%"; Hit description =Dolichyl-diphosphooligosaccharide--protein glycosyltransferase 67 kDasubunit
  Pfam annotation: Domain name=Ribophorin_I; Domain location=51-479; Score=886.3; E_value=1.7e-263; Accession=PF04597.6; Description =Ribophorin I
  Subcellular localization annotation: CTP_CleavageSite=44; ConfidenceScore=5.40e-01
APLPRSGREANSPTRSGRGKMATPLPPLRRATTTLLLVVLVAVLASTARADLVISKADRRVDLTSHIVRVLASLKVENVGPDPVSQVLLSFPNIQAKNLAAIRAFGTEGKVKGPSTILPIEVVEPSGAPPELTFFSALLPKPLGKGKTLHLDVLTVFTHSLQPFPEEITQAEAQLVVYQDSAHYLSPYPVKVQTLTIRLPGGRVESYTRHPSAKLVDSELKYGQFEDLPPFSYLPVIVHFENNNPFAVAKEVIREIEISHWGNVQITEHYNIAHGGAKLKGEFSRIDYQSRPYVRGVSSFRNLIARLPPRAHSIYYRDEIGNISTSHLWSDSKKTHLEIEPRFPLFGGWQTTFTVGYGLPLQDFVFYSDGKRFLNITFGSPMEEILIEKLIVKVVLPEGSKDIEVSAPFPTKQWQEVKYSHLDIVGRPVVVLEKPDVIPEHNLYFQVYYKFNNISLLREPLMLITGFFLLFVACIVYMRTDMSISKSSPSYLAKLQWDEVQATVQKIQGLFEQCLAVHDKLEASLRDLSRTGDVQSCKAARKAADAQFKELWKELKPLLTSLQSSPQSYQIWPKVEDLITKEREMQEKLMTRHSTVVDSFEKKLRGQDVENRIALQQQKIAALRQEVESLLEYISEI

SEQ ID NO: 78888 - protein, 86 aa, Setaria italica
  misc_feature (72)..(72): Xaa can be any naturally occurring amino acid
  Transcript Sequence Number=SeqID_12914
  Gene Ontology: Mol. function=binding; Cellular component=chloroplast; Biological process=regulation of transcription, DNA-dependent
  Homolog annotation: Hit_ID=B8Y6I0; Match level="QueryCoverage=100%, HitCoverage=10%, E-value=9e-40, Identity=93%"; Hit description =Chloroplast pentatricopeptide repeat protein 10
  Pfam annotation: Domain name=PPR; Domain location=39-74; Score=4.5; E_ value=2.6; Accession=PF01535.12; Description=PPR repeat
  Pfam annotation: Domain name=PPR; Domain location=4-38; Score=36.9; E_ value=8e-08; Accession=PF01535.12; Description=PPR repeat
  Pfam module annotation: Pfam domain module=PPR::PPR; Domain location =39-74::4-38
LDVRAYTTVLHALSRAGRYERAVELFAELRRQGVAPTLVTYNVVLDVYGRMGRSWPQIVALVEEMRAAGVEXDDFTASTVIAACCR

SEQ ID NO: 78889 - protein, 92 aa, Setaria italica
  misc_feature (1)..(1): Xaa can be any naturally occurring amino acid
  misc_feature (37)..(37): Xaa can be any naturally occurring amino acid
  Transcript Sequence Number=SeqID_12915
  Gene Ontology: Mol. function=phosphoric diester hydrolase activity; Cellular component=nucleus
XKWMSEFAYSLSAGKSDDGSQLGIGKPLIVWPTVEDXRCSIEGYAAGSCIPSPQKNVEKDFLKKYWSRWKADHVGRWYAHFSCNYLKNYDVI

SEQ ID NO: 78890 - protein, 418 aa, Setaria italica
  Transcript Sequence Number=SeqID_12916
  Gene Ontology: Mol. function=phosphoric diester hydrolase activity; Cellular component=nucleus; Biological process=response to DNA damage stimulus
  Homolog annotation: Hit_ID=Q32Q25; Match level="QueryCoverage=90%, HitCoverage=65%, E-value=9e-68, Identity=42%"; Hit description=TDP1 protein
  Pfam annotation: Domain name=Tyr-DNA_phospho; Domain location=4-403; Score=589.4; E_value=3.9e-174; Accession=PF06087.4; Description =Tyrosyl-DNA phosphodiesterase
FFHYVFRLMRVQGLPSWTNTSSVTIQDVIQGEVLLAVLSNYMVDMDWLLSACPSLRKVPHVLVLHGQDGASVELMKKLKPANWILHKPPLPISFGTHHSKAMLLVYPQGIRIVVHTANLIHVDWNYKSQGLWMQDFPWKDTKDLNKKAPFENDLVDYLSALKWPEFRVNLPEVGDVNINAAFFRKFDYSNSMVRLIGSVPGYHVGPNIRKWGHMKLRNVLEECMFDKQFCKSPLIYQFSSLGSLDEKWMSEFAYSLSAGKSDDGSQLGIGKPLIVWPTVEDVRCSIEGYAAGSCIPSPQKNVEKDFLKKYWSRWKADHVGRCRAMPHIKTFTRYSGQNIAWFLLTSSNLSKAAWGALQKNNTQLMIRSYELGVLFLPQTLQSVPQFSCTERNASNRDGLALGKTIKTKLVTLLVLVKV

SEQ ID NO: 78891 - protein, 163 aa, Setaria italica
  Transcript Sequence Number=SeqID_12917
  Gene Ontology: Mol. function=molecular_function; Cellular component =small-subunit processome; Biological process=rRNA processing
  Homolog annotation: Hit_ID=B9T842; Match level="QueryCoverage=100%, HitCoverage=17%, E-value=1e-66, Identity=68%"; Hit description=WD -repeat protein, putative
  Pfam annotation: Domain name=WD40; Domain location=123-161; Score =28.4; E_value=2.9e-05; Accession=PF00400.24; Description=WD domain, G-beta repeat
  Pfam annotation: Domain name=WD40; Domain location=35-71; Score=3.2; E_value=16; Accession=PF00400.24; Description=WD domain, G-beta repeat
  Pfam annotation: Domain name=WD40; Domain location=79-119; Score=0.3; E_value=36; Accession=PF00400.24; Description=WD domain, G-beta repeat
  Pfam module annotation: Pfam domain module=WD40::WD40::WD40; Domain location=123-161::35-71::79-119
VLAGPQLPKKIRTLASYKDYTFAAYGSDIAVFKRTDQVVTWSKHEEKVNMLYLFGEYVLSADAKGNIFIWAFKGAEPNSEPVGSISLGDKFTPTCIMHPDTYLNKVIVGSEEGPLQLWNISTKKKLYDFKGWESPVRCCVSSPALDVVAVGCSDGTVHVHNIR

SEQ ID NO: 78892 - protein, 91 aa, Setaria italica
  Transcript Sequence Number=SeqID_12918
  Gene Ontology: Mol. function=asparagine synthase (glutamine -hydrolyzing) activity; Biological process=asparagine biosynthetic process
  Homolog annotation: Hit_ID=Q5QFC3; Match level="QueryCoverage=61%, HitCoverage=9%, E-value=9e-15, Identity=73%"; Hit description =Glutamine-dependent asparagine synthetase
GQRVVANRRDDGLLVVPRRVVPSREPSLLARVEVAVIPSVRYDPLALRKAFEKAVIKRLMTDVPFGVLLSGGLDSSLVAAVTVRHLAGTKA

SEQ ID NO: 78893 - protein, 54 aa, Setaria italica
  Transcript Sequence Number=SeqID_12919
  Gene Ontology: Mol. function=metalloexopeptidase activity; Cellular component=intracellular; Biological process=protein metabolic process
  Homolog annotation: Hit_ID=Q6K669; Match level="QueryCoverage=88%, HitCoverage=8%, E-value=7e-18, Identity=91%"; Hit description =Leucine aminopeptidase 2, chloroplastic
IASGTVLGSYEDSRYKSESKKVHLKQVDIIGLGSGPEVDQKLKYANDLPQAQQG

SEQ ID NO: 78894 - protein, 161 aa, Setaria italica
  Transcript Sequence Number=SeqID_12920
  Gene Ontology: Mol. function=asparagine synthase (glutamine -hydrolyzing) activity; Biological process=asparagine biosynthetic process
  Homolog annotation: Hit_ID=B5U8J7; Match level="QueryCoverage=53%, HitCoverage=14%, E-value=1e-40, Identity=91%"; Hit description =Asparagine synthetase
  Subcellular localization annotation: CTP_CleavageSite=66; ConfidenceScore=5.18e-01
WSWASWLLPRWWPGHACSAAERRIRTRIRIGGRRRDGRPAPPSPRGRDSPTTARPTRRPWPCCTPRLGRRAPSGSPDLGRIEKWVLRKAFDDEENPFLPKHILYRQKEQFSDGVGYSWIDGLKAHAASNVTDKMLSNAKFIFHTTPDHKEAYYYRMIFERF

SEQ ID NO: 78895 - protein, 283 aa, Setaria italica
  misc_feature (15)..(15): Xaa can be any naturally occurring amino acid
  misc_feature (92)..(92): Xaa can be any naturally occurring amino acid
  misc_feature (223)..(223): Xaa can be any naturally occurring amino acid
  misc_feature (256)..(256): Xaa can be any naturally occurring amino acid
  Transcript Sequence Number=SeqID_12921
  Gene Ontology: Mol. function=asparagine synthase (glutamine -hydrolyzing) activity; Biological process=asparagine biosynthetic process
  Homolog annotation: Hit_ID=B5U8J7; Match level="QueryCoverage=100%, HitCoverage=40%, E-value=1e-120, Identity=76%"; Hit description =Asparagine synthetase
  Pfam annotation: Domain name=Asn_synthase; Domain location=1-133; Score=-42.2; E_value=0.00049; Accession=PF00733.13; Description =Asparagine synthase
GSDEIFGGYLYFHKXPNKEEFHRETCRKIKALHQYDCLRANKATSAWGLEARVPFLDKEFINEAMSIDPEWKMVLTISSTSLKLKPLFFRQXPFLTSLQVRPDLGRIEKWVLRKAFDDEENPFLPKHILYRQKEQFSDGVGYSWIDGLKAHAASNVTDKMLSNAKFIFPHNTPTTKEAYYYRMIFERFFPQKPAILTVPGGPSVACSTAKAVEWDAQWSANLXDPSGRAALGVHLASYHQSESESESGAQQQNKHXPATIAAGAKKPRTIKATTTPPGVVIEG

SEQ ID NO: 78896 - protein, 613 aa, Setaria italica
  misc_feature (149)..(149): Xaa can be any naturally occurring amino acid
  misc_feature (180)..(180): Xaa can be any naturally occurring amino acid
  misc_feature (281)..(281): Xaa can be any naturally occurring amino acid
  misc_feature (399)..(399): Xaa can be any naturally occurring amino acid
  misc_feature (551)..(551): Xaa can be any naturally occurring amino acid
  misc_feature (561)..(561): Xaa can be any naturally occurring amino acid
  misc_feature (590)..(590): Xaa can be any naturally occurring amino acid
  Transcript Sequence Number=SeqID_12922
  Gene Ontology: Mol. function=asparagine synthase (glutamine -hydrolyzing) activity; Cellular component=phagocytic vesicle; Biological process=asparagine biosynthetic process
  Homolog annotation: Hit_ID=B5U8J7; Match level="QueryCoverage=100%, HitCoverage=100%, E-value=0.0, Identity=82%"; Hit description =Asparagine synthetase
  Pfam annotation: Domain name=Asn_synthase; Domain location=218-461; Score=322.7; E_value=7.3e-94; Accession=PF00733.13; Description =Asparagine synthase
  Pfam annotation: Domain name=GATase_2; Domain location=2-167; Score =57.5; E_value=5.2e-14; Accession=PF00310.13; Description=Glutamine amidotransferases class-II
  Pfam module annotation: Pfam domain module=Asn_synthase::GATase_2; Domain location=218-461::2-167
MCGILAVLGCADEASLQGKKRARVLELSRRLKHRGPDWSGLRQVGDCYLSHQRLAIIDPASGDQPLYNEDESVVVTVNGEIYNHENLRTHLSAAGHKFRTGSDCEVIAHLYEEHGEGFVDMLDGVFSFVLLDTRHGRFMAARDAIGVTXPLYIGWGIDGSVWISSEMKALHDECEHFEIXFPPGHLYSSKEGGFTRWYNPPWYDEEAVIPSVRYDPLALRKAFEKAVIKRLMTDVPFGVLLSGGLDSSLVAAVTVRHLAGTKAAKRWGTKLHSFCVGLGGXPPDLKAAKEVADHLGTLHHEFHFTVQDGIDAIEDVIYHTETYDVTTIRASTPMFLMSRKIKSLGVKMVISGEGSDEIFGGYLYFHKAPNKEEFHRETCRKIKALHQYDCLRANKATSXAWGLEARVPFLDKEFINEAMSIDPEWKMVRPDLGRIEKWVLRKAFDDEENPFLPKHILYRQKEQFSDGVGYSWIDGLKAHAASNVTDKMLSNAKFIFPHNTPTTKEAYYYRMIFERFFPQKPAILTVPGGPSVACSTAKAVEWDAQWSANLXDPSGKAALGXVHLASYHQSESESESGAQQQNKHAPATIXAAGAKKPRTIKATTTPPGVVIEG

SEQ ID NO: 78897 - protein, 107 aa, Setaria italica
  Transcript Sequence Number=SeqID_12923
LNLSVCLPPVLCFHRLARRLVQQCYLDDLTCPQRYLPKYHRLNISLWRTRPSDVPWDKAAKAAESLWSGPNPFATSPNRLEYMCTGTDICYIINSWDFFGCDSTFDG

SEQ ID NO: 78898 - protein, 508 aa, Setaria italica
  Transcript Sequence Number=SeqID_12924
  Gene Ontology: Cellular component=chloroplast; Biological process =transport
  Homolog annotation: Hit_ID=Q9FSB5; Match level="QueryCoverage=98%, HitCoverage=85%, E-value=0.0, Identity=45%"; Hit description=RSP67.2
  Pfam annotation: Domain name=PPR; Domain location=121-155; Score =22.5; E_value=0.0018; Accession=PF01535.12; Description=PPR repeat
  Pfam annotation: Domain name=PPR; Domain location=156-190; Score =24.5; E_value=0.00043; Accession=PF01535.12; Description=PPR repeat
  Pfam annotation: Domain name=PPR; Domain location=16-50; Score=31.7; E_value=3e-06; Accession=PF01535.12; Description=PPR repeat
  Pfam annotation: Domain name=PPR; Domain location=191-225; Score =21.4; E_value=0.0038; Accession=PF01535.12; Description=PPR repeat
  Pfam annotation: Domain name=PPR; Domain location=229-263; Score =30.1; E_value=9.1e-06; Accession=PF01535.12; Description=PPR repeat
  Pfam annotation: Domain name=PPR; Domain location=264-298; Score =31.3; E_value=4e-06; Accession=PF01535.12; Description=PPR repeat
  Pfam annotation: Domain name=PPR; Domain location=365-399; Score =14.1; E_value=0.19; Accession=PF01535.12; Description=PPR repeat
  Pfam annotation: Domain name=PPR; Domain location=51-85; Score=28.3; E_value=3.1e-05; Accession=PF01535.12; Description=PPR repeat
  Pfam annotation: Domain name=PPR; Domain location=86-120; Score=34.4; E_value=4.6e-07; Accession=PF01535.12; Description=PPR repeat
  Pfam module annotation: Pfam domain module=PPR::PPR::PPR::PPR::PPR::PP R::PPR::PPR::PPR; Domain location=121-155::156-190::16-50::191 -225::229-263::264-298::365-399::51-85::86-120
GGTKNRLRDGVQPDNATFSTVISCARACGLPSKAVEWFEKMPEFGCSPDMLTYSAVIDAYGRAGKAEAALRLYDRARAEKWQLDPVICSTVIKIHSTTGNFDGALNVFEEMKAAGVKPNQVVYNTMLDAMGRAMRPWVVKTIHREMVDQQVQPSKATYCCLLHAYTRARYGEDAMAVYRLMKDEVMDIDVVLYNMLLSMCADIGYVDEAEEIFRDMKASMDARSKPDSWSYSSMVTLYSSTANVLGAEGVLNEMVEAGFKPNIFVLTSLIRCYGKAGRTDDVVRSFGMLEELGISPDDRFCGCLLSVAGNTPDEELGKVIDCIERSNAQLGAVVKLLVDRSASSGSFREAASELLGSARGLVKMPYCNSLMDLCVNLNQMEKACALLDAAQQLGIYANIQTRTQTQWSLHLRGLSVGAALTTLHVWMNDLYTALQSGGEGLPPLLGIHTGQGKNTYSDRGLAAMFEAHLKELDAPFHEAPDKAGWFLTTSVAAKHWLEIKKASELVAV

SEQ ID NO: 78899 - protein, 130 aa, Setaria italica
  Transcript Sequence Number=SeqID_12925
  Homolog annotation: Hit_ID=Q9M9G1; Match level="QueryCoverage=88%, HitCoverage=24%, E-value=8e-10, Identity=33%"; Hit description =F14O23.23 protein
DVSEKRAVGVLHELLSLFVTCSAERRRLLCLRQHLGLPQKFHLVFERHPHVFYLLLKEKTCFVVLKEAYMAGGDTAIGEHPMLELRKKYVELMEQSREIIRCRRSGKPVELESKVYDNTEDPLKRCLKNL

SEQ ID NO: 78900 - protein, 80 aa, Setaria italica
  Transcript Sequence Number=SeqID_12926
VLRKELIFLQDWRRAASRKTKDQIPDSVRRQKIETRLRIARALHAGCCVAHGDGDGGRAAHQRPAQPEPAAGWEARRGRL

SEQ ID NO: 78901 - protein, 129 aa, Setaria italica
  Transcript Sequence Number=SeqID_12927
  Gene Ontology: Mol. function=protein serine/threonine kinase activity; Biological process=protein amino acid phosphorylation
  Homolog annotation: Hit_ID=Q6K8L8; Match level="QueryCoverage=100%, HitCoverage=19%, E-value=1e-37, Identity=59%"; Hit description =Putative receptor-type protein kinase LRK1
  Pfam annotation: Domain name=Lectin_legB; Domain location=1-88; Score= -64.0; E_value=5.3e-06; Accession=PF00139.11; Description=Legume lectin domain
GYYDDRTGEFTSLTLISGEAMQAWVDYDSDAGRVDVRLAPIRTGKPRKPLVSTEVNLSTVIGEEAYVGFSSSTGTLTSRHYVLGWSFAVGEPAPAIDMSRLPKLPQRSSESPSKALVIALPVVAGGLTL

SEQ ID NO: 78902 - protein, 588 aa, Setaria italica
  Transcript Sequence Number=SeqID_12928
  Gene Ontology: Mol. function=protein binding; Biological process =plant-type hypersensitive response
  Homolog annotation: Hit_ID=B6VAC8; Match level="QueryCoverage=86%, HitCoverage=84%, E-value=1e-143, Identity=54%"; Hit description=NPR1- like protein
  Pfam annotation: Domain name=Ank; Domain location=291-324; Score =15.8; E_value=0.18; Accession=PF00023.22; Description=Ankyrin repeat
  Pfam annotation: Domain name=Ank; Domain location=325-357; Score =33.4; E_value=9.2e-07; Accession=PF00023.22; Description=Ankyrin repeat
  Pfam annotation: Domain name=BTB; Domain location=47-167; Score=9.4; E_value=0.0024; Accession=PF00651.23; Description=BTBPOZ domain
  Pfam module annotation: Pfam domain module=Ank::Ank::BTB; Domain location=291-324::325-357::47-167
  Subcellular localization annotation: CTP_CleavageSite=35; ConfidenceScore=5.39e-01
MEASTISFSSPSSSPQSTPPPPPPRATPTELEAVRLRRLSDNLERLLDPAFLDCADAEVALAAGKGGAAVGVHRCILAARSAFFRDHFASLPPPAAFGEKPRLELADLVPGGRHIGQDALVPVLGYLYTGRLKSAPQDATVCMDDACGHGACRPAIDFVVESMYAASGFQISELVSLFQRRLSDFVSTALDEDVVPIVHVASTCELQDLLNQSLQRIAVSSLDSRYLEKELPDDIYCKIKEIRQSVFHDESENAILDPEHEKRVRNILKALDSDDVDLVGLLLKESAVTLDDAFAVHYAAAYCEPKVFAELLKLNSANVNLKNNSGYTPLHIACMRREPDIILSLVERGASVMERTPDGRDAFTICKRLTREKDCNRKLEKCEEKSKAYLCIDILEQELKRKSFILDQISIEESIATPLLVDNFHMRLINLENRVAFARIFFPSEAKLVMRIAQADSTEEFAGIRNFSKLKEVDLNETPTMQNKRLRERLDALTKTVELGRRYFPHCSDVLDKFLIEESTDLIYLETGTPEDQHLKRMRFSELKEDVRKAFTKDKAAVTAIASSASSSSSSRYEGRGRQSNRKSKQSR

SEQ ID NO: 78903 - protein, 86 aa, Setaria italica
  Transcript Sequence Number=SeqID_12929
GPLQRSGSNSLASLLRAEPPDDVVVADPRKLGERDGSRRRARRRSCLRLPLGAAGGCRVCDCDEMDSAAPAAAPRRRPADGNDKDD

SEQ ID NO: 78904 - protein, 171 aa, Setaria italica
  Transcript Sequence Number=SeqID_12930
  Gene Ontology: Mol. function=DNA binding
  Homolog annotation: Hit_ID=B9RYZ9; Match level="QueryCoverage=42%, HitCoverage=9%, E-value=1e-22, Identity=72%"; Hit description =Transcription factor, putative
MTIDAVVGRKLAEKGYTRSAKKCKEKFENVHKYYKRTKESRAGRNDGKTYRFFTQLEALHGTGGAAQAASFVPPATSVGLSSSGAARPSALRVPAEPPPAVAIGGAGMPMALGNQMSFSTSNTEDYSDEEDSDDEGTQELGGGADERGKRKRVSEGGAAAGGSGSGSGSGS

SEQ ID NO: 78905 - protein, 286 aa, Setaria italica
  Transcript Sequence Number=SeqID_12931
  Gene Ontology: Mol. function=receptor activity; Cellular component =endoplasmic reticulum lumen
  Pfam annotation: Domain name=DUF1618; Domain location=101-227; Score =18.6; E_value=6.7e-07; Accession=PF07762.6; Description=Protein of unknown function (DUF1618)
TTNAYFGRPIPRPFEPWGVGLLCCGEEFAVAYMSVSRRDPEAEALEVELWVLRSTVRDDSTSGGEKWEAMYLPIQGQHVKHINLLNFTTNEVVPFKNTLCWVDYRRGVLYCEDICGDSPKAVFAGFPPDYSSYHPAGFPALYRSLCVTEGGRTLAILDVGRHDGADIGRMVPDTGFTIVSKAVTETQSANSFVVQADDLWATHSTKDLPHEVMMLPLLSMDDINVAHFVLYDWADLSGKFKISLVTIDLSTKRVVGSVVPYINEEDSFLLVRTSCYFWFLKVFKPL

SEQ ID NO: 78906 - protein, 222 aa, Setaria italica
  misc_feature (152)..(152): Xaa can be any naturally occurring amino acid
  Transcript Sequence Number=SeqID_12932
  Gene Ontology: Mol. function=DNA binding
  Homolog annotation: Hit_ID=Q7XR86; Match level="QueryCoverage=34%, HitCoverage=63%, E-value=7e-37, Identity=70%"; Hit description =OSJNBa0011L07.15 protein
  Pfam annotation: Domain name=MADF_DNA_bdg; Domain location=5-81; Score=4.8; E_value=0.065; Accession=PF10545.1; Description=Alcohol dehydrogenase transcription f
LRQALIRIRSEMDATFRDATLKGPLWEDVSRKLADLGYKRSAKKCKEKFENVHKYYKRTKEGRAGRQDGKSYRFFDELEALHAAAPQPQPQQQLPPASSAQPLHAFAVPVSAPPPMSSMPPPPPGPMQPAPISSAGPAPVPAAAPMELPPAXQPLNLQGLSFSSMSDSESDDESEDDDMTAETGGSQDHLGKRKRGGGAGGSKKMMSFFEGLMQQVVQRQEG

SEQ ID NO: 78907 - protein, 119 aa, Setaria italica
  Transcript Sequence Number=SeqID_12933
  Gene Ontology: Mol. function=receptor activity; Cellular component =endoplasmic reticulum lumen
MAAADAPAGSGGALPNWVMLERFIFRRDDPQSFREDKRTSATGETSVGAHFRISFILAEPPTPSRLYLSWPGGPKREMMCHLAAAHRNLVLLRLDSFVDLSNPSPFGEMAHDYFIYYVA

SEQ ID NO: 78908 - protein, 197 aa, Setaria italica
  Transcript Sequence Number=SeqID_12934
  Pfam annotation: Domain name=DUF1618; Domain location=4-120; Score= -20.6; E_value=0.0014; Accession=PF07762.6; Description=Protein of unknown function (DUF1618)
RNVCGDSPKAVFVGFPPGYSSYHPSVRPELYRPELYRGLCVTEGGRTLAFLDVVRRDGIDIGPMVPAGFTIISMALTETQSANSFVVKADDLWATHSTKDLPHEVMMLPLMSLDDINVAHFVLYNWADLSEKVKVSLVTIDLSTKRVVGKVVPYIDGVDLSTDDADLVEAKPNYLMHFLPSEFPKFLNLQRTTKNPA

SEQ ID NO: 78909 - protein, 437 aa, Setaria italica
  Transcript Sequence Number=SeqID_12935
  Gene Ontology: Mol. function=receptor activity; Cellular component =endoplasmic reticulum lumen
  Pfam annotation: Domain name=DUF1618; Domain location=230-360; Score =22.4; E_value=3.2e-07; Accession=PF07762.6; Description=Protein of unknown function (DUF1618)
SFPRLVFVLPFPVSFVTVGLCCFREDKRTSATGETSVGAHFRISFILAEPPTPSRLYLSWPGGPKREMMCHLAAAHRNLVLLRLDSFVDPSYPSPFGEMAHDYFIYYVAADPRSQAQSTPALRRLPGCTVHNAYFGRPIPRPFEPWGVGLLCCGEEFAVAYMSVSRRDPEAEALEVELWVLRSTVRDDSTDGGEKWEAKYLPLQGQDVEHINLLDFTTSEVVPFKNSLCWVDYRMGILYCEDVCGDSPKAVFVGFPPGYSSYHPSVRPELYRPELYRGLCVTEGGRTLAFLDVVRRDGIDIGPMVPAGFTIISMALTETQSANSFVVKADDLWATHSTKDLPHEVMMLPLLSMDDINVAHFVLYDWADLSGKFKISLVTIDLSTKRVVGSVVPYINEEDLSTDDADLVKVKPNFFMPFLPAEFPKFLNLQRTRKNPA

SEQ ID NO: 78910 - protein, 159 aa, Setaria italica
  Transcript Sequence Number=SeqID_12936
HWNANEQVFQTKSGTSWAYDIEVTRSNMVHPSRSPQEAIIDRLMAIWTITRVRGDQQRGRGGLCHTVVKAAGAPEFWGQRLWHHLIHVWKESWNPNREIEAPRVCSSYSIKLKDHIVRYDQPAPCRSGEGFSLQLSTVRQIQKKTQSKTIGVLPKPHKK

SEQ ID NO: 78911 - protein, 127 aa, Setaria italica
  Transcript Sequence Number=SeqID_12937
  Gene Ontology: Mol. function=enzyme activator activity; Cellular component=anaphase-promoting complex; Biological process=positive regulation of ubiquitin-protein ligase activity during mitotic cell cycle
  Homolog annotation: Hit_ID=Q8H8G7; Match level="QueryCoverage=100%, HitCoverage=22%, E-value=7e-60, Identity=88%"; Hit description =Putative cell cycle switch protein
  Pfam annotation: Domain name=WD40; Domain location=62-100; Score =37.9; E_value=3.9e-08; Accession=PF00400.24; Description=WD domain, G-beta repeat
ASGGGTADRCIRFWNTTTNTHLSCVDTGSQVCNLVWSKNVNELVSTHGYSQNQIIVWRYPTMSKLATLTGHTYRVLYLAISPDGQTIVTGAGDETLRFWNVFPSPKSQSSDSLSCIGGTSFVRSYIR

SEQ ID NO: 78912 - protein, 186 aa, Setaria italica
  Transcript Sequence Number=SeqID_12938
  Gene Ontology: Mol. function=enzyme activator activity; Cellular component=centrosome; Biological process=positive regulation of exit from mitosis
  Homolog annotation: Hit_ID=Q8H8G7; Match level="QueryCoverage=100%, HitCoverage=33%, E-value=1e-94, Identity=89%"; Hit description =Putative cell cycle switch protein
  Pfam annotation: Domain name=WD40; Domain location=1-29; Score=6.8; E_ value=6.2; Accession=PF00400.24; Description=WD domain, G-beta repeat
  Pfam annotation: Domain name=WD40; Domain location=121-159; Score =37.9; E_value=3.9e-08; Accession=PF00400.24; Description=WD domain, G-beta repeat
  Pfam annotation: Domain name=WD40; Domain location=33-74; Score=22.1; E_value=0.0023; Accession=PF00400.24; Description=WD domain, G-beta repeat
  Pfam module annotation: Pfam domain module=WD40::WD40::WD40; Domain location=1-29::121-159::33-74
KSEVCGLKWSYDNRQLASGGNDNRLFVWNPHSVQPVLKYTEHTAAVKAIAWSPHLHGLLASGGGTADRCIRFWNTTTNTHLSCVDTGSQVCNLVWSKNVNELVSTHGYSQNQIIVWRYPTMSKLATLTGHTYRVLYLAISPDGQTIVTGAGDETLRFWNVFPSPKSQSSDSLSCIGGTSFVRSYIR

SEQ ID NO: 78913 - protein, 58 aa, Setaria italica
  Transcript Sequence Number=SeqID_12939
GLPHECGFVNPLPTGNVPVAIYSPGLASTSVAAAEPQRILRRFHVEELVLLVLLLFCG

SEQ ID NO: 78914 - protein, 128 aa, Setaria italica
  Transcript Sequence Number=SeqID_12940
  Gene Ontology: Mol. function=protein serine/threonine kinase activity; Biological process=protein amino acid phosphorylation
  Homolog annotation: Hit_ID=Q2ABR6; Match level="QueryCoverage=87%, HitCoverage=37%, E-value=5e-50, Identity=85%"; Hit description =Phosphoenolpyruvate carboxylase kinase
EITGVSSMSAELKRDYEIGEELGRGRFGVVHRCTSRATGEAFAVKSVDRSQLADDLDRELAQVEPKLAQLAGAGNPGVVQVHAVYEDEAWTHTVIDLCTGPDLLGWMGLRRGAPVPEPVAAAIVAQLR

SEQ ID NO: 78915 - protein, 140 aa, Setaria italica
  Transcript Sequence Number=SeqID_12941
  Homolog annotation: Hit_ID=Q0D622; Match level="QueryCoverage=90%, HitCoverage=16%, E-value=2e-18, Identity=45%"; Hit description=DEAD -box ATP-dependent RNA helicase 32
HTQQTSLQRTCSGRTPTIRFISHKKNVSKKDMEDIDKKQIKSSSKPEVIINPQVNSDLTMDDGDDDILYPKKPIADANMDDGLDDVLRPKEPTTDTDTKPEKVTELGKPLKKKKLKINVHRPVGTRVKYDDEGNIIPPLA

SEQ ID NO: 78916 - protein, 108 aa, Setaria italica
  Transcript Sequence Number=SeqID_12942
  Gene Ontology: Mol. function=ATP-dependent helicase activity; Cellular component=nucleus; Biological process=ribosome biogenesis
  Homolog annotation: Hit_ID=B9SAD3; Match level="QueryCoverage=99%, HitCoverage=14%, E-value=3e-40, Identity=74%"; Hit description=Dead box ATP-dependent RNA helicase, putative
  Pfam annotation: Domain name=DEAD; Domain location=1-105; Score=12.8; E_value=5.2e-06; Accession=PF00270.21; Description=DEADDEAH box helicase
QRNSTKEFHNFSAGAIVGKRKGIELEKEHINSLNILVCTPGRLVQHFNETPNFDCSHLQMLVLDEADQILDHGFKSQVDAIISQIPRVRQTLLFSATQTKSVKDLARL

SEQ ID NO: 78917 - protein, 120 aa, Setaria italica
  Transcript Sequence Number=SeqID_12943
  Gene Ontology: Mol. function=catalytic activity; Biological process =metabolic process
  Homolog annotation: Hit_ID=B6SVP8; Match level="QueryCoverage=85%, HitCoverage=13%, E-value=5e-48, Identity=85%"; Hit description =Cycloartenol synthase
MQLFLSYGCFHIFSQFIQEDLIYRPSWLQNIAMAYLNKFVEPVSNWWPFTNLRERAMKNLMEHIHYEDETSNYVGLCPINKALNMICCWIEKPNSKEFRQHLPRIQDHLWLAEDGMKSKV

SEQ ID NO: 78918 - protein, 68 aa, Setaria italica
  Transcript Sequence Number=SeqID_12944
  Gene Ontology: Mol. function=catalytic activity; Biological process =metabolic process
  Homolog annotation: Hit_ID=B6SVP8; Match level="QueryCoverage=98%, HitCoverage=8%, E-value=7e-29, Identity=88%"; Hit description =Cycloartenol synthase
GQIEYDPTPLYRAAKELINMQMEGGEFPQQEVVGNFNSSLFFNYTNYRNLFPIWALGEFRRRLLAKRG

SEQ ID NO: 78919 - protein, 149 aa, Setaria italica
  Transcript Sequence Number=SeqID_12945
  Gene Ontology: Mol. function=catalytic activity; Biological process =metabolic process
  Homolog annotation: Hit_ID=B6SVP8; Match level="QueryCoverage=100%, HitCoverage=19%, E-value=2e-66, Identity=80%"; Hit description =Cycloartenol synthase
MWRLKVGERPSDPLLRSPNDFLGREVWEFDPDAGTLEERAEVERLRQEYTRNRFTQRECGDFLLRMQYAKQNLHNTNLPVIKIKEDSELTEETVLIVLRRALSQYCSLQGPDGHWPGGYSGILFILPLMIFALHVTQSVNEVLSTEHIR

SEQ ID NO: 78920 - protein, 68 aa, Setaria italica
  Transcript Sequence Number=SeqID_12946
WICSIRFFIALSRRLVKPNSKEFRQHLPRIQDHLWLAEDGMKSKVIRLASYNLVRHLTRNERIAIHIL

SEQ ID NO: 78921 - protein, 761 aa, Setaria italica
  misc_feature (71)..(71): Xaa can be any naturally occurring amino acid
  misc_feature (107)..(107): Xaa can be any naturally occurring amino acid
  misc_feature (387)..(387): Xaa can be any naturally occurring amino acid
  Transcript Sequence Number=SeqID_12947
  Gene Ontology: Mol. function=catalytic activity; Biological process =metabolic process
  Homolog annotation: Hit_ID=B6SVP8; Match level="QueryCoverage=99%, HitCoverage=99%, E-value=0.0, Identity=84%"; Hit description =Cycloartenol synthase
  Pfam annotation: Domain name=Prenyltrans; Domain location=151-194; Score=49.0; E_value=1.9e-11; Accession=PF00432.13; Description =Prenyltransferase and squalene oxidase re
  Pfam annotation: Domain name=Prenyltrans; Domain location=592-634; Score=40.9; E_value=5e-09; Accession=PF00432.13; Description =Prenyltransferase and squalene oxidase re
  Pfam annotation: Domain name=Prenyltrans; Domain location=641-694; Score=31.4; E_value=3.7e-06; Accession=PF00432.13; Description =Prenyltransferase and squalene oxidase re
  Pfam module annotation: Pfam domain module=Prenyltrans::Prenyltrans::P renyltrans; Domain location=151-194::592-634::641-694
MWRLKVGERPSDPLLRSPNDFLGREVWEFDPDAGTLEERAEVERLRQEYTRNRFTQRECGDFLLRMQYAKXNLHNTNLPVIKIKEDSEVTEETVLIVLRRALSQYLXEQLMNMHLNFGHWPGGYSGILFILPLMIFALHVTQSVNEVLSTEHIREICRYIYNIQNEDGGWGTHTLGPSSMFGTCVNYATLRLLGEVLDGENVALSRGRAWILSHGSATAAPQWAKIYLSIIGAYDWSGNNAIIPELWMLPHFLPIHPGRFWCFCRMVYMPMAYIYGKKFVGPITPTILAIRNEIYNVPYNEINWSKARSSCAKEDLIYRPSWLQNIAMAYLNKFVEPVSNWWPFTNLRERAMKNLMEHIHYEDETSNYVGLCPINKALNMICCWIEXPNSKEFRQHLPRIQDHLWLAEDGMKSKVYAGCQTWETALIVQAICGTGLTEEFCSALQKAHEFLKNAQVTQNLPDYKSYYRERTKGAWTLTNGEHVWPVPDTTAESLKAVLLLSNINPELVGDPIKEERLYDAVDCLLSYVNKDGTLSSAECKRTTSWVEFINPSESFRNIIVDYPYPECTSSLIQALVLFRGICPMYRHEEIEKIIKKGASFLEKTQRKDGSWYGSWAVCFTYGTFFAIKGLVAAGRTYHNSLSIRKACNFLLSKQLITGGWGENYLSCQIEEYVCSGSPHAVNTAMAMLALLYAGQIEYDPTPLYRAAKELINMQMEGGEFPQQEVVGNFNSSLFFNYTNYRNLFPIWALGEFRRRLLAKRG

SEQ ID NO: 78922 - protein, 80 aa, Setaria italica
  Transcript Sequence Number=SeqID_12948
SRLRPLLPNFKNKAMIISFSYTINEVHDPIWFSTSSRWKKIAFMVHHKIELFWASVSKPTNDKIQFDVSSLQRNSMNFHP

SEQ ID NO: 78923 - protein, 150 aa, Setaria italica
  Transcript Sequence Number=SeqID_12949
  Gene Ontology: Mol. function=nucleic acid binding; Biological process= intracellular signaling cascade
  Homolog annotation: Hit_ID=Q2R3J1; Match level="QueryCoverage=99%, HitCoverage=6%, E-value=1e-26, Identity=40%"; Hit description =Transposon protein, putative, Mutator sub-class
SPYDGDDPLPFPLSFMCATDDDIYRMVCPLICFYAVKYHLPHRVARQFGMRQIWPPQATSTSIELHNVDRKKKRKVSEWAAFHHAYIQEWEQFEQNLDKNNEPHTNSAYRQYQSWYQGATRHRLREAWTEDDYADIHSSDDEDTVYESRS

SEQ ID NO: 78924 - protein, 145 aa, Setaria italica
  Transcript Sequence Number=SeqID_12950
  Gene Ontology: Cellular component=plastoglobule
  Homolog annotation: Hit_ID=B6SW29; Match level="QueryCoverage=91%, HitCoverage=69%, E-value=1e-67, Identity=93%"; Hit description=Thiol- disulphide oxidoreductase DCC
  Pfam annotation: Domain name=DUF393; Domain location=26-137; Score =173.6; E_value=5.6e-49; Accession=PF04134.4; Description=Protein of unknown function, DUF393
FFPYLLRFGSYGTSEFFQPSDTRPIMLFDGVCNLCNGGVRFVREHDHNRSIRYVPLQSESGRKLLQRSGRSPDDISSVVLVEKDRSYIKSEAVLRIMEYLNLPFPQLAIFLKFVPLFLRDFAYDNVANNRYIVFGRSKTEACEIL

SEQ ID NO: 78925 - protein, 150 aa, Setaria italica
  Transcript Sequence Number=SeqID_12951
  Gene Ontology: Mol. function=[ribulose-bisphosphate carboxylase] -lysine N-methyltransferase activity; Cellular component=chloroplast
  Homolog annotation: Hit_ID=B9S910; Match level="QueryCoverage=82%, HitCoverage=24%, E-value=4e-48, Identity=72%"; Hit description =Ribulose-1,5 bisphosphate carboxylase/oxygenase large subunit N -methyltransferase, chloroplast, putative
  Pfam annotation: Domain name=Rubis-subs-bind; Domain location=1-109; Score=65.0; E_value=2.7e-16; Accession=PF09273.3; Description =Rubisco LSMT substrate-binding
FSFNPFFPRFTFKIFSFFTYYLTVYFVIGGTDAFLLEALFRNSVWGHLELPLSPDNEESICQVMRDACKSALDAYHTTIQEDEEQLQTENLPSRLHIAIGVRAGEKKVLQQIDDIFKQREEELDGLEYYQERRLKDLGLVGDNGEIIFWE

SEQ ID NO: 78926 - protein, 268 aa, Setaria italica
  misc_feature (107)..(107): Xaa can be any naturally occurring amino acid
  Transcript Sequence Number=SeqID_12952
TDAYALDDETAEYIEEQAVSDGMNSSPVSSKQSDDPCLITPLTLADEDDTGACKITDSYTPEVEHMTLSETFMDTDLSKVVTESVIDSEDAMPDDKQYYLHLEPTFXQGAVLSSSEIVVQNGQVPLCSSSTVAVTPELTVNTKEKHELHPVVHQEPPNSCNSSTEVFGDPLAPDSRDVPPSIISSFVWMLNGPMQQSLNVLPAQPTYGSAQGNGSSEDAPPLPPLPPMQWRTNKLQMGSSPLSAKIGRPPRPKPPVKHQESEGNSSLD

SEQ ID NO: 78927 - protein, 158 aa, Setaria italica
  Transcript Sequence Number=SeqID_12953
  Gene Ontology: Mol. function=nucleic acid binding; Cellular component= nucleus; Biological process=nuclear mRNA splicing, via spliceosome
  Homolog annotation: Hit_ID=Q6YXY3; Match level="QueryCoverage=98%, HitCoverage=12%, E-value=3e-80, Identity=93%"; Hit description =Putative splicing factor 3b, subunit 3, 130kDa
AVIPRRADLPAERGVLIVAAATHRQKTLFFFLLQTEYGDIFKVDLEHSGDTVTELRIKYFDTVPVTSAICVLRSGFLLFAASEFGNHALYQFRDIGRDADVETSSATLMETEEGFQPVFFQPRALKNLMRIDDIESLMPVMDMRVANLFDEETPQTSP

SEQ ID NO: 78928 - protein, 392 aa, Setaria italica
  Transcript Sequence Number=SeqID_12954
  Gene Ontology: Mol. function=pyridoxal phosphate binding; Cellular component=chloroplast; Biological process=L-serine biosynthetic process
  Homolog annotation: Hit_ID=Q8LMR0; Match level="QueryCoverage=93%, HitCoverage=85%, E-value=0.0, Identity=91%"; Hit description =Phosphoserine aminotransferase
  Pfam annotation: Domain name=Aminotran_5; Domain location=31-380; Score=118.5; E_value=2.2e-32; Accession=PF00266.11; Description =Aminotransferase class-V
  Subcellular localization annotation: CTP_CleavageSite=18; ConfidenceScore=5.06e-01
NLPARAAKISCAAVAAPSASSPVAGAGDRGVYNFAAGPATLPLNVLERAQAELVNYHGSGMSIMEMSHRGKEFDAAIKKAEADLRALLAVPDTHAVLFLQGGATTQFAAVPLNLCAGPTDPADFVVSGSWSDKAFKEAKKFSAASVAWSGKDGKYTALPPFDAIKQNPEARFLHICSNETIHGVEFKDYPVPQNKSGILVADMSSNFCSKPVDVSRFGVIYAGAQKNVGPSGVTIAIVRKDLIGNAQPITPVMLDFKTHADNASLYNTPPCFAIYICGLVFEDLLAQGGLAEVEKKNAHKAGILYDTIDASGGYYICPVEKSVRSLMNVPFTLAKGPDFEKQFIAEAAKEGMVQLKGHRSVGGVRASIYNAMPLAGVEKLVAFMKDFQARNP

SEQ ID NO: 78929 - protein, 280 aa, Setaria italica
  Transcript Sequence Number=SeqID_12955
  Gene Ontology: Mol. function=structural constituent of cell wall
  Homolog annotation: Hit_ID=B6TZH9; Match level="QueryCoverage=88%, HitCoverage=87%, E-value=3e-71, Identity=61%"; Hit description =Proline-rich protein
  Pfam annotation: Domain name=DUF1210; Domain location=33-236; Score =336.3; E_value=6.2e-98; Accession=PF06735.3; Description=Protein of unknown function (DUF1210)
MGALPRGLLIGVCAVLLAAVLAHAAEPEAASMVVGLAKCADCTRKNMKAEAAFNGLKVAVKCKNADGMFETKALGEVDKSGAFSVPLAADLLREDGELKQDCFAQLHSATNQPCPGQEPSWIVRPSRDDDDKKKTFVAVAGKMHYSSKECASAFLCDHFHKKPIMIPHIPKETIVIPHFHNKPVPEYKPPTPVPVYHAPVPEYKPPTPVPEYHSPVPEYKPPTPAHSHPTPIYHPPADQKTQNPETDPEKFKKLLPFIKKNPFFFPKFRKFPPGKVEIKA

SEQ ID NO: 78930 - protein, 115 aa, Setaria italica
  Transcript Sequence Number=SeqID_12956
GFGGDFHVDILPQQQGGSAEQGGDKTATEWVRDTVIVEERSDAEVSEAEPEEAERDRNGNAAAAVASNSDDQPAPAVETKQAQDDAVVTTAAAATTTAQPATEKTATETDRPEEK

SEQ ID NO: 78931 - protein, 90 aa, Setaria italica
  Transcript Sequence Number=SeqID_12957
  Gene Ontology: Mol. function=oxidoreductase activity, acting on the CH-OH group of donors, NAD or NADP as acceptor; Cellular component =endoplasmic reticulum membrane; Biological process=isoprenoid biosynthetic process
  Homolog annotation: Hit_ID=O24594; Match level="QueryCoverage=95%, HitCoverage=14%, E-value=2e-35, Identity=83%"; Hit description=3 -hydroxy-3-methylglutaryl-coenzyme A reductase
QAGDALPLPIRHTNLIFSALFAASLAYLMRRWREKIRNSTPLHAVGLAEMLAIFGLIASLIYLLSFFGIAFVQSIVSSSDEDEDFLGVGY

SEQ ID NO: 78932 - protein, 65 aa, Setaria italica
  Transcript Sequence Number=SeqID_12958
  Gene Ontology: Mol. function=sequence-specific DNA binding; Cellular component=nucleus; Biological process=regulation of transcription, DNA-dependent
  Homolog annotation: Hit_ID=Q1G158; Match level="QueryCoverage=100%, HitCoverage=36%, E-value=4e-22, Identity=76%"; Hit description=MADS -box transcription factor TaAGL12 (Fragment)
  Pfam annotation: Domain name=SRF-TF; Domain location=8-58; Score =86.1; E_value=1.2e-22; Accession=PF00319.10; Description=SRF-type transcription factor (DNA-binding and dimerisation domain)
KRERVELRRIEDRTSRQVRFSKQRNGLFKKAYKLSVLCNAQVALVIFSPAGRLHEFTSADSSIHS

SEQ ID NO: 78933 - protein, 174 aa, Setaria italica
  Transcript Sequence Number=SeqID_12959
  Gene Ontology: Mol. function=sequence-specific DNA binding; Cellular component=nucleus; Biological process=regulation of transcription, DNA-dependent
  Homolog annotation: Hit_ID=Q1G158; Match level="QueryCoverage=89%, HitCoverage=88%, E-value=4e-51, Identity=66%"; Hit description=MADS -box transcription factor TaAGL12 (Fragment)
  Pfam annotation: Domain name=SRF-TF; Domain location=27-77; Score =96.6; E_value=8.8e-26; Accession=PF00319.10; Description=SRF-type transcription factor (DNA-binding and dimerisation domain)
MERRVELDLLQQEKKGTKRKRGRVELRRIEDRTSRQVRFSKRRCGLFKKAYELSVLCDAQVALVVFSPAGRLYKFASADSSIEEIFGRHWDLPTTVNDLNIEAQDSRINNNIQNEQSATGSLPDLLITVGQWAMEANLNELNTDELRGLEEAVIDALAVIRNELMAKVNGLPPN

SEQ ID NO: 78934 - protein, 92 aa, Setaria italica
  Transcript Sequence Number=SeqID_12960
LDDHMILKMKLPCIGCFFFHDQYTSINLYANSLSVLAHAMPLHKCGYKLFSIRIPFGSWELVSEDYTVRMSNLYWVSVNSDSFLACPPTFSE

SEQ ID NO: 78935 - protein, 162 aa, Setaria italica
  Transcript Sequence Number=SeqID_12961
  Gene Ontology: Mol. function=sequence-specific DNA binding; Cellular component=nucleus; Biological process=regulation of transcription, DNA-dependent
  Homolog annotation: Hit_ID=Q1G158; Match level="QueryCoverage=84%, HitCoverage=88%, E-value=3e-40, Identity=55%"; Hit description=MADS -box transcription factor TaAGL12 (Fragment)
  Pfam annotation: Domain name=SRF-TF; Domain location=33-83; Score =91.0; E_value=4.2e-24; Accession=PF00319.10; Description=SRF-type transcription factor (DNA-binding and dimerisation domain)
MEEEVAARRAELELLQPEKASKVKKKRGRVELRRIEDRTSRQVRFSKRRSGLFKKARELAVLCDARVALVVFSPAGRLYKFASADSSIEEIFGRHWDLPTTNEQSATGSLPDLLITVGQWAMEANLNELNTDELRGLEEAVIDALAVIRNELMAKVNGLPPN

SEQ ID NO: 78936 - protein, 338 aa, Setaria italica
  Transcript Sequence Number=SeqID_12962
  Gene Ontology: Mol. function=phosphotransferase activity, alcohol group as acceptor; Cellular component=rough endoplasmic reticulum membrane; Biological process=phosphoinositide-mediated signaling
  Homolog annotation: Hit_ID=B9V0G9; Match level="QueryCoverage=100%, HitCoverage=27%, E-value=0.0, Identity=93%"; Hit description =Phosphatidylinositol kinase
  Pfam annotation: Domain name=PI3_PI4_kinase; Domain location=74-286; Score=142.0; E_value=1.8e-39; Accession=PF00454.19; Description =Phosphatidylinositol 3- and 4-kinase
STIAIEEVKAAALKGEAPPGLPLKGVGQSTQNLDSMATDGGDPKPTDALAGELWAVKKERIRRSSIHGKSPSWDLRSVIVKSGDDCRQEHLAVQLVAHFYDIYQEAGLPLWLRPYEVIVTSAYTALIETIPDTASIHSIKSRFPNISSLRDYYVAKYEENSANFKLAQRNFVESMAGYSILCYLLQVKDRHNGNLLIDEEGHIIHIDFGFMLSNSPGGVNFESAPFKLTRELLEVMDSDAEGTPSEFFDYFKVLCIQGFLTCRKHAERIILLVEMLQDSGFPCFKGGPRTIQNLRKRFHLSLTEEQCVSLVLSLISSSMDAWRTRQYDYYQRVLNGIL

SEQ ID NO: 78937 - protein, 188 aa, Setaria italica
  misc_feature (171)..(171): Xaa can be any naturally occurring amino acid
  Transcript Sequence Number=SeqID_12963
  Gene Ontology: Mol. function=binding; Cellular component=plasma membrane
  Homolog annotation: Hit_ID=B9SKQ6; Match level="QueryCoverage=100%, HitCoverage=25%, E-value=2e-45, Identity=49%"; Hit description =Calmodulin binding protein, putative
PLETVSSYRRALVTNWNLDAKTIAKIQKEFAIFLLYSGCEASPPKLRFQLDGLFVPQNNLEEAILLLLILLMKFNLRRIERDPTVMHHLTFALSMCGQLKPLARQFEALLPGVLENREWSYNVALCYLASDDDLTALDLLRRVLKSGEDSNSLKELLLASKICGESGAHVXEGVLYARRALANQHGGC

SEQ ID NO: 78938 - protein, 433 aa, Setaria italica
  Transcript Sequence Number=SeqID_12964
  Gene Ontology: Mol. function=DNA binding; Biological process =regulation of transcription
  Homolog annotation: Hit_ID=B9SWI3; Match level="QueryCoverage=46%, HitCoverage=43%, E-value=9e-59, Identity=57%"; Hit description =Transcription factor, putative
  Pfam annotation: Domain name=Myb_DNA-binding; Domain location=243 -294; Score=42.0; E_value=2.4e-09; Accession=PF00249.23; Description =Myb-like DNA-binding domain
MMNTKKIKLHDHHFGSPLYDPQMFPATAAAGLSFHPGLVGSLPQQHGGAGGWLQEEYSPTPRTVLATQGSCVGSDPAAFFAAEHLLGMARFDCTLGSTALPAMTATKTAAPFVRSPEAEQLYRPLDPLLLRDGSVRTYYVRPQQRDATEAPPPLKLPLQQQQERGHGLYGNGSTGRLLGGGEPKAPSFSPHATANTLIQAMESPGMQSPIENTLSRSCSIGAPASHTGNVVAAAGHGAPSKTRIRWTQDLHERFVECVNQLGGADKATPKGILKLMNSDGLTIYHIKSHLQKYRIAKYMPASTSSEGKQEKRAAGNDAQNLDPSTGSQITEALRVQVDVQRRLHEQLEIQRNLQMRIEAQGKKLQKMFEEQLKASRTVMEPREELQLQDAGGIGAAAFPGVSEQEGEDAFDDVQLLSVASSGYNDARFPSKIS

SEQ ID NO: 78939 - protein, 69 aa, Setaria italica
  Transcript Sequence Number=SeqID_12965
  Gene Ontology: Mol. function=phosphoglycerate kinase activity; Cellular component=cytoplasm; Biological process=glycolysis
  Homolog annotation: Hit_ID=Q84JX6; Match level="QueryCoverage=81%, HitCoverage=18%, E-value=4e-24, Identity=96%"; Hit description =Phosphoglycerate kinase (Fragment)
FGTAHRAHASTEGVTKFLKPAVAGFLMQKELDYLVGAVANPKKPFAAIVGGSKVSTFPKRDSITPIFVD

SEQ ID NO: 78940 - protein, 143 aa, Setaria italica
  misc_feature (63)..(63): Xaa can be any naturally occurring amino acid
  Transcript Sequence Number=SeqID_12966
  Gene Ontology: Mol. function=phosphoglycerate kinase activity; Cellular component=cytoplasm; Biological process=glycolysis
  Homolog annotation: Hit_ID=P12783; Match level="QueryCoverage=94%, HitCoverage=33%, E-value=7e-63, Identity=90%"; Hit description =Phosphoglycerate kinase, cytosolic
  Pfam annotation: Domain name=PGK; Domain location=1-143; Score=-98.3; E_value=2.6e-14; Accession=PF00162.11; Description=Phosphoglycerate kinase
KLAASLPDGGVLLLENVRFYKEEEKNDPEFAKKLASVADLYVNDAFGTAHRAHASTEGVTKFXLKPAVAGFLMQKELDYLVGAVANPKKPFAAIVGGSKVSTKIGVIESLLGKVDILILGGGMIFTFSYSVSLSLVNVKILLP

SEQ ID NO: 78941 - protein, 180 aa, Setaria italica
  Transcript Sequence Number=SeqID_12967
  Gene Ontology: Mol. function=phosphoglycerate kinase activity; Cellular component=cytoplasm; Biological process=glycolysis
  Homolog annotation: Hit_ID=P12783; Match level="QueryCoverage=75%, HitCoverage=33%, E-value=2e-64, Identity=88%"; Hit description =Phosphoglycerate kinase, cytosolic
  Pfam annotation: Domain name=PGK; Domain location=1-180; Score=-60.1; E_value=8e-17; Accession=PF00162.11; Description=Phosphoglycerate kinase
MFSKKHDLCLSFSDVICCCYFQGRPKGVTPKYSLKPLVPRLSELLGVDVVMANDCIGEEVEKLAAALPEGGVLLLENVRFYKEEEKNDPEFAKKLASAADLYVNDAFGTAHRAHASTEGVTKFLKPAVAGFLMQKELDYLVGAVANPKKPFAFAFSISEVASSSLSSSTRDFPTAYPCAL

SEQ ID NO: 78942 - protein, 448 aa, Setaria italica
  Transcript Sequence Number=SeqID_12968
  Gene Ontology: Mol. function=phosphoglycerate kinase activity; Cellular component=cytoplasm; Biological process=glycolysis
  Homolog annotation: Hit_ID=P12783; Match level="QueryCoverage=79%, HitCoverage=88%, E-value=0.0, Identity=90%"; Hit description =Phosphoglycerate kinase, cytosolic
  Pfam annotation: Domain name=PGK; Domain location=3-374; Score=668.6; E_value=5.7e-198; Accession=PF00162.11; Description=Phosphoglycerate kinase
MATKRSVGTLGEADLRGKKVFVRADLNVPLDDAQKITDDTRIRASVPTVKFLLEKGAKVILASHLGRPKGVTPKYSLKPLVPRLSELLGVDVVMANDCIGEEVEKLAAALPEGGVLLLENVRFYKEEEKNDPEFAKKLASAADLYVNDAFGTAHRAHASTEGVTKFLKPAVAGFLMQKELDYLVGAVANPKKPFAAIVGGSKVSTKIGVIESLLAKVDILILGGGMIYTFYKAQGYAVGKSLVEEDKLELATSLIEKAKAKGVSLLLPTDIVVADKFAPDAESKIVPATAIPDDWMGLDVGPDATKTFNDALDKTQTIIWNGPMGVFEFEKFAAGTEAIAKKLAELTTTKGVTTIIGPFQIIVWVLSNASLKVLVASGPTSRPIQSSGIAVAGTILLSASGANLSATTISVGSRRETPFCPFAFSISEVASSSFASSTRDFSKQHIPC

SEQ ID NO: 78943 - protein, 109 aa, Setaria italica
  Transcript Sequence Number=SeqID_12969
  Pfam annotation: Domain name=DUF584; Domain location=4-109; Score= -7.3; E_value=1.5e-06; Accession=PF04520.5; Description=Protein of unknown function, DUF584
RPIPASRAARKKPADGAPGSLPMNIPDWQKILGVEYRDHHAGEWELDGEDDGGYGRVGSGGSEMVPPHELAWRSRAASLSVHEGIGRTLKGRDLSRVRDAVWKRTGFED

SEQ ID NO: 78944 - protein, 428 aa, Setaria italica
  Transcript Sequence Number=SeqID_12970
  Gene Ontology: Mol. function=nucleic acid binding; Cellular component= contractile ring; Biological process=protein amino acid autophosphorylation
  Homolog annotation: Hit_ID=B4FBS8; Match level="QueryCoverage=100%, HitCoverage=100%, E-value=0.0, Identity=84%"; Hit description =Nucleic acid binding protein
  Pfam annotation: Domain name=WD40; Domain location=135-173; Score =35.3; E_value=2.4e-07; Accession=PF00400.24; Description=WD domain, G-beta repeat
  Pfam annotation: Domain name=WD40; Domain location=214-250; Score =11.6; E_value=1.7; Accession=PF00400.24; Description=WD domain, G -beta repeat
  Pfam annotation: Domain name=WD40; Domain location=258-294; Score =27.2; E_value=6.8e-05; Accession=PF00400.24; Description=WD domain, G-beta repeat
  Pfam annotation: Domain name=WD40; Domain location=298-334; Score =30.1; E_value=9e-06; Accession=PF00400.24; Description=WD domain, G -beta repeat
  Pfam annotation: Domain name=WD40; Domain location=338-381; Score =7.7; E_value=4.9; Accession=PF00400.24; Description=WD domain, G -beta repeat
  Pfam annotation: Domain name=zf-CCCH; Domain location=103-129; Score =24.9; E_value=0.00032; Accession=PF00642.16; Description=Zinc finger C-x8-C-x5-C-x3-H type (and similar)
  Pfam annotation: Domain name=zf-CCCH; Domain location=29-53; Score =4.5; E_value=0.39; Accession=PF00642.16; Description=Zinc finger C -x8-C-x5-C-x3-H type (and similar)
  Pfam module annotation: Pfam domain module=WD40::WD40::WD40::WD40::WD4 0::zf-CCCH::zf-CCCH; Domain location=135-173::214-250::258-294::298 -334::338-381::103-129::29-53
MDVETDGRFGNKRVHNRLGPGSGGGPSSTTGKVCNYWRAGRCNRFPCPYLHSELPEAAAPPKRPSGPGGNVWRNPNSGGRGGGGHNRWGRGPGGGSGTAAHRPPDRPCKYFLAGTDCSYGERCRYPHSYCISDSITMLTLLKGHEKGVTGIALPTGSDKLYSGSKDGTVRMWDCQTGQCAGVSPMGREVGCMISEGPWLFVGIPDAVKVWNTQTSAVMDLTGPTGQVYALAVASELLFAATQDGRILAWRFSAATNRFEPAASLDGHKLAVVSLIVGGMRLYSASMDKTIRVWDLATLQCIQTLSDHTDVVMSVLCWDQFLLSCSLDQTIKVWAATETGNLEVTYTHKEEQGALALSGMPDAQSKPVLLCSLNDNTVRLYDLPSFSDRGRIFSKQEIRAIQMGPAGLFFTGDGTGELKVWQWVDRAQT

SEQ ID NO: 78945 - protein, 78 aa, Setaria italica
  Transcript Sequence Number=SeqID_12971
  Gene Ontology: Mol. function=transcription factor activity; Cellular component=nucleus; Biological process=regulation of transcription, DNA-dependent
  Homolog annotation: Hit_ID=Q2QM94; Match level="QueryCoverage=70%, HitCoverage=25%, E-value=8e-25, Identity=96%"; Hit description=CCAAT- box transcription factor complex WHAP5, putative, expressed
  Pfam annotation: Domain name=CBFB_NFYA; Domain location=21-61; Score =40.9; E_value=5e-09; Accession=PF02045.7; Description=CCAAT-binding transcription factor (CBF-BNF-YA) subunit B
MHPPLVGMHPTGLPLPTDAIEEPVYVNAKQYNAILRRRQSRAKAESERKLVKGRKVNLCNYLLQCDMNWILLISFFCP

SEQ ID NO: 78946 - protein, 213 aa, Setaria italica
  Transcript Sequence Number=SeqID_12972
  Gene Ontology: Mol. function=transcription factor activity; Cellular component=nucleus; Biological process=regulation of transcription, DNA-dependent
  Homolog annotation: Hit_ID=B6TY54; Match level="QueryCoverage=97%, HitCoverage=98%, E-value=5e-86, Identity=77%"; Hit description =Nuclear transcription factor Y subunit A-7
  Pfam annotation: Domain name=CBFB_NFYA; Domain location=107-163; Score=139.0; E_value=1.5e-38; Accession=PF02045.7; Description=CCAAT- binding transcription factor (CBF-BNF-YA) subunit B
MTSVVHSVSGDHRAEDQHQQQKQAEPEDQQEAPVTSSDSQPTVGTPSDYVAPYAPHDMGHAMGQYAYPNIDPYYGSLYAAYGGQPMMHPPLVGMHPTGLPLPTDAIEEPVYVNAKQYNAILRRRQSRAKAESERKLVKGRKPYLHESRHQHALKRARGAGGRFLNSKSDEKEENSDSSHKEKQNGVVPHKSGQPSTPPSPNGASSANRADSHE

SEQ ID NO: 78947 - protein, 151 aa, Setaria italica
  Transcript Sequence Number=SeqID_12973
  Gene Ontology: Mol. function=catalytic activity; Biological process =biosynthetic process
  Homolog annotation: Hit_ID=B6U0C2; Match level="QueryCoverage=100%, HitCoverage=51%, E-value=6e-72, Identity=84%"; Hit description =Phenazine biosynthesis protein
  Pfam annotation: Domain name=PhzC-PhzF; Domain location=2-147; Score=- 5.5; E_value=1.1e-07; Accession=PF02567.8; Description=Phenazine biosynthesis-like protein
LVDCHPAELPSIPQTLNGASVVSVQKSATAGDLIVELSSGKEVADIIPNIHEIKNCSGRGVVFTGPAPEGSGYDFFTRFFCPKLNIDEDPVCGSAHCVLAPFWGAKLGKQKLTAFQASRRSGILHLELEPAGRRVRIQGEAVAVMTGTLLA

SEQ ID NO: 78948 - protein, 97 aa, Setaria italica
  misc_feature (58)..(58): Xaa can be any naturally occurring amino acid
  Transcript Sequence Number=SeqID_12974
  Gene Ontology: Mol. function=phosphatidylinositol binding; Cellular component=clathrin coat; Biological process=clathrin coat assembly
  Homolog annotation: Hit_ID=B9T128; Match level="QueryCoverage=59%, HitCoverage=12%, E-value=4e-17, Identity=67%"; Hit description =Clathrin assembly protein, putative
AHQYQFLFWVAQAERLSEFYEVCKTIHIGRGEKFLKIEQPPASFLQTMEEYVRDAPTXDKEKAVLAIEYKKEPEEEEKPASPPPAPEPEAEQVTRVR

SEQ ID NO: 78949 - protein, 540 aa, Setaria italica
  Transcript Sequence Number=SeqID_12975
  Gene Ontology: Mol. function=phosphatidylinositol binding; Cellular component=clathrin coat; Biological process=clathrin coat assembly
  Homolog annotation: Hit_ID=B9T128; Match level="QueryCoverage=88%, HitCoverage=86%, E-value=1e-164, Identity=62%"; Hit description =Clathrin assembly protein, putative
  Pfam annotation: Domain name=ANTH; Domain location=32-302; Score =388.5; E_value=1.1e-113; Accession=PF07651.8; Description=ANTH domain
  Pfam annotation: Domain name=ENTH; Domain location=32-161; Score= -7.2; E_value=0.00013; Accession=PF01417.12; Description=ENTH domain
  Pfam module annotation: Pfam domain module=ANTH::ENTH; Domain location=32-302::32-161
MAVGGTQPTLRKYLGALKDTTTVSLAKVNSDYKDLDIAIVKATNHVERPSKEKYIREIFLSISAARPRADVAYCIHALARRLSKTRNWAVALKTLIVIHRALREVDPTFREELINYGRSRSHMLNMAYFKDDSSAEAWDYSAWVRIYALYLEERLECFRVLKYDVETDPPRTRDLDTVALLDHLPPLQQLLFRLLACQPQGASSYNIIIQHALSMVALESVKIYTAISDGTINLVDKFFEMQRNDAIRALDIYKRATNQAERLSEFYEVCKTIHIGRGEKFLKIEQPPASFLQTMEEYVRDAPTMTKEKAVLAIEYKKEPEEEEKPASPPPAPEPEAEQEPEPEPEPVIEEPPAPEPDLLGLNEPSPAATAIEEQNALALAIVPIDDVPKAAPTFENGVTGWELALVTAPSSNETAVASSKKLAGGLDLLTLDSLYDDANRRASQPAASYNPWDATPAAPAPMLQTMAPAMQDPFYASSGYAAPHAVQMAAMAQQQQAFLLQQQMMTMAVAPPPAAAAVHHHPMPMQQNPANPFGNPFAP

SEQ ID NO: 78950 - protein, 145 aa, Setaria italica
  Transcript Sequence Number=SeqID_12976
  Gene Ontology: Cellular component=chloroplast
  Homolog annotation: Hit_ID=B6SKI6; Match level="QueryCoverage=100%, HitCoverage=81%, E-value=2e-40, Identity=36%"; Hit description=ATP binding protein
  Pfam annotation: Domain name=PPR; Domain location=25-59; Score=39.3; E_value=1.6e-08; Accession=PF01535.12; Description=PPR repeat
  Pfam annotation: Domain name=PPR; Domain location=60-94; Score=40.9; E_value=5.1e-09; Accession=PF01535.12; Description=PPR repeat
  Pfam annotation: Domain name=PPR; Domain location=95-129; Score=38.1; E_value=3.5e-08; Accession=PF01535.12; Description=PPR repeat
  Pfam module annotation: Pfam domain module=PPR::PPR::PPR; Domain location=25-59::60-94::95-129
SAERWEHAEELLAEMVRSGCPPDEVTFNTIIASLCQKGLVNRAIKVVEQMLEHRYIPDIITYNCIIDGLCNIKCIDDAMEMLRNLQSCGCKPDLVTYNTVLKGLCSVDRWEDAEQLMVNMMHSNCSPDEMTFNTVITSLCQKGFL

SEQ ID NO: 78951 - protein, 141 aa, Setaria italica
  misc_feature (27)..(27): Xaa can be any naturally occurring amino acid
  Transcript Sequence Number=SeqID_12977
  Subcellular localization annotation: CTP_CleavageSite=63; ConfidenceScore=5.17e-01
PAHTSDEYGDAPYPPAESPSPSESSSXFSNSDAGSHSTVSTDSSDSTRNSTSTEEYEYLFGASDQMYPGAPVENEYPTYSRSRSSLNTSSSGGVADDAERFAEHKPQGGGAGGGWVVGDESPSLLYTDRSKHQVRRLVKFN

SEQ ID NO: 78952 - protein, 894 aa, Setaria italica
  misc_feature (196)..(196): Xaa can be any naturally occurring amino acid
  misc_feature (395)..(395): Xaa can be any naturally occurring amino acid
  Transcript Sequence Number=SeqID_12978
  Gene Ontology: Mol. function=ubiquitin thiolesterase activity; Cellular component=integral to membrane; Biological process =ubiquitin-dependent protein catabolic process
  Homolog annotation: Hit_ID=B9SXH5; Match level="QueryCoverage=76%, HitCoverage=78%, E-value=1e-121, Identity=41%"; Hit description =Cysteine-type endopeptidase, putative
  Pfam annotation: Domain name=DUF2256; Domain location=5-43; Score =6.0; E_value=0.087; Accession=PF10013.1; Description=Uncharacterized protein conserved in ba
  Pfam annotation: Domain name=UCH; Domain location=357-664; Score =201.7; E_value=2e-57; Accession=PF00443.21; Description=Ubiquitin carboxyl-terminal hydrolase
  Pfam annotation: Domain name=zf-MYND; Domain location=15-52; Score =49.1; E_value=1.7e-11; Accession=PF01753.10; Description=MYND finger
  Pfam module annotation: Pfam domain module=DUF2256::UCH::zf-MYND; Domain location=5-43::357-664::15-52
VEAQPQPPAGAKGVCAVCFRPTTFRCKQCKAVKYCSFKCQIAHWRQGHKDECHPPSVNTRPDDEGRVEQERAAEENVSVGVKPIAETNKPVTIGDETSDENHSLKSSIGEGKHMPLEDLCTSTEVPGGHKSNGTVEIPQNVPVSVDGSKMASNTEHATFVEDGSSSKDLNEVLPCNSQATDPKTSGRSSSFNGESXINSKEHHKAQDASIIEDCSQTSHNRELEDSGNPRAAASVVLETKSSRNPIRVELERSKTKSVGNDNVQSTKPVLTASTAEKATSIRGGCSVIPIPSKVSDNCSDRSSKPSERSGSTANNLATSLKKIVRQQTASKVVRHYPSELTLFPYELFVKLYDKVELHPFGLHNLGNSCYANAVLQCLMFTRPLTTYLLGGLHSXKNCSKREWCFMCEFEKLIVEGKRRKTALSPTGILSHLHDIGSSFGPGKQEDAHEFLRYAIDAMQSVCMKEARKGGALRSAEETTLVQLIFGGYLRSKIKCSRCHISSEQCERMLDLTVEIDGDISSLDEALVRFTSTEVLDGENRYHCSRCKSYERAKKKLTIEEAPNVLTIALKRYQSGKFGKINKAIRFPETLNMVRYMNPETDDRSPVYSLYAVVVHHDVMNAAFSGHYVCYVKDTQGKWFKADDSQVKPVSLDNVMSKCAYMLLYARCSPRAPSSVRKVMVQDPARPKKAKQKVVPGGTPFGGSFSRHQGGHLHADYMADDLAHTSDEYGDAPYPPAESPSPSESSSLFSNSDAGSHSTVSTDSSDSTRNSTSTEEYEYLFGASDQMYPGAPVENEYPTYSRSRSSLNTSSSGGVADDAERFAEHKPQGGGAGGGWVVGDESPSLLYTDRSKHQSSSKLTDQYRQLDRSGHDPGETRGGVLLRRSARDRTAQTFY

SEQ ID NO: 78953 - protein, 91 aa, Setaria italica
  Transcript Sequence Number=SeqID_12979
  Gene Ontology: Mol. function=endonuclease activity; Cellular component=nucleus; Biological process=tRNA processing
  Homolog annotation: Hit_ID=B6U9N4; Match level="QueryCoverage=69%, HitCoverage=20%, E-value=7e-28, Identity=88%"; Hit description =Nuclear ribonuclease Z
MAKVSESAAEAASTAAAPPLTSASAPPSRPKAKHRLEIEGYPVEGLSIGGQETCVIFPTLSLAFDIGRCPQRAISQEFLFISHGHLDHSRG

SEQ ID NO: 78954 - protein, 37 aa, Setaria italica
  Transcript Sequence Number=SeqID_12980
PPDTKAIRDICILPGGCAVFASLGRKLSLFRSVKNVC

SEQ ID NO: 78955 - protein, 77 aa, Setaria italica
  Transcript Sequence Number=SeqID_12981
  Gene Ontology: Mol. function=metal ion binding
  Homolog annotation: Hit_ID=B6UFQ4; Match level="QueryCoverage=97%, HitCoverage=13%, E-value=1e-27, Identity=78%"; Hit description =Transposon protein
TSGRGPGVGAEHILTKINMFARQRMQKIHLPPDTKAIRDICILPGGCAVFASLGRKLSLFSVATNNVVLQYDLPVIL

SEQ ID NO: 78956 - protein, 43 aa, Setaria italica
  Transcript Sequence Number=SeqID_12982
  Gene Ontology: Mol. function=hydroxymethyl-, formyl- and related transferase activity; Biological process='de novo' IMP biosynthetic process
  Homolog annotation: Hit_ID=Q10T40; Match level="QueryCoverage=93%, HitCoverage=17%, E-value=4e-10, Identity=80%"; Hit description=(RAP Annotation release2) Formyltetrahydrofolate deformylase family protein
AFNAGVKLIGATSHFVTPELDAGPIIEQMVFVLSTQQLTQVSD

SEQ ID NO: 78957 - protein, 57 aa, Setaria italica
  Transcript Sequence Number=SeqID_12983
  Gene Ontology: Mol. function=hydroxymethyl-, formyl- and related transferase activity; Biological process='de novo' IMP biosynthetic process
  Homolog annotation: Hit_ID=Q10T42; Match level="QueryCoverage=92%, HitCoverage=17%, E-value=1e-21, Identity=92%"; Hit description=(RAP Annotation release2) Formyltetrahydrofolate deformylase family protein
MLSLARRPVSAAVPAGNLLGIHLFQCPDTVGIVAKLSECIASRGGNIHSVDVFARRQ

SEQ ID NO: 78958 - protein, 186 aa, Setaria italica
  Transcript Sequence Number=SeqID_12984
  Gene Ontology: Mol. function=hydroxymethyl-, formyl- and related transferase activity; Biological process='de novo' IMP biosynthetic process
  Homolog annotation: Hit_ID=Q10T42; Match level="QueryCoverage=94%, HitCoverage=57%, E-value=4e-72, Identity=77%"; Hit description=(RAP Annotation release2) Formyltetrahydrofolate deformylase family protein
  Pfam annotation: Domain name=ACT; Domain location=28-95; Score=17.8; E_value=0.044; Accession=PF01842.17; Description=ACT domain
MPRPFGDRQMMSLARRPLSAAAGNLLGIHLFQCPDAVGIVAKVSECIASRGGNIHRVDVFVPDDKPVFYSRSEFTYNPRLWPRDDLRKDFLNLSHCFGAQRSTVRVPDLDPKYKISVLASKQDHCLFDLLYRWQEGRLPVDISCVISNHDRPEDNHVQRFLRRHGIPYHYLTEPTIWETKREDKEE

SEQ ID NO: 78959 - protein, 382 aa, Setaria italica
  Transcript Sequence Number=SeqID_12985
  Gene Ontology: Mol. function=hydroxymethyl-, formyl- and related transferase activity; Biological process='de novo' IMP biosynthetic process
  Homolog annotation: Hit_ID=Q10T42; Match level="QueryCoverage=78%, HitCoverage=100%, E-value=1e-153, Identity=87%"; Hit description =(RAP Annotation release2) Formyltetrahydrofolate deformylase family protein
  Pfam annotation: Domain name=Formyl_trans_N; Domain location=185-363; Score=112.8; E_value=1.1e-30; Accession=PF00551.11; Description =Formyl transferase
MAGTWNLEPWRKISRSWMPSLSPRSVQCRREAPTDTAPPTAARDSVTRWNQAHLLAAADGHPIPSHPSARQGRIGRSIDRQMMSLARRPLSAAAGNLLGIHLFQCPDAVGIVAKVSECIASRGGNIHRVDVFVPDDKPVFYSRSEFTYNPRLWPRDDLRKDFLNLSCCFGAQRSTVRVPDLDPKYKIAVLASKQDHCLFDLLHRWQEGRLPVDINCVISNHDRPQDNHVRRFLQRHAIPYYYLPTTPGNKREQEILELIQGTDFVVLARYMQIMSESFLKAYGKDIINIHHGLLPSFKGGHPSRQAFNAGVKLIGATSHFVTPELDAGPIIEQMVERVSHRDTLQSFVVKSENLEKQCLAEAIKSYCELRVLPYELKKTVVF

SEQ ID NO: 78960 - protein, 88 aa, Setaria italica
  Transcript Sequence Number=SeqID_12986
VLEPRSSRLTAELAGAGPAWQRGDGAHRRHARCRCSGSPPLPLLSRSPLSCAAYSAAGPAGGGGIEDSPLSRRSFLARFPSVARSPLP

SEQ ID NO: 78961 - protein, 82 aa, Setaria italica
  misc_feature (72)..(72): Xaa can be any naturally occurring amino acid
  Transcript Sequence Number=SeqID_12987
  Gene Ontology: Mol. function=methyltransferase activity
  Homolog annotation: Hit_ID=B9S456; Match level="QueryCoverage=95%, HitCoverage=12%, E-value=4e-23, Identity=62%"; Hit description=ATP binding protein, putative
ASNKEAFEADTEYWKQVVSEVYFSDFPLNWSSIRNIMDMNAGFGGFAAALIDQPLWVMNIVPIDQPDTLPVXFNRGLIGAYH

SEQ ID NO: 78962 - protein, 526 aa, Setaria italica
  Transcript Sequence Number=SeqID_12988
  Homolog annotation: Hit_ID=B9S456; Match level="QueryCoverage=98%, HitCoverage=85%, E-value=0.0, Identity=62%"; Hit description=ATP binding protein, putative
  Pfam annotation: Domain name=DUF248; Domain location=18-513; Score =968.1; E_value=3.9e-288; Accession=PF03141.8; Description=Putative methyltransferase
  Pfam annotation: Domain name=Methyltransf_11; Domain location=137 -232; Score=51.6; E_value=3.1e-12; Accession=PF08241.4; Description =Methyltransferase domain
  Pfam annotation: Domain name=Methyltransf_11; Domain location=385 -480; Score=1.1; E_value=0.074; Accession=PF08241.4; Description =Methyltransferase domain
  Pfam annotation: Domain name=Methyltransf_12; Domain location=137 -230; Score=7.2; E_value=0.095; Accession=PF08242.4; Description =Methyltransferase domain
  Pfam module annotation: Pfam domain module=DUF248::Methyltransf _11::Methyltransf_11::Methyltransf_12; Domain location=18-513::137 -232::385-480::137-230
ELLSWELCEVGKGVVAADYIPCLDNVKAIKALKSLRHMEHRERHCPEPRPRCLVPLPDRYRRPVPWPLSRDMIWYNNVPHPKLVEYKKDQNWVRKSGNYLVFPGGGTQFKDGVGRYIQFIEQTMPAIHWGTHTRTVLDVGCGVASFGGYLLDRNVITMSFAPKDEHEAQIQFALERGIPAFLAVIGTQKLPFPDNAFDVVHCARCRVHWYANGGKPLLELNRVLRPGGYFIWSATPVYRQEKRDQDDWNAMVTLTKSICWRTVVKSQVLNGIAVVIYQKPTSNSCYAERKSNEPPLCSKTDGSRFPWYAPLDSCIFTTSASSLDERTNWPVPWPERLNVRYASVPGDSASNKEAFEADTEYWKQVVSEVYFSDFPLNWSSIRNIMDMNAGFGGFAAALIDQPLWVMNIVPIDQPDTLPVIFNRGLIGAYHDWCESFNAYPRTYDLLHMSNLVASLTNRCDIIEVAAEIDRILRPGRWFVLKDTIEMIKRTRPVLKSLHYETVVVKQQFLVAKKSFWRPGKPASRSG

SEQ ID NO: 78963 - protein, 85 aa, Setaria italica
  Transcript Sequence Number=SeqID_12989
  Gene Ontology: Cellular component=mitochondrial matrix
  Homolog annotation: Hit_ID=Q2RAS2; Match level="QueryCoverage=85%, HitCoverage=35%, E-value=7e-13, Identity=63%"; Hit description =Mitochondrial glycoprotein, expressed
TSLHSPSSDVPAAAENLRRGANDGGVLAAIRAELSHELASSAPSAPPSIHSQDAPDFVAVPDAPRVQDVLLHRRDDSEEVLVSAL

SEQ ID NO: 78964 - protein, 48 aa, Setaria italica
  Transcript Sequence Number=SeqID_12990
  Gene Ontology: Mol. function=protein serine/threonine kinase activity; Biological process=protein amino acid phosphorylation
  Homolog annotation: Hit_ID=Q6X4A2; Match level="QueryCoverage=100%, HitCoverage=10%, E-value=1e-19, Identity=93%"; Hit description=CBL -interacting protein kinase 31
VFQIAPSLHVVELKIAKGDTLEFQKFYRSLSTQLKDVVWKCDGEVEGN

SEQ ID NO: 78965 - protein, 72 aa, Setaria italica
  Transcript Sequence Number=SeqID_12991
  Gene Ontology: Mol. function=protein serine/threonine kinase activity; Biological process=protein amino acid phosphorylation
  Homolog annotation: Hit_ID=Q6X4A2; Match level="QueryCoverage=52%, HitCoverage=8%, E-value=3e-14, Identity=92%"; Hit description=CBL -interacting protein kinase 31
TVLFTESCHQYSIAEKYFLNLNLRAFLLFLDFYQRITIAQILEDPWFKKGYKPPVFDEKYQTSLDDVDAAFG

SEQ ID NO: 78966 - protein, 54 aa, Setaria italica
  Transcript Sequence Number=SeqID_12992
QTKVPLNLQAILQTPSSAGRRLIDRREEVSRSEGEARASTRLRAKMLCWKSQSI

SEQ ID NO: 78967 - protein, 41 aa, Setaria italica
  Transcript Sequence Number=SeqID_12993
  Gene Ontology: Mol. function=protein serine/threonine kinase activity; Cellular component=plasma membrane; Biological process =protein amino acid phosphorylation
  Homolog annotation: Hit_ID=Q10M84; Match level="QueryCoverage=100%, HitCoverage=10%, E-value=3e-13, Identity=87%"; Hit description=CIPK -like protein 1, putative, expressed
ERHTGGELFETIATNGRLKEDEACKYFQQLINAVDYCHSRG

SEQ ID NO: 78968 - protein, 97 aa, Setaria italica
  Transcript Sequence Number=SeqID_12994
  Gene Ontology: Mol. function=protein kinase activity; Cellular component=chloroplast envelope; Biological process=protein amino acid phosphorylation
  Homolog annotation: Hit_ID=B6SVY7; Match level="QueryCoverage=71%, HitCoverage=9%, E-value=8e-37, Identity=100%"; Hit description =ATATH13
MDRRGTREGEGGGDRKGLGRYAVESYLEQILSHGFFHADPHPGNIAVDDVNGGRLIFYDFGMMGSISQNIREGLLEVFYGVYEKDPDKVCFSGHNSL

SEQ ID NO: 78969 - protein, 146 aa, Setaria italica
  misc_feature (54)..(54): Xaa can be any naturally occurring amino acid
  Transcript Sequence Number=SeqID_12995
  Gene Ontology: Mol. function=glucose-1-phosphate adenylyltransferase activity; Cellular component=chloroplast; Biological process =glycogen biosynthetic process
  Homolog annotation: Hit_ID=A5GZ73; Match level="QueryCoverage=90%, HitCoverage=25%, E-value=3e-69, Identity=94%"; Hit description =Glucose-1-phosphate adenylyltransferase
MYCIRQLRFICFLQQVDTTVLGLSKEEAEQKPYIASMGVYIFKKDILLNLLRSXWRFPTANDFGSEIIPASAKEINVKAYLFNDYWEDIGTIKSFFEANLALTEQPPKFSFYDADKPMYTSRRNLPPSMVNNSKITDSIISHGCFL

SEQ ID NO: 78970 - protein, 117 aa, Setaria italica
  Transcript Sequence Number=SeqID_12996
  Gene Ontology: Mol. function=protein serine/threonine kinase activity; Cellular component=plasma membrane; Biological process =protein amino acid phosphorylation
  Homolog annotation: Hit_ID=Q6X4A2; Match level="QueryCoverage=100%, HitCoverage=25%, E-value=5e-54, Identity=89%"; Hit description=CBL -interacting protein kinase 31
  Pfam annotation: Domain name=NAF; Domain location=1-42; Score=29.1; E_ value=7.2e-06; Accession=PF03822.6; Description=NAF domain
NLFEAKKEYKRETRFTSQFPPKEIITKIEEVLSKPLGFDIQKKKYKMRMENPKAGRKGNLNVATEVFQIAPSLHVVELKIAKGDTLEFQKFYRSLSTQLKDVVWKCDGEVEGNSTLA

SEQ ID NO: 78971 - protein, 160 aa, Setaria italica
  Transcript Sequence Number=SeqID_12997
  Gene Ontology: Mol. function=protein serine/threonine kinase activity; Cellular component=plasma membrane; Biological process =protein amino acid phosphorylation
  Homolog annotation: Hit_ID=Q6X4A2; Match level="QueryCoverage=99%, HitCoverage=35%, E-value=3e-83, Identity=94%"; Hit description=CBL -interacting protein kinase 31
  Pfam annotation: Domain name=Pkinase; Domain location=20-160; Score =19.6; E_value=1.2e-09; Accession=PF00069.17; Description=Protein kinase domain
  Pfam annotation: Domain name=Pkinase_Tyr; Domain location=20-160; Score=-119.1; E_value=8.2e-06; Accession=PF07714.9; Description =Protein tyrosine kinase
  Pfam module annotation: Pfam domain module=Pkinase::Pkinase_Tyr; Domain location=20-160::20-160
MYRAKRAALSPKVKRRVGKYELGRTIGEGTFAKVRFAKNTENGEPVAIKILDKEKVQRHRLVEQIKREICTMKLVKHPNVVRLLEVMGSKARIFIVLEYVTGGELFETIATNGRLKEDEACKYFQQLINAVDYCHSRGVYHRDLKLENLLLDAAGNLKVI

SEQ ID NO: 78972 - protein, 392 aa, Setaria italica
  misc_feature (126)..(126): Xaa can be any naturally occurring amino acid
  Transcript Sequence Number=SeqID_12998
  Gene Ontology: Mol. function=protein serine/threonine kinase activity; Cellular component=plasma membrane; Biological process =protein amino acid phosphorylation
  Homolog annotation: Hit_ID=Q6X4A2; Match level="QueryCoverage=98%, HitCoverage=85%, E-value=0.0, Identity=92%"; Hit description=CBL -interacting protein kinase 31
  Pfam annotation: Domain name=NAF; Domain location=257-317; Score =118.5; E_value=2.2e-32; Accession=PF03822.6; Description=NAF domain
  Pfam annotation: Domain name=Pkinase; Domain location=2-218; Score =224.9; E_value=2e-64; Accession=PF00069.17; Description=Protein kinase domain
  Pfam annotation: Domain name=Pkinase_Tyr; Domain location=2-216; Score=-41.7; E_value=6e-11; Accession=PF07714.9; Description=Protein tyrosine kinase
  Pfam module annotation: Pfam domain module=NAF::Pkinase::Pkinase_Tyr; Domain location=257-317::2-218::2-216
SHTTNSIKREICTMKLVKHPNVVRLLEVMGSKARIFIVLEYVTGGELFETIATNGRLKEDEACKYFQQLINAVDYCHSRGVYHRDLKLENLLLDAAGNLKVSDFGLSALTEQVKADGLLHTTCGTXPNYVAPEVIEDGGYDGATADIWSCGVILFVLLAGYLPFEDENIIALYKKISKAQFTCPSWFSAGAKNLITRILDPNPTTRITIAQILEDPWFKKGYKPPVFDEKYQTSLDDVDAAFGDSEDRHVKEETEDQPATMNAFELISLNQALNLENLFEAKKEYKRETRFTSQFPPKEIITKIEEAAKPLGFDIQKKKYKMRMENPKAGRKGNLNVATEVFQIAPSLHVVELKIAKGDTLEFQKFYRSLSTQLKDVVWKCDGEVEGNSTLA

SEQ ID NO: 78973 - protein, 762 aa, Setaria italica
  misc_feature (62)..(62): Xaa can be any naturally occurring amino acid
  Transcript Sequence Number=SeqID_12999
  Gene Ontology: Mol. function=protein kinase activity; Cellular component=chloroplast envelope; Biological process=protein amino acid phosphorylation
  Homolog annotation: Hit_ID=B6SVY7; Match level="QueryCoverage=94%, HitCoverage=94%, E-value=0.0, Identity=89%"; Hit description=ATATH13
  Pfam annotation: Domain name=ABC1; Domain location=279-399; Score =173.6; E_value=5.5e-49; Accession=PF03109.8; Description=ABC1 family
  Pfam annotation: Domain name=APH; Domain location=293-515; Score= -14.7; E_value=0.025; Accession=PF01636.15; Description =Phosphotransferase enzyme family
  Pfam module annotation: Pfam domain module=ABC1::APH; Domain location= 279-399::293-515
  Subcellular localization annotation: CTP_CleavageSite=49; ConfidenceScore=5.57e-01
MSVASAAASLVASTSLSVPDHLRLRRFRLHPRPPPPPLPCFRRRSRGCVARAVLEDRAPPPXAEEDAKRYGLNGNGSGVGYDDAAVQAYLGSNGNGNGSASASGSGNGAAVKQKQPEESTPISAAVVPVPPGDDERRRKERVEEIGKEDAWFKQSSGDLPEVSVAPGGRWNRFKTYSTIQRTLEIWGFVFTFIFKAWLNNQKFTYKGGMTEEKKIMRRKVLAKWLKESILRLGPTFIKIGQQFSTRVDILPQEYVDQLSELQDQVPPFPSETAVKIVEEELGSSVNQIFDRFDFEPIAAASLGQVHRARLNGQEIVIKVQRPGLKELFDIDLKNLRVIAEYLQKVDPKSDGAKRDWVAIYDECASVLYQEIDYTKEAFNAEKFAENFKKLDYVKVPEIYWEYTTPQVLTMEYVPGIKINRIKQLDKLGVDRKRLGRYAVESYLEQILSHGFFHADPHPGNIAVDDVNGGRLIFYDFGMMGSISQNIREGLLEVFYGVYEKDPDKVLQAMVQMGVLVPTGDMTAVRRTAQFFLNSFQERLAAQRKEREMTTAELGFKKQLTKEEKFEKKKQRLAAIGEDLLAIAADQPFRFPATFTFVVRAFSVLDGIGKGLDPRFDITEIAKPYAKELLRFNEAGVEVVVKDAKKRWERQSRAFYNLFRQPDRVEKLAQIIERLEQGELKLRVRTLESERAFQRVAAVQKTIGYGIAAGSLVNLATMLYFNSIRGPATVAYSLCAFFGLQVVVGLIKVKKLDRQERLITGTA

SEQ ID NO: 78974 - protein, 86 aa, Setaria italica
  Transcript Sequence Number=SeqID_13000
  Gene Ontology: Cellular component=integral to membrane
  Homolog annotation: Hit_ID=B6SWN8; Match level="QueryCoverage=100%, HitCoverage=13%, E-value=4e-38, Identity=88%"; Hit description=C4 -dicarboxylate transporter/malic acid transport protein
LYQRLPTSETLPRDLHPVFFLFVAAPSVACLAWARITGEFGYGSRVAYFIAMFLYASLAVRINLFRGFSFSLAWWAYTFPMTSAAI

SEQ ID NO: 78975 - protein, 988 aa, Setaria italica
  Transcript Sequence Number=SeqID_13001
  Gene Ontology: Mol. function=hydrolase activity, acting on acid anhydrides, catalyzing transmembrane movement of substances; Cellular component=integral to membrane; Biological process=calcium ion transport
  Homolog annotation: Hit_ID=Q9LM01; Match level="QueryCoverage=99%, HitCoverage=95%, E-value=0.0, Identity=80%"; Hit description=Calcium ATPase
  Pfam annotation: Domain name=Cation_ATPase_C; Domain location=743 -969; Score=234.9; E_value=2e-67; Accession=PF00689.13; Description =Cation transporting ATPase, C-terminus
  Pfam annotation: Domain name=E1-E2_ATPase; Domain location=47-303; Score=252.7; E_value=8.5e-73; Accession=PF00122.12; Description=E1 -E2 ATPase
  Pfam annotation: Domain name=Hydrolase; Domain location=307-682; Score=89.7; E_value=1e-23; Accession=PF00702.18; Description =haloacid dehalogenase-like hydrolase
  Pfam module annotation: Pfam domain module=Cation_ATPase_C::E1-E2 _ATPase::Hydrolase; Domain location=743-969::47-303::307-682
RLLQLLAQQFEDTLVRILLAAAAVSFLLALFSSAGEVTLSAFVEPLVIFLILVVNAAVGIWQETNAEKALEALREIQSDHAAVLRDGEWLPALPARELVPGDVVKLRVGDKVPADMRVASLVTSTLRVEQGSLTGETASVNKTSHAVPVEDADIQAKECMVFAGTTIVNGCAVCIVVHTGMATEIGKIHAQIHEASQEDDDTPLKKKLNEFGEALTKIIGLICALVWLINVKYFLTFELHGWVPRNIRFSFEKCTYYFEIAVALAVAAIPEGLPAVITTCLALGTRKMAAKNALVRKLPSVETLGCTTVICSDKTGTLTTNQMSVAKLVAIGDSSGEVRSFKVEGTTYDPRDGKIHDWPAGSIDVNLETIAKVAAVCNDASVAHSSHQYVATGMPTEAALKVLVEKMGLPGGKNGPSLDPSDTLGCCKWWNNVAKRIATLEFDRMRKSMGVIVRTSSGSNALLVKGAVETLLERSSHVQLKDGLVVPLDEKAKEIVLASLHEMSTKALRCLGFAYKEDLAEFATYDGENHPAHKLLLDPANYAAIETDLIFAGLVGLRDPPREEVYDAIEDCRAAGIRVMVITGDNKETAEAICREIGVFSPDEDITLNSLTGKEFMALEDKKTLLRRKGGLLFSRAEPRHKQEIVRLLKEDGEVVAMTGDGVNDAPALKLADIGVAMGITGTEVAKEASDMVLADDNFSTIVAAVGEGRSIYNNMKAFIRYMISSNIGEVASIFLTSALGIPEGLIPVQLLWVNLVTDGPPATALGFNPPDKDIMKKPPRRSDDSLITPWILFRYLIIGLYVGIATVGIFVIWYTHGSFMGIDLTGDGHTLVSYSQLSNWGQCSTWDNFTVSPFTAGTRSFTFDNPCEYFQAGKVKATTLSLSVLVAIEMFNSLNALSEDSSLLSMPPWVNPWLLVAMSVSFGLHFLILYVPFLATVFGIVPLSLNEWLLVLLVALPVVLIDEVLKFVGRSTSSSGPKRLSRKQKGE

SEQ ID NO: 78976 - protein, 329 aa, Setaria italica
  Transcript Sequence Number=SeqID_13002
  Gene Ontology: Mol. function=beta-amylase activity; Cellular component=chloroplast; Biological process=polysaccharide catabolic process
  Homolog annotation: Hit_ID=B9S1Q4; Match level="QueryCoverage=97%, HitCoverage=48%, E-value=1e-130, Identity=66%"; Hit description=Beta- amylase, putative
  Pfam annotation: Domain name=Glyco_hydro_14; Domain location=1-315; Score=33.8; E_value=3.8e-18; Accession=PF01373.9; Description =Glycosyl hydrolase family 14
DIFFADREGRRNTECLSWGVDKERVLRGRTGIEVYFDFMRSFHMEFRNLSEEGLISAIEIGLGASGELRYPSCPERMGWKYPGIGEFQCYDRYMQKNLRQSAASRGHLFWARGPDNAGYYNSRPRETGFFCDGGDYDSYYGRFFLNWYSGVLIDHVDQVLSLATLAFDGAEILVKIPSIYWWYRTASHAAELTAGFYNPTNRDGYSPVLKMLKKHSVILKLVCYGPEFTVQENDEACADPEGLTWQVVNAAWDHGLSLCIESALPCLDGDMYSQILDTTKPRNDPDRHHASFFTYRQQPPSLLQRDAYFPELRTFVKCMHGEAPQNGED

SEQ ID NO: 78977 - protein, 33 aa, Setaria italica
  Transcript Sequence Number=SeqID_13003
AASFSSVESAILSLKIASQGLLKTAMEYLIPTS

SEQ ID NO: 78978 - protein, 124 aa, Setaria italica
  Transcript Sequence Number=SeqID_13004
  Homolog annotation: Hit_ID=B9SPN4; Match level="QueryCoverage=63%, HitCoverage=7%, E-value=2e-29, Identity=83%"; Hit description =Nucleotide binding protein, putative
SVSQLVLVRWGQTYVDLLQDLMEKTITLALATGHKRFSASLSKLVENYAELLASQGLLKTAMEYLKLLGSDEHSHELAILRDRIALSTEGWHKLIESLDLVFLLFPVGLIFYAFSLVYRFALLC

SEQ ID NO: 78979 - protein, 198 aa, Setaria italica
  Transcript Sequence Number=SeqID_13005
  Gene Ontology: Mol. function=ATP-dependent helicase activity; Cellular component=endoplasmic reticulum membrane; Biological process=vesicle-mediated transport
  Homolog annotation: Hit_ID=Q00Y68; Match level="QueryCoverage=98%, HitCoverage=17%, E-value=4e-70, Identity=61%"; Hit description=ATP -dependent RNA helicase (ISS)
  Pfam annotation: Domain name=WD40; Domain location=120-159; Score =34.0; E_value=6.1e-07; Accession=PF00400.24; Description=WD domain, G-beta repeat
  Pfam annotation: Domain name=WD40; Domain location=29-68; Score=19.2; E_value=0.017; Accession=PF00400.24; Description=WD domain, G-beta repeat
  Pfam annotation: Domain name=WD40; Domain location=72-115; Score=0.2; E_value=37; Accession=PF00400.24; Description=WD domain, G-beta repeat
  Pfam module annotation: Pfam domain module=WD40::WD40::WD40; Domain location=120-159::29-68::72-115
PNRLASGAEQGELCIWDLKNPVEPVVYPPLKQSVGSSAQAEISCLSWNPKFQHILATTSTNGMTVVWDLRNQKPLTSFSDSIRRKSSVLQWNPDMSTQLIVASDDDSSPSLRVWDVRKTISPVREFVGHSKGVIAMSWCPYDSSFLLTCSKDNRTICWDTVSGEIISELPTSDNWNFDLHWYRKIPGVIAASSFDWVK

SEQ ID NO: 78980 - protein, 156 aa, Setaria italica
  misc_feature (122)..(122): Xaa can be any naturally occurring amino acid
  Transcript Sequence Number=SeqID_13006
  Homolog annotation: Hit_ID=B9SPN4; Match level="QueryCoverage=53%, HitCoverage=7%, E-value=1e-21, Identity=66%"; Hit description =Nucleotide binding protein, putative
RNRYLGTEAVGPREGTGGVEYGWFMPSTNQGFVQRPGLSPAQPSSPTQAQAQAQAQAQAQAAPPAPPPTVQTADTSKVSGELRPVIATLTRLFDETSKALGGSQATQAKKREIEDNSRKIGXFAKLNKWRHIFQNVSSKLIQLCSALDSSDFATAM

SEQ ID NO: 78981 - protein, 164 aa, Setaria italica
  misc_feature (66)..(66): Xaa can be any naturally occurring amino acid
  misc_feature (76)..(76): Xaa can be any naturally occurring amino acid
  Transcript Sequence Number=SeqID_13007
  Homolog annotation: Hit_ID=B9SPN4; Match level="QueryCoverage=69%, HitCoverage=11%, E-value=3e-19, Identity=52%"; Hit description =Nucleotide binding protein, putative
VFCIGKSTYLLLRPFVLLGHKRFSASLSKLVENYAELLASQGLLKTAMEYLKLLGSDEHSHELAIXLRDRIALSTXEKKNDAARSSLSGSTGASSPYVTNHSYITQDQPQNLHQQVQSYNLHSSTYSDGYPQQSNAAFAYNNPYQPQPQSQMFCFLPKLSNRNY

SEQ ID NO: 78982 - protein, 400 aa, Setaria italica
  Transcript Sequence Number=SeqID_13008
  Homolog annotation: Hit_ID=B9SPN4; Match level="QueryCoverage=99%, HitCoverage=41%, E-value=4e-82, Identity=46%"; Hit description =Nucleotide binding protein, putative
TITLALATGHKRFSASLSKLVENYAELLASQGLLKTAMEYLKLLGSDEHSHELAILRDRIALSTEENDAARSSLSGSTGASSPYVTNHSYITQDQPQNLHQVQSYNLHSSTYSDGYPQQSNAAFAYNNPYQPQPQSQMFVPPSAPISSQLPQGSAPVQAPPQTVKTFTPANPMGLKNAEQYHQPNTLGSQLYMPAANQPYSTPPVPSLGPTASVPGTVPNQMFPHSAATNSTARFMPSTNQGFVQRPGLSPAQPSSPTQAQAQAQAQAQAQAAPPAPPPTVQTADTSKVSGELRPVIATLTRLFDETSKALGGSQATQAKKREIEDNSRKIGALFAKLNSGDISPNVSSKLIQLCSALDSSDFATAMHLQVILTTSDWDECNFWLAALKRMIKTRQNFRM

SEQ ID NO: 78983 - protein, 888 aa, Setaria italica
  Transcript Sequence Number=SeqID_13009
  Gene Ontology: Mol. function=ATP-dependent helicase activity; Cellular component=endoplasmic reticulum membrane; Biological process=vesicle-mediated transport
  Homolog annotation: Hit_ID=B9SPN4; Match level="QueryCoverage=77%, HitCoverage=69%, E-value=0.0, Identity=52%"; Hit description =Nucleotide binding protein, putative
  Pfam annotation: Domain name=WD40; Domain location=101-140; Score =21.0; E_value=0.0051; Accession=PF00400.24; Description=WD domain, G- beta repeat
  Pfam annotation: Domain name=WD40; Domain location=144-187; Score =0.2; E_value=37; Accession=PF00400.24; Description=WD domain, G-beta repeat
  Pfam annotation: Domain name=WD40; Domain location=192-231; Score =34.0; E_value=6.1e-07; Accession=PF00400.24; Description=WD domain, G-beta repeat
  Pfam annotation: Domain name=WD40; Domain location=235-274; Score =11.6; E_value=1.7; Accession=PF00400.24; Description=WD domain, G -beta repeat
  Pfam annotation: Domain name=WD40; Domain location=51-90; Score=19.6; E_value=0.013; Accession=PF00400.24; Description=WD domain, G-beta repeat
  Pfam module annotation: Pfam domain module=WD40::WD40::WD40::WD40::WD4 0; Domain location=101-140::144-187::192-231::235-274::51-90
PDRFNRLSWSRPGAVEGDSYALGLLAGGLSDGSVAVWNPLSMISSEGKAEDAMVARLEKHTGAVCGLEFSELTPNRLASGAEQGELCIWDLKNPVEPVVYPPLKSVGSSAQAEISCLSWNPKFQHILATTSTNGMTVVWDLRNQKPLTSFSDSIRRKSSVLQWNPDMSTQLIVASDDDSSPSLRVWDVRKTISPVREFVGHSKGVIAMSWCPYDSSFLLTCSKDNRTICWDTVSGEIISELPTSDNWNFDLHWYRKIPGVIAASSFDGKIGIYNLEFSGLYAAGDAGGAPACPRAPAPKWLKCPTGASFGFGGKLVAFHPAAPTQGAQASTSEVHVHNLVIEQSLVSRSTEFEAAIQNGDKSSLRALCEKKSQESLSDEERETWGFLRVMFEDGDVARTKLLAHLGFEPPQAPTVDSTDELSQTLADTLNLDHGTATDNADAQFLVDNGDDFFNNPQPSEASLAEESISTNGEQIEQEIPGDVVPSDPSIDKSIQHALVVGDYKGAVNQCLAANRMADALVIAHAGGSALWESTRNQYLRKSISPYLKVVSAMVGNDLMSFVSTWPLSSWKETLALLCTFARKEEWNVLCDTLASRLLSVGDTLAATLCYICAGNIDKAVEIWSRNLKSEDGGQTYVDLLQDLMEKTITLALATGHKRFSASLSKLVENYAELLASQGLLKTAMEYLKLLGSDEHSHELAILRDRIALSTEENDAARSSLSGSTGASSPYVTNHSYITQDQPQNLHQQVQSYNLHSSTYSDGYPQQSNAAFAYNNPYQPQPQSQMFVPPSAPISSQLPQGSAPVQAPPQTVKTFTPANPMGLKNAEQYHQPNTLGSQLYMPAANQPYSTPPVPSLGPTASVPGTVPNQMFPHSAATVATARFMPSTNQ

SEQ ID NO: 78984 - protein, 210 aa, Setaria italica
  misc_feature (36)..(36): Xaa can be any naturally occurring amino acid
  Transcript Sequence Number=SeqID_13010
GGAFYMTTAEAADFYWMVVFVPSAVLFGASLTYLVXAGMSVAYAAPRRHPMICIVENNFCASRRGGVRCLAILNAVFAVVFGLMAIVLGSTLLALGSTCSVPLFWCYEITAWGLAILYGGTAFSLRRKAAVVLDEGDYATHNVGLEMLESKMEVTPEMQRRINDGFKQWMGSSLLSSDDEDEASDDYIEHNGPSLTASVEQHRQENDLET

SEQ ID NO: 78985 - protein, 70 aa, Setaria italica
  Transcript Sequence Number=SeqID_13011
  Subcellular localization annotation: CTP_CleavageSite=7; ConfidenceScore=5.04e-01
FFFLRSRAKLISNTTNNKYTKIPAPRLIAYTQLNSTLSSYNQIEFLLCPRSGLHAASSPAARPSHPDPNW

SEQ ID NO: 78986 - protein, 61 aa, Setaria italica
  Transcript Sequence Number=SeqID_13012
TRSHRNLAKLLCPEYIQLQVALPKTLDNTHLSSQNLTTCFGWLPCLPRAFSRAKLNSLNGI

SEQ ID NO: 78987 - protein, 64 aa, Setaria italica
  Transcript Sequence Number=SeqID_13013
  Gene Ontology: Mol. function=oxidoreductase activity; Cellular component=mitochondrion; Biological process=fatty acid biosynthetic process
  Homolog annotation: Hit_ID=C5MRG3; Match level="QueryCoverage=96%, HitCoverage=16%, E-value=1e-22, Identity=83%"; Hit description=Trans- 2-enoyl CoA reductase
MQRDRPGSEEAKGKLKQLGADEVFTESQLDMKNLKSLLGALPEPALGFNCVGGNAASLVLKFLR

SEQ ID NO: 78988 - protein, 366 aa, Setaria italica
  Transcript Sequence Number=SeqID_13014
  Gene Ontology: Mol. function=oxidoreductase activity; Cellular component=mitochondrion; Biological process=fatty acid biosynthetic process
  Homolog annotation: Hit_ID=B9SW66; Match level="QueryCoverage=92%, HitCoverage=89%, E-value=1e-154, Identity=75%"; Hit description=Zinc binding dehydrogenase, putative
  Pfam annotation: Domain name=ADH_N; Domain location=61-145; Score =31.9; E_value=1.9e-06; Accession=PF08240.4; Description=Alcohol dehydrogenase GroES-like doma
  Pfam annotation: Domain name=ADH_zinc_N; Domain location=176-326; Score=72.0; E_value=2.2e-18; Accession=PF00107.18; Description=Zinc -binding dehydrogenase
  Pfam module annotation: Pfam domain module=ADH_N::ADH_zinc_N; Domain location=61-145::176-326
MAPPSRLLPATLQILRRRCASRFSTASSIVSPPSKAVLYDEHGAPDQVLRVADVPPVHLGDRDVCVRMLAAPINPSDINRIEGVYPIRPPLPGAVGGCEGVGQVHALGPAVTAPLSPGDWVIPSPSSFGTWQTYIVKNESVWHKVRSDVPMEYAATVTVNPLTALRMLRDFVQLNPGDAIVQNGATSIVGQCVIQLAKVHGIHTINIIRDRPGSEEAKGKLKQLGADEVFTESQLDMKNLKSLLGALPEPALGFNCVGGNAASLVLKFLRQGGTMVTYGGMSKRPVTVPTSYFIFKDISMRGFWLQKWMNSDKAEDCRTMIDYLLGLVHEGKLKYEMESIPFSEFSLALEKALGKHGSQPKQVVRF

SEQ ID NO: 78989 - protein, 539 aa, Setaria italica
  Transcript Sequence Number=SeqID_13015
  Gene Ontology: Cellular component=chloroplast
CLAVGECGIGMSFWFPAVWSLQQRSFAAGLVWNTSLKSGEAIAAGSSAITHNYRGNLAGLKYNYTKVDEAMKHYKKSGLNKDRKGKFPDSSSYRDLVFRFFVQKGGGSGYASPITLGSMLFDGNSLVAPDPFSHHVTGVMKQRLINVSYDIYYVGNWSLESFHRRHISAEGVYDTKTGSLCMIACRELNVSSDCEILVTAQFSSLDAKVAQHVKGTIRSLRKKTDPLFFETLYIASYGMFIDQVDESIWRMDLESTMALISMTLACIFIAVQLFHVNKVPEALPAMSITMLVVLALGYMIPLVLNFEALFKNSNKQTFPLAGGGWLEVNEVMVRIITMITFLLQLRLLQLAWSARSVDVSKAESWAAEKKVLWICLPLYITGGVITWVVHMRFNHSRRMLRQVVQIKPVGHAFWEDLVSYGGLILDGFLLPQVILNASSDSKVRALSPGFYIGSTMIRALPHVYDVFRRQHFVPSLRPSYMYASPHDDLFSLAWDIVIPCGAMLLSVVLFFQQRLGGAFFLCSKNRKTREYEMVSTVSS

SEQ ID NO: 78990 - protein, 108 aa, Setaria italica
  Transcript Sequence Number=SeqID_13016
RQARKGEDEITVEPNLSLCTLMMHRGLPFVFSPAKRAFPRDVNHSRMAVGSVTRWLGDARSPAGWKSFFLACVFLLIPCIIHPVGSMRRVAWTWPSGCLTNLCLADLP

SEQ ID NO: 78991 - protein, 65 aa, Setaria italica
  Transcript Sequence Number=SeqID_13017
  Gene Ontology: Mol. function=carbohydrate binding; Cellular component= chloroplast; Biological process=carbohydrate metabolic process
  Homolog annotation: Hit_ID=Q9FJY6; Match level="QueryCoverage=80%, HitCoverage=16%, E-value=4e-12, Identity=65%"; Hit description =Apospory-associated protein C-like
  Subcellular localization annotation: CTP_CleavageSite=52; ConfidenceScore=5.21e-01
DSYSRSMWDFSFQALYKVSLHSTSLSTTLKITNTDDKPFSFNSALHTYFRVSCSFPGTIFFVFPL

SEQ ID NO: 78992 - protein, 79 aa, Setaria italica
  Transcript Sequence Number=SeqID_13018
SSYHWGNAICITYCLMQLQQDIIFRVVQVSALPPRIVSAPVVLFQSLRFPHRQNLCSRPTEAQVSKTSHSTDDEQQHHG

SEQ ID NO: 78993 - protein, 320 aa, Setaria italica
  misc_feature (310)..(310): Xaa can be any naturally occurring amino acid
  Transcript Sequence Number=SeqID_13019
  Gene Ontology: Mol. function=carbohydrate binding; Cellular component= chloroplast; Biological process=carbohydrate metabolic process
  Homolog annotation: Hit_ID=B9S6E7; Match level="QueryCoverage=95%, HitCoverage=98%, E-value=1e-123, Identity=69%"; Hit description =Aldose 1-epimerase, putative
  Pfam annotation: Domain name=Aldose_epim; Domain location=56-315; Score=186.8; E_value=6e-53; Accession=PF01263.12; Description=Aldose 1-epimerase
  Subcellular localization annotation: CTP_CleavageSite=32; ConfidenceScore=5.53e-01
MAASCASTLPSLSFVSNSYCNSPRRFRRSAVVAMASVGQKVYAPGVAVSEGNGGLQKIDLKSPHGSEAEIYLFGACVTSFKVPNGKDLLFVRPDAVFNGQKPISGGIPHCFPQFGPGPMQQHGFARNVNWSITDSEVTEGDPAVTLELKDDSYSRSMWDFSFQALYKVSLHSTSLSTTLKITNTDDKPFSFNSALHTYFRASITGVSVKGLKGCKTLNKDPDPKNPLEGKEEREEVTFPGFVDCIYLGAPSELILDNGLGDKIAISNSNWSDAVLWNPHLQMEACYKDFVCVENAKIETVQLEPKQSWVXEQKLELNFFL

SEQ ID NO: 78994 - protein, 119 aa, Setaria italica
  Transcript Sequence Number=SeqID_13020
  Subcellular localization annotation: CTP_CleavageSite=35; ConfidenceScore=5.21e-01
QVHKTTDLSQCKTLDITRTTITGLLKRRFPRQAIQQTMSSNTMARRHLSTRLSHLKICIQACHYHHHPSPSAYLDLCLIFRRFLFSLLMRFFFHLALMVASSRSLLGASPPAASAAGLR

SEQ ID NO: 78995 - protein, 74 aa, Setaria italica
  Transcript Sequence Number=SeqID_13021
  Gene Ontology: Mol. function=nucleoside-triphosphatase activity; Cellular component=integral to membrane; Biological process=defense response
  Homolog annotation: Hit_ID=Q8GU88; Match level="QueryCoverage=97%, HitCoverage=4%, E-value=5e-36, Identity=95%"; Hit description =Putative pleiotropic drug resistance protein 7
WEAMFLGLVTHLFNGFAELAMSIAKLPIFYKQRDLLFYPSWAYALPTWVLKIPISFLECAVWLGMTYYVIGFDP

SEQ ID NO: 78996 - protein, 197 aa, Setaria italica
  Transcript Sequence Number=SeqID_13022
  Gene Ontology: Cellular component=nucleolus; Biological process =regulation of transcription, DNA-dependent
  Homolog annotation: Hit_ID=Q9ZVL7; Match level="QueryCoverage=78%, HitCoverage=54%, E-value=9e-35, Identity=51%"; Hit description =T22H22.18
  Pfam annotation: Domain name=Fcf2; Domain location=68-165; Score =189.2; E_value=1.2e-53; Accession=PF08698.3; Description=Fcf2 pre -rRNA processing
  Subcellular localization annotation: CTP_CleavageSite=71; ConfidenceScore=5.34e-01
MSETAAPIGLSWAPKLPSLATTSCSSKSEPAPKPSTAQGSLWKPQSELVDGLFVSPRDPKKVNKLTRKSVKDTTGKGWFDMPAPTITPELKKDLEILQLRHVMDPKRHFKRAGKSKALPKYFQVGTVVEPASEFYSGRMTRRERKTTLVDELLSDQYLKSYRMRKVREIQESRMPGGNQKWKNKGKQTLKRAKDRRK

SEQ ID NO: 78997 - protein, 129 aa, Setaria italica
  Transcript Sequence Number=SeqID_13023
  Gene Ontology: Mol. function=protein binding; Cellular component =integral to membrane; Biological process=phagocytosis, engulfment
  Homolog annotation: Hit_ID=B9SXF5; Match level="QueryCoverage=61%, HitCoverage=13%, E-value=2e-25, Identity=68%"; Hit description =Endomembrane protein emp70, putative
RIVMRTLRNDYAKYARDDDDIETLERDVNEESGWKLVHGDVFRPPRNLVLLSSLVGIGTQLAALILLVILLAIIGMLYIGYALNLQCCFIKFLFSLRAASSKASIVANLPELALFIDTLPSKGHIYLSL

SEQ ID NO: 78998 - protein, 346 aa, Setaria italica
  Transcript Sequence Number=SeqID_13024
  Gene Ontology: Mol. function=binding; Cellular component=integral to membrane
  Homolog annotation: Hit_ID=B9SXF5; Match level="QueryCoverage=100%, HitCoverage=57%, E-value=1e-161, Identity=80%"; Hit description =Endomembrane protein emp70, putative
  Pfam annotation: Domain name=EMP70; Domain location=1-304; Score =334.6; E_value=1.9e-97; Accession=PF02990.8; Description =Endomembrane protein 70
MRTLRNDYAKYARDDDDIETLERDVNEESGWKLVHGDVFRPPRNLVLLSSLVGIGTQLAALILLVILLAIIGMLYIGRGAIVTTFIVCYALTSFISGYVSGALYSRHGGKNWIKAMAMTASLFPFMCFGIGLVLNTIAIFYGSLAAIPFGTMVVVFILWAFISFPLALLGTVVGRNWSGAPNNPCRVKTIPRPIPEKKWYLTPSVIALMGGLLPFGSIFIEMYFVFTSFWNYKVYYVYGFMLLVFLILIIVTICVTIVGTYFLLNAENYHWQWTSFFSAASTAVYVYLYSIYYYHMKTKMSGFFQTSFYFGYTLMFCLGLGTLCGAVGYLGSTLFVRRIYRNIKCD

SEQ ID NO: 78999 - protein, 414 aa, Setaria italica
  misc_feature (98)..(98): Xaa can be any naturally occurring amino acid
  misc_feature (204)..(204): Xaa can be any naturally occurring amino acid
  misc_feature (287)..(287): Xaa can be any naturally occurring amino acid
  Transcript Sequence Number=SeqID_13025
  Gene Ontology: Mol. function=ATP-dependent helicase activity; Cellular component=intracellular; Biological process=RNA processing
  Homolog annotation: Hit_ID=Q5N870; Match level="QueryCoverage=100%, HitCoverage=25%, E-value=1e-175, Identity=70%"; Hit description =Endoribonuclease Dicer homolog 3a
  Pfam annotation: Domain name=PAZ; Domain location=88-245; Score=35.8; E_value=1.7e-07; Accession=PF02170.14; Description=PAZ domain
  Pfam annotation: Domain name=Ribonuclease_3; Domain location=282-414; Score=116.5; E_value=9e-32; Accession=PF00636.18; Description=RNase3 domain
  Pfam module annotation: Pfam domain module=PAZ::Ribonuclease_3; Domain location=88-245::282-414
EQAKLFQALLFNGLFGKLFTGSKASKTAREFILKKDNTFLWDKANMYLLLPVDPTLDSAKSVCINWSVIEVAATAVGLMRSIYSEDQQNLIDKLNPEXNGGDLIHLANKSCKADDLRNMVVLALHTGKIYTSLDVSDLCASSTFDGASDKKEAKFRTFAEYFEKKYSVFLHHPSQPLLVLKPTHNPHNLLSSKIRDEGNRVENXNRANSLVHMPPELLIPLDLPVDVLRVFYLFPSLMYRIESLMLASQLRSEIAYTGSDISSFLILEALTTLRCCEDFSMERLELXGDSVLKYAVSSHLFLTFPNKHEGQLSSRRQEIICNATLHKLGIESKIQGYIRDAAFDPRRWLAPGQLSIWPCPCECPVNSEVVTEDIHRIDDKSIIIGKACDKGHRWICSKTISDCVEALIGAYYVG

SEQ ID NO: 79000 - protein, 82 aa, Setaria italica
  Transcript Sequence Number=SeqID_13026
  Subcellular localization annotation: CTP_CleavageSite=38; ConfidenceScore=5.59e-01
SRTCSGFRCVVFTPLFLSPLAATTRRAPPPFATFSPATSTHQVGWLWQFRPAARPWLPTESPPEMYVLLELHAPYGWFPWRL

SEQ ID NO: 79001 - protein, 116 aa, Setaria italica
  Transcript Sequence Number=SeqID_13027
  Gene Ontology: Mol. function=catalytic activity; Cellular component =cytoplasm; Biological process=metabolic process
  Homolog annotation: Hit_ID=Q9XHH0; Match level="QueryCoverage=93%, HitCoverage=50%, E-value=3e-50, Identity=92%"; Hit description =Acetoacetyl CoA thiolase (Fragment)
KPPVLIEKDESLAKFDPVKLKKLRPSFKENGGTVTAGNASSISDGAAALVLVSGQKAQELGLQVLARIKGYADAAQAPELFTTTPALAIPKAIANAGLESSHVDFCKGNSRKGFIN

SEQ ID NO: 79002 - protein, 190 aa, Setaria italica
  Transcript Sequence Number=SeqID_13028
  Gene Ontology: Mol. function=DNA binding; Biological process =regulation of transcription
  Homolog annotation: Hit_ID=B6SVM7; Match level="QueryCoverage=84%, HitCoverage=34%, E-value=2e-30, Identity=53%"; Hit description =Transcription factor ZmGLK1
GWCRPGSRRRVRRPVFPPPPPFCRPLHVWGHPPTAAVEAPATMLPVWPRHLAPPRPWVDPGYWHQQYNAGRTKWAPPQAAAAVTQGTPCVPPPPAMVQLPRFPHPMYSRPPVMVPPPPPPPTTTTTKLAELQLQLDAHPSKESIDAAIGDVLVKPWLPLPLGLKPPSLDSVMSELHKQGIPKIPPASSTG

SEQ ID NO: 79003 - protein, 147 aa, Setaria italica
  Transcript Sequence Number=SeqID_13029
  Gene Ontology: Mol. function=peptidase activity; Biological process =lipid transport
  Homolog annotation: Hit_ID=B4G0Q2; Match level="QueryCoverage=48%, HitCoverage=33%, E-value=8e-25, Identity=78%"; Hit description=Lipid binding protein
  Pfam annotation: Domain name=Tryp_alpha_amyl; Domain location=40-112; Score=28.8; E_value=2.1e-05; Accession=PF00234.14; Description =Protease inhibitorseed storageLTP f
  Subcellular localization annotation: CTP_CleavageSite=82; ConfidenceScore=5.12e-01
MSSLRQLHPVTLALAVMVTAAATLSAAQQQPEAFPALPSCPPAPLSLSPCIGYVFGVSSATLTDCCSQLRSFLQAQAPCLCAASKLAPSPVGLILGQAQTIIPNVCHLPNPCDADAGDGEGSASPPSETTTTPAATTPATEEPSNRT

SEQ ID NO: 79004 - protein, 333 aa, Setaria italica
  misc_feature (165)..(165): Xaa can be any naturally occurring amino acid
  Transcript Sequence Number=SeqID_13030
  Gene Ontology: Mol. function=catalytic activity; Biological process =metabolic process
  Homolog annotation: Hit_ID=Q9C8A3; Match level="QueryCoverage=100%, HitCoverage=13%, E-value=5e-67, Identity=42%"; Hit description =Acetyl-CoA synthetase, putative; 45051-31547
LATEIECITFQAAMCRIRHTLLSLRRKASADFNGAMSSFMQTDVSNKSDLTPKYDIRKKEVMPIRLSSDVEHETHDRSLMESVGVWRPVVTPKGANSLESLSAKTLTGASPSQSMQRQPVVDLLFAMALLVQQSTSFVDISLDMDDGDGSFFWLSLDEQKRRGFXSCDPSMVHAGCGGLLGTCHSKDCAGVDLVDPLYAEVSESSMFSLLQSDIRTALKTAFANMDGPLSVIDWCRGRSNPPESAATGDAYSFQYSTGDIREPSNTLSIGGDSMSPPQPTSSNRGTSELEHQKGYHRVRPTIAVLPSPSMLVGYQDDWLKVSVNSLKTWEKAP

SEQ ID NO: 79005 - protein, 139 aa, Setaria italica
  Transcript Sequence Number=SeqID_13031
  Gene Ontology: Mol. function=calcium ion binding
  Homolog annotation: Hit_ID=B4G1S0; Match level="QueryCoverage=56%, HitCoverage=79%, E-value=7e-17, Identity=52%"; Hit description=EF hand family protein
  Pfam annotation: Domain name=efhand; Domain location=27-55; Score =33.7; E_value=7.4e-07; Accession=PF00036.24; Description=EF hand
  Pfam annotation: Domain name=efhand; Domain location=63-91; Score =10.5; E_value=1.5; Accession=PF00036.24; Description=EF hand
  Pfam module annotation: Pfam domain module=efhand::efhand; Domain location=27-55::63-91
MAMAAVPPAARCLFPGKEHRTAITVPEFKRWLKQFDTDRDGRISRKELREAIRRRGAWFSGLRALFAIRSADRNHNGFVDDSEIEGLIQFAERELGFRIATDAAAAGPQPLGGVMMPSPAAAAHHPFYSRSTTTTYMAY

SEQ ID NO: 79006 - protein, 78 aa, Setaria italica
  misc_feature (11)..(11): Xaa can be any naturally occurring amino acid
  misc_feature (28)..(28): Xaa can be any naturally occurring amino acid
  Transcript Sequence Number=SeqID_13032
  Homolog annotation: Hit_ID=O48878; Match level="QueryCoverage=58%, HitCoverage=5%, E-value=7e-12, Identity=73%"; Hit description=Gene X- like protein
IHRGIIDENQXLRSELESKMQELDSRSXELDELASQSDYDRRNLQQEKEKVCDGLFAILQLSPLRILKFVFSAAFMQQ

SEQ ID NO: 79007 - protein, 265 aa, Setaria italica
  misc_feature (248)..(248): Xaa can be any naturally occurring amino acid
  Transcript Sequence Number=SeqID_13033
  Homolog annotation: Hit_ID=O48878; Match level="QueryCoverage=88%, HitCoverage=26%, E-value=2e-92, Identity=66%"; Hit description=Gene X-like protein
  Pfam annotation: Domain name=XS; Domain location=112-226; Score =241.8; E_value=1.7e-69; Accession=PF03468.6; Description=XS domain
  Pfam annotation: Domain name=zf-XS; Domain location=42-83; Score =91.3; E_value=3.4e-24; Accession=PF03470.6; Description=XS zinc finger domain
  Pfam module annotation: Pfam domain module=XS::zf-XS; Domain location= 112-226::42-83
MGSSSEDDYEISDSEIDEREAEVYEQLKSGNIKVKDREAYSCPFCRDKRKKDYSKSNLLQHATGVGSAANRQAKDKATHRALAKYLKDESARSSEPQTQLTVLIEPQNLGNRDDQFVWPWMGVLVNVPTEWKNGRQVGESGNRLKEQLSHFCPQKVIPLWNYRGHTGNAIVEFAKDWTGFKNALAFENHFEAEGYGKRDWKLKKYRGSEMFGWVARVDDHRCQGPIGDHLRKNGDLKTVGDLENEGIXKTDKLVANLASQMKCTR

SEQ ID NO: 79008 - protein, 477 aa, Setaria italica
  Transcript Sequence Number=SeqID_13034
  Homolog annotation: Hit_ID=Q3T7E6; Match level="QueryCoverage=98%, HitCoverage=84%, E-value=1e-170, Identity=64%"; Hit description=X1 (Fragment)
  Pfam annotation: Domain name=XH; Domain location=343-477; Score =266.5; E_value=6.1e-77; Accession=PF03469.6; Description=XH domain
  Pfam annotation: Domain name=XS; Domain location=1-72; Score=47.6; E _value=5e-11; Accession=PF03468.6; Description=XS domain
  Pfam module annotation: Pfam domain module=XH::XS; Domain location =343-477::1-72
PLSRKLIRRYNTGNAIVEFAKDWTGFKNALAFENHFEAEGYGKRDWKLKKYRGSEMFGWVARVDDHRCQGPIGDHLRKNGDLKTVGDLENEGIRKTDKLVANLASQIEVKHRHVQELESKCNETTASLDRMMEQREQLLQNYNEEIRKIQQIARRHSQRIIDENQKLRSELESKMQELDSRSKELDELASQSDYDRRNLQQEKEKNQMKTKHLKMATMEQQRSDENVLKLVEEHKREKQVALEKILKLQQQLDAKQKLELDIQQLQGKLEVMKHMPGEEDSESKKKIKELSEDLQDKYDEMEAMESLNQTLVIKERKSNDELQNARKELIAGFKELSVGRTNIGIKRMGELDPKAFGNACRKRLSKDDAEVTSAILCSKWEDEIRNPNWHPFKVVLIDGKETEVLSEEDENLSKLKEEHGEEIYVLVTKALVEINEYNPSGRYPVPELWNFKEGRKATLKEAVQHVMKQWRTHKRKR

SEQ ID NO: 79009 - protein, 264 aa, Setaria italica
  Transcript Sequence Number=SeqID_13035
  Homolog annotation: Hit_ID=B6SXP2; Match level="QueryCoverage=100%, HitCoverage=65%, E-value=1e-135, Identity=61%"; Hit description =Pentatricopeptide repeat protein PPR986-12
  Pfam annotation: Domain name=PPR; Domain location=112-146; Score=9.2; E_value=0.73; Accession=PF01535.12; Description=PPR repeat
  Pfam annotation: Domain name=PPR; Domain location=178-212; Score=8.2; E_value=0.96; Accession=PF01535.12; Description=PPR repeat
  Pfam annotation: Domain name=PPR; Domain location=43-76; Score=30.8; E_value=5.7e-06; Accession=PF01535.12; Description=PPR repeat
  Pfam annotation: Domain name=PPR; Domain location=77-111; Score=15.1; E_value=0.15; Accession=PF01535.12; Description=PPR repeat
  Pfam module annotation: Pfam domain module=PPR::PPR::PPR::PPR; Domain location=112-146::178-212::43-76::77-111
LQLKMGFDSYVHVSNALVSMYAKCGSIGEARAIFESIACKDLISWNSMIFGYSQHGLAEHCLDLLKEMQGHIMPDAISFLGVLSSCRHACLVAEGRRCFMEMIEHGIKPELDHYSCMIDLLGRAGLLDEAWDLIQTMSMPPNGVVWGSLLASCRVHGSVSIGIQAAEHRLKLLPGCAAAHVQLANLYASFGCWSDVARVRKTMKERGLKTNIGCSWIEVGNKVYTFTAENRSKSQVNYVLAILDCLRSHMDYKCDILIDGLDWD

SEQ ID NO: 79010 - protein, 112 aa, Setaria italica
  Transcript Sequence Number=SeqID_13036
SRSRRVNEEQSPGIEHSKNARNRGSSQAVTTGRAFESIHQRSGRERQHGRPWTRWSEYASGTSDVLRAEALNVRTQGSREGICTFSSQDLHFLVGVFVGRSALHLFFLVGPC

SEQ ID NO: 79011 - protein, 77 aa, Setaria italica
  Transcript Sequence Number=SeqID_13037
  Gene Ontology: Mol. function=metal ion binding; Cellular component =mitochondrial intermembrane space protein transporter complex; Biological process=protein import into mitochondrial inner membrane
  Homolog annotation: Hit_ID=B6SLJ2; Match level="QueryCoverage=97%, HitCoverage=93%, E-value=7e-29, Identity=80%"; Hit description =Mitochondrial import inner membrane translocase subunit Tim8
  Pfam annotation: Domain name=zf-Tim10_DDP; Domain location=12-77; Score=58.8; E_value=2.1e-14; Accession=PF02953.7; Description =Tim10DDP family zinc finger
MDASALNNPRLKALIEEERTKALTNELVAKLTLACWDKCVTGSIGSSFSRSEASCLSNCAKRFAEVKMMTMQRFTER

SEQ ID NO: 79012 - protein, 123 aa, Setaria italica
  misc_feature (73)..(73): Xaa can be any naturally occurring amino acid
  Transcript Sequence Number=SeqID_13038
  Gene Ontology: Mol. function=flavin-containing monooxygenase activity; Biological process=cellular aromatic compound metabolic process
  Homolog annotation: Hit_ID=B6SWL5; Match level="QueryCoverage=99%, HitCoverage=28%, E-value=1e-60, Identity=88%"; Hit description =Disulfide oxidoreductase/ monooxygenase/ oxidoreductase
VLLPTDRMDSLFSPRCVWVNGPIIIGAGPSGLAVAACLREQGVPYVILERADCIASLWQKRTYNRLKLHLPKXKFCELPRMPFPDHYPKYPTRRQFIDYLEDYAAKFEIKPEFNSTVQSARYD

SEQ ID NO: 79013 - protein, 43 aa, Setaria italica
  Transcript Sequence Number=SeqID_13039
SVALTRGLLPPPPKQTSIYQANETHYLVRRSKHSLSPHQCAMF

SEQ ID NO: 79014 - protein, 286 aa, Setaria italica
  misc_feature (278)..(278): Xaa can be any naturally occurring amino acid
  Transcript Sequence Number=SeqID_13040
  Gene Ontology: Mol. function=nucleic acid binding; Cellular component= nucleus; Biological process=positive regulation of transcription from RNA polymerase II promoter
  Homolog annotation: Hit_ID=B4FMS3; Match level="QueryCoverage=97%, HitCoverage=96%, E-value=1e-122, Identity=77%"; Hit description=CCR4- NOT transcription complex subunit 8
  Pfam annotation: Domain name=CAF1; Domain location=17-250; Score =363.9; E_value=2.9e-106; Accession=PF04857.12; Description=CAF1 family ribonuclease
MAAPPPAAEGPDAVEIREVWADNLEQEFAVIRDVIDAYPYVAMDTEFPGIVVKPTGSYSCQSDVNYATLQGNVNILKLIQLGLTLSNEAGALPPRGTGGRGCIWQFNFRGFDPRTDPSSSISIDLLRRSGIDFDRFAAEGVDSTRFSELMMTSGLVLSDSVQWVTFHSGHDFGYLLRLLTGREMPNTLDEFLELTKTFFPVMYDVKHLMRFCSGLYGGLSKLGELLKVERVGTSHQAGSDSLLTLWCFLKVKNLYLKESVKLYDGLLFGLIPGEGVIXVKPGAPPI

SEQ ID NO: 79015 - protein, 95 aa, Setaria italica
  Transcript Sequence Number=SeqID_13041
CRNHWRRPRVSSTDLQYPYFHSTRSSSPSIEHDLGRSLGHMWSVCVCLTRSGAYFVVILALLLTQIKSSPSCYIPATPPCGMRTRRSRVEQAPGK

SEQ ID NO: 79016 - protein, 95 aa, Setaria italica
  Transcript Sequence Number=SeqID_13042
  Gene Ontology: Mol. function=nucleotide binding
  Homolog annotation: Hit_ID=B9V0H6; Match level="QueryCoverage=66%, HitCoverage=4%, E-value=3e-12, Identity=57%"; Hit description=NBS -LRR disease resistance protein family-4
KVLPEWLGDLTALKKLQIRYCSGINSLPQSIQKLTKLKGLAIYHCPELAEWCKLEKNKKMLAHIKVKYIFLMNDHLVQRVKLHGKRIKRSCGRTI

SEQ ID NO: 79017 - protein, 51 aa, Setaria italica
  Transcript Sequence Number=SeqID_13043
LILNIIYIRTEGIFDISVSFILQYIFLMNDHLVQRVKLHGKRIKRSCGRTI

SEQ ID NO: 79018 - protein, 51 aa, Setaria italica
  Transcript Sequence Number=SeqID_13044
  Gene Ontology: Mol. function=protein serine/threonine kinase activity; Biological process=protein amino acid phosphorylation
  Homolog annotation: Hit_ID=B9V0H3; Match level="QueryCoverage=98%, HitCoverage=7%, E-value=2e-13, Identity=66%"; Hit description =Protein kinase domain containing protein
DFGLSKIFGKELTRTSQSPLGTCGYQPPEYIERGEISKKFDIFSLGVLMIK

SEQ ID NO: 79019 - protein, 763 aa, Setaria italica
  misc_feature (365)..(365): Xaa can be any naturally occurring amino acid
  misc_feature (662)..(662): Xaa can be any naturally occurring amino acid
  Transcript Sequence Number=SeqID_13045
  Gene Ontology: Mol. function=nucleotide binding; Biological process =defense response
  Homolog annotation: Hit_ID=B9V0H5; Match level="QueryCoverage=59%, HitCoverage=32%, E-value=1e-123, Identity=51%"; Hit description=NBS -LRR disease resistance protein family-3
  Pfam annotation: Domain name=Arch_ATPase; Domain location=375-566; Score=-61.4; E_value=0.028; Accession=PF01637.10; Description =Archaeal ATPase
  Pfam annotation: Domain name=NB-ARC; Domain location=378-663; Score =152.7; E_value=1.2e-42; Accession=PF00931.14; Description=NB-ARC domain
  Pfam annotation: Domain name=Pkinase; Domain location=18-301; Score =161.7; E_value=2.2e-45; Accession=PF00069.17; Description=Protein kinase domain
  Pfam annotation: Domain name=Pkinase_Tyr; Domain location=18-301; Score=38.5; E_value=2.7e-16; Accession=PF07714.9; Description =Protein tyrosine kinase
  Pfam module annotation: Pfam domain module=Arch_ATPase::NB -ARC::Pkinase::Pkinase_Tyr; Domain location=375-566::378-663::18 -301::18-301
MELEDVTFQVLKDVTNGFSEKQKLGEGAYGVVYRGLTKNGEEVAVKKLRDVNPDLDDKQFQNEFYNLMKLKHNNIVQILGYCYEIEQISIEHNGRIVLAEKTYRALCFEYLHNGSLQKHISDEHCGLGWHTRYKIIKGICEGIKYIHEELEKPLYHLDLKPDNILLDKDMVPKIADFGLSKIFGKELTRTSQSPLGTCGYQPPEYIERGEISKKFDIFSLGVLMIRIVSGPEGYSKSQNMPYDEFIDQVQKSWRNMLQETWSDSLLEGYCHQVQRCTQIALTCLEKDSQERPDIMMIIDMLNKIEADTVKLRQKGCHGTVPSMTMLDTVTKMRTEQLDITNQYQHFNSMMTSSRCNDQEFVDTRXKTLDAGEGQIVGRTEEKNKIMAALLSMKEKIIVLPIYGIGGIGKTTFAKLIYEDTMFKYFSRAWVYVSPRFDLNKIGNSVISQLSVKESKTNEKREMDNILTKILSNKKILIVLDDLWEDNPFQMKDLKAMLSLGENNNIIVLVTTRSEHIAKNICVTLKPYKIRPLTNDMCWDIIKQRSHFETRDDREELMGIGREIALKCGGVALAAQSLGYMLQTMKSDEWEKVKENDIWNEHISKDVCSPNHVLASLKLSYSSMDPCLTSCFTYCAVFPKGHKIVKDDLIHQWISLGFIQPKXILSPIQLCEKYIVQLLGLSFLQHSVLPTTLGAYDNGFTLYKGVTVFTMHDLGHDMDRLDMADEILDGSKQGITVESSGRYVLLTDCSKPLKSSTISYTSDE

SEQ ID NO: 79020 - protein, 420 aa, Setaria italica
  Transcript Sequence Number=SeqID_13046
  Gene Ontology: Mol. function=nucleotide binding; Biological process =defense response
  Homolog annotation: Hit_ID=B9V0H5; Match level="QueryCoverage=91%, HitCoverage=30%, E-value=1e-87, Identity=43%"; Hit description=NBS -LRR disease resistance protein family-3
  Pfam annotation: Domain name=LRR_1; Domain location=294-316; Score =5.9; E_value=22; Accession=PF00560.25; Description=Leucine Rich Repeat
  Pfam annotation: Domain name=LRR_1; Domain location=318-340; Score =11.2; E_value=2.2; Accession=PF00560.25; Description=Leucine Rich Repeat
  Pfam annotation: Domain name=LRR_1; Domain location=342-364; Score =8.9; E_value=6.1; Accession=PF00560.25; Description=Leucine Rich Repeat
  Pfam module annotation: Pfam domain module=LRR_1::LRR_1::LRR_1; Domain location=294-316::318-340::342-364
MLSQFLFNIMSRWYTNSNDLYITKVMKRQVINDLKLQWTRDAGSSVEDVEVLGKLVPPSSLREFNMTGYSSVRFPAWVMDITLYLPSLSKIELWDIRKCNSLPPLGQLTNLQELVIGVMDSITIIDGDFCGGARAFPELRKFCLCRMRNLKLWETMYSYDMGSVKKFMFPNLVELLIRDCPDLRLKPCPPGAKRWEIESSDNVLSSWGERGASSVSSSVSLTNVIVTVKSSKVPLDQWMLLHHLRAITELRIISCTDLSCNSLDIIGDLSFIKSLWLEDNTQPELPKWLGDLSSIRKMDITGCKELSDLQGSMRHLTSLQELSLIDCPRIKVLPEWLGDLTALKKLEIRYCRGINSLPQSIQKLTKLKVLAIYHCPELAKWCKIEKNKKMLAHIQVKVYVPPCYLPSPTYLSLTALLSTL

SEQ ID NO: 79021 - protein, 45 aa, Setaria italica
  Transcript Sequence Number=SeqID_13047
LWAVMDSIRLEKGDSFLNEVKSSSSLKLEDFRPQHLKRSKLDAFM

SEQ ID NO: 79022 - protein, 1429 aa, Setaria italica
  Transcript Sequence Number=SeqID_13048
  Gene Ontology: Mol. function=translation initiation factor activity; Cellular component=eukaryotic translation initiation factor 4F complex; Biological process=regulation of translation
  Homolog annotation: Hit_ID=B9SKF9; Match level="QueryCoverage=56%, HitCoverage=49%, E-value=0.0, Identity=51%"; Hit description =Eukaryotic translation initiation factor 4g, putative
  Pfam annotation: Domain name=MA3; Domain location=1317-1428; Score =48.9; E_value=2e-11; Accession=PF02847.9; Description=MA3 domain
  Pfam annotation: Domain name=MIF4G; Domain location=904-1127; Score =200.9; E_value=3.5e-57; Accession=PF02854.11; Description=MIF4G domain
  Pfam module annotation: Pfam domain module=MA3::MIF4G; Domain location=1317-1428::904-1127
  Subcellular localization annotation: CTP_CleavageSite=65; ConfidenceScore=5.47e-01
GVQMSIPFHHQPAPVPLQFGGHGPQLQPQVVPSSLQMSMGLTGSNAPQVPQQLYAPTIQHQLQQQAMMHQGQGMSYVTSVGHQFPPQLGNIPMNMPPQYPQQQNKFVAAPRKTTVKITHPDTHEELKLDKRMDSSGQRAAPNLTQQSQSQPVGSYAPHIGFFHQPSNSYNQSGIYYPPTTGVNQVPTGSSGPRFNYPVTQSGQAIPYVSPSAGPPVSGHSQMTGKPHPGGLQAEKSGTHMVTITAPPGKSDAPKPRPVEDAAASRQKDNEVVSGITVSDKSAHEKESKAPLVPEKHPAVVSLPTQGAKPQTSVTANSALPMSGADGKNKESIQRTGSFKDNKKIAIKKEARNSSEPQHSASSAEDDSGDRQETKNLNKELDLTISSSGAAAPLPESKAGIAEADSTPVNAADIPGTDRSPARPASEGTSEPQGAESVAVSAVECDENKGTPKVTTDPIKDNISSDATERKSPEVCAVDMTEQASAVTCHTGNSDAAPHVTDQEHLPKESTPSGPEQQGSSSKNSETSSHVLDGGGVAVTTSETSEPTVQGVIDGDSDISPETGLAVSNVTLISSEGQQKSETMSSDQSTAAPTASIRPVSREKPSAEITRTKSTAGKKKKRKEMLSKADAAGSSDLYNAYKGPEEKSDIMGTAEGADSSSTVDTTPVLPDEPETEASSSADDSKKKVEPDDWEDAADMSTPKLQSDSGNQSGITKVLESDTTEANGRKKYSRDFLLTLQHHCTGLPVGFQMNEAVNAIMNNLAGKSYVVDREPHPSPGRGSDRPTSRGDRRGAAMADDRWTKSGVPLSPGRDMDLANGPSIVNYRGGPGGSHGVLRNPRGQPGGGLLLGPMHSVGPQVPRSGSDADRWQQKGLMPSPVTPMQAMHKAERKYVVGKVSDEEEAKQRQLKAILNKLTPQNFEKLFEQVKEVNIDNVATLTGVISQIFDKALMEPTFCEMYANFCFHLAGALPDFSEDNEKITFKRLLLNKCQEEFERGEREEAEADKTEEEGEIKQTKEEREEKRIRARRRMLGNIRLIGELYKKRMLTERIMHECIKKLFGNYDDPDEENIEALCKLMSTIGEMIDHVKAKEHMDAYFDIMYKMSTSQKLSSRVRFMLRDSIDLRKNKWQQRRKVEGPKKIEEVHRDAAQERHAQSSRLGRGPSVSSLPRRGAPPMDYGPRGSSALASPSSQQGSIRGMPPHSRSFGGSQDIRFEERHQFDSRTPLPQRAVKDEPITLGPQGGLARGMSIRGQPPVSNSELPSVVDHRRIVSGSNGYNSLADRTSGRTPASSQSAGPSQRPASQEGRSGKKSYSDDDLREKSISAIREYYSAKDEKEVALCIEELNAPSFYPNVVSIWVNDSFERKDMERELLAKLFVSLSSGRHNLLSKGQLIDGLALVLGSLEDTLSDAPRATEYLGRLLARFVQETH

SEQ ID NO: 79023 - protein, 54 aa, Setaria italica
  Transcript Sequence Number=SeqID_13049
PWLTSDQQSIRLTALASRHKITGQLPAHLSSEIIVLEVLLGVSQLHLYHALLTD

SEQ ID NO: 79024 - protein, 152 aa, Setaria italica
  misc_feature (38)..(38): Xaa can be any naturally occurring amino acid
  Transcript Sequence Number=SeqID_13050
  Gene Ontology: Mol. function=zinc ion binding; Cellular component =intracellular
  Homolog annotation: Hit_ID=B9S2M8; Match level="QueryCoverage=86%, HitCoverage=37%, E-value=9e-20, Identity=38%"; Hit description =Shwachman-Bodian-Diamond syndrome protein, putative
MCLQVCEIEPSILHSCEERLKDVQGRVEVLSVSAHAEXGLSVEQDDNVEVLQAAPAKQSDAVAQITETMQKQSISTETQGSAQGKQQRRCKECDVLVDDKLYREHCKSGWHKHNYTRHKNGLPPLSQEECMVEMEFGLYFLSKVPSKVLIVF

SEQ ID NO: 79025 - protein, 355 aa, Setaria italica
  Transcript Sequence Number=SeqID_13051
  Gene Ontology: Mol. function=microtubule binding; Cellular component =spindle pole; Biological process=inner cell mass cell proliferation
  Homolog annotation: Hit_ID=B9S2M8; Match level="QueryCoverage=100%, HitCoverage=100%, E-value=1e-130, Identity=63%"; Hit description =Shwachman-Bodian-Diamond syndrome protein, putative
  Pfam annotation: Domain name=SBDS; Domain location=15-105; Score =179.2; E_value=1.2e-50; Accession=PF01172.10; Description=Shwachman -Bodian-Diamond syndrome (SBDS) pro
  Pfam annotation: Domain name=SBDS_C; Domain location=108-230; Score =190.5; E_value=4.5e-54; Accession=PF09377.2; Description=SBDS protein C-terminal domain
  Pfam module annotation: Pfam domain module=SBDS::SBDS_C; Domain location=15-105::108-230
MSRTLVQPVGQKRLTNVAVVRLRKHGQRFEIACFPNKVLSWRSRTEKDLDEVLQSHTVYSNVSKGVLAKSKELIKAFGTDDQTKICIEILEKGELQVSGKEREAQLSSQFRDIATIVMEKTINPETRRPYTITMIERLMHEIHFAVDPNLTSKEQALKVIKKLIEHFPIKRAPLRVRFTAPKPNFAGLMEKVAEWNATVISKDESGTQPSIVCEIEPSILHSCEERLKDVQGRVEVLSVSAHAEGGLSVEQDDNVEVLQAAPAKQSDAVAQITETMQKQSISTETQGSAQGKQQRRCKECDVLVDDKLYREHCKSGWHKHNYTRHKNGLPPLSQEECMVEMELADSKKDLKDYDF

SEQ ID NO: 79026 - protein, 77 aa, Setaria italica
  Transcript Sequence Number=SeqID_13052
  Gene Ontology: Mol. function=iron-sulfur cluster binding; Biological process=metabolic process
  Homolog annotation: Hit_ID=Q7X7U6; Match level="QueryCoverage=100%, HitCoverage=12%, E-value=3e-21, Identity=70%"; Hit description =OSJNBa0088K19.13 protein
  Subcellular localization annotation: CTP_CleavageSite=36; ConfidenceScore=5.11e-01
MEDIEDVLGPAGLSGGGAPPGLRLPLSTVAVKPKRRSSRVAQTPPQPEARIPGTQTIYVKTFGCSHNQSDSEYMSGQ

SEQ ID NO: 79027 - protein, 65 aa, Setaria italica
  Transcript Sequence Number=SeqID_13053
  Gene Ontology: Mol. function=catalytic activity; Biological process =metabolic process
  Homolog annotation: Hit_ID=B6TV46; Match level="QueryCoverage=100%, HitCoverage=14%, E-value=3e-25, Identity=87%"; Hit description =Mitochondrion protein
LTYGTAEQVLVDAEEIMYIVKELWRGRSARDQNQKDTGRKMWRSVNELMLVRWDKSKPAGSSSFI

SEQ ID NO: 79028 - protein, 267 aa, Setaria italica
  Transcript Sequence Number=SeqID_13054
  Gene Ontology: Mol. function=catalytic activity; Cellular component =mitochondrial outer membrane; Biological process=metabolic process
  Homolog annotation: Hit_ID=B6TV46; Match level="QueryCoverage=100%, HitCoverage=58%, E-value=1e-146, Identity=94%"; Hit description =Mitochondrion protein
DCIDNIDTKVALLAACVRRGLKVLSAMGAGARADPTRIRVADLRESSNDPLSRSVRYRLKKEHGIEGGIPVVFSLEKPKAKLLPFQASKEEETPSDYQIVPGFRVRIIPVLGTIPAIFGQVMASYVVTQLAGLDFQTEPVVNLDLDHYCILHQRLIEHEELTYGTAEQVLVDAEEIMYIVKELWRGRSARDQNQKDTGRKMWRSVNELMLVRWDKSKPAGASNLILLKFSEADAHESTTLDHIKEEEPEFYSMVTRVLKRAEVEFGL

SEQ ID NO: 79029 - protein, 43 aa, Setaria italica
  Transcript Sequence Number=SeqID_13055
MADAPASPGGGGGSHESGSPRGGGGGGGGGVREQDRFLPIANI

SEQ ID NO: 79030 - protein, 188 aa, Setaria italica
  Transcript Sequence Number=SeqID_13056
  Gene Ontology: Mol. function=transferase activity, transferring glycosyl groups; Biological process=metabolic process
  Homolog annotation: Hit_ID=B6TIY9; Match level="QueryCoverage=85%, HitCoverage=36%, E-value=3e-51, Identity=66%"; Hit description =Cytokinin-N-glucosyltransferase 1
MATAAAGGRRRRVLFFPLPYQGHINPMFQLAGLLHARGFSITVFHVRFNAPDASAHPAYDFVSVPDDGMPADSPDTVQATMDHIVSVNRACEAPFRERLAALLERQRARAEDVACLVADSHLLTLLGVARGLGVPTLALRLGSAACFRCLTAFPMLCDKGYLPVQESSQLDAPVVELPPYRIGDLPAR

SEQ ID NO: 79031 - protein, 207 aa, Setaria italica
  Transcript Sequence Number=SeqID_13057
LFDAKAKQVSGKRDGFGAHVVKQRDEIKGKTEICGANMKRQSEEIGGRREGSDSKAKAGEEISGRKEGLNIKLVKEIPGENADSGEASSNAADFSATQKDDEEGNGSVIPVFTVHVVDPIDVPGAAREQQKNNEECKKQEEKSKLADKIRVFEKAAAGGEGRSAKPVSAVNKYPSKLHEKLAALEGRVQKIATDIKKTKEMLDENNP

SEQ ID NO: 79032 - protein, 262 aa, Setaria italica
  Transcript Sequence Number=SeqID_13058
  Gene Ontology: Mol. function=oxidoreductase activity; Biological process=metabolic process
  Homolog annotation: Hit_ID=B6TFA0; Match level="QueryCoverage=99%, HitCoverage=67%, E-value=1e-109, Identity=78%"; Hit description=D -amino acid oxidase
  Pfam annotation: Domain name=DAO; Domain location=3-234; Score=-0.9; E_value=1.3e-05; Accession=PF01266.16; Description=FAD dependent oxidoreductase
SAAPPRELGTPDTTAQVHPGLFTRAVLAASGAEVVTGEVERVVVRDGRAAGVVVKGRERDGVVDADAVVLALGPWSGRLEVVSEVFDVSGLKAHSIVLRPPEPEKVTPHCLFLSYQPEPGAKMLDPEVYPRPTGEVYICGMTKDENPPDDPATITGEPDSIAMLHKIAGRVSSQLKKEEGAEVVVEQACYLPCTTDGLPVIGEMPGVKGCYVATGHSCWGILNAPATGAALAELILDGKAKIVDLAPFSPARFLGRRSRCGA

SEQ ID NO: 79033 - protein, 262 aa, Setaria italica
  Transcript Sequence Number=SeqID_13059
  Gene Ontology: Mol. function=sequence-specific DNA binding; Cellular component=nucleus
  Homolog annotation: Hit_ID=Q9LQJ8; Match level="QueryCoverage=89%, HitCoverage=12%, E-value=2e-43, Identity=45%"; Hit description =F28G4.7 protein
VTPPLVQISSSLTCAESFYGVDHQKLMDGKTLTRTLNKLQKEGSCKCIKVSVPLVTNYTRSRLIDVVLHSSVGELSPELVDQFRIRQRNFDTESRAVAAAKVKQNQHMTAIPGLRISRRVNVYKPLLLEAMYANGFINAKMIRAKLLHKFLWAYVNASPDWCSAFGCAKEGHYDKSFNQSYLLFSMEAATKEMPLELFLQVVGSSKKIDNMITWCRLGKTLSEIPTEEYNQLMDTHAKGRLSRLINILDKLKLVQFAKEFVE

SEQ ID NO: 79034 - protein, 197 aa, Setaria italica
  misc_feature (16)..(16): Xaa can be any naturally occurring amino acid
  misc_feature (64)..(64): Xaa can be any naturally occurring amino acid
  Transcript Sequence Number=SeqID_13060
  Homolog annotation: Hit_ID=B5BRE2; Match level="QueryCoverage=78%, HitCoverage=8%, E-value=8e-09, Identity=28%"; Hit description =Transcription factor
KNCIYDMISAQGTKGXTLVEIGKRLGHNNSKRLHKRVSSMLKKFNLTWEAEVPDKTSQYRVWTXKNFSLYKAGTALQNFGALSEDCDDCPDLWSLVPSKELDSSSPHGNLLLLEQESHDEPIEHHIQNDLDASARVCQLVEEDKVALGQRKRRRSRPLTSDDQRHRRILHMLKKKKFVLKVELHKWLERLERRTENN

SEQ ID NO: 79035 - protein, 81 aa, Setaria italica
  Transcript Sequence Number=SeqID_13061
  Gene Ontology: Mol. function=nucleic acid binding; Cellular component= chloroplast; Biological process=cell redox homeostasis
  Homolog annotation: Hit_ID=B6TGT1; Match level="QueryCoverage=100%, HitCoverage=36%, E-value=2e-35, Identity=92%"; Hit description =Thioredoxin-like 6
ENKPMCKRLNVKVLPFFHFYRGADGLLEAFSCSLAKFQKLKDAIAIHNTARCSIGPPVGVGYVDLLDSASQQEKPAEASPR

SEQ ID NO: 79036 - protein, 95 aa, Setaria italica
  Transcript Sequence Number=SeqID_13062
  Gene Ontology: Mol. function=binding; Cellular component=plasma membrane
  Homolog annotation: Hit_ID=B9SS47; Match level="QueryCoverage=90%, HitCoverage=11%, E-value=3e-20, Identity=63%"; Hit description=O -linked n-acetylglucosamine transferase, ogt, putative
MEGRKRRGRFRNSVRRMAMECLCSGEQLKGADETVRSSDSTITKDFSASGYSSRNGEIEQYLDNGNIEEAELSLREGICLNYEEARALLGRLEYQ

SEQ ID NO: 79037 - protein, 870 aa, Setaria italica
  misc_feature (464)..(464): Xaa can be any naturally occurring amino acid
  misc_feature (495)..(495): Xaa can be any naturally occurring amino acid
  misc_feature (528)..(528): Xaa can be any naturally occurring amino acid
  Transcript Sequence Number=SeqID_13063
  Gene Ontology: Mol. function=calcium ion binding; Cellular component =plasma membrane; Biological process=intracellular protein transport
  Homolog annotation: Hit_ID=B9R8Q3; Match level="QueryCoverage=95%, HitCoverage=79%, E-value=1e-108, Identity=55%"; Hit description =Calcium ion binding protein, putative
  Pfam annotation: Domain name=efhand; Domain location=40-68; Score =17.0; E_value=0.079; Accession=PF00036.24; Description=EF hand
  Pfam annotation: Domain name=efhand; Domain location=422-450; Score =13.1; E_value=0.79; Accession=PF00036.24; Description=EF hand
  Pfam annotation: Domain name=efhand; Domain location=456-484; Score =23.5; E_value=0.00084; Accession=PF00036.24; Description=EF hand
  Pfam annotation: Domain name=efhand; Domain location=6-34; Score =16.8; E_value=0.088; Accession=PF00036.24; Description=EF hand
  Pfam module annotation: Pfam domain module=efhand::efhand::efhand::efh and; Domain location=40-68::422-450::456-484::6-34
MAGMEAFEAYFRRADLNQDGRISGQEAVAFFQGANLPQQVLAQVWMHADQNKTGFLGRPEFFNALRLVTVAQSGRQLTPDIVQSALYGPAAARIPAPKIATGQAPPQMGAAGAARPQGSAAMTPTPGQVGAVAAAPRPQGTGVIPTSTQVSMPQVNPGAAPRPQGINSIMPAASQGGALQATQFAGPRAMQSQPPNMGFNQQPPSSTGFMRPPQVGVPASSLQAQAPGTNQGPLGGGGMGGSVGWQGSNVASAGGIPQATPGVAPSQTTRGGFGLGLPGSVGMAPGQQVQAMSSSPLPPQSNIAVSPQDSKALVLSGNGPASSSGSSTDIFSALTQPKPSVSAPAPQTSSIPSSSSFMSTPTGSQNLTNLGQLGSLQGSSQPQQTQPITKPNLPVSAAPVVSAGVSNSASQWPKISQSDIQKYMKVFGDVDRDRDGKITGVEARTLFLSWRLPREVLKQVWDLXDQDNDGMLSLREFCIALYLMERHRAGTPLPXALPDSLRHDETLLRATGLPSTAYNGPSWQQNQXQRGPGVPGVPTGGVRPPLPPHLHSQADATSRSGQPRSHMPGMDNHVVTQGSKDDRSGMNTAVQEVADAPKKVEVEKQVLDSREKLEFYRTKMQDLVLYKSRCDNRLNEITERASSDKREVESLAKKYEEKYKQVAELASKLAVEEAAFRDVQERKVELHDALVKMVQGGSVDGLLQVRADRIQHQLEEMEKALSERCKHFGLQFKSSATVELPSGWEPGPQEGTIEWDEDWDKFEDEGFGIVKDNGTIHENPVSAENTKVPSLWDDGDDMSPVASSNGHIKDERRYSGGDRVAESEIGYDFGDDSVRSPGSAGRSASGSPFKSSRLRQDQTYKQELTKYLNY

SEQ ID NO: 79038 - protein, 154 aa, Setaria italica
  Transcript Sequence Number=SeqID_13064
  Subcellular localization annotation: CTP_CleavageSite=47; ConfidenceScore=5.40e-01
PQSSSPHAARPSSLPGFHPFAASIVAALSRPPLCSRVGDERPPGCVSATARPHHPDLLSRWRGPGRRCGPPAHRTRSRLPPVAPWRPPVDTVLPAAALRWCRRSVPWSWIPPPGRRPAPPPKPPPHASPGHMPPPPPPHLRLYEFAKTALILKF

SEQ ID NO: 79039 - protein, 480 aa, Setaria italica
  Transcript Sequence Number=SeqID_13065
  Gene Ontology: Mol. function=protein heterodimerization activity; Cellular component=microtubule; Biological process=cell division
  Homolog annotation: Hit_ID=Q7XKB3; Match level="QueryCoverage=99%, HitCoverage=50%, E-value=0.0, Identity=90%"; Hit description =OSJNBa0064G10.18 protein
  Pfam annotation: Domain name=WD40; Domain location=135-173; Score =58.3; E_value=3e-14; Accession=PF00400.24; Description=WD domain, G -beta repeat
  Pfam annotation: Domain name=WD40; Domain location=177-215; Score =51.1; E_value=4.3e-12; Accession=PF00400.24; Description=WD domain, G-beta repeat
  Pfam annotation: Domain name=WD40; Domain location=219-256; Score =8.7; E_value=3.7; Accession=PF00400.24; Description=WD domain, G -beta repeat
  Pfam annotation: Domain name=WD40; Domain location=51-89; Score=33.0; E_value=1.2e-06; Accession=PF00400.24; Description=WD domain, G-beta repeat
  Pfam annotation: Domain name=WD40; Domain location=8-47; Score=27.0; E_value=7.5e-05; Accession=PF00400.24; Description=WD domain, G-beta repeat
  Pfam annotation: Domain name=WD40; Domain location=93-131; Score =48.6; E_value=2.5e-11; Accession=PF00400.24; Description=WD domain, G-beta repeat
  Pfam annotation: Domain name=eIF2A; Domain location=6-190; Score= -99.7; E_value=0.0051; Accession=PF08662.3; Description=Eukaryotic translation initiation factor eIF
  Pfam module annotation: Pfam domain module=WD40::WD40::WD40::WD40::WD4 0::WD40::eIF2A; Domain location=135-173::177-215::219-256::51-89::8 -47::93-131::6-190
MTTNTKRAYKLQEFVAHSSNVNCLKIGRKTSRVLVTGGEDHKVNLWAIGKPNSILSLSGHTSAVESVGFDSTEVFVAAGAASGTIKLWDLEEAKIVRTLTGHRSNCMSVDFHPFGEFFASGSLDTNLKIWDIRRKNCIHTYKGHTRGVNAIRFTPDGRWVVSGGEDNTVKLWDLTAGKLLHEFKCHEGQIQCIDFHPHEFLLATGSADKTVKFWDLETFELIGSTGPETTGVRSMTFNPDGRSLLCGLHESLKVFSWEPIRCHDTVDVGWSRLADLNVHEGKLLGCSFNQSCVGIWVVDLTRLEPYATGTSTKLNGHSELKTVSSGTMPLQNDTGSKANIGRSSVLQNSENNLKASSGRLSVSQNSDSALKETKSTASSGLVPSTPQRAGVGSNNRSFGNSAFASGGTTLKRSSLRSHNASSVSNFSKSDVVPVIVPRTSSGGELATDSRSDAADVAPVLSKATRRVDPATDSRKEVLMW

SEQ ID NO: 79040 - protein, 309 aa, Setaria italica
  misc_feature (74)..(74): Xaa can be any naturally occurring amino acid
  Transcript Sequence Number=SeqID_13066
  Homolog annotation: Hit_ID=Q8H3E3; Match level="QueryCoverage=99%, HitCoverage=20%, E-value=1e-58, Identity=50%"; Hit description =Transcription factor (PWWP domain protein)-like protein
EDSQQQDSCMQDNLALSWRSGSSLGAELITSQDSDGLMNVTNLLSVDLVPGDKQEDSARHKFVVDEKPARVPLXVTKDAVLLHSSQATCSQLAPSGASNDDKPSNAEDNVQCTCSNEVSQTGVRDKEVKLNGMVDLPMSTTRTFKRKRRQNNSRANNPVSSEVTNMNRELQSKSNGDIVYSPNSRNEINKSDGDEHLPLVKRARVRMERRTPKDATADEHDHSYDKTEPAKHEDPCYKHATPAISGNDQSADDIPPSVDASPKIKLPMPSGVVPDYCNNNKEYQPKVLTLDVEAALPPSKRLHRALEAM

SEQ ID NO: 79041 - protein, 65 aa, Setaria italica
  Transcript Sequence Number=SeqID_13067
  Subcellular localization annotation: CTP_CleavageSite=53; ConfidenceScore=5.75e-01
MASTVTSSASTQAGLIQKPRNHGVTRYSGLKTSSSSVSFGLESSFLGRNASLRASVASRIVPKAT

SEQ ID NO: 79042 - protein, 669 aa, Setaria italica
  Transcript Sequence Number=SeqID_13068
  Gene Ontology: Mol. function=signal transducer activity; Biological process=G-protein coupled receptor protein signaling pathway
  Homolog annotation: Hit_ID=Q2QMS5; Match level="QueryCoverage=100%, HitCoverage=74%, E-value=0.0, Identity=77%"; Hit description=Extra -large guanine nucleotide binding protein, putative, expressed
  Pfam annotation: Domain name=G-alpha; Domain location=234-655; Score =8.6; E_value=1.3e-19; Accession=PF00503.12; Description=G-protein alpha subunit
AEGGGFWGRDKESCLACGARYCAGCVLRAMGSMPEGRKCLDCIGRPVAESRRDALGRGSRVLRRLLSAAEVELVMRSERECVANQLRADDVYVNGSRLSPEELVVLQGCPCPPSRLRPGFYWYDKVSGFWGKEGHKPHCIISANLNVGGSLDQKASNGNTGILINGREITKSELQMLKLAGVQCAGKPHFWVNADGTYQEEGQKTVKGKIWDKPIVKLLSPVLSLPTPNKAANQCGGEAVHMVNRPIPDYLEQRTVQKLLLVGSGASTILKQAKFLYKNKPFSADEREDLKLIIQSNIYNYLGILLEGRERFEDEDLADRRRNSQRDTSSSGCGESGSCDEVTEYSLIPRLKAFSDWILKAMALGNLEDIFPAASREYAPLVEELWKDRAIQATYKRRSELPFLPPAANYFLDKAVDISRTEYELSDMDILYADGITSSDGLASTEFSFPHMSLGGQGADEPDPQDTLLRYQLIRINSRGLHENCKWLQMFDDVRLVIFCVAASDYDEYYEDANGTIVNKMIESRQLFESIALHPTFEQMGFLLLLTKFDLLEQKISSSPLTSCHWFDDFTPLISSSLLNGSSRSTRSGSQTSSTLPQMAAHYMATKFKRLFDSLTGRKLYVSYVNTLDQESIRSAIRYGREIIKWEEEKPVFGASETVYSEEPSSFTH

SEQ ID NO: 79043 - protein, 106 aa, Setaria italica
  Transcript Sequence Number=SeqID_13069
YQAVDNWRPFGMNFSPTPLTACASSSIAYKRTDKIIKYNDRNGNEHNTLRQKFKAYMRTLHEFQIINTVYPMILRKRYWLHTFLLCNFQWIKSFFTMWTQSLNKAY

SEQ ID NO: 79044 - protein, 389 aa, Setaria italica
  Transcript Sequence Number=SeqID_13070
  Gene Ontology: Mol. function=DNA-directed RNA polymerase activity; Cellular component=nucleus; Biological process=transcription
  Homolog annotation: Hit_ID=B9S9W7; Match level="QueryCoverage=92%, HitCoverage=95%, E-value=1e-136, Identity=66%"; Hit description=DNA -directed RNA polymerase I/III subunits, putative
  Pfam annotation: Domain name=RNA_pol_A_bac; Domain location=131-274; Score=80.5; E_value=5.9e-21; Accession=PF01000.18; Description=RNA polymerase Rpb3RpoA insert domain
  Pfam annotation: Domain name=RNA_pol_L; Domain location=98-386; Score= 86.3; E_value=1.1e-22; Accession=PF01193.16; Description=RNA polymerases L  13 to 16 kDa subunit
  Pfam module annotation: Pfam domain module=RNA_pol_A_bac::RNA_pol_L; Domain location=131-274::98-386
QGYKSEQRGKTRVRQYAKEEGEPKSKNQVGDVPDQQENKLPDHLELQRTRVVCNADAPIHTQGFQYSGTYAATGVDNSVSVEKFCKNFKIDIKRLTEDDMEFDMIGVDASIANAFRRILISEVPTMAIEKIFMADNTSVIADEVLSHRLGLIPLDADPRLFDYISENDVPNERNTIVYKLHVSCPKKGSQRITVKSGELEWLPEGSQLSMASPGQSGDKQKTFTSFSQSQKDILQKPLGVKFKDITIARLGAGQAIELEAHAVKGVGKVHAKWSPVATAWYRMLPEVEILNQIEGVDAEELVKKCPVNVFDIEDLGDGRKRAIVAKPRACTLCRQCVMGPSGDKIQLRRVRDHFIFTIESTGALPPEVLFTEAVKILEGKCEKVISELS

SEQ ID NO: 79045 - protein, 99 aa, Setaria italica
  misc_feature (84)..(84): Xaa can be any naturally occurring amino acid
  Transcript Sequence Number=SeqID_13071
  Gene Ontology: Mol. function=phosphotransferase activity, alcohol group as acceptor; Cellular component=cytoplasm; Biological process =nucleoside metabolic process
  Homolog annotation: Hit_ID=Q0J0L4; Match level="QueryCoverage=100%, HitCoverage=19%, E-value=3e-45, Identity=90%"; Hit description =Uridine kinase
  Pfam annotation: Domain name=PRK; Domain location=1-99; Score=-68.6; E_value=0.034; Accession=PF00485.10; Description=Phosphoribulokinase Uridine kinase family
LTAEESAHAQDYNFDHPDAFDTEQLLECMGQLKRAQPVNVPIYDFKKHRRCSETFRKVAITYVIILEGILVFHDQRVRNLMDMXKFFVDTDADIRLARR

SEQ ID NO: 79046 - protein, 472 aa, Setaria italica
  Transcript Sequence Number=SeqID_13072
  Gene Ontology: Mol. function=phosphotransferase activity, alcohol group as acceptor; Cellular component=endoplasmic reticulum; Biological process=nucleoside metabolic process
  Homolog annotation: Hit_ID=B9G1X9; Match level="QueryCoverage=88%, HitCoverage=71%, E-value=0.0, Identity=88%"; Hit description=Uridine kinase
  Pfam annotation: Domain name=CoaE; Domain location=53-229; Score= -87.8; E_value=0.018; Accession=PF01121.12; Description=Dephospho-CoA kinase
  Pfam annotation: Domain name=PRK; Domain location=54-241; Score =200.9; E_value=3.5e-57; Accession=PF00485.10; Description =Phosphoribulokinase  Uridine kinase family
  Pfam annotation: Domain name=Pribosyltran; Domain location=288-422; Score=5.4; E_value=0.0031; Accession=PF00156.19; Description =Phosphoribosyl transferase domain
  Pfam module annotation: Pfam domain module=CoaE::PRK::Pribosyltran; Domain location=53-229::54-241::288-422
  Subcellular localization annotation: CTP_CleavageSite=58; ConfidenceScore=5.67e-01
KTGSASTRAASPHPPPRSRPRPPPTATATATARPTPPPKGSSPPRRTGPGRPFVIGVSGGTASGKTTVCDMIIQQLHDHRVVLVNQDSFYRGLTEEQSEHVQDYNFDHPDAFDTDQLLECMGKLKSGQSVNIPIYDFKNHRRCSESFRKVNASDVIILEGILVFHDQRVRDLMDMKIFVDTDADIRLARRIRRDTVERGRDVTSVLEQYGRFVKPAFDDFVLPSKKYADVIIPKGGDNHVAIDLIVQHIRTKLGQHDLCKIYPNVFVVHTTFQIRGMHTLIRDRNITTPDFVFYSDRLIRLVVEHGLGHLPFTEKQVVTPTGSVYMGVDFCKKLCGVSIVRSGESMENALRACCKGIKIGKILIHRVGDNGQQLIYHKLPLDIAERHVLLLDPVLGTGNSANQAIELLIRKGVPEERIIFLNLISAPEGVNCVCKRFPRLKIVTSEIDGGLNEEYRVIPGLGEYGDRYFGTD

SEQ ID NO: 79047 - protein, 76 aa, Setaria italica
  Transcript Sequence Number=SeqID_13073
PLVRLDRRPFIHRRFPYPEVLTSATILDEELGGMQLLMEASDFSSSTVKLSMNLMHTASIEKMESMKIYQLRRWNQ

SEQ ID NO: 79048 - protein, 192 aa, Setaria italica
  Transcript Sequence Number=SeqID_13074
  Gene Ontology: Mol. function=electron carrier activity; Biological process=oxidation reduction
  Homolog annotation: Hit_ID=C0KHM1; Match level="QueryCoverage=100%, HitCoverage=35%, E-value=3e-56, Identity=59%"; Hit description =Putative ferulate 5-hydroxylase
MDKAYVAVLTFAFLFVLHYLVARVGGGGNGGKGNGKGNKAARRLPPSPPAVPFLGHLHLVKTPFHAALARLAARHGPVFSMRMGSRRAVVVSSPECARECLTENDVCFANRPRSPSTGLVSFGGNSLSMASYGPYWRNLRRVASVQLLSAHRVSCMSPVISAEVRAMVRRINRAAAAAAGGAARVQLKRRLF

SEQ ID NO: 79049 - protein, 699 aa, Setaria italica
  Transcript Sequence Number=SeqID_13075
  Gene Ontology: Biological process=slug development during sorocarp development
  Homolog annotation: Hit_ID=B9T4Y7; Match level="QueryCoverage=95%, HitCoverage=63%, E-value=0.0, Identity=70%"; Hit description =Aldehyde dehydrogenase, putative
  Pfam annotation: Domain name=FG-GAP; Domain location=420-443; Score =5.3; E_value=1.8; Accession=PF01839.15; Description=FG-GAP repeat
  Pfam annotation: Domain name=FG-GAP; Domain location=48-77; Score =20.5; E_value=0.0069; Accession=PF01839.15; Description=FG-GAP repeat
  Pfam annotation: Domain name=FG-GAP; Domain location=623-652; Score =22.3; E_value=0.002; Accession=PF01839.15; Description=FG-GAP repeat
  Pfam module annotation: Pfam domain module=FG-GAP::FG-GAP::FG-GAP; Domain location=420-443::48-77::623-652
MRKRDLGILLLAAFAVFFSLHHEGDFSFRESWYHLADEDFPIKYEADRLPPPLIADLNGDGKPEVLLPTHDAKIQVLQPPHARHINDDTSFHEARLMADISLLPDNVRVASGRRPIAMAVGNVDRSYRAGDVRKQVLVVVTSGWSVLCFDHNLKKLWEQNLQDDFPHGAHHREVAISITNYTLKHGDAGLVIVGGRMEMQHHSADLFDEFMMPEDHRRSTDEKQGSETGTADLRHFALYAFAGRTGERRWSRKNENIQSQPSDASVMIPQHNYKLDVHALNSRQPGQFECREFRESILGVMPHHWDRREDTTLQLAHFRRHKRKQVKKTQGKAAINSVNKPIEHNPPGKDASNRIARVLGKAADIASSNKVRKTQRTMYIPTITNHTQVWWVPNVIVAHEKEGIEAVHLASGRTICKLHLTEGGLHADINGDGVLDHVQVVGGNGIKEQTVVSGSMEVLKPCWAVATSGVPVREQLFNVSICHYNHFNLFHHGDFSRSFGRKFDTTGLEVATPILVQTDDGHKHRRGSHGDIVFLTSQGEVTSYSPGLLGHDAVWRWQVSTGATWSNLPSPSGMMENIVVPTLKAFSLRSYDRKEVIIAGGDQEAVVLSPSGGILAIIELPAPPTHALIMEDFSGDGLTDMVVVTSGGVYGFVQIRQPGALFFSTLVGCLIVVIGVIFVSLHLNSSSSGKPRASSAEYR

SEQ ID NO: 79050 - protein, 64 aa, Setaria italica
  Transcript Sequence Number=SeqID_13076
KKKILWNLLFHVQIVRKLELVLGEVCNLNLNQDIRDVIALSVIIIQRSHVTFEAKCLTLYTPKK

SEQ ID NO: 79051 - protein, 63 aa, Setaria italica
  Transcript Sequence Number=SeqID_13077
  Subcellular localization annotation: CTP_CleavageSite=51; ConfidenceScore=5.09e-01
PMSTVTNLILTGYKSDTHRRFQAPSSSQFYRPHHFTSPLFKIYGSTCDRPCEAKESALIRALA

SEQ ID NO: 79052 - protein, 118 aa, Setaria italica
  Transcript Sequence Number=SeqID_13078
  Gene Ontology: Mol. function=metal ion binding; Cellular component =integral to membrane; Biological process=ubiquitin-dependent protein catabolic process
  Homolog annotation: Hit_ID=B9SNU8; Match level="QueryCoverage=39%, HitCoverage=12%, E-value=3e-10, Identity=51%"; Hit description=Ring finger protein, putative
  Pfam annotation: Domain name=zf-C3HC4; Domain location=52-93; Score =32.5; E_value=1.8e-06; Accession=PF00097.17; Description=Zinc finger, C3HC4 type (RING finger)
YALCLANIIVMVVWLSPDSGAAASSAAKSFLRLSDDEDEGSTGGSAGADDKCCVCLAGMREDQALRALPRCGHRFHDKCIGKWLKAHPTCPVCRATAVPPLQDGGGGDPLDDDIISPV

SEQ ID NO: 79053 - protein, 61 aa, Setaria italica
  Transcript Sequence Number=SeqID_13079
  Gene Ontology: Mol. function=electron carrier activity; Cellular component=cytoplasm; Biological process=tRNA wobble uridine modification
  Homolog annotation: Hit_ID=Q1EP54; Match level="QueryCoverage=75%, HitCoverage=6%, E-value=5e-18, Identity=91%"; Hit description =Glucose-inhibited division A family protein
VIISGVNAARHSDGKSLIILERESSYIGTLIDDLVTKDLREPYRMLTRCIISVENILIIDA

SEQ ID NO: 79054 - protein, 294 aa, Setaria italica
  Transcript Sequence Number=SeqID_13080
  Gene Ontology: Mol. function=electron carrier activity; Cellular component=cytoplasm; Biological process=tRNA wobble uridine modification
  Homolog annotation: Hit_ID=Q1EP54; Match level="QueryCoverage=99%, HitCoverage=40%, E-value=1e-132, Identity=77%"; Hit description =Glucose-inhibited division A family protein
LEVEGLFFSGQINGTTGYEEAAAQGIISGVNAARHSDGKSLIILERESSYIGTLIDDLVTKDLREPYRMLTSRSEHRLLLRADNADSRLTPLGRDIGLIDDRRWELYQSKQARIKQEKERLKSTKVPGGEFAAEVSAVSNQPVKDSSTLEAILKKPHVQYKLLDKHGFGNENLSRIEKECIEIDIKYEGFIARQQSQLHQIVNQEHRKLPEDLDYHSMKNLSIEAREKLSRVRPQTIGQASRIGGVSPADMTVLLIWMESNRRMANHRRQQDQLRAAAVKVDDSSEEVARASTA

SEQ ID NO: 79055 - protein, 270 aa, Setaria italica
  Transcript Sequence Number=SeqID_13081
  Homolog annotation: Hit_ID=Q2MLZ1; Match level="QueryCoverage=74%, HitCoverage=91%, E-value=7e-42, Identity=50%"; Hit description =Putative PRLI-interacting factor A (Fragment)
  Subcellular localization annotation: CTP_CleavageSite=34; ConfidenceScore=5.00e-01
RAKRSGGIASLVSPCPVTPAVLPTPRLSPSREGLADMAQAQWGVDGYGSMKGLIRLRSSPQPANPNATAASDDDEEGNSSGSDVEEHVEVERRLDHDLSRFEMVYPGRGEDAGGYVFEDDDEYDQDAHVARLEEENLTLKERLFLMEQEVGDMRRRLEALEARFSQCNEHDAERVHLGSGEGGGETAAKQGAVGLEETGNHDAEEQGAVCGSEKAGETDAEEQGAVCGSKKAGDHDAMTLGTEKTDEHKIQMVDSALEKKMGEDNVEVRD

SEQ ID NO: 79056 - protein, 209 aa, Setaria italica
  misc_feature (142)..(142): Xaa can be any naturally occurring amino acid
  Transcript Sequence Number=SeqID_13082
  Gene Ontology: Mol. function=protein serine/threonine kinase activity; Biological process=protein amino acid phosphorylation
  Homolog annotation: Hit_ID=B9A1H1; Match level="QueryCoverage=98%, HitCoverage=53%, E-value=7e-67, Identity=39%"; Hit description =Putative LRR-kinase protein
  Pfam annotation: Domain name=LRR_1; Domain location=121-143; Score =5.4; E_value=28; Accession=PF00560.25; Description=Leucine Rich Repeat
  Pfam annotation: Domain name=LRR_1; Domain location=145-167; Score =6.7; E_value=16; Accession=PF00560.25; Description=Leucine Rich Repeat
  Pfam annotation: Domain name=LRR_1; Domain location=170-192; Score =1.8; E_value=1.4e+02; Accession=PF00560.25; Description=Leucine Rich Repeat
  Pfam annotation: Domain name=LRR_1; Domain location=194-208; Score =2.6; E_value=98; Accession=PF00560.25; Description=Leucine Rich Repeat
  Pfam annotation: Domain name=LRR_1; Domain location=24-46; Score =13.6; E_value=0.75; Accession=PF00560.25; Description=Leucine Rich Repeat
  Pfam annotation: Domain name=LRR_1; Domain location=49-71; Score =16.3; E_value=0.13; Accession=PF00560.25; Description=Leucine Rich Repeat
  Pfam annotation: Domain name=LRR_1; Domain location=73-95; Score=5.2; E_value=30; Accession=PF00560.25; Description=Leucine Rich Repeat
  Pfam annotation: Domain name=LRR_1; Domain location=97-119; Score =9.5; E_value=4.6; Accession=PF00560.25; Description=Leucine Rich Repeat
  Pfam module annotation: Pfam domain module=LRR_1::LRR_1::LRR_1::LRR _1::LRR_1::LRR_1::LRR_1::LRR_1; Domain location=121-143::145-167::170- 192::194-208::24-46::49-71::73-95::97-119
  Subcellular localization annotation: CTP_CleavageSite=79; ConfidenceScore=5.03e-01
NKQGLEANDSQGWEFITSLANSSQLQLLILGNNSFSGQLPNSVANLSSTLQSLYLGDNMISGNIPINIGNLVGLTVFVMGNTSVSGQIPESIGQLRNLGVLGLYNTSLSGLIPSSLGNLTQLNRLYAYYGNLEGPIPSNLGXLKNVFVFDLSTNRLNGSIPIEVLKLPRLSWYLDLSYNSLSGPLPTEVGTMVNLNELILSGNKLSDTI

SEQ ID NO: 79057 - protein, 81 aa, Setaria italica
  Transcript Sequence Number=SeqID_13083
  Subcellular localization annotation: CTP_CleavageSite=64; ConfidenceScore=5.09e-01
GNQDRLAKATAAGRRRAQAGTRGADSFRHSLLLEPKQTPHRLQGTASRRRVSFPTRKIIIQPSRSGAAATGGADTTGQVLE

SEQ ID NO: 79058 - protein, 587 aa, Setaria italica
  Transcript Sequence Number=SeqID_13084
  Gene Ontology: Mol. function=zinc ion binding; Cellular component =intracellular
  Homolog annotation: Hit_ID=Q5Z4U6; Match level="QueryCoverage=94%, HitCoverage=76%, E-value=0.0, Identity=76%"; Hit description =Putative C2H2 zinc-finger protein
  Pfam annotation: Domain name=ARS2; Domain location=292-494; Score= -78.6; E_value=0.0052; Accession=PF04959.5; Description=Arsenite -resistance protein 2
YGYDDRRRGYDYERGGGRGGYDDDRNHGRYPNRAPDWHDSGYGAANDGPGITQREGLMTYKQFMQVLEDDISPSEAERRYQEYRTEYITTQKRAYFELHKNEDWLKDKYHPTNLVSVIERRNERCKVMSKDFFLDLQNGTLDLGPGITAGAASKPGSGGDGNSDDDMDGDKRRKQGKDSSKGTDSLSGAPKAHPVSSESRRIQADIEQTLALVRKLDAEKGIEGNVLLSGDHDKSDGDKSHIGSMGPIIIIRGLTTVKGLEGVELLDTILTYLWRIHGVDYYGTSESHEAKGLRHVRVDNKTSSTSDVNAADWEKKLDTFWQERLNGQDPLVILTAKDKIDAAAVEVLEPYVRKIRDEKYGWKYGCGAKGCTKLFHAPEFVHKHLRLKHPELVLESTSKVREDLYFQNYMNDPNAPGGTPVMQQSAPDRGRRKPGMDSRLRFDRGNNKDNDKAEGGRYGRGDRSPSRDGPDDQMFDAFRGRGSNAPFVAEFPPPPILMPVPGAGPLGPFVPAPPEIAMHMMREQGPPPFEPNGAPHGNTGMLGPMMGGPAPIITMPPNFRHDPRRLRSYNDLDAPDEEVTVLDYRSL

SEQ ID NO: 79059 - protein, 175 aa, Setaria italica
  Transcript Sequence Number=SeqID_13085
  Gene Ontology: Mol. function=nucleic acid binding
  Homolog annotation: Hit_ID=B6SW16; Match level="QueryCoverage=100%, HitCoverage=44%, E-value=3e-60, Identity=72%"; Hit description =Nucleic acid binding protein
  Subcellular localization annotation: CTP_CleavageSite=65; ConfidenceScore=5.70e-01
EVKNNPSFGVPQTSGPPVFSSFSQVGAGNNFGPGPRTAPGNPTNTLFGQPVQASLPAFPAPTFGRSDMKFGVSGSFGSQVSQQPSAGSSMSNVGNFPKPPAGYQQSASSSHHRDIDRQSQDLLSGIVAPTSALNQAPVEDNKNENQDDSIWLKEKWSIGEIPLGEPPQRHISHVF

SEQ ID NO: 79060 - protein, 95 aa, Setaria italica
  Transcript Sequence Number=SeqID_13086
AHLTPLSSNPVLIVLNKRIYQHFKSAKAIKLAEHPILKVTREHCFKTLTINPVPSTTTRKCKLLSYAHSHAQFHRPCKITNALEYEVSGSNSYSK

SEQ ID NO: 79061 - protein, 72 aa, Setaria italica
  Transcript Sequence Number=SeqID_13087
TRHLRNGGTGEEDEEGDEEEAAGGHEARSTYGLLLETEIAVPLHGCWMELKFAILSGEANCCVTCYCCSAVS

SEQ ID NO: 79062 - protein, 98 aa, Setaria italica
  misc_feature (1)..(1): Xaa can be any naturally occurring amino acid
  misc_feature (67)..(67): Xaa can be any naturally occurring amino acid
  Transcript Sequence Number=SeqID_13088
  Gene Ontology: Mol. function=protein dimerization activity; Biological process=proteolysis
  Homolog annotation: Hit_ID=B6T417; Match level="QueryCoverage=96%, HitCoverage=21%, E-value=1e-36, Identity=75%"; Hit description=IAA -amino acid hydrolase ILR1
XVINDEGMYDHAKAVAQSLLGEENVKVAPQLMGAEDFGFYAQRMAGAFFTIGVGNKSTMVTVHSTHXPHFVIDEDVLPIGAALHAAVATEYLKKHASA

SEQ ID NO: 79063 - protein, 321 aa, Setaria italica
  Transcript Sequence Number=SeqID_13089
  Gene Ontology: Mol. function=protein dimerization activity; Biological process=proteolysis
  Homolog annotation: Hit_ID=B6T417; Match level="QueryCoverage=99%, HitCoverage=73%, E-value=1e-150, Identity=77%"; Hit description=IAA -amino acid hydrolase ILR1
  Pfam annotation: Domain name=M20_dimer; Domain location=106-207; Score=39.0; E_value=1.9e-08; Accession=PF07687.6; Description =Peptidase dimerisation domain
  Pfam annotation: Domain name=Peptidase_M20; Domain location=1-313; Score=206.4; E_value=7.6e-59; Accession=PF01546.20; Description =Peptidase family M20M25M40
  Pfam module annotation: Pfam domain module=M20_dimer::Peptidase_M20; Domain location=106-207::1-313
MDALPLQELVDWEYKSQEKGKMHACGHDAHTAMLLGAAKILQDHKSDLKGTVKFVFQPAEEGQGGAYYILQEGLLDDVSAIFGLHVDPVLPVGVVASRPGPFAATAARFQATVTGKGGHAALPHQAFDPIVAASSAILSLQQIVSREIDPLQGAVVSVTFVKGGDAYNVIPESVTFGGTLRSMTNEGLLYLMKRIKEIVEGQSAIHHCTGTVDFMEGKMRTYPAVINDEGMYDHAKAVAQSLLGEENVKVAPQLMGAEDFGFYAQRMAGAFFTIGVGNKSTMVTVHSTHSPHFVIDEDVLPIGAALHAAVATEYLKKHASA

SEQ ID NO: 79064 - protein, 100 aa, Setaria italica
  Transcript Sequence Number=SeqID_13090
CTSCELVTPVPSHAHRESEKRKGSEKLGKEGAREKREGNRIDEGGEGSGGTSRARSRRSGTGGRRRAWPGGRERSARYHLQMAGKVISGWGRGHVMAGNR

SEQ ID NO: 79065 - protein, 366 aa, Setaria italica
  Transcript Sequence Number=SeqID_13091
  Gene Ontology: Mol. function=heat shock protein binding; Cellular component=integral to membrane; Biological process=protein folding
  Homolog annotation: Hit_ID=B9RT65; Match level="QueryCoverage=100%, HitCoverage=100%, E-value=5e-78, Identity=43%"; Hit description =Chaperone protein dnaJ, putative
  Pfam annotation: Domain name=DUF1977; Domain location=270-363; Score =124.3; E_value=4e-34; Accession=PF09320.3; Description=Domain of unknown function (DUF1977)
  Pfam annotation: Domain name=DnaJ; Domain location=106-167; Score =117.0; E_value=6.4e-32; Accession=PF00226.23; Description=DnaJ domain
  Pfam module annotation: Pfam domain module=DUF1977::DnaJ; Domain location=270-363::106-167
MDGNKDEALRSVKLAKSAFASGDKQRAEKLVRIAQRLDPSLPLDDLLSPAEKFGILNSATCQDKTRRGQASENPKTPKESVGPVNVDQVYTEENIRVVQDIRKKKDYYAVLGVERRCSVEEIRKAYRRLSLKVHPDKNKAPGAEDAFKLVSKAFKCLSNDQSRKTYDQTGTIEDHEFNEQYPNAMRQGVARRRRQARNGFYNYEEDFDPDEIFRSFFYGSHDNLFRAQHTYRARGTGRQQQQRREHTVQGGSSINLTVLMHLAVVLFIVSLAFIPVRQPKYSLQKTYYFPISKVTQKHGVEYFVSKQDFDQQFPQGSQSRENLEQYVFKDYKSLLGRYCHVERQRRQWAKDYPTPNCDRLRSLSVA

SEQ ID NO: 79066 - protein, 267 aa, Setaria italica
  Transcript Sequence Number=SeqID_13092
  Homolog annotation: Hit_ID=B6TCW7; Match level="QueryCoverage=100%, HitCoverage=100%, E-value=1e-114, Identity=76%"; Hit description =Tic20-like protein
  Pfam annotation: Domain name=Tic20; Domain location=133-264; Score =283.7; E_value=4.2e-82; Accession=PF09685.2; Description=Chloroplast import component protein (
  Subcellular localization annotation: CTP_CleavageSite=55; ConfidenceScore=5.40e-01
MFPCHGVATANPLLLGAPAASRYGSPARPSLRARPAFLSLRDPAFRREQKSFALRAGADFHRHVLSSSFAKYDTIKGIKPLLPSPKSHPRTQVGCQASLSSFSYPELSSKPKWWWRSLACVPYLLPLHNMWGHADAIYQLHPYLQRFSLLYAFIDTMALLPGWLFLVIFMTIYFFVVRRKWSPHFLRFHIILAILLDTGSQALATAINWSPSIVFQGKPMAYFWMTMAFIQIFTVVECMRCALSGLYPNVPFISHTAFIHSDLNLFR

SEQ ID NO: 79067 - protein, 183 aa, Setaria italica
  Transcript Sequence Number=SeqID_13093
  Gene Ontology: Mol. function=transferase activity, transferring glycosyl groups; Biological process=metabolic process
  Homolog annotation: Hit_ID=Q8LKT3; Match level="QueryCoverage=93%, HitCoverage=38%, E-value=8e-76, Identity=81%"; Hit description =Putative glucosyl transferase
ALAGATIPGGGAIDLVSFPDGMGPDGDRTDIGKLLQGLPAAMLGGLEETIRSRKIRWVVADVSMSFVLELVPTVGVRVALFSTFSAANFALRLQVPKMIEDGIIDETGSMKRNERIQLNPKMPAIDATELPWISLGKSPESRRAMIQTVLKNNPTFRLAETIVCNTFREIESAALPLLPIPAL

SEQ ID NO: 79068 - protein, 108 aa, Setaria italica
  Transcript Sequence Number=SeqID_13094
  Gene Ontology: Mol. function=structural constituent of ribosome; Cellular component=mitochondrial ribosome; Biological process =translation
  Homolog annotation: Hit_ID=B3TLS2; Match level="QueryCoverage=53%, HitCoverage=40%, E-value=2e-22, Identity=87%"; Hit description =Structural constituent of ribosome
  Pfam annotation: Domain name=MRP-L47; Domain location=38-108; Score =85.7; E_value=1.7e-22; Accession=PF06984.5; Description =Mitochondrial 39-S ribosomal protein L4
MLSLSRALGRRLFSSAAAASESAAAASTSAVRKAQNPLEEFFEVERSTEEDKPPPHYGRSWKASELRLKSWDDLQKLWYVLLKEKNMLMTQRQMLYAENLRFPNPERI

SEQ ID NO: 79069 - protein, 117 aa, Setaria italica
  misc_feature (58)..(58): Xaa can be any naturally occurring amino acid
  Transcript Sequence Number=SeqID_13095
  Gene Ontology: Mol. function=structural constituent of ribosome; Cellular component=mitochondrial ribosome; Biological process =translation
  Homolog annotation: Hit_ID=B3TLS2; Match level="QueryCoverage=54%, HitCoverage=44%, E-value=4e-25, Identity=87%"; Hit description =Structural constituent of ribosome
  Pfam annotation: Domain name=MRP-L47; Domain location=38-108; Score =92.9; E_value=1.1e-24; Accession=PF06984.5; Description =Mitochondrial 39-S ribosomal protein L4
  Subcellular localization annotation: CTP_CleavageSite=15; ConfidenceScore=5.03e-01
MLSLSRALGRRLFSSAAAASESAAAASTSAVRKAQNPLEEFFEVERSTEEDKPPSPLXKLWYVLLKEKNMLMTQRQMLYAENLRFPNPERISKVKKSMCRIKHVLTERAIAEPDPEV

SEQ ID NO: 79070 - protein, 95 aa, Setaria italica
  Transcript Sequence Number=SeqID_13096
  Gene Ontology: Mol. function=structural constituent of ribosome; Cellular component=mitochondrial ribosome; Biological process =translation
  Homolog annotation: Hit_ID=B3TLS2; Match level="QueryCoverage=92%, HitCoverage=63%, E-value=3e-39, Identity=90%"; Hit description =Structural constituent of ribosome
  Pfam annotation: Domain name=MRP-L47; Domain location=5-75; Score =111.5; E_value=2.8e-30; Accession=PF06984.5; Description =Mitochondrial 39-S ribosomal protein L4
  Pfam annotation: Domain name=Ribosomal_L29; Domain location=13-75; Score=10.7; E_value=0.0015; Accession=PF00831.15; Description =Ribosomal L29 protein
  Pfam module annotation: Pfam domain module=MRP-L47::Ribosomal_L29; Domain location=5-75::13-75
VPLLTVTVVRGKASELRLKSWDDLQKLWYVLLKEKNMLMTQRQMLYAENLRFPNPERISKVKKSMCRIKHVLTERAIAEPDPRRSAEMKRMINTL

SEQ ID NO: 79071 - protein, 161 aa, Setaria italica
  Transcript Sequence Number=SeqID_13097
  Homolog annotation: Hit_ID=Q9FZ72; Match level="QueryCoverage=99%, HitCoverage=73%, E-value=2e-17, Identity=30%"; Hit description =F13B4.3 protein
  Pfam annotation: Domain name=DUF1262; Domain location=1-125; Score= -112.2; E_value=0.00026; Accession=PF06880.3; Description=Protein of unknown function (DUF1262)
PVAATAAAVGKWYAPFYLVKEAGVTPREQMGRSAFYEVTLEQRWEPVRPDAGGGVSKLASKKALVGGIVEAEQESLNSRHGDAYVWFRAAATGQMVGVCTSMWERMRWEQCRGGWVDEEEDAGKVAGGSVLAERFVMKRLDGSVVVAFDFVHFNKVRAKQI

SEQ ID NO: 79072 - protein, 210 aa, Setaria italica
  Transcript Sequence Number=SeqID_13098
  Gene Ontology: Mol. function=protein dimerization activity; Cellular component=nucleus; Biological process=regulation of transcription, DNA-dependent
  Homolog annotation: Hit_ID=Q5W670; Match level="QueryCoverage=93%, HitCoverage=58%, E-value=3e-80, Identity=75%"; Hit description=Auxin- responsive protein IAA18
  Pfam annotation: Domain name=AUX_IAA; Domain location=1-196; Score =30.5; E_value=1.5e-11; Accession=PF02309.8; Description=AUXIAA family
ELTLGGENMAGERKKGCCPPPSSHDSAAGPVHRSSNPHQGRGAVLPVIGWPPVRSFRRNLTNGSSSKQSPERPNDEAGDKAKLTCKRSPLVKINMDGNPIGRKIDLAAYDNYQKLSSAVEELFSGFLEAQNDLDCTKSGEQGAEEKIFSGLLDGTGEYTLVYEDNGGSRTPVGDLPWNVFVSIAKRLRVMKSSELPHVLTKTASGRAADH

SEQ ID NO: 79073 - protein, 48 aa, Setaria italica
  Transcript Sequence Number=SeqID_13099
MPNGARKTDTFYSKCVMHQRRQNICTKGINPMQVLASHQNTCFDDNKN

SEQ ID NO: 79074 - protein, 126 aa, Setaria italica
  misc_feature (46)..(46): Xaa can be any naturally occurring amino acid
  misc_feature (95)..(95): Xaa can be any naturally occurring amino acid
  Transcript Sequence Number=SeqID_13100
LRLRRHPGRGRQEQELEEAGADQEAHSSGAAPRAEPPPESLPGQEXSGRICHLWLLGLGSVEESCPALNWGGTRTRFGAEKAGILRTDGHLRPAXRAPTRAGPRKQAALAERKGERQWRWKRGGQV

SEQ ID NO: 79075 - protein, 142 aa, Setaria italica
  Transcript Sequence Number=SeqID_13101
  Gene Ontology: Cellular component=integral to membrane
  Homolog annotation: Hit_ID=B3TLS7; Match level="QueryCoverage=97%, HitCoverage=51%, E-value=9e-21, Identity=36%"; Hit description =Senescence-associated protein
  Pfam annotation: Domain name=Tetraspannin; Domain location=5-142; Score=-1.6; E_value=0.0011; Accession=PF00335.12; Description =Tetraspanin family
MYPYRFSNVLIGYLNLGTLLASIPIIGAGLWLAKGSNTTCSSILQTPLLVIGFVVLLISLAGFVGACFHVAWALWLYLFAIMLLIAFLLGITAFGFAVTAGGGGTQIPGRPYREYHISDYSSWLQHHMQDMKYWRPALACVV

SEQ ID NO: 79076 - protein, 243 aa, Setaria italica
  Transcript Sequence Number=SeqID_13102
  Gene Ontology: Mol. function=catalytic activity; Biological process =cellular metabolic process
  Homolog annotation: Hit_ID=B4FED4; Match level="QueryCoverage=99%, HitCoverage=72%, E-value=1e-126, Identity=88%"; Hit description =Dihydroflavonol-4-reductase
  Pfam annotation: Domain name=Epimerase; Domain location=1-143; Score=- 33.2; E_value=0.00012; Accession=PF01370.13; Description=NAD dependent epimerasedehydratase family
RGLENVLTAAKRTPTVKKIVYTSSFFAIGPTDGYVADETQMHPEKAFCTEYEKSKVLADRIALQAATEGVPITIVYPGVIYGPGKLTTGNLVSRILIERFNGRLPGYIGDGYDRESFCHVDDVVSGHIAAMEKGRVGERYLLTGENLSFKQIFNMAANITNTKAPLFHVPLWLIEVYGWISVFVSRITGKLPLISYPTVHVLRHQWSYSCDKAKTELGYSPRNLTEGLSEVLLWLKDEKQIKF

SEQ ID NO: 79077 - protein, 86 aa, Setaria italica
  Transcript Sequence Number=SeqID_13103
  Gene Ontology: Mol. function=transporter activity; Cellular component= membrane; Biological process=oligopeptide transport
  Homolog annotation: Hit_ID=B6ST62; Match level="QueryCoverage=100%, HitCoverage=16%, E-value=4e-25, Identity=67%"; Hit description=POT family protein
NWFHFSISWGYAFASAGLSYVQDNAGWTVGFGACWAAMVLCLAVFLLGTPAYRSKQHADGGPFAETVRAQVARVFRRKDDATRTQR

SEQ ID NO: 79078 - protein, 137 aa, Setaria italica
  misc_feature (81)..(81): Xaa can be any naturally occurring amino acid
  Transcript Sequence Number=SeqID_13104
  Gene Ontology: Mol. function=protein binding; Cellular component =Golgi apparatus; Biological process=vesicle docking during exocytosis
  Homolog annotation: Hit_ID=O49048; Match level="QueryCoverage=87%, HitCoverage=15%, E-value=6e-25, Identity=52%"; Hit description =Vacuolar protein sorting-associated protein 45 homolog
RLSRTSLDPQTVGMVSVVYSQSDLLRKEVFLVETMDNASSSRESMAHLKAVYFLRPSADNVQKLRRHLAMPRFAEYHLCAXPITDLLWNLVQWDFPYSFGSFTVCAFAVFSNILKIPQIQILADSDEQEVVQQVQEF

SEQ ID NO: 79079 - protein, 162 aa, Setaria italica
  misc_feature (60)..(60): Xaa can be any naturally occurring amino acid
  misc_feature (66)..(66): Xaa can be any naturally occurring amino acid
  Transcript Sequence Number=SeqID_13105
  Gene Ontology: Mol. function=protein binding; Cellular component =Golgi apparatus; Biological process=vesicle docking during exocytosis
  Homolog annotation: Hit_ID=B9SJI7; Match level="QueryCoverage=99%, HitCoverage=26%, E-value=7e-62, Identity=74%"; Hit description =Vacuolar protein sorting-associated, putative
PEYRKTHGNVTKHVALVSEMSRIVEERKLMLVSQTEQELACTSGQAAAFEASKNWSQAFXFISLSXFSVKAVTSLLNSESVSDIDRLRLVMLYALRYEKESSVQLMQLFNKLASCSAKYKSGLVQFLLKQAGVDKRTGDLYGNRDLLNIARNMARGLKGVEM

SEQ ID NO: 79080 - protein, 567 aa, Setaria italica
  Transcript Sequence Number=SeqID_13106
  Gene Ontology: Mol. function=protein binding; Cellular component =Golgi apparatus; Biological process=vesicle docking during exocytosis
  Homolog annotation: Hit_ID=O49048; Match level="QueryCoverage=99%, HitCoverage=99%, E-value=0.0, Identity=75%"; Hit description =Vacuolar protein sorting-associated protein 45 homolog
  Pfam annotation: Domain name=Sec1; Domain location=21-554; Score =433.9; E_value=2.5e-127; Accession=PF00995.15; Description=Sec1 family
MVLIPLVRDYIDRMLHDIPGMKVLVLDPQTVGMVSVVYSQSDLLRKEVFLVETMDNASSSRESMAHLKAVYFLRPSADNVQKLRRHLAMPRFAEYHLFFSNILKIPQIQILADSDEQEVVQQVQEFYADFCAIDPYHFTLNIQNNHMYMLPTVVDPPGMQSFCDRAVDGIASVFLALKRRPVIRYQRTSDVAKRIAQETARLMYEQESGLFDFRRTENSSLLLVIDRRDDPVTPLLNQWTYQAMVHELIGIENNKVDLRGFANVPKDQQEVVLSSVQDDFFRANMFENFGDLGMNIKRMVDDFQHLSKSSLNLQSIGDMAKFVSNYPEYRKTHGNVTKHVALVSEMSRIVEERKLMLVSQTEQELACTSGQAAAFEAVTSLLNSESVSDIDRLRLVMLYALRYEKESSVQLMQLFNKLASCSAKYKSGLVQFLLKQAGVDKRTGDLYGNRDLLNIARNMARGLKGVENVYTQHQPLLFQTMEGIVKGRLRDVDYPLVGNQFQQGRPQDVVIFIVGGTTYEEARSVSLYNAANPGVRFFLGGSVVLNSKRFLEDLGEAQRISKSSTII

SEQ ID NO: 79081 - protein, 80 aa, Setaria italica
  misc_feature (47)..(47): Xaa can be any naturally occurring amino acid
  Transcript Sequence Number=SeqID_13107
  Homolog annotation: Hit_ID=B6T7F1; Match level="QueryCoverage=66%, HitCoverage=13%, E-value=3e-09, Identity=64%"; Hit description =Ribonuclease P
LFSKKELDTSSVGYQSPLPADEVKPLVEYDNDEGWNSIPMNQTGPYXIVDAHSPGGRGRGRGGRGRGRGRGRGRGGRVSG

SEQ ID NO: 79082 - protein, 108 aa, Setaria italica
  misc_feature (32)..(32): Xaa can be any naturally occurring amino acid
  Transcript Sequence Number=SeqID_13108
  Gene Ontology: Mol. function=phosphatidate cytidylyltransferase activity; Cellular component=membrane; Biological process =phospholipid biosynthetic process
  Homolog annotation: Hit_ID=B9SCH4; Match level="QueryCoverage=96%, HitCoverage=23%, E-value=3e-33, Identity=58%"; Hit description =Transmembrane protein, putative
DFSPAVIFQPAFLDLAFGAAFAVFLILEMIRXHFSLLLGCALPKWMSSGLNDRPLAPFAGILSLGIGDTMASMIGYKYGVLRWSKTGKKTIEGTAAGITSVLAACLLI

SEQ ID NO: 79083 - protein, 50 aa, Setaria italica
  Transcript Sequence Number=SeqID_13109
CATYSTLFDSLPYSRSAAHKYLSYMANNNIQIYSTYNYISLINLCLNYDY

SEQ ID NO: 79084 - protein, 126 aa, Setaria italica
  misc_feature (107)..(107): Xaa can be any naturally occurring amino acid
  Transcript Sequence Number=SeqID_13110
  Gene Ontology: Mol. function=nucleotide binding; Cellular component =chloroplast; Biological process=intracellular protein transmembrane transport
  Homolog annotation: Hit_ID=Q657P0; Match level="QueryCoverage=77%, HitCoverage=9%, E-value=2e-47, Identity=94%"; Hit description =Protein translocase subunit secA
  Pfam annotation: Domain name=SecA_DEAD; Domain location=13-74; Score=- 179.1; E_value=6.8e-05; Accession=PF07517.6; Description=SecA DEAD -like domain
ETITPSPAHHNSASELIHNKHFLATNYVIEAKEGVTIQNETITLASISYQNFFLQFPKLCGMTGTAATESQEFESIYKLKVTVVPTNKPMIRKDDSDVVFRATNGKXWRAVLVEISRMNKVGRPVL

SEQ ID NO: 79085 - protein, 108 aa, Setaria italica
  misc_feature (55)..(55): Xaa can be any naturally occurring amino acid
  Transcript Sequence Number=SeqID_13111
  Gene Ontology: Mol. function=nucleic acid binding
  Homolog annotation: Hit_ID=Q7XXQ1; Match level="QueryCoverage=70%, HitCoverage=37%, E-value=7e-28, Identity=75%"; Hit description=Pre -mRNA splicing factor (Fragment)
SEAPHYNNPLECRHPGQDQTFQKDYYSGEPRGFAFVEFVDPYDASEAQYHMNRQXFFGREITVVLAAESRKRPEEMRSRARVRGYSGHEGRRSSYYGRSRSRSRSPST

SEQ ID NO: 79086 - protein, 114 aa, Setaria italica
  misc_feature (58)..(58): Xaa can be any naturally occurring amino acid
  misc_feature (83)..(83): Xaa can be any naturally occurring amino acid
  Transcript Sequence Number=SeqID_13112
TKRGLIEIVDAHSPGGRGRGRGGRGRGRGRGRGRGGRGNGYNEYADGGWGEDDHAPEXNRDNGYPRGRGRGFRGRGRRGGYNXSRPDYQQDGGYYDEAPVPAPTRGRGRGRGRG

SEQ ID NO: 79087 - protein, 57 aa, Setaria italica
  Transcript Sequence Number=SeqID_13113
IIVIRMEFNSYSTLLDSLLYSRSAAYKYLSHITNYNIQLYSTYNYISLINLCLNYDY

SEQ ID NO: 79088 - protein, 54 aa, Setaria italica
  Transcript Sequence Number=SeqID_13114
  Subcellular localization annotation: CTP_CleavageSite=23; ConfidenceScore=5.16e-01
SLIFHIGRSRSRSRSPRYRGRPRSRSYSPAPRRRDDYSASPRRKEAHRASPPRR

SEQ ID NO: 79089 - protein, 75 aa, Setaria italica
  Transcript Sequence Number=SeqID_13115
LYIIVGDMGEILVCCTSTIEKRVQERAIRIEFHLITIIYRINFHLPPHEFKIGLYLNFGKLWNATFQHKLAYSIK

SEQ ID NO: 79090 - protein, 140 aa, Setaria italica
  Transcript Sequence Number=SeqID_13116
  Gene Ontology: Mol. function=translation elongation factor activity; Cellular component=mitochondrion; Biological process=translational elongation
  Homolog annotation: Hit_ID=Q9FE64; Match level="QueryCoverage=100%, HitCoverage=18%, E-value=3e-66, Identity=88%"; Hit description =Elongation factor G, mitochondrial
GDTFTDGTVKYTMTSMNVPEPVMSLAVSPISKDSGGQFSKALNRFQKEDPTFRVGLDPESGQTIISGMGELHLDIYVERIKREYKVDAKVGKPRVNFRETITQRAEFDYLHKKQSGGQGQIIGTKFSGYIEPLPSGSDGK

SEQ ID NO: 79091 - protein, 47 aa, Setaria italica
  Transcript Sequence Number=SeqID_13117
IMIIRMEFNSYSTLLNSLPYIEMQHISTSPISPTIIYKYIPHTIILA

SEQ ID NO: 79092 - protein, 57 aa, Setaria italica
  Transcript Sequence Number=SeqID_13118
IMVIRMEFNSYSTLLDSLLYSRSAAYKYLSHITNYNIQLYSTYNYISLINLCLNYDY

SEQ ID NO: 79093 - protein, 205 aa, Setaria italica
  misc_feature (91)..(91): Xaa can be any naturally occurring amino acid
  Transcript Sequence Number=SeqID_13119
  Gene Ontology: Mol. function=nucleotide binding; Cellular component =chloroplast; Biological process=intracellular protein transmembrane transport
  Homolog annotation: Hit_ID=B6TMB4; Match level="QueryCoverage=71%, HitCoverage=56%, E-value=4e-40, Identity=63%"; Hit description=SR repressor protein
  Pfam annotation: Domain name=SecA_SW; Domain location=5-193; Score= -79.7; E_value=0.00047; Accession=PF07516.5; Description=SecA Wing and Scaffold domain
ISLILLSNKINVCREPRGFAFVEFVDPYDASEAQYHMNRQVFFGREITVVLAAESRKRPEEMRSRARVRGYSGHEGRRSSYYGRSRSRSAXPRYRGRPRSRSYSPAPRRRDDYSASPRRKEAHRASPPRRPPKELDEDKKRRSYSPASRDDAENGYAQRDPLIEYKLEGYNLFLDMMAQIRRNVIYSVYQFKPVVKNQEEEKPPK

SEQ ID NO: 79094 - protein, 270 aa, Setaria italica
  Transcript Sequence Number=SeqID_13120
  Gene Ontology: Mol. function=aspartic-type endopeptidase activity; Cellular component=nucleus
  Homolog annotation: Hit_ID=B6T7F1; Match level="QueryCoverage=87%, HitCoverage=87%, E-value=6e-83, Identity=69%"; Hit description =Ribonuclease P
  Pfam annotation: Domain name=Alba; Domain location=17-87; Score =112.2; E_value=1.7e-30; Accession=PF01918.13; Description=Alba
MDRYQRVEKPREEAPIKENEIRITTQGRMRNYITYATALLQDKGSDEVVFKAMGRAINKTVMIAELIKRRIVGLHQNTTTGSTDITDMWEPLEEGLLPLETTRHVSMITITLSKKELDTSSVGYQSPLPADEVKPLVEYDNDEDAHSPGGRGRGRGGRGRGRGRGRGRGGRGNGYNEYADGGWGEDDHAPEYMGNGYPRGRGRGFRGRGRRGGYNGQPDYQQDGGYYDEAPVPAPTRGRGRGRGRGRGPSRGRGRGGNANGVMHAAAAGA

SEQ ID NO: 79095 - protein, 270 aa, Setaria italica
  misc_feature (22)..(22): Xaa can be any naturally occurring amino acid
  Transcript Sequence Number=SeqID_13121
  Gene Ontology: Mol. function=translation elongation factor activity; Cellular component=mitochondrion; Biological process=translational elongation
  Homolog annotation: Hit_ID=Q9FE64; Match level="QueryCoverage=97%, HitCoverage=35%, E-value=1e-144, Identity=90%"; Hit description =Elongation factor G, mitochondrial
  Pfam annotation: Domain name=EFG_C; Domain location=172-259; Score =119.1; E_value=1.5e-32; Accession=PF00679.16; Description=Elongation factor G C-terminus
  Pfam annotation: Domain name=EFG_IV; Domain location=49-170; Score =200.0; E_value=6.6e-57; Accession=PF03764.10; Description=Elongation factor G, domain IV
  Pfam module annotation: Pfam domain module=EFG_C::EFG_IV; Domain location=172-259::49-170
TNLTKKGRNPTFRVGLDPESGXGMGELHLDIYVERIKREYKVDAKVGKPRVNFRETITQRAEFDYLHKKQSGGQGQYGRVCGYIEPLPSGSDGKFEFDNMIIGQAIPSNFIPAIEKGFREACNSGSLIGHPVENIRIVLTDGASHQVDSSELAFKLAAIYAFRQCYTAAKPVILEPVMKVELKFPTEFQGTVTGDMNKRKGIIVGNEQEGDDTIVVCHVPLNNMFGYATAIRSVTQGKGEFTMEYLEHNIVSQDVQMQLVNSYKAAKGTE

SEQ ID NO: 79096 - protein, 412 aa, Setaria italica
  misc_feature (135)..(135): Xaa can be any naturally occurring amino acid
  Transcript Sequence Number=SeqID_13122
  Gene Ontology: Mol. function=phosphatidate cytidylyltransferase activity; Cellular component=membrane; Biological process =phospholipid biosynthetic process
  Homolog annotation: Hit_ID=B9SCH4; Match level="QueryCoverage=88%, HitCoverage=64%, E-value=1e-118, Identity=58%"; Hit description =Transmembrane protein, putative
  Pfam annotation: Domain name=CTP_transf_1; Domain location=214-412; Score=-8.4; E_value=7.6e-05; Accession=PF01148.12; Description =Cytidylyltransferase family
LIYLVYASSVTLCDLFSFCYLSAYCSITLTWRFSPFFPPSLFKLLHISGEALLVSSGLVLYFGDMLAHTLSKMDFSMSSKAFIHTPGTRSDMTTIIQGILLGLFLLPLLYKSSLQFWDYCKGKQRTEAAVEHTQXRIGSAVFYTLLLVVLMFLVPSWTHLVQGLKVHPFVWIINYMFTDSHERLALCAYWICVICVSVRRFYSISKQSKTERILLRKYYHLVAVLIFSPAVIFQPAFLDLAFGAAFAVFLILEMIRIWEIYPLGRVVHQFMNAFTDHRDSEILIVSHFSLLLGCALPKWMSSGLNDRPLAPFAGILSLGIGDTMASMIGYKYGVLRWSKTGKKTIEGTAAGITSVLAACSILVSLLASSGYILSQNWLSLLIAVTLSGLLEAYTAQLDNAFIPLVFYSLLCL

SEQ ID NO: 79097 - protein, 536 aa, Setaria italica
  misc_feature (505)..(505): Xaa can be any naturally occurring amino acid
  Transcript Sequence Number=SeqID_13123
  Gene Ontology: Mol. function=translation elongation factor activity; Cellular component=mitochondrion; Biological process=translational elongation
  Homolog annotation: Hit_ID=Q9FE64; Match level="QueryCoverage=89%, HitCoverage=64%, E-value=0.0, Identity=94%"; Hit description =Elongation factor G, mitochondrial
  Pfam annotation: Domain name=GTP_EFTU; Domain location=66-341; Score =383.5; E_value=3.6e-112; Accession=PF00009.19; Description =Elongation factor Tu GTP binding domain
  Pfam annotation: Domain name=GTP_EFTU_D2; Domain location=382-448; Score=70.8; E_value=5.2e-18; Accession=PF03144.17; Description =Elongation factor Tu domain 2
  Pfam annotation: Domain name=MMR_HSR1; Domain location=69-199; Score=- 19.2; E_value=0.059; Accession=PF01926.15; Description=GTPase of unknown function
  Pfam module annotation: Pfam domain module=GTP_EFTU::GTP_EFTU_D2::MMR_ HSR1; Domain location=66-341::382-448::69-199
  Subcellular localization annotation: CTP_CleavageSite=37; ConfidenceScore=5.21e-01
AMARRYASYLLSSFRPFSLLLQPPLADAPSPAAAAAVASARRALSSASALRARDEKDAARWRESMDRMRNIGISAHIDSGKTTLTERVLYYTGRIHEIHEVRGRDGVGAKMDSMDLEREKGITIQSAATYCTWKGYQVNIIDTPGHVDFTIEVERALRVLDGAILVLCSVGGVQSQSITVDRQMRRYEIPRVAFINKLDRMGADPWKVLNQARSKLRHHNAAVQVPIGLEEEFEGLVDLVDMKAYKFEGSSGQNVTAYDVPSNMADLVTEKRRELIEVVSEVDDQLAEAFLNDEPITAHQLKAAIRRATVARKFIPVYMGSAFKNKGVQPLLDGVMDYLPCPLEVDNYALDQNKSEEKVLLAGTPAEPLVALAFKLEEGRFGQLTYLRIYDGVIRKGDFIYNVNTGKKIKVPRLVRMHSNEMEDIQEAHAGQIVAVFGVDCASGDTFTDGTVKYTMTSMNVPEPVMSLAVSPISKDSGGQFSKALNRFQKEDPTFRVGLDPESGXGMGELHLDIYVERIKREYKVDCRKVRVNLRC

SEQ ID NO: 79098 - protein, 259 aa, Setaria italica
  Transcript Sequence Number=SeqID_13124
  Gene Ontology: Mol. function=nucleic acid binding; Cellular component= nucleoplasm; Biological process=regulation of alternative nuclear mRNA splicing, via spliceosome
  Homolog annotation: Hit_ID=B6TMB4; Match level="QueryCoverage=69%, HitCoverage=69%, E-value=2e-61, Identity=72%"; Hit description=SR repressor protein
  Pfam annotation: Domain name=RRM_1; Domain location=40-110; Score =70.9; E_value=4.7e-18; Accession=PF00076.14; Description=RNA recognition motif. (a.k.a. RRM, RBD, o
MRRYSPPYRSPPRRGYGGRGRSPPPRRGYGGGRKEGSGSLLVRNIPLSVRAEDLRVPFERFGPVRDVYIPKDYYSGEPRGFAFVEFVDPYDASEAQYHMNRQVFFGREITVVLAAESRKRPEEMRSRARVRGYSGHEGRRSSYYGRSRSRSRSPRYRGRPRSRSYSPAPRRRDDYSASPRRKEAHRASPPRRPPKELDEDKKRRSYSPASRDDAENGYEKRSPPPDSDGSPPHRRSPKEYSGSPPGSRSRSAESPARSD

SEQ ID NO: 79099 - protein, 641 aa, Setaria italica
  Transcript Sequence Number=SeqID_13125
  Gene Ontology: Mol. function=nucleotide binding; Cellular component =chloroplast; Biological process=intracellular protein transmembrane transport
  Homolog annotation: Hit_ID=Q657P0; Match level="QueryCoverage=100%, HitCoverage=63%, E-value=0.0, Identity=89%"; Hit description=Protein translocase subunit secA
  Pfam annotation: Domain name=SecA_DEAD; Domain location=1-85; Score= -166.2; E_value=8.4e-06; Accession=PF07517.6; Description=SecA DEAD -like domain
  Pfam annotation: Domain name=SecA_PP_bind; Domain location=1-41; Score=-14.2; E_value=7.9e-07; Accession=PF01043.12; Description=SecA preprotein cross-linking domain
  Pfam annotation: Domain name=SecA_SW; Domain location=391-608; Score =381.5; E_value=1.4e-111; Accession=PF07516.5; Description=SecA Wing and Scaffold domain
  Pfam module annotation: Pfam domain module=SecA_DEAD::SecA_PP _bind::SecA_SW; Domain location=1-85::1-41::391-608
ELFLKDVNYIVLSKEVLIVDEFTGRVMVGRRWSDGLHQAIEAKEGVTIQNETITLASISYQNFFLQFPKLCGMTGTAATESQEFESIYKLKVTVVPTNKPMIRKDDSDVVFRATNGKWRAVLVEISRMNKVGRPVLVGTTSVEQSESLSEQLREAGIPHEVLNAKPENVEREAEIVAQSGRLGAVTIATNMAGRGTDIILGGNAEFMARLKLREILMPRVVNPMDGVIVSKKQMPPRKTWKTNESLFPCELSKETSSSVKDAVEVAVKEWGEKSLTELEAEERLSYSCEKGPTRDDVIANLRNAFMKISDEYKVYTEEEKKKVITAGGLHVVGTERHESRRIDNQLRGRSGRQGDPGSSRFFLSLEDNIFRIFGGDRIQGLMQAFRVEDLPIESKMLTRALDEAQRKVENYFFDIRKQLFEYDEVLNSQRDRVYAERRRALASDSLESLIVEYAELTMDDILDANIGRDTPKENWDLSKLIAKLQQYCYLLDDLTPELLESKSSSYEDLQEYLRKRGREAYFQKAEIVEKQAPGLMKEAERFLILSNIDRLWKEHLQALKFVQQAVGLRGYAQRDPLIEYKLEGYNLFLDMMAQIRRNVIYSVYQFKPVVKNQEEEKPQNKGSKKKLDKGANKLGAAQAAS

SEQ ID NO: 79100 - protein, 104 aa, Setaria italica
  Transcript Sequence Number=SeqID_13126
GFKSSLRELLELLLLRPWTSKCTATSSLPLPACRALCWLAAAWKAASKSTSPPNPSGLQSTLRRSFLSRIPRLPNRRLLQSFSRPPPSPSPPLIFFLPPPPPPP

SEQ ID NO: 79101 - protein, 288 aa, Setaria italica
  Transcript Sequence Number=SeqID_13127
  Gene Ontology: Mol. function=protein disulfide oxidoreductase activity; Biological process=intracellular signaling cascade
  Homolog annotation: Hit_ID=B9RY43; Match level="QueryCoverage=87%, HitCoverage=37%, E-value=1e-80, Identity=58%"; Hit description =Electron transporter, putative
  Pfam annotation: Domain name=DEP; Domain location=162-234; Score =80.0; E_value=8.3e-21; Accession=PF00610.13; Description=Domain found in Dishevelled, Egl-10, and Pleckstrin
  Pfam annotation: Domain name=Glutaredoxin; Domain location=40-100; Score=54.7; E_value=3.5e-13; Accession=PF00462.16; Description =Glutaredoxin
  Pfam module annotation: Pfam domain module=DEP::Glutaredoxin; Domain location=162-234::40-100
VKVTVRLKDAIAAEDDDISLADSNDDGGYSFSGGHIKGRVSFFSRSGCRDCAAVRAFFRQSGLPYVEINLDVFPEREAELASRAGAAARVPQIFLNEKLLGGLVVLNSLRNSGEFERRVRDLAGRRCPDSAPRMPVYGFDDDAGGKEGEEAEDAMVGVVRVLRHRLPIQDRFVRVKLVKNCFSGADMVDGIVNHLECSRKKAVEIGKELARKHFIHHVFRENDFEDGSQNLYRFLEHDPAVPKYYNFRGSTNDGEPKPAAAVGHRMTKIMLAILEAYASDDRRHLDYS

SEQ ID NO: 79102 - protein, 63 aa, Setaria italica
  Transcript Sequence Number=SeqID_13128
QNQGGKLQNNSLEDQSVMSSLCNYIFAGSTIWLYLSEFTLVRRTKNNCNRSLANYSIAWKQKL

SEQ ID NO: 79103 - protein, 376 aa, Setaria italica
  misc_feature (244)..(244): Xaa can be any naturally occurring amino acid
  Transcript Sequence Number=SeqID_13129
  Gene Ontology: Cellular component=plasma membrane
  Homolog annotation: Hit_ID=Q9C6N3; Match level="QueryCoverage=98%, HitCoverage=32%, E-value=4e-23, Identity=44%"; Hit description =Transposon protein, putative
RSPARETYHKRASSFGSVLPAKQKDDELPLFSDMQKVERENFLLEPSEDFDDSIAKLSYFPEVKLGVNIPARGESQDLLNVDGDKNDCEWLLTPPETPLFRSLDDEEEQSVTQVSRGRAQSKPIQISRSSTMDNTQRASRSSASPSRLSPSPRSMARTRSSSSASRSSPPLDLQPPTLSRRSSTPPVAKTSTPPRRSPSPASRRMSTGSSVPTLNGTRGASPVKPNRRSSSPKLQGWQSNVPSXPFDAPSNLRTSLPDHPVSRSRGGSPSSFSGLDKGSRGRRQSMSPTPSRRASSSHSIERDRMSSHSKASATSSGEDDLDSMQSVPISYSSSPAMKKSLAVMKTRTIASSKNLSKTFTPSSVPKRSFDSAVWLN

SEQ ID NO: 79104 - protein, 201 aa, Setaria italica
  Transcript Sequence Number=SeqID_13130
  Gene Ontology: Mol. function=binding
  Homolog annotation: Hit_ID=B9S6P3; Match level="QueryCoverage=93%, HitCoverage=5%, E-value=6e-54, Identity=59%"; Hit description =Inositol or phosphatidylinositol kinase, putative
  Pfam annotation: Domain name=HEAT; Domain location=125-161; Score =10.4; E_value=2.6; Accession=PF02985.14; Description=HEAT repeat
  Pfam annotation: Domain name=HEAT; Domain location=52-86; Score=11.1; E_value=2.1; Accession=PF02985.14; Description=HEAT repeat
  Pfam module annotation: Pfam domain module=HEAT::HEAT; Domain location=125-161::52-86
  Subcellular localization annotation: CTP_CleavageSite=64; ConfidenceScore=5.42e-01
IYVGHFAMLFHVDSPSSGQAGFMQPIGSSLPSSINMGSRSRSNTSSNLRELDPLIFLDALVEVLSSENRQHAKAALSALNTFAETLIFLARMKHTGMLRGGPSTPMLVSSPSLNPVYSPPPSVRVAVFEELLPRLLHCCYSSTWQAQMGGVMGLGALVGKVSVDTLCIFQVKVVRGLLFVLKRLPVHANKRAGGRQNHVLN

SEQ ID NO: 79105 - protein, 60 aa, Setaria italica
  Transcript Sequence Number=SeqID_13131
ELAKASVPARQKDAVALVCCSVLAVHQNSQARHVEVILLCLLLHVNQVILETPKVRAQKN

SEQ ID NO: 79106 - protein, 196 aa, Setaria italica
  Transcript Sequence Number=SeqID_13132
TCKILSYIVENRYNYNYTTSTHTLRWLTLHSTGAQCLYIGVENTFVLKIHKQVNLQCNLLNFVAEEQLCFSLFPPALPALTETVHSSSLLVTTAPFCRSMFDSANCLCQVHHYSVLLGPYLPETILTRKESCLHKKSSKSMGECHKHIDEMRPIIRQNYHERQFFQVLRSFRAFGRLAKYIDPNIYYHYQSLGNQN

SEQ ID NO: 79107 - protein, 202 aa, Setaria italica
  misc_feature (97)..(97): Xaa can be any naturally occurring amino acid
  Transcript Sequence Number=SeqID_13133
  Gene Ontology: Mol. function=ATP-dependent helicase activity; Cellular component=intracellular; Biological process=RNA processing
  Homolog annotation: Hit_ID=Q69LX2; Match level="QueryCoverage=71%, HitCoverage=10%, E-value=1e-58, Identity=75%"; Hit description =Endoribonuclease Dicer homolog 2b
  Pfam annotation: Domain name=DEAD; Domain location=14-181; Score =30.2; E_value=2.9e-07; Accession=PF00270.21; Description=DEADDEAH box helicase
  Pfam annotation: Domain name=ResIII; Domain location=10-157; Score= -2.2; E_value=8.1e-05; Accession=PF04851.7; Description=Type III restriction enzyme, res subunit
  Pfam module annotation: Pfam domain module=DEAD::ResIII; Domain location=14-181::10-157
EDPPPPCDPETLARGYQLEALERAVAGNTVAFLETGAGKTLIAVLLLRAYAHRIRSAPPPCFAVFLVPTVVLVGQQARVIEHHTDLRVEQFYGEMGXVDYWNADTWRRAVDGAEVLVMTPQILLDDLRHCFFTLRDIALLIFDECHHAHGNPPTPTFLRSLERWKLSLLFLVCDPRAFETLRGVLGSLVPTGLKFMSHQIIG

SEQ ID NO: 79108 - protein, 673 aa, Setaria italica
  Transcript Sequence Number=SeqID_13134
  Gene Ontology: Mol. function=catalytic activity; Cellular component =plasma membrane; Biological process=cellular metabolic process
  Homolog annotation: Hit_ID=Q9SYM5; Match level="QueryCoverage=99%, HitCoverage=100%, E-value=0.0, Identity=84%"; Hit description =Probable rhamnose biosynthetic enzyme 1
  Pfam annotation: Domain name=3Beta_HSD; Domain location=10-280; Score= -22.4; E_value=2.2e-08; Accession=PF01073.11; Description=3-beta hydroxysteroid dehydrogenaseisomerase family
  Pfam annotation: Domain name=Epimerase; Domain location=9-251; Score =220.1; E_value=5.8e-63; Accession=PF01370.13; Description=NAD dependent epimerasedehydratase family
  Pfam annotation: Domain name=NAD_binding_4; Domain location=11-235; Score=15.2; E_value=2.4e-10; Accession=PF07993.4; Description=Male sterility protein
  Pfam annotation: Domain name=Polysacc_synt_2; Domain location=9-294; Score=-91.0; E_value=1e-07; Accession=PF02719.7; Description =Polysaccharide biosynthesis protein
  Pfam annotation: Domain name=RmlD_sub_bind; Domain location=6-321; Score=-132.2; E_value=6.4e-05; Accession=PF04321.9; Description=RmlD substrate binding domain
  Pfam module annotation: Pfam domain module=3Beta_HSD::Epimerase::NAD _binding_4::Polysacc_synt_2::RmlD_sub_bind; Domain location=10-280::9- 251::11-235::9-294::6-321
MATYEPKNILITGAAGFIASHVANRLVRNYPHYKIVVLDKLDYCSNLKNLNPSRPSPNFKFVKGDIASADLVNYLLITESIDTIMHFAAQTHVDNSFGNSFEFTKNNIYGTHVLLEACKVTGQIRRFIHVSTDEVYGETEEDAVVGNHEASQLLPTNPYSATKAGAEMLVMAYGRSYGLPVITTRGNNVYGPNQFPEKLIPKFILLAMRGLPLPIHGDGSNVRSYLYCEDVAEAFEVVLHKGEVGHVYNIGTVKERRVIDVAKDICKLFGLDTEKVIRFVENRPFNDQRYFLDDQKLKKLGWAERTPWEEGLKKTIEWYTTNPDYWGDVTGALLPHPRMLMTPGVDERHNWTEEIKSLASSPVEASTTAPAASTQSTTDAPQKPSYKFLIYGRTGWIGGLLGKICEKQGIPYEYGKGRLEERSQLLEDIRNVKPTHVFNAAGVTGRPNVDWCETHKQDTIRTNVVGTLNLADVCREQGLLMINYATGCIFEYDAKHPEGSGIGFKEEDTPNFTGSFYSKTKAMVEELLKDYDNVCTLRVRMPISSDLGNPRNFITKIARYDKVVNIPNSMTILDELLPISIEMAKRDCRGIWNFTNPGVVSHNEILEMYKKYINPDFKWTNFTLEEQAKVIVAPRSNNEMDASKLKAEFPELLSIKDSLIKYVFEPNRKVPTN

SEQ ID NO: 79109 - protein, 206 aa, Setaria italica
  misc_feature (21)..(21): Xaa can be any naturally occurring amino acid
  misc_feature (33)..(33): Xaa can be any naturally occurring amino acid
  misc_feature (43)..(43): Xaa can be any naturally occurring amino acid
  misc_feature (82)..(82): Xaa can be any naturally occurring amino acid
  misc_feature (112)..(112): Xaa can be any naturally occurring amino acid
  Transcript Sequence Number=SeqID_13135
  Gene Ontology: Mol. function=RNA-directed DNA polymerase activity; Cellular component=chromatin; Biological process=chromatin assembly or disassembly
  Homolog annotation: Hit_ID=Q8SA91; Match level="QueryCoverage=94%, HitCoverage=8%, E-value=2e-53, Identity=53%"; Hit description =Putative gag-pol polyprotein
RCFVNDCPSNWADWLSSAEYXYNTSTHFAIGRXPFEALYGYHXKHFGISAVEVVQVPKLSNWLQNRQVMNNLIHQHLLRAKXRMKRQADKNRSERHFAVGDMVFLKLQPYVXSSLAPRFNMKLAFKYFGPYKIVAKVGCVAYKLDLLAQSIAHPVFNVSQSKLANIPTSEVIAPLPDAIDMPRVPEKILQRRSITVNTHPMVQSFY

SEQ ID NO: 79110 - protein, 93 aa, Setaria italica
  Transcript Sequence Number=SeqID_13136
  Subcellular localization annotation: CTP_CleavageSite=60; ConfidenceScore=5.15e-01
GELFTSPTRRPEPPLPPPRTRPPWPRNHHSPRLLLGIGPRGRIKLNQIGSNTRLSARRMRSERKRASDWKARAGSNPNSSRQIGWDWDWECVW

SEQ ID NO: 79111 - protein, 275 aa, Setaria italica
  misc_feature (86)..(86): Xaa can be any naturally occurring amino acid
  misc_feature (136)..(136): Xaa can be any naturally occurring amino acid
  misc_feature (211)..(211): Xaa can be any naturally occurring amino acid
  Transcript Sequence Number=SeqID_13137
  Gene Ontology: Mol. function=protein binding; Biological process =apoptosis
  Homolog annotation: Hit_ID=Q2R0H0; Match level="QueryCoverage=100%, HitCoverage=27%, E-value=3e-37, Identity=42%"; Hit description=NB -ARC domain containing protein
LSNVKASSKDGAELKEIRKLGKLRKLGVVIQNKKAHLTNLLWALSDLKECIQSLSVTILGTRTEGTATDQKLLEPPLYNYLIRPPXVLESLSIDGVTDIVQLLTLFAKGSDELSKVTLSRTLLEKNNLIHIAILPXLQCLRLRHDAYKESSLTFKKEDFPHLKNFLVECLHKTGMIKFKNGATPELEKIVLFRTNIKHLCGIGALPKLKEXLELKGNEFLVLLPEDGTPSAVTVEDGTASAEPVKHEDGTAYAEAITRSTLTFREEEFKHLKYFL

SEQ ID NO: 79112 - protein, 189 aa, Setaria italica
  Transcript Sequence Number=SeqID_13138
  Gene Ontology: Cellular component=vacuole; Biological process =response to stress
  Homolog annotation: Hit_ID=Q4VSM2; Match level="QueryCoverage=73%, HitCoverage=80%, E-value=1e-52, Identity=74%"; Hit description =Universal stress protein
  Pfam annotation: Domain name=Usp; Domain location=37-183; Score=85.0; E_value=2.8e-22; Accession=PF00582.18; Description=Universal stress protein family
MAEAKTAQPAHPAPPPPPAAAVDGSVEHQKQQQQQRKTVVVVGVDDSEHSYYALEWTVRHVAGGVAGGAELVIVHAKPSASSVVSFGGPGAGEAMRCVEADLRKMAEAVVGRARQVCIANSVHALIEVVEGEPRYVLCNAAEKHHADLLVVGSHGYGAIKRAFLGSVSDYCAHHTHCTVMIVKRPKSKC

SEQ ID NO: 79113 - protein, 59 aa, Setaria italica
  Transcript Sequence Number=SeqID_13139
  Homolog annotation: Hit_ID=B6TF40; Match level="QueryCoverage=96%, HitCoverage=33%, E-value=7e-15, Identity=88%"; Hit description=ZIM motif family protein
MAMAAAEGKSRRFALACGVLSQYVKAEQKMAAVAPRAPATTLSLMPGADVGAEQEPALR

SEQ ID NO: 79114 - protein, 435 aa, Setaria italica
  Transcript Sequence Number=SeqID_13140
  Homolog annotation: Hit_ID=B6UC23; Match level="QueryCoverage=95%, HitCoverage=81%, E-value=0.0, Identity=87%"; Hit description=mTERF family protein
  Pfam annotation: Domain name=mTERF; Domain location=88-400; Score =52.2; E_value=1.9e-12; Accession=PF02536.6; Description=mTERF
DDDEEEFEEEGDDEGYDSDDDMSGLEYPGVLYSNNPRAPSKRPGLQTPLMKENWEGRQPKARDKYGSPEKFKSLHPRNKVGRSSTDLMNMESKVELKNESISRSLFQKLQEEYDFDDKWLPLVDYLCTFGLKESHFTYIYERHMACFQISQASAEERLNFLLNSGVKSKDMKRILVRQPQILEYTLSNLKSHVDFLVSIGVPSTRIGQIVSSAPSMFSYSVEQSLKPTVRYLIEEVGIEERDVGKVVQLSPQILVQKIDSAWKSRSLFLSKELGAPKDSIVKMVTKHPQLLHYSIEDGILPRINFLRSIGMRNSDILKVLTSLTQVLSLSLEDNLKPKYLYLVNDLKNEVQSLTKYPMYLSLSLDQRIRPRHRFLVSLKKAPKGPFPLSSFVPTDERFCQRWAGTSLEKYHTFRQSLLLTGFAEKSARKKLVSRR

SEQ ID NO: 79115 - protein, 101 aa, Setaria italica
  Transcript Sequence Number=SeqID_13141
  Homolog annotation: Hit_ID=B6UC23; Match level="QueryCoverage=100%, HitCoverage=19%, E-value=1e-48, Identity=92%"; Hit description=mTERF family protein
IRPKYLYLVNDLKNEVQSLTKYPMYLSLSLDQRIRPRHRFLVSLKKAPKGPFPLSSFVPTDERFCQRWAGTSLEKYHTFRQSLLLTGFAEKSARKKLVSRR

SEQ ID NO: 79116 - protein, 188 aa, Setaria italica
  Transcript Sequence Number=SeqID_13142
  Gene Ontology: Mol. function=DNA binding
  Pfam annotation: Domain name=zf-C2HC_plant; Domain location=73-127; Score=72.1; E_value=2.1e-18; Accession=PF07567.4; Description =Protein of unknown function, DUF1544
MMDGEGSQGIKKVHFRDSSSQVPLITYKRRRRQKPQQAEPQQQAEPQLETEPEQKAGDVPAQQTKDTFWKSRDMGWKYGIMIDENRQHWKCMYCGLIRYGGGVSRLKRHLAGDLDVKMCPKVPADVVEEIREHLRKKRERRRKRAAQNGGNNVNAKSFSDDANAEKDLLPADSVLPAGMGTNVLEEVT

SEQ ID NO: 79117 - protein, 93 aa, Setaria italica
  Transcript Sequence Number=SeqID_13143
FSHLDLLALFLCLRRYEGARPGSPLRDQLRMAIWLLTSALTLMFSSKVAAVVPGAVAAVVWLVAFGTVAGGFYALFFCGNEDKQSNVFDTIIN

SEQ ID NO: 79118 - protein, 52 aa, Setaria italica
  Transcript Sequence Number=SeqID_13144
  Gene Ontology: Mol. function=hydrolase activity; Biological process =metabolic process
  Homolog annotation: Hit_ID=B6T2M3; Match level="QueryCoverage=100%, HitCoverage=15%, E-value=2e-16, Identity=86%"; Hit description =Gibberellin receptor GID1L2
MSDIGAGGGDEVILDAPGFIRVYKSGRVERFLPVDFAPPSTDAAPTGVSSKD

SEQ ID NO: 79119 - protein, 503 aa, Setaria italica
  Transcript Sequence Number=SeqID_13145
  Subcellular localization annotation: CTP_CleavageSite=36; ConfidenceScore=5.40e-01
VSADSYDKVDTAVALIELLLAPVSVKSTSTPTTTTVSSAVTSDVNPVQNTISPPGLLHYQSQNAPWLSTPQTDAPSITSSGPVLSTLPNNSLQPQPFAGSFSMPPFTGHPPHMNSTPRNPFPVPGPQQSMPSNQQHPPQFRANSSIGPFGQPPGIVSPQMTPSSSVPPPVRPLQIPHASGGWPSFSPITPQSQWPPQASPNFVPVRPISVSPLGATPPHGPAALTPPSNMPTMYHSQQPALANFTCSATLVSRPPGGVQSFSTVAPQCPSPVAFPGGGGSSTQSGYPLSIGPPPAFSRVGPTPGMVPPSCPPASGPASTSSGQAPIAALRPPRPVAGDFTFRPVVSPAPTPDFAASGGQMGIQGRSHPGAPFFHPGNQSPNQGFQRPCDGRPLNAMGQARMHAPPHPPQHLHGGFPRNPSHLELPAGFPGIPPAVQAHPMLGPSNFLPSRPFQPRPPSQANPFASRDRQGGNPIYNPFAPTAAQKTEGADPEYEDLMASVGVK

SEQ ID NO: 79120 - protein, 374 aa, Setaria italica
  misc_feature (74)..(74): Xaa can be any naturally occurring amino acid
  Transcript Sequence Number=SeqID_13146
  Gene Ontology: Mol. function=RNA binding; Cellular component =commitment complex; Biological process=generation of catalytic spliceosome for first transesterification step
  Homolog annotation: Hit_ID=B9SY02; Match level="QueryCoverage=70%, HitCoverage=29%, E-value=1e-51, Identity=45%"; Hit description =Protein binding protein, putative
  Pfam annotation: Domain name=KH_1; Domain location=174-242; Score =8.3; E_value=0.089; Accession=PF00013.21; Description=KH domain
  Subcellular localization annotation: CTP_CleavageSite=48; ConfidenceScore=5.51e-01
KLDQSSPAKHQRAKSTAPLSLTPKISIFGTKAGFVIPKNKLAGSLVTRGATTKNETPTASKEDNSRHAQRKTKXWGPDLTTDPAVCKGRALAYQQTRVEQITKQLKSGTLDMGKIEGSVSTGKGTNSVGSDNLKENEQGKVELLELERREITGEILRLNPGYKVPENYKPVLKETKIPLPAEAHPGHNIIGVLIGPESNTLKRLHEETGAVIQVYGTKKINGEKSEIHHQDISDARAAYEDLYINVSADSYDKVDTAVALIELLLAPVSVKSTSTPTTTTVSSAVTSDVNPVQNTISPPGLLHYQSQNAPWLSTPQTDAPSITSSGPVLSTLPNNSLQPQPFAGSFSMPPFTGHPPHMNSTPRNSYFPCFLGTF

SEQ ID NO: 79121 - protein, 60 aa, Setaria italica
  Transcript Sequence Number=SeqID_13147
  Subcellular localization annotation: CTP_CleavageSite=37; ConfidenceScore=5.23e-01
TSFVGNLGLCGKQINSVCKDALQSPSNGPQSPSNCCYCTNNKSGRILSILLLSMSSEEGD

SEQ ID NO: 79122 - protein, 54 aa, Setaria italica
  Transcript Sequence Number=SeqID_13148
FFGKLLKEALNYWELELSGCGFNRGWQGALPLHFSVRTRGFVVLLNCYPSLKVR

SEQ ID NO: 79123 - protein, 127 aa, Setaria italica
  misc_feature (7)..(7): Xaa can be any naturally occurring amino acid
  Transcript Sequence Number=SeqID_13149
  Gene Ontology: Mol. function=protein serine/threonine kinase activity; Cellular component=plasma membrane; Biological process =protein amino acid phosphorylation
  Homolog annotation: Hit_ID=B9S1N0; Match level="QueryCoverage=99%, HitCoverage=21%, E-value=7e-37, Identity=61%"; Hit description =BRASSINOSTEROID INSENSITIVE 1-associated receptor kinase 1, putative
  Pfam annotation: Domain name=LRR_1; Domain location=20-42; Score=0.7; E_value=2.2e+02; Accession=PF00560.25; Description=Leucine Rich Repeat
  Pfam annotation: Domain name=LRR_1; Domain location=44-66; Score =14.7; E_value=0.38; Accession=PF00560.25; Description=Leucine Rich Repeat
  Pfam annotation: Domain name=LRR_1; Domain location=68-90; Score =16.6; E_value=0.1; Accession=PF00560.25; Description=Leucine Rich Repeat
  Pfam annotation: Domain name=LRR_1; Domain location=92-114; Score =17.1; E_value=0.073; Accession=PF00560.25; Description=Leucine Rich Repeat
  Pfam module annotation: Pfam domain module=LRR_1::LRR_1::LRR_1::LRR _1; Domain location=20-42::44-66::68-90::92-114
EQDADPXQLKGVRCDSHSKRVINLILAYHRLVGPIPPEIGRLNQLQTLSLQGNSLYGSLPPELGNCTKLQQLYLQGNYLSGYIPSEFGDLVELEALDLSSNTLSGSIPRSLDKLSKLTSFNVSMNFL

SEQ ID NO: 79124 - protein, 400 aa, Setaria italica
  misc_feature (373)..(373): Xaa can be any naturally occurring amino acid
  Transcript Sequence Number=SeqID_13150
  Gene Ontology: Mol. function=protein serine/threonine kinase activity; Cellular component=plasma membrane; Biological process =protein amino acid phosphorylation
  Homolog annotation: Hit_ID=B9S1N0; Match level="QueryCoverage=95%, HitCoverage=64%, E-value=1e-128, Identity=59%"; Hit description =BRASSINOSTEROID INSENSITIVE 1-associated receptor kinase 1, putative
  Pfam annotation: Domain name=LRRNT_2; Domain location=28-68; Score =59.0; E_value=1.8e-14; Accession=PF08263.4; Description=Leucine rich repeat N-terminal domain
  Pfam annotation: Domain name=LRR_1; Domain location=121-143; Score =16.6; E_value=0.1; Accession=PF00560.25; Description=Leucine Rich Repeat
  Pfam annotation: Domain name=LRR_1; Domain location=145-167; Score =17.1; E_value=0.073; Accession=PF00560.25; Description=Leucine Rich Repeat
  Pfam annotation: Domain name=LRR_1; Domain location=169-190; Score =4.5; E_value=42; Accession=PF00560.25; Description=Leucine Rich Repeat
  Pfam annotation: Domain name=LRR_1; Domain location=73-95; Score=0.7; E_value=2.2e+02; Accession=PF00560.25; Description=Leucine Rich Repeat
  Pfam annotation: Domain name=LRR_1; Domain location=97-119; Score =14.7; E_value=0.38; Accession=PF00560.25; Description=Leucine Rich Repeat
  Pfam module annotation: Pfam domain module=LRRNT_2::LRR_1::LRR_1::LRR_ 1::LRR_1::LRR_1; Domain location=28-68::121-143::145-167::169-190::73- 95::97-119
MGSFLRKQPSYLFILIILHLVAHEARTLSSDGEALLAFKKAVTNSDGVFLNWREQDADPCNWKGVRCDSHSKRVINLILAYHRLVGPIPPEIGRLNQLQTLSLQGNSLYGSLPPELGNCTKLQQLYLQGNYLSGYIPSEFGDLVELEALDLSSNTLSGSIPRSLDKLSKLTSFNVSMNFLTGAIPSSGSLVNFNETSFVGNLGLCGKQINSVCKDALQSPSNGPQSPSSDDMLSKKNGKNSTRLVISAVATVGALLLVALMCFWGCFLYKNFGKKDMRGFRVELCGGSSVVMFHGDLPYSSKDILRKLETMDEENIIGAGGFGTVYKLAMDDGSVFALKRIVKTNEGLDRFFDRELEILGSVKHRYLVNLRGXCNSPSSKLLIRASQSNCSDFSCNTSSR

SEQ ID NO: 79125 - protein, 343 aa, Setaria italica
  Transcript Sequence Number=SeqID_13151
  Gene Ontology: Mol. function=protein serine/threonine kinase activity; Cellular component=integral to membrane; Biological process=protein amino acid phosphorylation
  Homolog annotation: Hit_ID=B9S1N0; Match level="QueryCoverage=99%, HitCoverage=57%, E-value=1e-177, Identity=85%"; Hit description =BRASSINOSTEROID INSENSITIVE 1-associated receptor kinase 1, putative
  Pfam annotation: Domain name=Pkinase; Domain location=60-327; Score =158.1; E_value=2.6e-44; Accession=PF00069.17; Description=Protein kinase domain
  Pfam annotation: Domain name=Pkinase_Tyr; Domain location=60-327; Score=78.7; E_value=2.1e-20; Accession=PF07714.9; Description =Protein tyrosine kinase
  Pfam module annotation: Pfam domain module=Pkinase::Pkinase_Tyr; Domain location=60-327::60-327
VGALLLVALMCFWGCFLYKNFGKKDMRGFRVELCGGSSVVMFHGDLPYSSKDILRKLETMDEENIIGAGGFGTVYKLAMDDGSVFALKRIVKTNEGLDRFFDRELEILGSVKHRYLVNLRGYCNSPSSKLLIYDYLQGGSLDEVLHEKSEQLDWDARINIILGAAKGLSYLHHDCSPRIIHRDIKSSNILLDGNFEARVSDFGLAKLLEDEESHITTIVAGTFGYLAPEYMQSGRATEKTDVYSFGVLVLEILSGKRPTDASFIEKGLNIVGWLNFLASENREREIVDPNCEGVQIETLDALLSLAKQCVSSLPEERPTMHRVVQMLESDVITPCPSDFYDSE

SEQ ID NO: 79126 - protein, 179 aa, Setaria italica
  Transcript Sequence Number=SeqID_13152
  Gene Ontology: Mol. function=DNA-directed RNA polymerase activity; Cellular component=nucleus; Biological process=transcription
  Homolog annotation: Hit_ID=B6ST98; Match level="QueryCoverage=87%, HitCoverage=77%, E-value=3e-69, Identity=82%"; Hit description=DNA -directed RNA polymerase III subunit 22.9 kDa polypeptide
  Pfam annotation: Domain name=RNA_pol_Rbc25; Domain location=58-166; Score=161.5; E_value=2.6e-45; Accession=PF08292.4; Description=RNA polymerase III subunit Rpc25
  Pfam annotation: Domain name=RNA_pol_Rpb7_N; Domain location=1-56; Score=41.4; E_value=3.7e-09; Accession=PF03876.9; Description=RNA polymerase Rpb7, N-terminal domain
  Pfam module annotation: Pfam domain module=RNA_pol_Rbc25::RNA_pol _Rpb7_N; Domain location=58-166::1-56
LPDAIKAELERLFLDKVIANLGLCVSVYDIRSLEGGSIHPGEGCSIYKVSFRLLMFRPFNGEVLVGRISGYDDKGLQVSLEFFNDICIPGHLMQFGTVRGPDGRWMLRTEDNDELYLDLDDEIRFLVSGTKYPPIPIEQKADDPPFSPMQIVGSIKGDGLGLLAWWAADEEEGEEVAEQ

SEQ ID NO: 79127 - protein, 82 aa, Setaria italica
  Transcript Sequence Number=SeqID_13153
RRSGQVLHDSVASLVALLLLPARLLAELPAVSFSTGCAFLRVEHRPAQILDKRALWINSCHIFRRRLNVLQRRRIESRSTRP

SEQ ID NO: 79128 - protein, 196 aa, Setaria italica
  Transcript Sequence Number=SeqID_13154
  Gene Ontology: Mol. function=sulfotransferase activity; Cellular component=integral to membrane
  Homolog annotation: Hit_ID=B6SVJ1; Match level="QueryCoverage=100%, HitCoverage=47%, E-value=2e-88, Identity=86%"; Hit description=Auxin Efflux Carrier family protein
  Pfam annotation: Domain name=Mem_trans; Domain location=1-190; Score=- 65.5; E_value=9.4e-05; Accession=PF03547.10; Description=Membrane transport protein
NMNKVVFTVFTPSLMFASLAKTVTLEDVISWWFMPVNIGITFFIGGSLGWIACNILKPPQHFRGLIMAFCSAGNLGNLLLIIVPAVCDEDGNPFGKDRSICRSRGLSYSSLSMALGGLFIWTYTYSLMQKSGKLYHKMQSKSIQCSADSDEEQAKQDGPAAYNDEEAPLPTSVKPEEQTDENPMEAPLLSCESEVA

SEQ ID NO: 79129 - protein, 412 aa, Setaria italica
  misc_feature (123)..(123): Xaa can be any naturally occurring amino acid
  Transcript Sequence Number=SeqID_13155
  Gene Ontology: Mol. function=sulfotransferase activity; Cellular component=integral to membrane
  Homolog annotation: Hit_ID=B6SVJ1; Match level="QueryCoverage=100%, HitCoverage=100%, E-value=0.0, Identity=78%"; Hit description=Auxin Efflux Carrier family protein
  Pfam annotation: Domain name=Mem_trans; Domain location=9-404; Score =301.2; E_value=2.2e-87; Accession=PF03547.10; Description=Membrane transport protein
  Subcellular localization annotation: CTP_CleavageSite=40; ConfidenceScore=5.56e-01
MGFFSFFLVASMPIVQVLLIGVVGAYLASGFSNVLTTSARRDMNKVVFTVFTPSLMFASLAKTVTLEDVISWWFMPVNIGITFFIGGSLGWIACNILKPPQHFRGLIMAFCSAGNLGNLLLIXIVPGLNKRTKNKRNRYQDRPNKSLSMALGVFIWTYTYSLMQKSGKLYHKMQSKSIQCSADSDEEQAKQDGPAAYNDEEAPLPTSVKPEEQTDENPMEAPLLSCESEVADKGFWTNLKDTVHQFVKELMAPPTISALIGFVVGLVPWLKSLIIGDGAPLKVLQDSLHLMGDGTIPCITLILGGNLTQGLRKSGLKRTVIITIVCIRFVILPLIGIAVVHAAYGVGFLSHDPLYRYVLMVQFALPPAMNIGTMAQLFDVAQEECSVIFLWTYLVAAVALTTWSTIFMSILS

SEQ ID NO: 79130 - protein, 170 aa, Setaria italica
  misc_feature (96)..(96): Xaa can be any naturally occurring amino acid
  Transcript Sequence Number=SeqID_13156
  Homolog annotation: Hit_ID=Q5CAF6; Match level="QueryCoverage=74%, HitCoverage=41%, E-value=1e-14, Identity=38%"; Hit description =OSJNBa0065H10.11 protein
GLVISYGVFAQRNADADGNAAKERSLAWNSRYHPDGPLVVVADHAAAPSDDDEDGQHGARERPLSLPVRRLKSAAAQESETGGDAGDAFGEETDSXCASSSGFWAGARAVPSPPSVLDADLGLSPCSQPESSRPFFVHGANKSHGFDAATLSTHVEGAPRPAVERRRPGG

SEQ ID NO: 79131 - protein, 70 aa, Setaria italica
  misc_feature (1)..(43): Xaa can be any naturally occurring amino acid
  Transcript Sequence Number=SeqID_13157
XXXXXXXXXXXXXXXXXXXXXXXXXXXXXXXXXXXXXXXXXXXFFFFLSNKGSSLDFNWLLFCIGNERIY

SEQ ID NO: 79132 - protein, 65 aa, Setaria italica
  Transcript Sequence Number=SeqID_13158
  Gene Ontology: Mol. function=phospholipase D activity
  Homolog annotation: Hit_ID=B9RTA5; Match level="QueryCoverage=53%, HitCoverage=3%, E-value=9e-14, Identity=91%"; Hit description =Phospholipase d zeta, putative
  Subcellular localization annotation: CTP_CleavageSite=23; ConfidenceScore=5.12e-01
RHTSNHLATTCRSGTNFSNIKHRGNLVSPFWCHPHRFGSFAPPRGLTEDGSVVQWFIDGRAAFDA

SEQ ID NO: 79133 - protein, 673 aa, Setaria italica
  misc_feature (42)..(42): Xaa can be any naturally occurring amino acid
  Transcript Sequence Number=SeqID_13159
  Gene Ontology: Mol. function=catalytic activity; Cellular component =endoplasmic reticulum membrane; Biological process=metabolic process
  Homolog annotation: Hit_ID=Q7F0T4; Match level="QueryCoverage=100%, HitCoverage=59%, E-value=0.0, Identity=85%"; Hit description =Putative phospholipase D-like protein
  Pfam annotation: Domain name=PLDc; Domain location=34-61; Score=37.4; E_value=5.8e-08; Accession=PF00614.14; Description=Phospholipase D. Active site motif
  Pfam annotation: Domain name=PLDc; Domain location=469-496; Score =39.9; E_value=1e-08; Accession=PF00614.14; Description=Phospholipase D. Active site motif
  Pfam module annotation: Pfam domain module=PLDc::PLDc; Domain location=34-61::469-496
ARELNSMYSKRRLLNIHENVKVLRYPDHFSTGIYLWSHHENXVVVDNQVCYIGGLDLCFGRYDSPEHKVADFPPSTWPGKDYYNPREYEPNSWEDTMKDELDRTKYPRMPWHDVQCALYGPACRDVARHFVQRWNYAKRNKAPNEQAIPLLMPHHHMVIPHYMGTSKETNGETESKQNHGMDVKFNRLNSLTTPASCQDIPLLLPHEPDHHAFPNGDFGLNGMNINNGLSDHPNKTKRNQPLPNRKAKLDLSLQDLQMKGFVDNVGSPEVSVSKHYDTSKPDTQNIDKEWWETQERGDQVSSVLDVGEVGPRAACRCQVVRSVGPWSAGTTEIEGSIHNAYFSLIEKAEHFVYIENQFFISGLSGDDTIKNRVLEALYRRILRAEKEKKCFRVIIVIPLLPGFQGGIDDGGAASVRAIMHWQYRTICRGPNSILKNLYDVVGSKAHDYISFYGLRAHGRLGNGGPLVTNQIYVHSKLMIIDDRMTLIGSANINDRSLLGSRDSEIGMIIEDKEVVSSLMDGKPWEAGKFSLSLRLSLWAEHLGLLPGEVSCIMDPVDDSAYKNIWMATAKVNTMIYQQVFSCVPNDHIHSRYQFRQSFAHRKEKIGHTTIDLGVALEKQETKQDRDLADADPMEQLQAVRGHIVSFPLEFMCQEDLRPFFSESEYYTSPQVFH

SEQ ID NO: 79134 - protein, 64 aa, Setaria italica
  Transcript Sequence Number=SeqID_13160
LPVCSLSLMTCVGKKTALIINIDACSYVSMQHLELNMFHELGNCKMHHLPHLSLACRCIFYIYL

SEQ ID NO: 79135 - protein, 158 aa, Setaria italica
  Transcript Sequence Number=SeqID_13161
  Gene Ontology: Mol. function=protein binding; Cellular component =nucleus; Biological process=ribosome assembly
  Homolog annotation: Hit_ID=B9RT37; Match level="QueryCoverage=96%, HitCoverage=81%, E-value=1e-49, Identity=61%"; Hit description=60S ribosome subunit biogenesis protein NIP7, putative
  Pfam annotation: Domain name=UPF0113; Domain location=1-153; Score= -46.5; E_value=0.089; Accession=PF03657.5; Description=Uncharacterised protein family (UPF0113)
SRRGGPDPEPGRYCLRLHKNRVYYASESLVRRATTVARPRLAAVGTPIGKFTHHGSFHLTVHALDLLAAHARRRVWLKPDTERSFLFGNSVPKSSLARITENTKAGDGVVVMSMADVPLGFGIAARSAQDCRKADTNAVVVLHQADAGEYLRKEEELM

SEQ ID NO: 79136 - protein, 69 aa, Setaria italica
  Transcript Sequence Number=SeqID_13162
KEAIGTSDGLCLTQLLCSVSIAPMLAPTLFWGPSEHPMVPVFLNFFGSLLIFGCGCLLRTYNTFKACWG

SEQ ID NO: 79137 - protein, 86 aa, Setaria italica
  Transcript Sequence Number=SeqID_13163
LMSQKSLEVCTESLGNETGSGDFTSSLDMACLFDSALPAAAATADEPFWQHDAARDCEKEQWEAKDLAAVNYHRSAGTRSPRLTNR

SEQ ID NO: 79138 - protein, 242 aa, Setaria italica
  Transcript Sequence Number=SeqID_13164
  Gene Ontology: Mol. function=binding
  Homolog annotation: Hit_ID=Q7XIB9; Match level="QueryCoverage=70%, HitCoverage=19%, E-value=2e-23, Identity=41%"; Hit description =Putative BLE2 protein
  Subcellular localization annotation: CTP_CleavageSite=45; ConfidenceScore=5.15e-01
MAGAVADPNHHSIAVTAPDQPQGSTAVEPPWLAAQRCLNRFVRTVALLERAGNGLGTLAFTWATVVILGGFSTNLGPDFWYATAIVFLEAFRVFSRESRSDDELLFKTTGSIRLKRVKLIGNVPYYLNVGIVMVSLYGTIEFLLVHYKYLPQPPHRMPYHFVLLAVLLALGSMVQLPTIVKYMKKGHPLLQASPLVAVLAFGGVLLWTNAPARFAALVVAPLFVGCLHSLISGLVLVKNRKL

SEQ ID NO: 79139 - protein, 143 aa, Setaria italica
  Transcript Sequence Number=SeqID_13165
  Gene Ontology: Mol. function=aspartic-type endopeptidase activity; Cellular component=chromatin; Biological process=oxidation reduction
  Homolog annotation: Hit_ID=Q75M81; Match level="QueryCoverage=88%, HitCoverage=11%, E-value=4e-45, Identity=63%"; Hit description =Putative integrase
MVSIDQMRNQTIVGVARSMLKAKKMLAAFWGEVVSTAVFNLNRSPTKSLKGTTPFEAWHGRKPDVSFLRTFGCVGHVKETKSGLKKLDDRSKPMVFLGYEQGSKAYRLYNPQARWVVVSRDVVFDEAASWDWESSGGEVVGGR

SEQ ID NO: 79140 - protein, 107 aa, Setaria italica
  Transcript Sequence Number=SeqID_13166
RYSVRIMTSTIEAWMVFKATPRRPGPKKSWVSQLPNLKTAREGREEEECNRPTRPRATATIPLKNHGSLKHIAQKMSNMVKKPAPFKLKDDQGCREFPKEKYQGPGK

SEQ ID NO: 79141 - protein, 294 aa, Setaria italica
  misc_feature (87)..(87): Xaa can be any naturally occurring amino acid
  Transcript Sequence Number=SeqID_13167
  Gene Ontology: Mol. function=nucleic acid binding; Cellular component= nucleus; Biological process=nuclear mRNA splicing, via spliceosome
  Homolog annotation: Hit_ID=Q6YXY3; Match level="QueryCoverage=100%, HitCoverage=24%, E-value=1e-155, Identity=92%"; Hit description =Putative splicing factor 3b, subunit 3, 130kDa
  Subcellular localization annotation: CTP_CleavageSite=30; ConfidenceScore=5.07e-01
MYLYSLTLQRATGAVCAVIGAFSGRDTKKSAASGSASTQEIAVARGSTLDLLRPDPETGRLRTLLSVDVFGAIRSLAQFRLTGATKXYLVVGSDSGRLVILEYSPDRNRFDKVHQETFGKSGCRRIVPGQLLAVDPKGRALCIAALEKQKLVYVLNRDAAARLTISSPLEAHKSNTLTFSLTALDCGFDNPIFAAIELEYAESDRDPTGQAANQAQKLLTFYELDLGLNHVSRKASEPIDNGANLLVTVPGGGDGPSGVLVCCDNFVLYRNQGHPEVRAVIPRRADLPAERGVL

SEQ ID NO: 79142 - protein, 79 aa, Setaria italica
  Transcript Sequence Number=SeqID_13168
GQPGVLVRQLCVAVRRGPEEQQQRGHRRRREQRHPVPAKERDEASPDLRVVALQQPDQNLREVIHQGLEHARPDAAGEL

SEQ ID NO: 79143 - protein, 101 aa, Setaria italica
  Transcript Sequence Number=SeqID_13169
  Gene Ontology: Mol. function=hydrolase activity, hydrolyzing O -glycosyl compounds; Biological process=carbohydrate metabolic process
  Homolog annotation: Hit_ID=Q6VB92; Match level="QueryCoverage=79%, HitCoverage=12%, E-value=1e-38, Identity=90%"; Hit description=Beta -glucanase
  Pfam annotation: Domain name=Glyco_hydro_3_C; Domain location=2-97; Score=10.9; E_value=8.1e-08; Accession=PF01915.14; Description =Glycosyl hydrolase family 3 C terminal domain
PKVESKDVCGLVKCVVLLVSGRPLVVQPYVDYMDALVAAWLPGTEGQGVSDVLFGDYGFTGKLPRTWFKTVDQLPMNYGDKRYDPLFPFGYGITTKAAGHK

SEQ ID NO: 79144 - protein, 99 aa, Setaria italica
  Transcript Sequence Number=SeqID_13170
  Subcellular localization annotation: CTP_CleavageSite=35; ConfidenceScore=5.08e-01
PALLDLAQLLALAVICWCSAPARRVAFLGVPTVSLAHMGTGMKLLARVSPQLGKGRAEDFLYSFCSCSHGFCTLADSGGSPRRLHLAITLSLLRTNRGN

SEQ ID NO: 79145 - protein, 177 aa, Setaria italica
  Transcript Sequence Number=SeqID_13171
  Gene Ontology: Mol. function=hydrolase activity, hydrolyzing O -glycosyl compounds; Biological process=carbohydrate metabolic process
  Homolog annotation: Hit_ID=Q9XE93; Match level="QueryCoverage=89%, HitCoverage=25%, E-value=3e-81, Identity=88%"; Hit description =Exhydrolase II
  Pfam annotation: Domain name=Glyco_hydro_3; Domain location=1-161; Score=53.3; E_value=9.1e-13; Accession=PF00933.13; Description =Glycosyl hydrolase family 3 N terminal domain
GRCYESYSEDPGIVQAMTELIPGLQGDVPQNFTSGMPYVAGKNKVAACAKHFVGDGGTQNGINENNTIIDRQGLMSIHMPAYLDSLRKGVSTVMISYSSWNGIKMHANHDLITGFLKGRLKFKGFTISDWEGIDRITSPAGANYSYSVQAGILAGIDMVGKLAAALPILFLLVTMVM

SEQ ID NO: 79146 - protein, 64 aa, Setaria italica
  misc_feature (48)..(48): Xaa can be any naturally occurring amino acid
  Transcript Sequence Number=SeqID_13172
  Gene Ontology: Mol. function=hydrolase activity, hydrolyzing O -glycosyl compounds; Biological process=carbohydrate metabolic process
  Homolog annotation: Hit_ID=Q9LLB8; Match level="QueryCoverage=92%, HitCoverage=9%, E-value=2e-18, Identity=78%"; Hit description =Exoglucanase
MASLHKITFVLMFCLVALGRAEYLRYKDPKQPVSVRVKDLLSRMTLAXEKIGQMTNERKCHSRC

SEQ ID NO: 79147 - protein, 651 aa, Setaria italica
  misc_feature (202)..(202): Xaa can be any naturally occurring amino acid
  misc_feature (421)..(421): Xaa can be any naturally occurring amino acid
  misc_feature (533)..(533): Xaa can be any naturally occurring amino acid
  misc_feature (552)..(552): Xaa can be any naturally occurring amino acid
  Transcript Sequence Number=SeqID_13173
  Gene Ontology: Mol. function=hydrolase activity, hydrolyzing O -glycosyl compounds; Biological process=carbohydrate metabolic process
  Homolog annotation: Hit_ID=Q9XE93; Match level="QueryCoverage=94%, HitCoverage=97%, E-value=0.0, Identity=85%"; Hit description =Exhydrolase II
  Pfam annotation: Domain name=Glyco_hydro_3; Domain location=126-364; Score=306.7; E_value=4.8e-89; Accession=PF00933.13; Description =Glycosyl hydrolase family 3 N terminal domain
  Pfam annotation: Domain name=Glyco_hydro_3_C; Domain location=436 -648; Score=177.1; E_value=5e-50; Accession=PF01915.14; Description =Glycosyl hydrolase family 3 C terminal domain
  Pfam module annotation: Pfam domain module=Glyco_hydro_3::Glyco_hydro_ 3_C; Domain location=126-364::436-648
MGTGMKLLARVRRRLVPLLRRHRMALLTAPAVAALLLLFWSAAYGDAQLPYKDPGLPVEDRVRDLLGRMTLAEKIGQMTQIERLVASPQVLKDNFIGSLLSGGGSVPRKGATAAEWMSMITDFQKACLSTRLGIPMIYGIDAVHGHNNVYGATIFPHNVALGATRDPELVKRIGAATALEVRATGIQYAFAPCIAVCRDPRXWGRCYESYSEDPGIVQAMTELIPGLQGDVPQNFTSGMPYVAGKNKVAACAKHFVGDGGTQNGINENNTIIDRQGLMSIHMPAYLDSLRKGVSTVMISYSSWNGIKMHANHDLITGFLKGRLKFKGFTISDWEGIDRITSPAGANYSYSVQAGILAGIDMIMVPNNYQSFISILTGHVNSGVIPMSRIDDAVTRILRVKFTMGLFENPMPDTTLADQLGXQEHRDLAREAVRKSLVLLQNGKPGDAPLLPLPKKAAKILVAGSHANNLGYQCGGWTIEWQGDTGNITVGTTILDAVKAAVDPSTTVVFVENPDAEFVKNGGFSYAIVAVGEXPYTETKGDSMNLTIPDPGXRSTIQTVCGAVRCATVLISGRPVVIQPFLGATDALVAAWLPGTEGQGVTDVLFGDYGFTGKLPRTWFKSVDQLPMNVGDKHYDPLFRLGFGLTTKGKAY

SEQ ID NO: 79148 - protein, 373 aa, Setaria italica
  misc_feature (16)..(16): Xaa can be any naturally occurring amino acid
  misc_feature (176)..(176): Xaa can be any naturally occurring amino acid
  misc_feature (300)..(300): Xaa can be any naturally occurring amino acid
  misc_feature (318)..(318): Xaa can be any naturally occurring amino acid
  Transcript Sequence Number=SeqID_13174
  Gene Ontology: Mol. function=hydrolase activity, hydrolyzing O -glycosyl compounds; Biological process=carbohydrate metabolic process
  Homolog annotation: Hit_ID=Q9LLB8; Match level="QueryCoverage=100%, HitCoverage=59%, E-value=0.0, Identity=89%"; Hit description =Exoglucanase
  Pfam annotation: Domain name=Glyco_hydro_3; Domain location=1-85; Score=-103.6; E_value=0.0075; Accession=PF00933.13; Description =Glycosyl hydrolase family 3 N terminal domain
  Pfam annotation: Domain name=Glyco_hydro_3_C; Domain location=157 -371; Score=213.3; E_value=6.4e-61; Accession=PF01915.14; Description= Glycosyl hydrolase family 3 C terminal domain
  Pfam module annotation: Pfam domain module=Glyco_hydro_3::Glyco_hydro_ 3_C; Domain location=1-85::157-371
IHMPPYYNSIIRGVSXVMVSYSSWNGVKMHANHFLVTDFLKNKLKFRGFVISDWEGIDRITSPPHANYSYSIEAGVGAGIDMIMVPFRYTEFIDDLTAQVQNKVIPMSRIDDAVYRILRVKFSMGLFENPYPDTSLAGELGKQEHRDLAREAVRKSLVLLKNGKSSYSPLLPLPKXKAGKILVAGSHADNLGNQCGGWTITWQGQPGNNITAGTTILEGIKATIDPSTQVVYSENPDSTVLADKYDYAVVVVGEPPYAETFGDNLNLTIPAPGPSVIQSVCKATKCVVVLISGRPLVVEXPYLGDMDAFVAAWLPGSXEGQGVADVLFGDYGFTGKLSRTWFKSVDQLPMSVGDKHYDPLFPFGFGLTTKGTK

SEQ ID NO: 79149 - protein, 89 aa, Setaria italica
  Transcript Sequence Number=SeqID_13175
  Subcellular localization annotation: CTP_CleavageSite=74; ConfidenceScore=5.90e-01
MGKRSGGRKLPFFTRSSSSSSSSKRNRSARRLPSLPKQDNPARALLPSPSDASPSATPPTAAAVQTAQPPPRLSAAAGAGGAVSGKVGK

SEQ ID NO: 79150 - protein, 176 aa, Setaria italica
  Transcript Sequence Number=SeqID_13176
  Pfam annotation: Domain name=SNAPc_SNAP43; Domain location=21-174; Score=-36.2; E_value=9.1e-05; Accession=PF09808.1; Description=Small nuclear RNA activating complex (SN
PPVPVGYTPFRAIPAHMDMAPFKLDIDELVADYGKENSTTLADFKRVWKEKKFSYIYEGRPKANSCLFMQSLFLHCIGHLTSESSLPRRLAGLYCLYCLYECVLYKPQFKIYLSLEECRQLKDFISMAKQNGVHLVPALVKRMLDKGMFLFGYMNLLGDNGEKQVEELTAMQNKRI

SEQ ID NO: 79151 - protein, 152 aa, Setaria italica
  Transcript Sequence Number=SeqID_13177
  Gene Ontology: Mol. function=metal ion binding; Cellular component =integral to membrane; Biological process=ubiquitin-dependent protein catabolic process
  Homolog annotation: Hit_ID=B6TV57; Match level="QueryCoverage=96%, HitCoverage=36%, E-value=1e-41, Identity=63%"; Hit description=RING -H2 finger protein ATL5I
  Pfam annotation: Domain name=zf-C3HC4; Domain location=104-145; Score= 40.8; E_value=5.3e-09; Accession=PF00097.17; Description=Zinc finger, C3HC4 type (RING finger)
GGGNGKISPAVLFIIVILAVIFFISGLLHLLVRLLMKKQHGRGAGMGESAASPHRTGARDAAMDRQLQQLFHLHDSGLDQAFIDALPVFAYREIIGGNKEPFDCAVCLCEFDGEDRLRLLPVCGHAFHLQCIDTWLLSNSTCPLCRSTLFVP

SEQ ID NO: 79152 - protein, 124 aa, Setaria italica
  misc_feature (117)..(117): Xaa can be any naturally occurring amino acid
  Transcript Sequence Number=SeqID_13178
  Gene Ontology: Mol. function=protein binding; Cellular component =cytoskeleton
  Homolog annotation: Hit_ID=Q5XPJ9; Match level="QueryCoverage=100%, HitCoverage=8%, E-value=2e-37, Identity=61%"; Hit description =Protein SCAR2
MPLSRHTVGNEFALGGRDLYRTADQHDPEAVLDGVAMAGLVGVLRQLGDLAEFAAQVFHGLYDEVMSTSARGHGLMLRVQQLEAELPLLEKESCQRDYLYVVSNRGVDWHLNPRVEXSGVVTRG

SEQ ID NO: 79153 - protein, 83 aa, Setaria italica
  Transcript Sequence Number=SeqID_13179
  Homolog annotation: Hit_ID=B6SW62; Match level="QueryCoverage=96%, HitCoverage=20%, E-value=2e-30, Identity=86%"; Hit description =Calmodulin binding protein
  Pfam annotation: Domain name=IQ; Domain location=30-50; Score=18.5; E_ value=0.029; Accession=PF00612.19; Description=IQ calmodulin-binding motif
  Pfam annotation: Domain name=IQ; Domain location=56-76; Score=1.2; E _value=25; Accession=PF00612.19; Description=IQ calmodulin-binding motif
  Pfam annotation: Domain name=IQ; Domain location=8-28; Score=25.8; E _value=0.00018; Accession=PF00612.19; Description=IQ calmodulin -binding motif
  Pfam module annotation: Pfam domain module=IQ::IQ::IQ; Domain location=30-50::56-76::8-28
PPASLAEDAAAVRIQATFRGYLARTALCALRGIVKLQALVRGQLLRKQANATLRCMQALLTAQSHLRAQRMRVLQEHHHPAAR

SEQ ID NO: 79154 - protein, 84 aa, Setaria italica
  Transcript Sequence Number=SeqID_13180
ERTSPENFVSFFLDETKEKKLSFHLFAAWPLLLGVPCLVWLRVLFCVVMIPCSTASRDLMLQSLFAPCRVLCKCFQPFTVSPSA

SEQ ID NO: 79155 - protein, 430 aa, Setaria italica
  Transcript Sequence Number=SeqID_13181
  Gene Ontology: Mol. function=tryptophan-tRNA ligase activity; Cellular component=cytoplasm; Biological process=tRNA aminoacylation for protein translation
  Homolog annotation: Hit_ID=B6T773; Match level="QueryCoverage=89%, HitCoverage=93%, E-value=0.0, Identity=89%"; Hit description =Tryptophanyl-tRNA synthetase
  Pfam annotation: Domain name=tRNA-synt_1b; Domain location=112-402; Score=7.2; E_value=2.3e-10; Accession=PF00579.17; Description=tRNA synthetases class I (W and Y)
LCSAPNPLAPPASKGERSALRAAMAAAEQGAGAVRKEEGEGEQEQVVNPWEVSAGKGGIDYDKLVDQFGCQRIDDGLVDRVARLTGRPPHCFLRRGLFFAHRDFNDILDLYEKGEKFYLYTGRGPSSESLHLGHLIPFMFTKYLQEAFKVPLVIQLTDDEKFYWKNLTIEESKRLARENAKDIIACGFDVERTFIFTDFGFVGGAFYENMARVARCVTYNKAVGIFGFSPEDHIGKCTFPPVQAVPSFPSSFPHLFSGRDQLRCLIPCAIDQDPYFRMTRDVAPRIGYQKPSLIESRFFPALQGENTKMSASDANTAIYVTDSAKQIKTKVNKYAFSGGQDSIELHRKLGANLDVDVPIKYLNFFLEDDDELEHIKKEYKEGRMLTGEVKQRLIAVLSELVARHQRARAQVTEEMVDAFMAVRPLPNMFG

SEQ ID NO: 79156 - protein, 268 aa, Setaria italica
  Transcript Sequence Number=SeqID_13182
  Gene Ontology: Mol. function=sequence-specific DNA binding; Cellular component=nucleus; Biological process=regulation of transcription, DNA-dependent
  Homolog annotation: Hit_ID=Q2L3E1; Match level="QueryCoverage=82%, HitCoverage=37%, E-value=3e-62, Identity=53%"; Hit description =Putative WRKY DNA-binding protein
MLNECLDLQSILFLFPAMLSCSMCGTLLFLCAADKKHLATSMAGTDNRRALMEDWMLPSPSPRTVMSSFLNEEFSSCPFSSIFSDNGSSTPLFRANQESTSHGGLAERMAARAGFGVLKIDTSRVSSSAPIRSPVTIPPGVSPRELLESPVFLPNAIAQPSPTTGKLPFLMPNNFKSMISSVPKKAEDYLHDDCAFSFQPILKSKPPSFSTVDKGLSAVHQNQSLANYSQELSLQANTTATKDETEENLVKPSTCDSMLDNDHPSPAD

SEQ ID NO: 79157 - protein, 185 aa, Setaria italica
  Transcript Sequence Number=SeqID_13183
  Gene Ontology: Mol. function=hydrolase activity; Biological process =metabolic process
  Homolog annotation: Hit_ID=B6T7L7; Match level="QueryCoverage=92%, HitCoverage=51%, E-value=1e-77, Identity=80%"; Hit description =Gibberellin receptor GID1L2
  Pfam annotation: Domain name=Abhydrolase_3; Domain location=76-185; Score=8.8; E_value=5.1e-08; Accession=PF07859.5; Description =alphabeta hydrolase fold
MDPSSEIIVDTPFFRLYSDRRIDRLMGTSTVPPGLDASTGVTSKDVVIDGDTGLYVRLYLPDTASRSDDSKKLPVLVYFHGGGFVTQSAASPAYQPFLNSLAARAGLLVVSVNYRLAPEHPLPAGYEDSFRTLKWAVSGNGDPWLSQHADHGRLFLAGDSAGGNIVHNVLMMAASEGEAGTGTAA

SEQ ID NO: 79158 - protein, 88 aa, Setaria italica
  misc_feature (51)..(51): Xaa can be any naturally occurring amino acid
  misc_feature (76)..(76): Xaa can be any naturally occurring amino acid
  Transcript Sequence Number=SeqID_13184
SLVVSVSDDERRAAAVPAVKSDADDRRTNAKRLVVVFESLRACSRAPGIGXGCRTKGLSRKVAGAGCAPGKAELFXCRPIPMGRRCRV

SEQ ID NO: 79159 - protein, 74 aa, Setaria italica
  Transcript Sequence Number=SeqID_13185
ADLFSPPPPRQESEREESAAGKRGGAGLEVAAWGIDKWWRAHAGPPEAPRYAEKAPRRVAGGARVSPRPIQQPR

SEQ ID NO: 79160 - protein, 80 aa, Setaria italica
  Transcript Sequence Number=SeqID_13186
LGALVVSRLVLIAQLLGSRHKFFLKHAGATYLCIKERRKKESRSLTSNPSNSPRRIERLQKQANKKSPSAKSFPEPPLED

SEQ ID NO: 79161 - protein, 55 aa, Setaria italica
  Transcript Sequence Number=SeqID_13187
  Gene Ontology: Mol. function=metal ion binding; Cellular component =nucleus
  Homolog annotation: Hit_ID=B6T3H2; Match level="QueryCoverage=94%, HitCoverage=15%, E-value=1e-13, Identity=75%"; Hit description =Inhibitor of apoptosis-like protein
  Pfam annotation: Domain name=zf-C3HC4; Domain location=8-42; Score =6.2; E_value=0.02; Accession=PF00097.17; Description=Zinc finger, C3HC4 type (RING finger)
APASRWACRACGGGEASVLLLPCRHLCLCKACEPRADACPVCLAAKSGAIHVADG

SEQ ID NO: 79162 - protein, 726 aa, Setaria italica
  misc_feature (12)..(12): Xaa can be any naturally occurring amino acid
  misc_feature (20)..(20): Xaa can be any naturally occurring amino acid
  misc_feature (169)..(169): Xaa can be any naturally occurring amino acid
  Transcript Sequence Number=SeqID_13188
  Gene Ontology: Mol. function=RNA binding
  Homolog annotation: Hit_ID=B6U784; Match level="QueryCoverage=99%, HitCoverage=95%, E-value=0.0, Identity=69%"; Hit description=Nucleic acid binding protein
  Pfam annotation: Domain name=KH_1; Domain location=20-82; Score=56.0; E_value=1.5e-13; Accession=PF00013.21; Description=KH domain
  Pfam annotation: Domain name=KH_1; Domain location=246-312; Score =46.3; E_value=1.2e-10; Accession=PF00013.21; Description=KH domain
  Pfam annotation: Domain name=KH_1; Domain location=401-466; Score =55.9; E_value=1.5e-13; Accession=PF00013.21; Description=KH domain
  Pfam annotation: Domain name=KH_1; Domain location=485-552; Score =54.6; E_value=3.8e-13; Accession=PF00013.21; Description=KH domain
  Pfam annotation: Domain name=KH_1; Domain location=653-715; Score =24.6; E_value=0.0004; Accession=PF00013.21; Description=KH domain
  Pfam module annotation: Pfam domain module=KH_1::KH_1::KH_1::KH_1::KH_ 1; Domain location=20-82::246-312::401-466::485-552::653-715
SNSSSHKSQFKXIEPGVPIXFRILCPASKSGNVIGKEGSIIAKIRQETGVRIRVDKAVLDCDERVIFISAIEKDVEASREQFGKNDGGVAVSARGDHEKDKVNSKEKKDDPEKNLSKGEEDGSEGDYRNEEKDDSEKDNSKEQKGDLEKENSKEDKDDSEKDHSNKEEXNDDSEKDHSKEEKDDDSEKDHSKEEKDDPFVAIDMKSEPERAVPSALKAILFVFDRIFAAEDDNETGDASGASTSVSLRLLVLYSQAGWLLGKGGSVIKQMSVDNGCEIRVSKDNLPPCALSNDRLCQINGEVDSVRKGLNAVAELLLAHPPKESDVVTGIHSSGSSSRSLFSQSDGFPSGMQSNFHFPLQGPSQANGPFDTIDRQPNIGPFPIIHEAPMHNHASVPIEPLTFRLLCSKDKVGSVIGKGGNTVKTIQNDTGCEIKVLDTVPKTDDRIISISGPAHPGDGISPAQNAILHVQRKLMLPASDKEGPAMCRLIVSPNQVGCLLGKGGSIITEMRKLSGAFIVVLSKDKIPMGVPEDDEVIQISGGCDAIQEALMQITARLRNHLFRDRMPALGPNMRPPFGLLDSQFGPYVGNHESSSLFHKDFMGRPLDGISAPWTIKGIRDVGDPMSIPDIPGAEHRELGGFSGPGQSSMMPNLTAEVFVPRLVIPALCGEDGGCLDRIREFSEAKIAVAEPIADAMDTAVLISGTPDQMHAARSLVQAFVISESFAP

SEQ ID NO: 79163 - protein, 250 aa, Setaria italica
  Transcript Sequence Number=SeqID_13189
  Homolog annotation: Hit_ID=B6SV90; Match level="QueryCoverage=99%, HitCoverage=45%, E-value=3e-86, Identity=67%"; Hit description=PAPA -1-like conserved region family protein
MEGRGNPPLSTTEAVMKKPRSVASRKPRSTEQLASEYNGMCAPSRNISQDDDTGVEAGGHRRKELYLNSPEMKGSMTHKNDVSRKIRKEDRSGGDYDGHSRSSKSKDAARRGDGVLALECTTRSGSPDNPRLVPRDGSVHGENSIRKVKLKVGGITRTIHTKTIQEAGGSGIPATSDGSSHRHKHKDSGGHTNRDTHGNRVEGKHGNRHDISPSSDLVRKSKRIPKKKPLDGDSDDEDGELRYLVTLRGL

SEQ ID NO: 79164 - protein, 177 aa, Setaria italica
  misc_feature (162)..(162): Xaa can be any naturally occurring amino acid
  Transcript Sequence Number=SeqID_13190
  Homolog annotation: Hit_ID=B6SV90; Match level="QueryCoverage=69%, HitCoverage=22%, E-value=7e-31, Identity=61%"; Hit description=PAPA -1-like conserved region family protein
MPRGSSSRGARGGRGRSQGRGGGRRKDSGGHTNRDTHGNRVEGKHGNRHDISPSSDLVRKSKRIPKKKPLDGDSDDEDGELRYLEKLRGAKVAPDPMTPGHGAYDDSVDDGLKKKKLPKVSKNKSTPYEVDEDFTMSRFVRDGRKNLQLGDGNESIEEEESXEMDEKSGTKELIHLR

SEQ ID NO: 79165 - protein, 102 aa, Setaria italica
  Transcript Sequence Number=SeqID_13191
RGDPPHLASHCHTRASVSAWLWHAPCVACQGQAPSRAEISRSRLVLGSRAAPRVIRLIILPAAPCLFSPFSPTSCAGAAAVASAGVTRDARPFVFVFVPPNP

SEQ ID NO: 79166 - protein, 124 aa, Setaria italica
  Transcript Sequence Number=SeqID_13192
LHLMAMVCLLQANTLLLPRSYGDGYAPRVSEESRRVTVDVFLKAAGYLDCAIRHVLPQIPPELRRQLPVDLVEGNLKALSLQALGQGGVDMQLGLAIDSPKATLAVKRRLACEMIKYWQHVQES

SEQ ID NO: 79167 - protein, 126 aa, Setaria italica
  Transcript Sequence Number=SeqID_13193
VFFWVSDGTTCRRYTKKTTPFRGEKYANLAVRYAKLHSCSDVDYWSPPANVLKDKSCFVSLTGVRRGLFLRLCARAETAETGSGGSSGGGGPCWVEVEASIRAVARGLTNPGKAAGKGRTKVNRPL

SEQ ID NO: 79168 - protein, 414 aa, Setaria italica
  Transcript Sequence Number=SeqID_13194
  Pfam annotation: Domain name=BRO1; Domain location=26-411; Score= -102.0; E_value=5.7e-05; Accession=PF03097.10; Description=BRO1-like domain
  Subcellular localization annotation: CTP_CleavageSite=40; ConfidenceScore=5.14e-01
MGCGASSQKDAAGGPRRRPGSVGDVVVFLPGLRVPRSVDLAQALGGRLDRSIVERLSALRARVVEMAMQESAVALKPRRRAAARHGSSTANLLQALEEYLPVLLGLVKEGSMLRHAVQFTWTNQEDNAEETAMADAWYEVLSVLHLMAMVCLLQANTLLLPRSYGDGYAPRVSEESRRVTVDVFLKAAGYLDCAIRHVLPQIPPELRRQLPVDLVEGNLKALSLQALGQGVDMQLGLAIDSPKATLAVKRRLACEMIKYWQHVQESIPDLPGSDGWGKKHRLFVKWKYVEAKAAAYYFHGLILDEGNTEKSHGMAIAALQASEEFLKESKRVSEAFHATPPTSRSPTPFGTAKYMFDKIPKDASSKVRINQDLYTQEKVIGTPPPLPDFALALTPEDYDLPPLDPLWNKEDRRH

SEQ ID NO: 79169 - protein, 278 aa, Setaria italica
  Transcript Sequence Number=SeqID_13195
HSPRPRREECPAGKSRLGGASAVYEDPHRLSLRRLRLKDMLNEDADSAELAPSHEKSVGQEGEEGRPRLAIVAVGGCGHWDEPLVSGEIYDPLTDKWVEIAGFPADVGLACSGAVCGRVFYVYCESDTLVAYHLDKGYWAVVQTSRPPPRLRDYAPTLACCASRLFMLCVSWCDRHGPVSRREKVVRKLFELDLTSLQWKEAAAHPDAPMDPNAAFAVGGDRIYAVEMFRIFGKVLDFVTACRVSDTEQRWSRIGRENAATEADTMSCRLKSMAVLHL

SEQ ID NO: 79170 - protein, 276 aa, Setaria italica
  misc_feature (39)..(39): Xaa can be any naturally occurring amino acid
  Transcript Sequence Number=SeqID_13196
  Gene Ontology: Mol. function=catalytic activity; Cellular component =peroxisome; Biological process=metabolic process
  Homolog annotation: Hit_ID=Q7F1X5; Match level="QueryCoverage=95%, HitCoverage=48%, E-value=8e-87, Identity=65%"; Hit description=4 -coumarate--CoA ligase-like 5
  Pfam annotation: Domain name=AMP-binding; Domain location=27-276; Score=-106.3; E_value=0.0064; Accession=PF00501.20; Description=AMP -binding enzyme
  Subcellular localization annotation: CTP_CleavageSite=9; ConfidenceScore=5.07e-01
PPTPSHPPLAATRRPALVDAATGIAVSYPSFLAAVRSLXGGLWSALGVRPGDIALVVAPSRLDVPVLDLALMSVGAAVSPANPASTAEEFAHMVALARPVVAFAAPEVAAKLPRGLRCVVIGSDEYKRLSSAGGASPPPPVAVKQSDTAAVLYSSGTTGRVKAVAVSHRNLIALICTHRANREKVEKEAAEAGEEPPPPTVTLLPLPLFHVFGFMMLLRSVAMGETAILMERFDFGAALRAVERYRVTLLPAAPPVLVAMIKSEEARRRDLSSLLV

SEQ ID NO: 79171 - protein, 68 aa, Setaria italica
  Transcript Sequence Number=SeqID_13197
  Subcellular localization annotation: CTP_CleavageSite=4; ConfidenceScore=5.28e-01
KTISLSSVATSHTAYNYMQTKKDGNTPAATNNTSCSHRLFFPYSYNHTQDFTRQLACELRHCLSEQAC

SEQ ID NO: 79172 - protein, 365 aa, Setaria italica
  misc_feature (153)..(153): Xaa can be any naturally occurring amino acid
  Transcript Sequence Number=SeqID_13198
  Gene Ontology: Mol. function=protein serine/threonine phosphatase activity; Cellular component=protein serine/threonine phosphatase complex; Biological process=protein amino acid dephosphorylation
  Homolog annotation: Hit_ID=Q6ZQ70; Match level="QueryCoverage=90%, HitCoverage=45%, E-value=7e-15, Identity=28%"; Hit description =MKIAA0683 protein (Fragment)
  Pfam annotation: Domain name=Telomere_reg-2; Domain location=158-268; Score=67.8; E_value=4.1e-17; Accession=PF10193.1; Description =Telomere length regulation protein
LQGVSCRLESPIDLVRKMASAVALTFSKVVDPKNPLYLDDNCCENVDWEFGVLSPKEIKAPLHVVESKNKPKSRENKSNAGEKKAKAVKQDVPDVKPKIVEIKSIDHDQISDTVTNEQFEGEECDEESMNIDAHSDSSLEPYDLSDDDTDLQXKFSHLSDIAAALRKPDDPDGVENALSSAEKLVRASPDELRHNSGDLVRALVHVRCSDLAMEGEEDSAEEKRQKALVALLVTCPFESLDVMTKLLYSSSVDISQRILIIDVMTEAAQELAETKIVKTEQRHGNLITDSSPSWLVPSNRGPPGAGPWREVSEPGTPLSWSHRYEREVPSRSGQVKSGKSRKWGLGKAKDLQVEWSKNRFPCMLL

SEQ ID NO: 79173 - protein, 225 aa, Setaria italica
  Transcript Sequence Number=SeqID_13199
  Gene Ontology: Mol. function=protein serine/threonine phosphatase activity; Cellular component=protein serine/threonine phosphatase complex; Biological process=protein amino acid dephosphorylation
  Homolog annotation: Hit_ID=Q08CY4; Match level="QueryCoverage=74%, HitCoverage=19%, E-value=7e-14, Identity=29%"; Hit description =Telomere length regulation protein TEL2 homolog
YPLCALPISCCVSQVPSRSGQVKSGKSRKWGLGKAKDLQVEWSKNRFPLYAAAFMLPVMQGYDKRSHGVDLLNRDFVVLGKLIYMLGVCMKCMAMHPEASALAPALLDMIRSRDVSQHAEAYVRRSVLFAASCILISLHPSYVASSLIEGNQDISTGLEWIRTWALQVAEADPDTECTSMAMTCLRLHSEMALQTSRALESADHSKTGRALPTKLDSIIIPFGNM

SEQ ID NO: 79174 - protein, 89 aa, Setaria italica
  Transcript Sequence Number=SeqID_13200
HKAWIKVGRSLSRLRGLDKQLANLAEQVSSLKKSELIYRTAFTGRCCDLQTAEAEVDLLGDEVELLLGLVSKTYKALNHYSPVLNTIFG

SEQ ID NO: 79175 - protein, 565 aa, Setaria italica
  misc_feature (14)..(14): Xaa can be any naturally occurring amino acid
  Transcript Sequence Number=SeqID_13201
  Homolog annotation: Hit_ID=A6MD06; Match level="QueryCoverage=95%, HitCoverage=89%, E-value=1e-125, Identity=48%"; Hit description=UBX domain-containing protein
  Pfam annotation: Domain name=UBX; Domain location=480-562; Score =97.6; E_value=4.2e-26; Accession=PF00789.12; Description=UBX domain
  Pfam annotation: Domain name=UIM; Domain location=176-193; Score =12.7; E_value=0.88; Accession=PF02809.12; Description=Ubiquitin interaction motif
  Pfam annotation: Domain name=UIM; Domain location=211-228; Score =14.0; E_value=0.59; Accession=PF02809.12; Description=Ubiquitin interaction motif
  Pfam module annotation: Pfam domain module=UBX::UIM::UIM; Domain location=480-562::176-193::211-228
LEEHGNDLNGAVNXYFNEGDRSTTRINQNPVPASVDDMELDEPLDPMFNRPLFPRTLGNPFELLGPGFADITAADIFGRGPQVTHPREVRQVPIEVKDTNTQTGSSGQGPVIEDVTGRESFYGPEVHGTVIVDEDDEDLPSTPSAHDPNIPSSTSRPNHFMPSAPPPVNVSDYNNDIEEEMIRAAIEASKREAEGMTNDLNSGETENTSRGRGDDELARAVSLSLETAERERALRQEGMHVAEPSPDLSDKEDTEGTSGMNERQGLTTGKVGTSEQTVDGENFQEDIEDDDEQPLVRQRSRRVRGRTTDPVEVVQMADSPPLSPQPHNIQNDHQHNGGFPSEEWGGISSEEHDEAVMLEAAMFGGIPEGAPYPFSFPTRGRSTHYPRVARPPSPALTAQRLLREQQDDEYLAALQADREKELKAVEEAELRRAEEAAAREAALERQKKEEEEKLKKQREEEELESELAAKQASLPKEPLQNDEGAVTVVVRMPDGSRRGRRFLKSDKLQYLFDFIDISRTFKPGTYRLVRSYPRRAFTDGESQMSLSDLGLTSKQEALFLEKISG

SEQ ID NO: 79176 - protein, 91 aa, Setaria italica
  Transcript Sequence Number=SeqID_13202
RRLAVGARRTARRGARRGPWRMAPRREAKEAMAGAEYVIRCTDRDKGSGYNAYIEGPNGRARYSVSDQHGYMGRSGRKRPTSTWPVPIRFF

SEQ ID NO: 79177 - protein, 82 aa, Setaria italica
  Transcript Sequence Number=SeqID_13203
  Subcellular localization annotation: CTP_CleavageSite=46; ConfidenceScore=5.45e-01
NQSSMLKCPHSAPPKPPRARFARLSAATDAAEKAAVKPKPRVQRICAMRASPTRTKTAKVEAPSARKKALTMPRSKAVRPTQ

SEQ ID NO: 79178 - protein, 77 aa, Setaria italica
  Transcript Sequence Number=SeqID_13204
TASRDDPKTQGPHFLRKTDYGYKHNKTKCIPKGFMKCIMKLYHKKEQQISILTFFESCKIEQCRARGMPTSLAFTNR

SEQ ID NO: 79179 - protein, 81 aa, Setaria italica
  Transcript Sequence Number=SeqID_13205
  Gene Ontology: Mol. function=electron carrier activity; Biological process=response to oxidative stress
  Homolog annotation: Hit_ID=B6UBA1; Match level="QueryCoverage=55%, HitCoverage=12%, E-value=1e-12, Identity=73%"; Hit description =Peroxidase 1
MTTKVSAALLCAAALLLVVAPLAAEASELKLGYYKKTCPGWKNVVKYHVAKAIRANRGSGAALVRLIFHDCFVRVRAAPPS

SEQ ID NO: 79180 - protein, 132 aa, Setaria italica
  Transcript Sequence Number=SeqID_13206
  Gene Ontology: Mol. function=electron carrier activity; Biological process=response to oxidative stress
  Homolog annotation: Hit_ID=B6UBA1; Match level="QueryCoverage=97%, HitCoverage=37%, E-value=2e-48, Identity=70%"; Hit description =Peroxidase 1
  Pfam annotation: Domain name=peroxidase; Domain location=1-132; Score= 65.8; E_value=1.6e-16; Accession=PF00141.15; Description=Peroxidase
LAVQGCDASVLLDPTPANPHTEKTAPINIGLAAFEVIDDIKAALEERCPGTVSCSDIVVFAARDASSILSNGHVHFDPPAGRLDGPISRAADAQRDLPDSTFTIGELIRNFRRKNFTVEELVILSGAHAIGV

SEQ ID NO: 79181 - protein, 344 aa, Setaria italica
  Transcript Sequence Number=SeqID_13207
  Gene Ontology: Mol. function=electron carrier activity; Biological process=response to oxidative stress
  Homolog annotation: Hit_ID=B6UBA1; Match level="QueryCoverage=90%, HitCoverage=89%, E-value=1e-127, Identity=69%"; Hit description =Peroxidase 1
  Pfam annotation: Domain name=peroxidase; Domain location=45-306; Score=294.3; E_value=2.7e-85; Accession=PF00141.15; Description =Peroxidase
MTTKVSAALLCAAALLLVVAPLAAEASELKLGYYKKTCPGWKNVVKYHVAKAIRANRGSGAALVRLIFHDCFVRGCDASVLLDPTPANPHTEKTAPINIGLAAFEVIDDIKAALEERCPGTVSCSDIVVFAARDASSILSNGHVHFDPPRGGLDGPISRAADAQRDLPDSTFTIGELIRNFRRKNFTVEELVILSGAHAIGVGHCSSFRGRLSSPPSQIVPAYRNLLSAKCAAGPDPVVTNNVRDEDPSAVAAAFPSFLKKLRKNKDFLDNSYYHNNLARIVTFNSDWQLLTEKEALGHVKEYAENGTLWDEDFSDALVKLSKLPMPPHSKGEIRKHCRFLNHH

SEQ ID NO: 79182 - protein, 192 aa, Setaria italica
  misc_feature (175)..(175): Xaa can be any naturally occurring amino acid
  Transcript Sequence Number=SeqID_13208
LELALMVEKLQELRSIRVQKMKKQGHFLPEEDDKYLERVKAAVEEEERQAATAARTDAVKDAILTAEESRKAPQNENHHEDGSEQFRSGPTEDKNQGDVGISEKNDQASQKTEHVGHKVEGKGHVHHDPVSNLPFEFYHYYHGSSYDMGTLIEVRRMWDSFIRPGGSRIPGHWVXPPPPSDEVWASLVRLTK

SEQ ID NO: 79183 - protein, 46 aa, Setaria italica
  Transcript Sequence Number=SeqID_13209
TPCSSRRCNHAIMDRIRLRTQVTIYRTRSRLSQPPGLIETKSRGRC

SEQ ID NO: 79184 - protein, 378 aa, Setaria italica
  Transcript Sequence Number=SeqID_13210
  Gene Ontology: Mol. function=catalytic activity; Biological process =metabolic process
  Homolog annotation: Hit_ID=A7LH71; Match level="QueryCoverage=84%, HitCoverage=47%, E-value=1e-171, Identity=89%"; Hit description =Neutral invertase
  Pfam annotation: Domain name=Invertase_neut; Domain location=36-378; Score=711.2; E_value=8.1e-211; Accession=PF04853.4; Description =Plant neutral invertase
GVLIERGGELLDRVLLALGERLGLLARGEAGDVGGGRRRGGSGGGEEAWWLLGRAVVNYCGSAVGTVAANDPSTSQMLNYDQVFIRDFVPSAIAFLLKGESDIVKNFLLHTLQLQSWEKTVDCYSPGQGLMPASFKVRSVPLDGNSEAFEEILDPDFGESAIGRVAPVDSGLWWIILLRAYGKITGDYALQERVDVQTGIRLILNLCLSDGFDMFPTLLVTDGSCMIDRRMGIHGHPLEIQALFYSALRCAREMISVNDGSKNLIRAINNRLSALSFHIREYYWVDMKKINEIYRYKTEEYSHDAINKFNIYPEQIPSWLADWIPVKGGYLIGNLQPAHMDFRFFSLGNLWSIVSSLATQRQAEGILNLIEAKMGIEQ

SEQ ID NO: 79185 - protein, 93 aa, Setaria italica
  Transcript Sequence Number=SeqID_13211
  Homolog annotation: Hit_ID=B6TCB4; Match level="QueryCoverage=70%, HitCoverage=25%, E-value=3e-18, Identity=72%"; Hit description=CUE domain containing protein
  Pfam annotation: Domain name=CUE; Domain location=28-70; Score=22.3; E_value=0.002; Accession=PF02845.8; Description=CUE domain
ELVGEDGGGPLATDYRRHGAAALPRRGRREALLLQLIPLFPDMDPQLLEKALEASGDDLDSAIKSLNELRLESAGFKSENGQPTVIQPSVEGI

SEQ ID NO: 79186 - protein, 270 aa, Setaria italica
  Transcript Sequence Number=SeqID_13212
  Gene Ontology: Mol. function=electron carrier activity
  Homolog annotation: Hit_ID=B6TCB4; Match level="QueryCoverage=99%, HitCoverage=98%, E-value=1e-96, Identity=67%"; Hit description=CUE domain containing protein
  Pfam annotation: Domain name=CUE; Domain location=46-88; Score=22.3; E_value=0.002; Accession=PF02845.8; Description=CUE domain
SVARRSSSIFADELLPPSPPSPHSSHHHLHHPAAKRSRRSPPHRGRREALLLQLIPLFPDMDPQLLEKALEASGDDLDSAIKSLNELRLESAGFKSENGQPTVIQPSVEGIPNGAVDTATEHPPAVDNYQTSNNGSEWVELFVREMTNASDIDDARARASRALEALEKSIVERAGAEASQNLHKENMMLKEQLTVVLRENAVLKRAVAIQHERQKEFDERSHEVQSLKQLVLQYQEQVRTLEINNYALTMHLKQAQQNNTMPGRFNPDVF

SEQ ID NO: 79187 - protein, 89 aa, Setaria italica
  Transcript Sequence Number=SeqID_13213
MAAAVSMKLSLAFVLLLSGLVVFGEQVAAARKSRVDCSLVRCIQGGYITCDNYPYQKLEGCICDCAPRDGKNCKLHLQSGSTQDCGKEE

SEQ ID NO: 79188 - protein, 418 aa, Setaria italica
  Transcript Sequence Number=SeqID_13214
  Gene Ontology: Mol. function=transferase activity; Cellular component= cytoplasm; Biological process=glycolysis
  Homolog annotation: Hit_ID=Q1WM16; Match level="QueryCoverage=99%, HitCoverage=89%, E-value=0.0, Identity=84%"; Hit description =Hexokinase-7
  Pfam annotation: Domain name=Hexokinase_1; Domain location=1-168; Score=149.9; E_value=7.9e-42; Accession=PF00349.13; Description =Hexokinase
  Pfam annotation: Domain name=Hexokinase_2; Domain location=170-415; Score=281.9; E_value=1.4e-81; Accession=PF03727.8; Description =Hexokinase
  Pfam module annotation: Pfam domain module=Hexokinase_1::Hexokinase _2; Domain location=1-168::170-415
GGSKIKMIISYVDNLPTGNEEGFFYSLDLGGTNFRVLRVQLAGKEKRVAKRESKEVSIPPHLMSGNASELFGFIASALAKVIVDEGRNDVFEDKHRELGFTFSFPVRQTSIASGTLIKWTKAFSIDDAVGEDVVAELRTAMEKHGVDMRVAALINDTVGTLAAGRYNDEDVVIGVILGTGSNAAYVEEASAIPKFEGELPKSGNMVINTEWGNFYSSCLPITEYDQALDEESLNPGEQIFEKLISGMYLGEIVRRVLLKIASQSTLFGKVNHTKLKTRFILRTPDISAMHHDETPDLRIVAEKLADNFKIKDTSLETRKMVVEICDVVTSRSARLAAAGIVGILRKIGRAVPGDERRSVVAIDGGLFEHYTEFRQCLESTLVELLGEEASRSVAVKLTKDGSGLGAALIAAAHSQYQH

SEQ ID NO: 79189 - protein, 148 aa, Setaria italica
  misc_feature (4)..(4): Xaa can be any naturally occurring amino acid
  Transcript Sequence Number=SeqID_13215
  Subcellular localization annotation: CTP_CleavageSite=45; ConfidenceScore=5.31e-01
EREXPSSLAKHSQLSSGSSILQIPSFFPSLGTEPRGSLRSMMNVVASHPQNLQLPLQDASLSLSLRGRLFINSKGSNKVQCLPASSPCSSSGGRCSSSIHHPHTRRFAVIRAAGDGRGGESSSGGQDDDDEEGGGDNEVPQSSSSSSS

SEQ ID NO: 79190 - protein, 154 aa, Setaria italica
  Transcript Sequence Number=SeqID_13216
  Gene Ontology: Mol. function=ATP-dependent helicase activity; Cellular component=intracellular; Biological process=RNA processing
  Homolog annotation: Hit_ID=Q10HL3; Match level="QueryCoverage=95%, HitCoverage=9%, E-value=7e-46, Identity=64%"; Hit description =Endoribonuclease Dicer homolog 2a
ITLVTLSQHLEFLKGKLHDSSLENAEKRIKQLSATFLYCIDNLGVWLAAKAAEVLQSRKESCLSFWGEKLDEKVEEFVRNYMEDAYSDLSEIISKMTKRGIQRHIGEDFAADLQDGLLTPKVHFLIKSLLEYRHKQDLRCIVFVERVVTSIVLE

SEQ ID NO: 79191 - protein, 279 aa, Setaria italica
  misc_feature (174)..(174): Xaa can be any naturally occurring amino acid
  Transcript Sequence Number=SeqID_13217
  Gene Ontology: Mol. function=ATP-dependent helicase activity; Cellular component=intracellular; Biological process=RNA processing
  Homolog annotation: Hit_ID=Q69LX2; Match level="QueryCoverage=93%, HitCoverage=20%, E-value=2e-93, Identity=61%"; Hit description =Endoribonuclease Dicer homolog 2b
  Pfam annotation: Domain name=Helicase_C; Domain location=220-278; Score=6.8; E_value=0.012; Accession=PF00271.23; Description=Helicase conserved C-terminal domain
ILLFIICAFSLINKLCCEIFSLALQRSDYSVKISELENLMNAKVYTVESESALSQYIPFATTKVVQYDDSIISSELYCHAIGCLNRLERKHLEFLKGKLHDSSLENAEKRIKQLSATFLYCIDNLGVWLAAKAAEVLQSRKESCLSFWGEKLDEKVEEFVRNYMEDAYSDLSEXYIKDDEEGHTTHKQDLRCIVFVERVVTSIVLESFLSTIHQMSGWIIRYMAGKNCGLQHQSRKEHTEIVDSFRRGKVHLIVATQILEEGLDVPTCNLIIRFDPSAT

SEQ ID NO: 79192 - protein, 64 aa, Setaria italica
  Transcript Sequence Number=SeqID_13218
  Gene Ontology: Mol. function=catalytic activity; Cellular component =plasma membrane; Biological process=protein amino acid dephosphorylation
  Homolog annotation: Hit_ID=B4F7V3; Match level="QueryCoverage=92%, HitCoverage=20%, E-value=1e-25, Identity=91%"; Hit description =Protein phosphatase 2C isoform epsilon
VSNLPGDVPRVDGQLAVARAFGDRSLKKHLSSDPYVIEETINENSDFLILASDGLWKVMDMDLV

SEQ ID NO: 79193 - protein, 171 aa, Setaria italica
  misc_feature (77)..(77): Xaa can be any naturally occurring amino acid
  Transcript Sequence Number=SeqID_13219
  Gene Ontology: Mol. function=nucleic acid binding
  Homolog annotation: Hit_ID=B4FLJ6; Match level="QueryCoverage=92%, HitCoverage=42%, E-value=4e-63, Identity=74%"; Hit description=DNA binding protein
  Pfam annotation: Domain name=Myb_DNA-binding; Domain location=84-131; Score=43.9; E_value=6.3e-10; Accession=PF00249.23; Description=Myb -like DNA-binding domain
  Pfam annotation: Domain name=zf-CCHC; Domain location=13-30; Score =10.7; E_value=0.011; Accession=PF00098.15; Description=Zinc knuckle
  Pfam module annotation: Pfam domain module=Myb_DNA-binding::zf-CCHC; Domain location=84-131::13-30
SAAGVGGGGDGPRRCSQCGHHGHNARTCTARPVKLFGVRIGDKPMRKSASMGNLAQLAAEGSGGGGREEGYGSDGEXRPHKKRGEAWTEEEHKKFLLGLNKLGKGDWRGISRNYVISRTPTQVASHAQKYFNRQTNVHRRKRRSSLFDMVIDDSSDQMPLSRSSSQEVEQH

SEQ ID NO: 79194 - protein, 207 aa, Setaria italica
  misc_feature (131)..(131): Xaa can be any naturally occurring amino acid
  Transcript Sequence Number=SeqID_13220
  Gene Ontology: Mol. function=nucleic acid binding
  Homolog annotation: Hit_ID=B4FLJ6; Match level="QueryCoverage=90%, HitCoverage=50%, E-value=3e-28, Identity=47%"; Hit description=DNA binding protein
LYLFFLCVSCQSSDQMPLSRSSSQEVEQHLDDPQPVGAIPAPVVSPAAVAPPPVSVEAPASLPPPVQVPIPVTAPVVTPQLMEQDSVPSSSSAGETGVVMPEAMPPYLYPMMIPPPYYHPAFVPVPCYGYXPFYYGPPGAAQAPHQVVKPVAVHSTPPLNVKDLYNMSELSLKGDDSNANSGVPASPLPPKPIGRPERQFLSFPIGS

SEQ ID NO: 79195 - protein, 283 aa, Setaria italica
  Transcript Sequence Number=SeqID_13221
  Gene Ontology: Mol. function=nucleic acid binding
  Homolog annotation: Hit_ID=B4FLJ6; Match level="QueryCoverage=92%, HitCoverage=71%, E-value=7e-68, Identity=57%"; Hit description=DNA binding protein
LFFFVCLFFFCFLVSFYLVLNKLGKGDWRGISRNYVISRTPTQVASHAQKYFNRQTNVHRRKRRSSLFDMVIDDSSDQMPLSRSSSQEVEQHLDDPQPVGAIPAPVVSPAAVAPPPVSVEAPASLPPPVQVPIPVTAPVVTPQLMEQDSVPSSSSAGETGVVMPEAMPPYLYPMMIPPPYYHPAFVPVPCYGYVPFYYGPPGAAQAPHQVVKPVAVHSTPPLNVKDLYNMSELSLKGDDSNANSGVPASPLPPKPIGRPERQSAFHGKGPSGGSSGGLIPAVK

SEQ ID NO: 79196 - protein, 64 aa, Setaria italica
  Transcript Sequence Number=SeqID_13222
RRRMATDGEEKRAALLRQITEEGGFAFVASAEKAAAGDVRAAEAAREMAWEQLHSAPRDEVGAA

SEQ ID NO: 79197 - protein, 207 aa, Setaria italica
  misc_feature (39)..(39): Xaa can be any naturally occurring amino acid
  Transcript Sequence Number=SeqID_13223
  Gene Ontology: Mol. function=DNA topoisomerase type I activity; Cellular component=chromosome; Biological process=DNA unwinding during replication
  Homolog annotation: Hit_ID=B9EZZ0; Match level="QueryCoverage=74%, HitCoverage=15%, E-value=3e-49, Identity=65%"; Hit description=DNA topoisomerase
  Pfam annotation: Domain name=Toprim; Domain location=125-207; Score =11.7; E_value=0.0034; Accession=PF01751.14; Description=Toprim domain
VTDAKTDTAKRKSSRGSKKEVHGDMKEKKVPTKKKEDTXRTRKAATKMTESISVNQEDKKADNSKSKKGADSSKEKKVNNRSKSKSKVSAAFTVSSEAESYMKTSNDGSRSEAKPLVPLYPPTAKSVVVVESATKAKVIQNYLGDMYEVVPSYGHVRDLAGRSKSVRPDDDFSMVWEVPAAAWTHLKSIKVALKGAENLILASDPDR

SEQ ID NO: 79198 - protein, 36 aa, Setaria italica
  Transcript Sequence Number=SeqID_13224
PIRFKPVCVTPSFFSRILLCMNTQYFVQYKVLQSIE

SEQ ID NO: 79199 - protein, 86 aa, Setaria italica
  Transcript Sequence Number=SeqID_13225
CVPLASNRNLFKPRKWIEFTNSNAGSSYSPAGQFSPVACLREDPVSKQEKAVKDHDDSPVTGFSISNILNKENPDNFTQAKRGGLK

SEQ ID NO: 79200 - protein, 139 aa, Setaria italica
  Transcript Sequence Number=SeqID_13226
SFGTSGYISRYFWTRSYLLNCNCKLFHRKAGLPYQFLSLSGHQEVMQNSQGHTGKQMDASDANLVGCNQSDQEEHLDFTSLSSFKRIAECHLGFVPLASNRNLFKPRKWIEFTNSNAGSSYSPAGLTLEFMYSSWYLVC

SEQ ID NO: 79201 - protein, 91 aa, Setaria italica
  Transcript Sequence Number=SeqID_13227
APPVTSADISGPEVICSTATANCSIEKVTSVPVMPDSVSEGQDKTKYLSNSTGRVAGLPYQFLSLSGHQEVMQNSQGHTGQPQFVQTKEMD

SEQ ID NO: 79202 - protein, 60 aa, Setaria italica
  Transcript Sequence Number=SeqID_13228
EWLHILSFLQLCKQYCYFLAINGANDVSTKISSESYNLFASVFIGVTWKLRPPSSAFTGS

SEQ ID NO: 79203 - protein, 72 aa, Setaria italica
  Transcript Sequence Number=SeqID_13229
AELLFYFLLVTSMFQTKQLGDNMYTQQVLARKLTDNKRNIHKSKHSFPWPVVLTVGKGQHTTKHEIKQHRSR

SEQ ID NO: 79204 - protein, 210 aa, Setaria italica
  Transcript Sequence Number=SeqID_13230
  Gene Ontology: Mol. function=Rab GTPase activator activity; Cellular component=intracellular; Biological process=regulation of Rab GTPase activity
  Homolog annotation: Hit_ID=UPI00017395C6; Match level="QueryCoverage =98%, HitCoverage=30%, E-value=2e-96, Identity=76%"; Hit description =RAB GTPase activator
  Pfam annotation: Domain name=TBC; Domain location=9-209; Score=-14.8; E_value=1.7e-06; Accession=PF00566.10; Description=TBC domain
ISIPFLSTSDRAEYEAIKSQWKSITATQAKRFTKFRERKGLIDKDVVRTDRSVPYYEGDDNRNVVVLRDILLTYSFYNFDLGYCQGMSDFLAPILYVMEDESESFWCFASLMERLGANFNRDQNGMHAQLLALSKLVELLDPPLHNYFRQNDCLNYFFCFRWVLIQFKREFSFDQIMLLWEVLWTHYLSEHFHLYLCVAILKRYRQRIIG

SEQ ID NO: 79205 - protein, 118 aa, Setaria italica
  Transcript Sequence Number=SeqID_13231
  Gene Ontology: Mol. function=Rab GTPase activator activity; Cellular component=intracellular; Biological process=regulation of Rab GTPase activity
  Homolog annotation: Hit_ID=UPI00017395C6; Match level="QueryCoverage =57%, HitCoverage=10%, E-value=3e-20, Identity=64%"; Hit description =RAB GTPase activator
FQNNSGAHAYGRQQHEYLLDNEASDKQKNQYITPEKASMPSAPPEPDPLPLVWGKQRDRPLSDEEWAAFLDPEGRVMDSKALRKKVFYGGVDHVLREKVWKFLLGYHEYDSTYAEREY

SEQ ID NO: 79206 - protein, 68 aa, Setaria italica
  Transcript Sequence Number=SeqID_13232
ESCNFGRLFVIGIYCIHFCRNNAFTFFGHTLHFIYTSICMIILDTICRVSQPPKLKDSPSLGKKALLT

SEQ ID NO: 79207 - protein, 139 aa, Setaria italica
  misc_feature (81)..(81): Xaa can be any naturally occurring amino acid
  misc_feature (122)..(122): Xaa can be any naturally occurring amino acid
  Transcript Sequence Number=SeqID_13233
  Gene Ontology: Mol. function=Rab GTPase activator activity; Cellular component=intracellular; Biological process=regulation of Rab GTPase activity
  Homolog annotation: Hit_ID=UPI00017395C6; Match level="QueryCoverage =72%, HitCoverage=14%, E-value=4e-26, Identity=56%"; Hit description =RAB GTPase activator
FCLLTFDAVESFNCLAFHDCKLHIHLFRVKLASQLFLQPDPLPLVWGKQRDRPLSDEEWAAFLDPEGRVMDSKALRKKVFXGGVDHVLREKVWKFLLGYHEYDSTYAEREYHAAMKRAEYEXIKSQWKSITRPPKTKSP

SEQ ID NO: 79208 - protein, 353 aa, Setaria italica
  Transcript Sequence Number=SeqID_13234
  Gene Ontology: Mol. function=Rab GTPase activator activity; Cellular component=intracellular; Biological process=regulation of Rab GTPase activity
  Homolog annotation: Hit_ID=UPI00017395C6; Match level="QueryCoverage =98%, HitCoverage=51%, E-value=1e-157, Identity=73%"; Hit description= RAB GTPase activator
  Pfam annotation: Domain name=TBC; Domain location=50-287; Score=12.9; E_value=1.7e-08; Accession=PF00566.10; Description=TBC domain
RPYKTPPEPDPLPLVWGKQRDRPLSDEEWAAFLDPEGRVMDSKALRKKVFYGGVDHVLREKVWKFLLGYHEYDSTYAEREYHAAMKRAEYEAIKSQWKSITATQAKRFTKFRERKGLIDKDVVRTDRSVPYYEGDDNRNVVVLRDILLTYSFYNFDLGYCQGMSDFLAPILYVMEDESESFWCFASLMERLGANFNRDQNGMHAQLLALSKLVELLDPPLHNYFRQNDCLNYFFCFRWVLIQFKREFSFDQIMLLWEVLWTHYLSEHFHLYLCVAILKRYRQRIIGEQMDFDTLLKFINELSGQINLDRALQDAEALCTIAGENGASCIPPGTPPSMPIETDGGLYVQQDDVL

SEQ ID NO: 79209 - protein, 66 aa, Setaria italica
  Transcript Sequence Number=SeqID_13235
STGKKGTDGSGRKASAAAGYDKVEKTESMRVEIRSRQARKLIAKNLDAADSIGRAGRANKRFFLAF

SEQ ID NO: 79210 - protein, 100 aa, Setaria italica
  Transcript Sequence Number=SeqID_13236
  Gene Ontology: Biological process=cell wall catabolic process
  Homolog annotation: Hit_ID=B6TKT2; Match level="QueryCoverage=100%, HitCoverage=27%, E-value=3e-36, Identity=78%"; Hit description=LysM domain containing protein
  Subcellular localization annotation: CTP_CleavageSite=62; ConfidenceScore=5.63e-01
ASAGKGLALRPKSSNRSDMNKSQQNLFAMAEPLFSNGVQTVRKSSSTPEFQEPESNTSSSIWSASKWSINTDAFALPLPIPRFDNIPKPIAAWRNKAARD

SEQ ID NO: 79211 - protein, 53 aa, Setaria italica
  Transcript Sequence Number=SeqID_13237
LHLVILNILVLNIIIRPNGCTVYTKSVPMQRSHYYWNSQGEDIAIGEWNQVCR

SEQ ID NO: 79212 - protein, 115 aa, Setaria italica
  Transcript Sequence Number=SeqID_13238
SMPFAARSSLVCCSPCLLSSAYLVPFTDGNVFPLTVPIVVRSLHWDRFGIHSAAIRPHWSLEPRPVLKAPGRTHGDGEGGRGDVMMIFRTKMFRITKCNQPTTIDVRDITQGNKL

SEQ ID NO: 79213 - protein, 248 aa, Setaria italica
  misc_feature (162)..(162): Xaa can be any naturally occurring amino acid
  Transcript Sequence Number=SeqID_13239
  Gene Ontology: Cellular component=chloroplast
  Homolog annotation: Hit_ID=B9T6B9; Match level="QueryCoverage=29%, HitCoverage=8%, E-value=4e-16, Identity=52%"; Hit description =Pentatricopeptide repeat-containing protein, putative
  Subcellular localization annotation: CTP_CleavageSite=52; ConfidenceScore=5.39e-01
TRGDGGNGQLSSHLKVKDTSSSMSEHQSVRNRQNQSVGSLSLEGQVPYTPPRTSALPNNSISSKNAKFQMGKGDFTSTSSSRDFKYPRQSTFFNSEVNANSKVQRHQQRVESSGRNFVECRLGEIDIDSKKSTPQHDSHSSDSLKSDKPRKIQMQRGANVNXGKYVRRDTEATYFDDRAAFKSFEVFTDVRDRPRILRMEMEERIQKLASQLNATDVNTPEWKFSKMIHDAQIKFSDHSILRIVQMLG

SEQ ID NO: 79214 - protein, 237 aa, Setaria italica
  Transcript Sequence Number=SeqID_13240
  Gene Ontology: Cellular component=integral to membrane
  Homolog annotation: Hit_ID=B4FII4; Match level="QueryCoverage=100%, HitCoverage=100%, E-value=1e-101, Identity=78%"; Hit description =Cytochrome b561
  Pfam annotation: Domain name=Cytochrom_B561; Domain location=14-231; Score=244.1; E_value=3.4e-70; Accession=PF03188.8; Description =Eukaryotic cytochrome b561
MARAGLGVKATPFTYAAHALAAVAAVLVLVWCVHFRGGLALEAPNKNLIFNVHPVLMLIGYIILGSEAIMIYKVFPNLNHDTAKLTHLILHAIATVLGAFGIYCAFKFHNDSGIANLYSLHSWLGIGTISLYGIQWVFGFVTFFFPGAAPSLRRSALPWHALFGLFVYVLAVMTAELGFLEKLTFLESGGLDKYGAEAFLVNFTALVVVLFGASVVVAAVAPAHVEEPQGYAPIPVN

SEQ ID NO: 79215 - protein, 73 aa, Setaria italica
  Transcript Sequence Number=SeqID_13241
MGAEMERSILSLCASLSSVLDHADSSSRELADVVSRRPIHLESTTTAFLQKLDRLTEAANEDLAHLDSMTLVL

SEQ ID NO: 79216 - protein, 331 aa, Setaria italica
  misc_feature (7)..(7): Xaa can be any naturally occurring amino acid
  Transcript Sequence Number=SeqID_13242
  Gene Ontology: Mol. function=histone-lysine N-methyltransferase activity; Cellular component=nucleus; Biological process=chromatin modification
  Homolog annotation: Hit_ID=B9S7M5; Match level="QueryCoverage=93%, HitCoverage=49%, E-value=1e-125, Identity=67%"; Hit description=Set domain protein, putative
  Pfam annotation: Domain name=Pre-SET; Domain location=2-151; Score =25.1; E_value=2.6e-06; Accession=PF05033.8; Description=Pre-SET motif
  Pfam annotation: Domain name=SET; Domain location=153-300; Score =130.8; E_value=4.4e-36; Accession=PF00856.20; Description=SET domain
  Pfam module annotation: Pfam domain module=Pre-SET::SET; Domain location=2-151::153-300
TDISKGXERVRISVVNEFGSETCPPSFYYIPRNLVFQSAYVNISIARIGDEDCCADCSGNCLSAPLPCACARATGGDFVYTPEGLVKTAFLDECTSVNHFPENHHRFYCKVCPLKRSKNAASPGPCKGHLVRKFIKECWSKCGCGMQCGNRVIQRGITCRLQVFFTHEGKGWGLRTLEDLPKGAFVCEYAGEVLTSTELYERAIENARNGRHMHQVLLDADWGSEGVLRDEEALGLDGTFYGNVGRFINHRCYDANLVQIPVEVETPDHHYYHLAFFTTKKVEAFEELTWDYGIDFDDVDGPSKAFRCMCGSRCCRDPRSSRRMGRAAGRI

SEQ ID NO: 79217 - protein, 216 aa, Setaria italica
  misc_feature (17)..(17): Xaa can be any naturally occurring amino acid
  misc_feature (126)..(126): Xaa can be any naturally occurring amino acid
  Transcript Sequence Number=SeqID_13243
  Gene Ontology: Mol. function=oxidoreductase activity, acting on CH-OH group of donors; Biological process=metabolic process
  Homolog annotation: Hit_ID=Q8W5N7; Match level="QueryCoverage=98%, HitCoverage=27%, E-value=3e-88, Identity=78%"; Hit description =Putative alcohol oxidase
GRTDGCKAERFVLESNXGKNGCRSKRCVGLVAKCMGDGITRKLRIEAKVSISACGALMTPPLLRRSGLKNRHIGRNLHLHPVSMAWGYFPDGTPEPRPLTGKCYEGGIITTLHRVTARTIVQTPAXGPGSMASLIPWESGRDMKERMLRYARTAHAFALVRDRGAGTVGREGRVRYVPSSEDVEELRNGLRRALRILVAAGAAEVGTHRSDGLRLR

SEQ ID NO: 79218 - protein, 143 aa, Setaria italica
  misc_feature (2)..(2): Xaa can be any naturally occurring amino acid
  Transcript Sequence Number=SeqID_13244
LXVLDQMDLADAQERKRLRDENAKKAGSKAAPKKQRKKPAAKQPKVESDTEGDAAEPVVAKRGAQRKKPAKENGAGSDDEDYVAEKAKAEQQKKKQSKKASAPPVDEDEDDLPTLKERLAAFNLNDSSPDNSGSAQVQFLNLS

SEQ ID NO: 79219 - protein, 709 aa, Setaria italica
  misc_feature (450)..(450): Xaa can be any naturally occurring amino acid
  misc_feature (460)..(460): Xaa can be any naturally occurring amino acid
  Transcript Sequence Number=SeqID_13245
  Gene Ontology: Mol. function=DNA topoisomerase (ATP-hydrolyzing) activity; Cellular component=chromosome; Biological process=DNA topological change
  Homolog annotation: Hit_ID=A3AAF2; Match level="QueryCoverage=90%, HitCoverage=44%, E-value=1e-158, Identity=49%"; Hit description=DNA topoisomerase 2
  Pfam annotation: Domain name=DNA_topoisoIV; Domain location=1-384; Score=80.2; E_value=4.9e-23; Accession=PF00521.12; Description=DNA gyrasetopoisomerase IV, subunit A
ASPRYIFTKLSHITRSIFPKDDDTLLNYLNEDGQLIEPSWYVPILPMVLVNGSEGIGTGWSTFIPNYNPRDIAANIRRLLNDEATVPMHPWYRGFKGSIQKANNARVDGATYTITGIIEAVDSTTLRITELPVRRWTQDYKDFIDSLRPDEKNKDKEAFIEDCTAQGDNDDVYFELKLSEKNMNIAKEEGLLKKFKLTTTIGTTNMHLFDSDGKIRKYDTPEQILEEFFKLRLQFYFKRKEVLLQNMKLDLKKLENKARFIRCVVNNEIVVNNRKRADLFLELRQKNFDPFPKKKKRAEPAAVGATEEEENEESPEAANGVDPSDYEYLLSMAIGTLTLEKIQELNAEKEKVVNEVEELEKTTEKSLWLRDLDAFEKDLDVLDQMDLADAQERKRLRDENAKKAGSKAAPKKQRKKPAAKQPKVESDTEGDAAEPVVAKRGSQQRKKPRXKGKLGRLGYXNDDEDYVAEKAKAEQQKKKQSKKASAPPVDEDEDDLPTLKERLAAFNLNDSSPDNSAMETETTEEQIGGKGKKGVSKRGGGKKASSSLAVIHDDEDEDVDVSLEVPEEVQGPKKGRGRKPAAPVKPKATATRKRAPAQGKAMMLKPTEDSNTSAPSPEKKVRKMRESPFNKKSGSILQRGSIAASTSSESTAEASPPSGSSAEPIAAPQPRRTARATTKKTPVYDLESEDEVVEVTDDSDFDVDGDSDE

SEQ ID NO: 79220 - protein, 77 aa, Setaria italica
  Transcript Sequence Number=SeqID_13246
  Subcellular localization annotation: CTP_CleavageSite=32; ConfidenceScore=5.45e-01
MALQLQLPRPPPLRLAAFRLSVRLPSRVAPARAASASAIALRARAGGVAFSLQTNVHLLKPNRRVRRSRDPYYGLDE

SEQ ID NO: 79221 - protein, 91 aa, Setaria italica
  misc_feature (58)..(58): Xaa can be any naturally occurring amino acid
  Transcript Sequence Number=SeqID_13247
  Subcellular localization annotation: CTP_CleavageSite=63; ConfidenceScore=5.66e-01
NGPRPLQAARPWSQRQNHAKISPKSPPPQPWRPPSVSAAAPRPRAPPPPPPSPSPPPXSPSPSPSRRRPPPPPPPSVPLPSPHPPPPPPLP

SEQ ID NO: 79222 - protein, 425 aa, Setaria italica
  Transcript Sequence Number=SeqID_13248
  Gene Ontology: Mol. function=protein serine/threonine kinase activity; Cellular component=plasma membrane; Biological process =protein amino acid phosphorylation
  Homolog annotation: Hit_ID=Q6ZLP5; Match level="QueryCoverage=100%, HitCoverage=94%, E-value=0.0, Identity=94%"; Hit description=CBL -interacting protein kinase 23
  Pfam annotation: Domain name=NAF; Domain location=284-345; Score =115.4; E_value=1.9e-31; Accession=PF03822.6; Description=NAF domain
  Pfam annotation: Domain name=Pkinase; Domain location=1-244; Score =292.6; E_value=8.7e-85; Accession=PF00069.17; Description=Protein kinase domain
  Pfam annotation: Domain name=Pkinase_Tyr; Domain location=1-242; Score=-3.1; E_value=1.6e-13; Accession=PF07714.9; Description =Protein tyrosine kinase
  Pfam module annotation: Pfam domain module=NAF::Pkinase::Pkinase_Tyr; Domain location=284-345::1-244::1-242
AKVKFARNVETGENVAIKILDKEKVLRHKMIAQIKREISTMKLIRHPNVIRMYEVMASKTKIYIVMELVTGGELFDKIATRGRLKEDDARKYFQQLINAVDYCHSRGVYHRDLKPENLLLDATGALKVSDFGLSALSQQVREDGLLHTTCGTPNYVAPEVINNKGYDGAKADLWSCGVILFVLMAGYLPFEDSNLMSLYKKIFKADFSCPSWFSTSAKKLIKKILDPNPNTRITVADLINNEWFKKGYQPPRFETADVNLDDVNSIFNESGDPAQLVVERREERPSVMNAFELISTSQGLNLGTLFEKQTGSVKRETRFTSRLPANEILSKIEAAAGPMGFNVQKRNYKLKLRGENPGRKGQLAIATEVFEVTPSLYMVELRKSNGDTLEFHKFYHNISNGLKDVMWKPEGSIMEGDEARHRKSP

SEQ ID NO: 79223 - protein, 117 aa, Setaria italica
  Transcript Sequence Number=SeqID_13249
MSYQKIPESYPPPGYSQPYPPPQAPPQGPYYPPQQLPPPGYQGYFNDGQQPYGYPPPHGGHHHHGHHHHHDDHHHHYHHHGHHHHHEEDDCCLGFLKGWLAALCCCCILDECCCCCF

SEQ ID NO: 79224 - protein, 55 aa, Setaria italica
  Transcript Sequence Number=SeqID_13250
KFNKEPKSLIVYAFQYGKLNLQRAVYILKNVVFYYFLLLSLCFPLSSNCIILSFT

SEQ ID NO: 79225 - protein, 347 aa, Setaria italica
  Transcript Sequence Number=SeqID_13251
  Pfam annotation: Domain name=Urb2; Domain location=104-346; Score =213.0; E_value=8.1e-61; Accession=PF10441.1; Description=Urb2Npa2 family
SSNTHLNAALQVIERALVGVNLYSHSIYEVCTGNPDGGTVSSDVAAGIDCLYLVLDFVPGNKRVFKRTVPGLVGALFNIILHLQSPLIFYVQKLPPHCSEFHPDAGAVVLMCVEVITSFVGRHSFQIDASHVSQCLHVPVTLFKGFKQLLAYRKISRSLAKYRHGSVRQHGDHDEYILDRQFSVDIYAACCKLLCTTLRHQQREIGRCVALLEDSVSILLSCLESTDSKMVNMAGYFAWNMEEALKCASFFRRIYEEMRQQRETLGKHAMHFLAGYISMFSGQGPFQTGITREIDEALRPGVYSLIDICEESDFQQLHTFLGEGPCRTTLAELVHDYKLHFQYQGKI

SEQ ID NO: 79226 - protein, 61 aa, Setaria italica
  Transcript Sequence Number=SeqID_13252
  Gene Ontology: Mol. function=oxidoreductase activity
  Homolog annotation: Hit_ID=Q8S9W7; Match level="QueryCoverage=67%, HitCoverage=6%, E-value=4e-14, Identity=85%"; Hit description=FAD binding domain containing protein-like
WSDEVVGGVEVEVDKGDGCALDGRCVCLEDRHCSPGQGYYCRPGLVFTEARVCRYSVSQNQ

SEQ ID NO: 79227 - protein, 99 aa, Setaria italica
  Transcript Sequence Number=SeqID_13253
AIWVQSSILHRDSLWMISAAPETAREAGSYSPRKGSKKHIQFIAHRARWSGPQIFMTQDGVFQFFLISEPSLQINRIKELTRHEFQSLCVILRSRDRAI

SEQ ID NO: 79228 - protein, 317 aa, Setaria italica
  Transcript Sequence Number=SeqID_13254
  Gene Ontology: Mol. function=L-ascorbate peroxidase activity; Cellular component=chloroplast thylakoid membrane; Biological process=response to oxidative stress
  Homolog annotation: Hit_ID=Q7XJ02; Match level="QueryCoverage=82%, HitCoverage=72%, E-value=1e-145, Identity=91%"; Hit description =Probable L-ascorbate peroxidase 7, chloroplastic
  Pfam annotation: Domain name=peroxidase; Domain location=53-285; Score=201.4; E_value=2.4e-57; Accession=PF00141.15; Description =Peroxidase
  Subcellular localization annotation: CTP_CleavageSite=37; ConfidenceScore=5.61e-01
ARASRAFLPNSSASPAGARVGLRAAPSRLPQKARAVRCAAVAAASDAAQLKAAREDIRELLRTTHCHPILVRLGWHDAGTYDKNIEDWPQRGGANGSLRFDVELKHGANAGLINALKLIQPIKDKYPGITYADLFQLASATAIEEAGGPKIPMTYGRVDVTGPEQCPPEGKLPDAGPTSPADHLREVFYRMGLDDKDIVVLSGAHTLGRSRPERSGWGKPETKYTKNGPGAPGGQSWTPEWLKFDNSYFKEIKEKRDQDLLVLPTDAALFEDPAFKVYAEKYAADQDAFFKDYTESHAKLSNLGAKFNPPQGFSLDD

SEQ ID NO: 79229 - protein, 77 aa, Setaria italica
  Transcript Sequence Number=SeqID_13255
DNLDEESQRQFMKDVGNNSEVRVLDIYVGRFKGMVQSDLVHSLGNLRKLQHLELTDHYLDQDGVRSEGATREWTEWC

SEQ ID NO: 79230 - protein, 123 aa, Setaria italica
  misc_feature (114)..(114): Xaa can be any naturally occurring amino acid
  Transcript Sequence Number=SeqID_13256
  Gene Ontology: Mol. function=protein binding; Biological process =apoptosis
  Homolog annotation: Hit_ID=Q2RB05; Match level="QueryCoverage=97%, HitCoverage=11%, E-value=4e-15, Identity=38%"; Hit description=NB -ARC domain containing protein, expressed
MDGLLKRLQKKMSKLFNKSKARHTIAGTIEDMKKRLQEVADRRDRFSVALSQPALPTKPDPRLAEMHKEAAQLIGIEESKAELTAMLLPTPHGNGDSDISGSNNKMKIVSVVGXGGLGKSTLA

SEQ ID NO: 79231 - protein, 131 aa, Setaria italica
  Transcript Sequence Number=SeqID_13257
  Gene Ontology: Mol. function=nucleotide binding; Biological process =apoptosis
  Homolog annotation: Hit_ID=Q2RB05; Match level="QueryCoverage=96%, HitCoverage=12%, E-value=7e-27, Identity=48%"; Hit description=NB -ARC domain containing protein, expressed
GQQVGEVPPEQLDPQVKLWASKVREASYDMEDILDTFLVSIVDVDTPAEKKDGLLKRLLKNIANLFNKSKERHTMAGAIEAMKKRLQEVADRRDRFSVAVSQPVLPRKPDPPLADMHKEAAQLIGIEETKG

SEQ ID NO: 79232 - protein, 85 aa, Setaria italica
  Transcript Sequence Number=SeqID_13258
TLKSEGRHDSLTSPQLPFPSLYKALTGTSYESSWRFGITGGGAIDLLYSSFVLEPKAIASIPFQMLNETPVESSLSTNWTIQPSN

SEQ ID NO: 79233 - protein, 120 aa, Setaria italica
  Transcript Sequence Number=SeqID_13259
MDSVDLVLDFNGLTLAAALSVHQHNLTDEQSDKPRSYRAAATNSSEATTRAPMANMLTDDEAENQSDPNSCVAERDTIEEEKRSGEWFVATGAAHHATWKRDLFSNLVDVENDGLCVHAA

SEQ ID NO: 79234 - protein, 158 aa, Setaria italica
  Transcript Sequence Number=SeqID_13260
  Gene Ontology: Mol. function=nucleotide binding; Biological process =defense response
  Homolog annotation: Hit_ID=Q2R1W1; Match level="QueryCoverage=98%, HitCoverage=16%, E-value=8e-38, Identity=52%"; Hit description=NB -ARC domain containing protein
LSVGRKPDLAQILKEIFLLLDKKEYEAIRDVKNESLLIGELRKFLQNKRYFIVIDDVWDIPTWKTIKSALVENNSGSRVITTTRNRDVANREEVYELRALSPDHSEKLFITRLFGVNGKYPTHHPAEASEKILKKCGSVPLAIITMASLLVGKSREDW

SEQ ID NO: 79235 - protein, 127 aa, Setaria italica
  Transcript Sequence Number=SeqID_13261
KEAMEVAIKPAYHQPEFPSQISAMDAAAWLIDPPVEASLKRFEDAETWKYILKAVFMEKKTREDDILDTCLIEVADRAEKKDGLLKRLQKNIADLLNKKRKALHTIAVASEDTKKRLQEVADRRDRF

SEQ ID NO: 79236 - protein, 92 aa, Setaria italica
  Transcript Sequence Number=SeqID_13262
  Gene Ontology: Mol. function=nucleotide binding; Biological process =defense response
MLLPTPHGNGDSDISGSNNKMKIVSVVGVGGLGKSTLAKAVYDEFRPRYDCGAFLSVGRKPDLTQVLKEIFLLLNEKEYKAIRDVKNESLLN

SEQ ID NO: 79237 - protein, 203 aa, Setaria italica
  Transcript Sequence Number=SeqID_13263
  Gene Ontology: Mol. function=nucleotide binding; Biological process =defense response
  Homolog annotation: Hit_ID=Q2RB05; Match level="QueryCoverage=93%, HitCoverage=18%, E-value=2e-40, Identity=46%"; Hit description=NB -ARC domain containing protein, expressed
LQAEYKLQKGLPEQIESLKNELESAQTALSKVGEVPPEQLDPQVRLWASEVREASYDMEDILDTFLIEVADPAEKKDGLLKRLQKKMSKLFNKSKARHTIAGAIEDMKKRLQEVADRRDRFSVAVALPAPATKPDPRLADMHKEAAQLIGIDKARAELIAMLQPMSHGNGDSDVSGSNNKMKIVLTSFGSALSRCCGCWLPQP

SEQ ID NO: 79238 - protein, 153 aa, Setaria italica
  Transcript Sequence Number=SeqID_13264
QITHLLLLWSIQSDPNSCVAERDTIEEEKRSGEWFVATGAAHHATWKRDLFSNLVDVENDGLCVHAADGTPMPVCGRGDVVTDDVVLPDVYYVPRLCTNLVSVGQLAGLDYCVGFGRGACVISSAAGTVVGRAHARGDGLYEVDFLRVPLGMP

SEQ ID NO: 79239 - protein, 338 aa, Setaria italica
  Transcript Sequence Number=SeqID_13265
  Gene Ontology: Mol. function=nucleic acid binding; Biological process= defense response
  Homolog annotation: Hit_ID=Q8LJZ8; Match level="QueryCoverage=88%, HitCoverage=34%, E-value=3e-32, Identity=37%"; Hit description =Putative Mla1
  Pfam annotation: Domain name=NB-ARC; Domain location=66-319; Score= -41.1; E_value=9.2e-07; Accession=PF00931.14; Description=NB-ARC domain
RFSVAVALPAPATKPDPRLADMHKEAAQLIGIDNARAELIAMLQPDLERKEKKRKAMLLPASYCDADSDVSGSSSRKMKIVSVVGFGGLAKTTLVKAVYDELQSQYDCGAFVPIGRTPQVFSNILYLLDKKEYSPILNLKDQFLLIGELQKFLQNKRDFIVIDDVWDITTWNIIKSALVNNDTRSRVITTTHNRDVASRVGEVPPEQLDPQVRLWASEAWEASYDMEDILDTCLIEVADPVEKKDGLLKRLHKNIADLLKKSKARHTIAVAIKDMKKRLQEVADCRDRFSVAVALPAPAPQEYLNVSLSPTASVPAVKGPEFIRTGTVKKKGKGGGCT

SEQ ID NO: 79240 - protein, 325 aa, Setaria italica
  misc_feature (181)..(181): Xaa can be any naturally occurring amino acid
  Transcript Sequence Number=SeqID_13266
  Gene Ontology: Mol. function=nucleotide binding; Biological process =defense response
  Homolog annotation: Hit_ID=Q6YYL2; Match level="QueryCoverage=99%, HitCoverage=29%, E-value=5e-66, Identity=44%"; Hit description =Putative RGH1A
MDLVSGAVGSVIGKLGELLQAEYKLQKGLPQQIQSLKDELESAQTALSKVGEVRPEQLDPQVRLWAREVREASYDMEDILDTFLVEVTDPAEKKDGLLEHLNKKMSKLLKKSKARHTIAGAIDDMKKRLQEVADRRDRFSVAVSQPALPTKPDPRLADMHKEAAQLIGIEETKAELTAMLXRRLKAMEDSDISGSNNKMKIVSVVGVGGLGKTTLAKAVYDELRPRYDRGAFLSVGRKPDLAQVLKEIFLLLDKKEYEAIRDVKNESLLIGELRKFLQNKRYFIVIDDVWDITTWNIIKSVLVENDTGSRVITTTRNRDVASMEE

SEQ ID NO: 79241 - protein, 855 aa, Setaria italica
  misc_feature (121)..(121): Xaa can be any naturally occurring amino acid
  Transcript Sequence Number=SeqID_13267
  Gene Ontology: Mol. function=nucleotide binding; Biological process =defense response
  Homolog annotation: Hit_ID=Q6YYL2; Match level="QueryCoverage=92%, HitCoverage=72%, E-value=1e-127, Identity=39%"; Hit description =Putative RGH1A
  Pfam annotation: Domain name=LRR_1; Domain location=392-415; Score =1.4; E_value=1.7e+02; Accession=PF00560.25; Description=Leucine Rich Repeat
  Pfam annotation: Domain name=LRR_1; Domain location=441-462; Score =11.6; E_value=1.9; Accession=PF00560.25; Description=Leucine Rich Repeat
  Pfam annotation: Domain name=LRR_1; Domain location=464-485; Score =8.3; E_value=7.9; Accession=PF00560.25; Description=Leucine Rich Repeat
  Pfam annotation: Domain name=LRR_1; Domain location=511-537; Score =0.1; E_value=2.9e+02; Accession=PF00560.25; Description=Leucine Rich Repeat
  Pfam annotation: Domain name=LRR_1; Domain location=594-614; Score =5.4; E_value=29; Accession=PF00560.25; Description=Leucine Rich Repeat
  Pfam annotation: Domain name=NB-ARC; Domain location=10-298; Score =123.9; E_value=5.3e-34; Accession=PF00931.14; Description=NB-ARC domain
  Pfam module annotation: Pfam domain module=LRR_1::LRR_1::LRR_1::LRR _1::LRR_1::NB-ARC; Domain location=392-415::441-462::464-485::511 -537::594-614::10-298
MLLPTPQGNGDSDISGSNNKMKIVSVVGVGGLGKTTLAKAVYDELRPRYDRGAFLSVGRKPDLAQVLKEIFLLLDKKEYEAIRDVKNESLLIGELRKFLQNKRYFIVMSHTSSITMKYLLXLDDVWDITTWNIIKSVLVENDTGSRVITTTRNRDVASMEEVYKLRTLSPDHSEKLFKTRLFGVNGEYPANHPAEACEKILKKCGGVPLAIITMASLLVGKLREDWFAVCNSPGFYRGQGNQQVDDTEWILSLSYYDLPSYLRTCLLYLSVYPEDIVIEKNSLIWKWIAEGFVEKKRGTSLLQQGEEYYNQLVNRSMIQVVESLHSMGINGCRVHDMVLDLIRDLSNKENFVTISSNDDEGKSPHQSRVRRLAHQNIIMKQTQQDDHMDMAQVRSLVAFRCDIDSWVLHPSFKLLRVLALLGCRGHWEGGQGLKHIGNLLHLRYLGLRRTNIRELPEEIGKLKFLQILDLEGSKVGQLPSSVCQLTQLVCLCGHSRYTCPPDGLFLRKVTSLEYLRIRIDNLDEESQRQFMKDLGNLREVRVLHIIGSLKGMVQSDLVHSLGNLHKLQHLELTKYNGNSEAATREWDRVVLPQHLRYLDLDSIPLRQLPSCINPVHLPVLHYLRLHVDHMDESSLRNLGGLTELRDLNLFTARPSMACAATVANINTAVDGFFKKLRYCLLHGWMVQLVLNEDSTGVSFSIWNGMGAIAFGSKTKDEYSRSIAPQPVMPNLQELLLYVPVRDFYKDGNGSCGDLRLDCLPSLCSVIIFVDCMDASTDDVEKAEAELRNAAKLYPNGPIIRLQRLLEHRMMARSTDQDDKESVDVSAKEEERGASATGDEVAVTESGGDNPATPSC

SEQ ID NO: 79242 - protein, 113 aa, Setaria italica
  Transcript Sequence Number=SeqID_13268
QQGQHPPRRLEAEAAPPASAHAGPHLPRPRGRHRTKAAASFSPPHANSPLEIPPPSYRLAALDSFYLWTGLGILVCFFLRAQGKERMAARRPNLREDSSGLAPPLRPQVRFAS

SEQ ID NO: 79243 - protein, 122 aa, Setaria italica
  misc_feature (60)..(60): Xaa can be any naturally occurring amino acid
  misc_feature (90)..(90): Xaa can be any naturally occurring amino acid
  Transcript Sequence Number=SeqID_13269
  Gene Ontology: Biological process=steroid metabolic process
  Homolog annotation: Hit_ID=Q8SA94; Match level="QueryCoverage=92%, HitCoverage=22%, E-value=2e-46, Identity=68%"; Hit description =Putative oxysterol-binding protein
GTYEGRLRATKDMFPRMSSSEMVGPGDTAAAVAVSTERLRQRLQQEGVSEAAIADSESIXRAEFEALHKQLVLAKQKHALLVETLRQLEXKVDLENTLVDESQRQSKEGSASESDDYNEHKI

SEQ ID NO: 79244 - protein, 167 aa, Setaria italica
  misc_feature (7)..(7): Xaa can be any naturally occurring amino acid
  misc_feature (16)..(16): Xaa can be any naturally occurring amino acid
  misc_feature (31)..(31): Xaa can be any naturally occurring amino acid
  misc_feature (35)..(35): Xaa can be any naturally occurring amino acid
  Transcript Sequence Number=SeqID_13270
  Gene Ontology: Mol. function=aldehyde dehydrogenase (NAD) activity; Cellular component=cellular_component; Biological process=cellular aldehyde metabolic process
  Homolog annotation: Hit_ID=Q5EBY6; Match level="QueryCoverage=99%, HitCoverage=35%, E-value=3e-72, Identity=74%"; Hit description =Aldehyde dehydrogenase family 7 member A1
  Pfam annotation: Domain name=Aldedh; Domain location=1-167; Score= -268.8; E_value=5.3e-05; Accession=PF00171.14; Description=Aldehyde dehydrogenase family
NVMDDAXIQLAVRSVXFAAVGTAGQRCTTCXRLVXKQVRIGHPLEKGTLLGPLHTPTSKENFLKGIQTIKSQGGTILFGGSAIESEGNFVQPTIVEISASAPVVKEELFGPVLYVMKFQTLKEAIEINNSVPQGLSSSIFTKRPEIIFKWLGPHGSDCGIVNVNIPT

SEQ ID NO: 79245 - protein, 78 aa, Setaria italica
  misc_feature (35)..(35): Xaa can be any naturally occurring amino acid
  Transcript Sequence Number=SeqID_13271
  Homolog annotation: Hit_ID=Q8SA94; Match level="QueryCoverage=88%, HitCoverage=8%, E-value=2e-24, Identity=84%"; Hit description =Putative oxysterol-binding protein
LENTLVDESQRQSKEYGSASKSRHEKYSGMIIGGXEGSASESDDYNEPQDPAEETDDDENIYFDTRDFLSSSSFKSSG

SEQ ID NO: 79246 - protein, 45 aa, Setaria italica
  Transcript Sequence Number=SeqID_13272
RSTTPHQRTLLTPRLSSDQITNAFGGCQPPENSFFLCKEKHPLHP

SEQ ID NO: 79247 - protein, 58 aa, Setaria italica
  Transcript Sequence Number=SeqID_13273
RSTTPHQRTLLTLRSSSDQITNAFGTCQPPENSFFLCKEKHPLHPGQGTIKHSIQRFF

SEQ ID NO: 79248 - protein, 114 aa, Setaria italica
  Transcript Sequence Number=SeqID_13274
  Gene Ontology: Mol. function=aspartic-type endopeptidase activity; Cellular component=chromatin
  Homolog annotation: Hit_ID=Q8SA93; Match level="QueryCoverage=99%, HitCoverage=4%, E-value=7e-17, Identity=37%"; Hit description =Putative polyprotein
IQHLLCSCVFSRQFWLQLLRSFGLLDIAPQPSSTGFFDWWQQAGSTLDKGTKRGFNSPVMLGAWILWKERNDIVFNGASPRMERVLLLAQEEAVLWRLVGAKGISDLVAARPGA

SEQ ID NO: 79249 - protein, 143 aa, Setaria italica
  misc_feature (62)..(62): Xaa can be any naturally occurring amino acid
  misc_feature (120)..(120): Xaa can be any naturally occurring amino acid
  misc_feature (134)..(134): Xaa can be any naturally occurring amino acid
  Transcript Sequence Number=SeqID_13275
  Gene Ontology: Cellular component=nucleus
  Homolog annotation: Hit_ID=B9N8U9; Match level="QueryCoverage=100%, HitCoverage=27%, E-value=4e-62, Identity=79%"; Hit description=SET domain protein
AVQSCVVHLQKVSLARRFALVPLGPPLLTYKSNCKAMLTADGDSVRLVVDRPYKAGEPIIVXLYRCGPQTNSRLVLNYGFVDEDNPFDRISIEASLNTEDPQYQEKRMVAQRNGKLAIQXFNVYVGKEKETVAXMLPYLRLGY

SEQ ID NO: 79250 - protein, 73 aa, Setaria italica
  misc_feature (7)..(7): Xaa can be any naturally occurring amino acid
  misc_feature (53)..(53): Xaa can be any naturally occurring amino acid
  Transcript Sequence Number=SeqID_13276
  Gene Ontology: Mol. function=aldehyde dehydrogenase (NAD) activity; Cellular component=cellular_component; Biological process=cellular aldehyde metabolic process
  Homolog annotation: Hit_ID=P93684; Match level="QueryCoverage=100%, HitCoverage=59%, E-value=4e-23, Identity=72%"; Hit description =Aldehyde dehydrogenase (Fragment)
IFKWLGXHGSDCGIVNVNIPTNGAEIGGAFGGEKATGGGREAGSDSWKQYMRXATCTINYGTELPLAQGINFG

SEQ ID NO: 79251 - protein, 79 aa, Setaria italica
  Transcript Sequence Number=SeqID_13277
  Homolog annotation: Hit_ID=Q8SA94; Match level="QueryCoverage=69%, HitCoverage=7%, E-value=7e-11, Identity=58%"; Hit description =Putative oxysterol-binding protein
EECGGHDARDGDEDLDGDKVPGIGETDDDENIYFDTRDFLSSSSFKSSGSDFQRSEAGSDDEDDYPMDGIDPSMKSVGI

SEQ ID NO: 79252 - protein, 91 aa, Setaria italica
  misc_feature (47)..(47): Xaa can be any naturally occurring amino acid
  Transcript Sequence Number=SeqID_13278
  Gene Ontology: Mol. function=aldehyde dehydrogenase (NAD) activity; Cellular component=cellular_component; Biological process=cellular aldehyde metabolic process
  Homolog annotation: Hit_ID=Q9SYG7; Match level="QueryCoverage=100%, HitCoverage=13%, E-value=3e-31, Identity=68%"; Hit description =Aldehyde dehydrogenase family 7 member B4
EIIDMCDYAVGLSRQLNGSIIPSEPYVQLDDNIRRSANTPFSVFLQXPNHMMMEVWNPLGVVGVITAFNFPCAVLGWNACIALVCGNCVVW

SEQ ID NO: 79253 - protein, 249 aa, Setaria italica
  misc_feature (19)..(19): Xaa can be any naturally occurring amino acid
  misc_feature (37)..(37): Xaa can be any naturally occurring amino acid
  Transcript Sequence Number=SeqID_13279
  Gene Ontology: Mol. function=nucleotide binding; Biological process =defense response
  Homolog annotation: Hit_ID=Q2QZH9; Match level="QueryCoverage=42%, HitCoverage=10%, E-value=2e-15, Identity=44%"; Hit description=NB -ARC domain containing protein, expressed
LCQNLVSLQLLCEHLAGLXGIKIRHLRMLQEIETSSXISEPARQEWEEAARNHPNRPIVLPFVTVNDLVENDNEKNPVASPEESRHEGGEAPRPSCVQHMPLSTCNNSGLSSEMDDAVHHDPRESPVETEETTPESVIDEQLLTEEPLKHTPVQTRHENSTVQPRTNGILGSISDHSGLNSPRDDSRNSKPLGKYVALEEPTYENGIQGCPAEEAIRYSLVLTDQTVKYTSRGPLNIATTPFNSTQTRI

SEQ ID NO: 79254 - protein, 139 aa, Setaria italica
  Transcript Sequence Number=SeqID_13280
  Gene Ontology: Mol. function=transcription coactivator activity; Cellular component=nucleus; Biological process=regulation of transcription, DNA-dependent
  Homolog annotation: Hit_ID=B6U0Q2; Match level="QueryCoverage=56%, HitCoverage=55%, E-value=1e-34, Identity=89%"; Hit description=RNA polymerase II transcriptional coactivator KELP
  Pfam annotation: Domain name=PC4; Domain location=41-132; Score =139.7; E_value=9.4e-39; Accession=PF02229.8; Description =Transcriptional Coactivator p15 (PC4)
GGHDARDGDEDLDGDKVPGIGELEVKVEQQQQGGDGEEAKGDEGEEEEEEEEEEEEGGARKREYDDQGDLILCRLSSKRRVTLSEFKGRTLVSIREFYLKDGKELPSSKGISMTVEQWEAFRNAVPAIEDAIKKLEDSD

SEQ ID NO: 79255 - protein, 282 aa, Setaria italica
  misc_feature (272)..(272): Xaa can be any naturally occurring amino acid
  Transcript Sequence Number=SeqID_13281
  Gene Ontology: Biological process=steroid metabolic process
  Homolog annotation: Hit_ID=Q8SA94; Match level="QueryCoverage=100%, HitCoverage=44%, E-value=1e-122, Identity=72%"; Hit description =Putative oxysterol-binding protein
  Subcellular localization annotation: CTP_CleavageSite=53; ConfidenceScore=5.03e-01
NRPSTSSSSHSNGHHQPRNPIGEIHLKVSTVRESRSDDRRFSIFSGTKTLHLRAETREDRAAWLEALRATKDMFPRMSSSEMVGPGDTAAAVAVSTERLRQRLQQEGVSEAAIADSESIVRAEFEALHKQLVLAKQKHALLVETLRQLETEKVDLENTLVDESQRQSKEYGSASKSRHEKYSEGSASESDDYNEPQDPAEETDDDENIYFDTRDFLSSSSFKSSGSDFQRSEAGSDDEDDYPMDGIDPSMKSVGISYPYVRRRKKLPDPVEXEKGVSLWSMI

SEQ ID NO: 79256 - protein, 71 aa, Setaria italica
  Transcript Sequence Number=SeqID_13282
  Homolog annotation: Hit_ID=B9R782; Match level="QueryCoverage=74%, HitCoverage=8%, E-value=2e-10, Identity=50%"; Hit description=ATP binding protein, putative
SNLQTFVQSAREDEGVDSDRISMIVDIAAACVRSSPESRPAAWQVLKMIQEVKEADTTGDNDNDSDLTSNS

SEQ ID NO: 79257 - protein, 285 aa, Setaria italica
  Transcript Sequence Number=SeqID_13283
  Gene Ontology: Mol. function=ATP binding; Biological process=defense response
  Homolog annotation: Hit_ID=Q2R4S9; Match level="QueryCoverage=91%, HitCoverage=23%, E-value=1e-49, Identity=49%"; Hit description=NB -ARC domain containing protein
VRSLTVRGNAGVAISDFGRYKLMRVLDLEECTDVNDRHVRKICKLWNLRYLSLSRNVTNLPKEIAKLKLLETLVLSKTVVNVLPVEVIGIPCLTNLIGKFKLSDQDCTSNSNMERLSKNEGLEDLFRKSKLETLAGFVGDGSHMQGFLQLMVHMKNLKKVKIWCESAADIEGNDHLNAELVKAIRQYIKTPMGAGDVRSLSIDFQGVPGGSLNALQELCRHSTSLQETYYLSSLKLHGNLSTYPEFVGIFSRLTELCLSCATVSTDLLSCWLTDFRMKFDLLKHS

SEQ ID NO: 79258 - protein, 160 aa, Setaria italica
  Transcript Sequence Number=SeqID_13284
  Gene Ontology: Mol. function=nucleic acid binding; Cellular component= ribonucleoprotein complex; Biological process=mRNA processing
  Homolog annotation: Hit_ID=A6N1F5; Match level="QueryCoverage=100%, HitCoverage=89%, E-value=2e-62, Identity=65%"; Hit description =Chloroplast 29 kDa ribonucleoprotein (Fragment)
  Pfam annotation: Domain name=RRM_1; Domain location=2-45; Score=16.5; E_value=0.0058; Accession=PF00076.14; Description=RNA recognition motif. (a.k.a. RRM, RBD, o
  Pfam annotation: Domain name=RRM_1; Domain location=78-148; Score =82.9; E_value=1.1e-21; Accession=PF00076.14; Description=RNA recognition motif. (a.k.a. RRM, RBD, o
  Pfam module annotation: Pfam domain module=RRM_1::RRM_1; Domain location=2-45::78-148
MVEVVYDRMTGRSRGFGFVTMSSAEEAGAAVEQFNGYTFQGRPLRVNSGPPPPRDDSAPRAPRGGGGGGNFVDSGNKVYVGNLSWGVDNSTLENLFSEQGQVLDAKVIYDRESGRSRGYLVCTYGSAEEVNNAISNLDGIDLDGRQIRVTVAESKPRRQF

SEQ ID NO: 79259 - protein, 223 aa, Setaria italica
  Transcript Sequence Number=SeqID_13285
  Gene Ontology: Biological process=steroid metabolic process
  Homolog annotation: Hit_ID=Q8SA94; Match level="QueryCoverage=97%, HitCoverage=31%, E-value=1e-108, Identity=87%"; Hit description =Putative oxysterol-binding protein
SSPAREKVDLENTLVDESQRQSKEYGSASKSRHEKYSEGSASESDDYNEPQDPAEETDDDENIYFDTRDFLSSSSFKSSGSDFQRSEAGSDDEDDYPMDGIDPSMKSVGISYPYVRRRKKLPDPVEKEKGVSLWSMIKDNIGKDLTKVCLPVYFNEPLSSLQKCFEDLEYSYLIDRASEWGKRGNSLMRILSVAAFAVSGYASTDGRSCKPFNPLLGETYEAD

SEQ ID NO: 79260 - protein, 207 aa, Setaria italica
  Transcript Sequence Number=SeqID_13286
  Gene Ontology: Mol. function=aldehyde dehydrogenase (NAD) activity; Cellular component=cellular_component; Biological process=cellular aldehyde metabolic process
  Homolog annotation: Hit_ID=Q5EBY6; Match level="QueryCoverage=92%, HitCoverage=37%, E-value=2e-80, Identity=76%"; Hit description =Aldehyde dehydrogenase family 7 member A1
  Pfam annotation: Domain name=Aldedh; Domain location=2-180; Score= -234.9; E_value=1e-06; Accession=PF00171.14; Description=Aldehyde dehydrogenase family
VYIKLFLDQLVEVYKQVRIGHPLEKGTLLGPLHTPTSKENFLKGIQTIKSQGGTILFGGSAIESEGNFVQPTIVEISASAPVVKEELFGPVLYVMKFQTLKEAIEINNSVPQGLSSSIFTKRPEIIFKWLGPHGSDCGIVNVNIPTNGAEIGGAFGGEKATGGGREAGSDSWKQYMRRATCTINYGTELPLAQGINFAQPSPAGLTK

SEQ ID NO: 79261 - protein, 267 aa, Setaria italica
  misc_feature (119)..(119): Xaa can be any naturally occurring amino acid
  misc_feature (153)..(153): Xaa can be any naturally occurring amino acid
  Transcript Sequence Number=SeqID_13287
  Gene Ontology: Mol. function=nucleic acid binding; Cellular component= ribonucleoprotein complex; Biological process=mRNA processing
  Homolog annotation: Hit_ID=B6U471; Match level="QueryCoverage=100%, HitCoverage=100%, E-value=1e-94, Identity=77%"; Hit description =Ribonucleoprotein A
  Pfam annotation: Domain name=RRM_1; Domain location=185-255; Score =100.1; E_value=7.4e-27; Accession=PF00076.14; Description=RNA recognition motif. (a.k.a. RRM, RBD, o
  Pfam annotation: Domain name=RRM_1; Domain location=80-151; Score =83.5; E_value=7.4e-22; Accession=PF00076.14; Description=RNA recognition motif. (a.k.a. RRM, RBD, o
  Pfam module annotation: Pfam domain module=RRM_1::RRM_1; Domain location=185-255::80-151
  Subcellular localization annotation: CTP_CleavageSite=51; ConfidenceScore=5.74e-01
MAAALFSTSLSPRFLALSSPKPAATVASAFLPFRLPLRAVSAPGRRVFEPVAVAVSSEYETEGAEQEEEGAEEFSEDLKLFVGNLPFSVDSAQLAGLFEQAGSVEMVEVVYDRMTGRSXRGFGFVTMSSAEEAGAAVEQFNGYTFQGRPLRVXNSGPPPPRDDSAPRAPRGGGGGGNFVDSGNKVYVGNLSWGVDNSTLENLFSEQGQVLDAKVIYDRESGRSRGFGFVTYGSAEEVNNAISNLDGIDLDGRQIRVTVAESKPRRQF

SEQ ID NO: 79262 - protein, 305 aa, Setaria italica
  Transcript Sequence Number=SeqID_13288
  Gene Ontology: Mol. function=NAD-dependent histone deacetylase activity; Cellular component=chromatin silencing complex; Biological process=regulation of transcription, DNA-dependent
  Homolog annotation: Hit_ID=B9RRG6; Match level="QueryCoverage=95%, HitCoverage=79%, E-value=1e-117, Identity=67%"; Hit description =Chromatin regulatory protein sir2, putative
  Pfam annotation: Domain name=SIR2; Domain location=31-249; Score =180.1; E_value=6.4e-51; Accession=PF02146.9; Description=Sir2 family
IVPDSDPPSSKDVDLLYQFIDKSKRLMVVTGAGMSTESGIPDYRSPNGAYSTGFKPLTHQEFVRSIRARRRYWARSYAGWRRFTRAQPNAAHYALASLERIGRVHSMVTQNVDRLHHRAGSKPLELHGSVYEVICLDCGTSISRESFQEQVKDLNPKWAQAIDSLEVGQPGSDKSFGMQQRPDGDIEIDEKFWEQDFEIPNCHQCGGVLKPDVVMFGDNVPQERAESAKEAARNCDALLVVGSALMTMSAFRLARLAHEANAPIAVVSIGETRADSILSLKINARCGEILPRILQMGSLTVPNVS

SEQ ID NO: 79263 - protein, 158 aa, Setaria italica
  Transcript Sequence Number=SeqID_13289
  Gene Ontology: Mol. function=hydrolase activity, hydrolyzing O -glycosyl compounds; Cellular component=extracellular region; Biological process=carbohydrate metabolic process
  Homolog annotation: Hit_ID=Q5W6G0; Match level="QueryCoverage=99%, HitCoverage=32%, E-value=4e-49, Identity=65%"; Hit description =Putative mannan endo-1,4-beta-mannosidase 5
QANPNTYAGHVGTDFIRNHRVLGVDFASVHIYPDTWMSGAAVEAQLKFVQSWMQAHIADAEGVLSMPVVFTEFGVSTKARSAFNATWRDQFVQAVYGVLLASMRRGGAGAGGLLWQVFPEGTDYMDDGYGVVLPRAKDTAGIISAHSKRLLIFNSRCD

SEQ ID NO: 79264 - protein, 73 aa, Setaria italica
  Transcript Sequence Number=SeqID_13290
  Gene Ontology: Mol. function=DNA binding; Cellular component=nuclear origin of replication recognition complex; Biological process=DNA replication
  Homolog annotation: Hit_ID=Q945C6; Match level="QueryCoverage=98%, HitCoverage=9%, E-value=1e-15, Identity=61%"; Hit description=Origin recognition complex subunit 3
FVSKVNSEKLSGVKPGSGDVFMAQVMNAIRYLPMKTLLHVLEVWSNYVKGISEINEKVKELQSTTIDADSART

SEQ ID NO: 79265 - protein, 599 aa, Setaria italica
  misc_feature (585)..(585): Xaa can be any naturally occurring amino acid
  Transcript Sequence Number=SeqID_13291
  Gene Ontology: Mol. function=ATPase activity, coupled to transmembrane movement of ions, phosphorylative mechanism; Cellular component=integral to membrane; Biological process=phospholipid transport
  Homolog annotation: Hit_ID=B9RL26; Match level="QueryCoverage=97%, HitCoverage=47%, E-value=0.0, Identity=67%"; Hit description =Phospholipid-transporting atpase, putative
AASYGIVLVERTSGYIVIDVLGDRQRFDILGLHEFDSDRKRMSVIVGCPDRTIKLYVKGADSSIFGITNKSSELDIVRATEAHLHKYSSLGLRTLVVGMRKLSQSEFEEWQLAYENASTAVLGRGNLLRSVAANIECNIHILGATGIEDKLQDGVPEAIESLRQADIKVWILTGDKQETAISIGYSCKLLTNDMTQIVINNNSKESCQRSLVEALATTKKLRSASSIATLGPVLASEASSVTIALIVDGNSLVYILETELQEELFKLATECSVVLCCRVAPLQKAGIVALIKNRTDDMTLAIGDGANDVSMIQMADVGVGISGQEGRQAVMASDFSMGQFRFLVPLLLVHGHWNYQRMSYMILYNFYKNATFVLVLFWYVLYTAFTLTTAITEWSSLLYTVLYTSLPTIVVGILDKDLSKATLLAYPKLYGSGQRDEKYNVNLFVLNMLEALWQSLVVFYLPYFAYRRSTIDMSSLGDLWALAAVIVVNMQLGMDIIRWNWIIHAFVWGTIAATTICLFVIDSIWILPGYGAIFHIMGTGLFWLLLLIIVVTAMVPHFVIKAFTEHFRPSDIQIAREIEKITNVXNQVNRAEVPMRGFS

SEQ ID NO: 79266 - protein, 40 aa, Setaria italica
  Transcript Sequence Number=SeqID_13292
MKQPMMMQDEMLSEAAGGDVNDFMAGLEDLICIDDAAMIA

SEQ ID NO: 79267 - protein, 103 aa, Setaria italica
  Transcript Sequence Number=SeqID_13293
  Subcellular localization annotation: CTP_CleavageSite=33; ConfidenceScore=5.46e-01
RPAPMPTLTPPPPTPPPPPPPTPPPPPPPTQSVCPAGFDDSKAFLSAIPVYLKRNILLLIVSKNIADASPGTSTTKCLCYYSTNLYLPIPTPNVKGPIACRRG

SEQ ID NO: 79268 - protein, 133 aa, Setaria italica
  Transcript Sequence Number=SeqID_13294
  Gene Ontology: Cellular component=mitochondrion
  Homolog annotation: Hit_ID=A2Q1Y4; Match level="QueryCoverage=87%, HitCoverage=37%, E-value=8e-35, Identity=62%"; Hit description =Nodulin-like protein, related (Fragment)
LAVGTALIGLSSGFIFAAAVSVTSELFGPNSIGVNHNILITNIPLGSLLYGQIAALVYDANGQRMRVMDNHTGMIDTMIVCMGVKCYSTTFFVWGCITLLGLASSIVLFIRTKPVYASTASRSSCEHLHQVSS

SEQ ID NO: 79269 - protein, 112 aa, Setaria italica
  Transcript Sequence Number=SeqID_13295
  Subcellular localization annotation: CTP_CleavageSite=18; ConfidenceScore=5.00e-01
NMISWNNDVSGKETPTSRVGNVNNEFMMPFRSQQLLLSARPNQNEHRPERDNAIKVSSFSNRILEQMRSKTVTPPSGVLGSPPNGKSKGKGVAYQGAREEVQAQANARPRVP

SEQ ID NO: 79270 - protein, 101 aa, Setaria italica
  Transcript Sequence Number=SeqID_13296
VPPRPPERAHLGAAAVPVSALISRLCGARHCRPSIESRTGFLRRGANWAWVQRARREREGRVRRAGGRAGWVSIPASGFSRGGRRPKGGVAGGVGGGERRV

SEQ ID NO: 79271 - protein, 67 aa, Setaria italica
  Transcript Sequence Number=SeqID_13297
TSRKQYLLCLLSSSSTSCIQRSTRVNVLYINEAVSLSHNNPRGLVLGHIFPTKTEKSIRMLALKRVH

SEQ ID NO: 79272 - protein, 121 aa, Setaria italica
  Transcript Sequence Number=SeqID_13298
  Gene Ontology: Mol. function=aspartic-type endopeptidase activity; Biological process=proteolysis
  Homolog annotation: Hit_ID=B9ST28; Match level="QueryCoverage=100%, HitCoverage=24%, E-value=2e-34, Identity=63%"; Hit description =Aspartic proteinase nepenthesin-1, putative
GDGSYTVGDFATETLTLGDSQPVSNVAIGCGHDNEGLFVGAAGLLALGGGPLSFPSQISATTFSYCLVDRDSPAASTLQFGDGAAEADTVTAPLLRSPRTSTFYYVAMTGISVGGQALSIP

SEQ ID NO: 79273 - protein, 206 aa, Setaria italica
  Transcript Sequence Number=SeqID_13299
  Gene Ontology: Mol. function=aspartic-type endopeptidase activity; Biological process=proteolysis
  Homolog annotation: Hit_ID=Q9LS40; Match level="QueryCoverage=78%, HitCoverage=31%, E-value=3e-46, Identity=51%"; Hit description=CND41, chloroplast nucleoid DNA binding protein-like
LAADGVTRLDLRPANASAVFAASAAAIQGPVVSGVGQGSGEYFSRVGIGSPARQLYMVLDTGSDVTWVQCQPCADCYQQSDPVFDPSLSASYAAVSCDSPRCRDLDTAACRNATGACLYEVAYGDGSYTVGDFATETLTLGDSQPVSNVAIGCGHDNEGLFVGAAGLLALGGGPLSFPSQISAAVSSSSSSPPPDARRLPPTPSPA

SEQ ID NO: 79274 - protein, 84 aa, Setaria italica
  Transcript Sequence Number=SeqID_13300
  Gene Ontology: Mol. function=ATP binding; Biological process=apoptosis
  Homolog annotation: Hit_ID=Q9FS52; Match level="QueryCoverage=92%, HitCoverage=44%, E-value=2e-11, Identity=55%"; Hit description =Resistance gene alike (Fragment)
DYVEIMYTQVSSQVPEAPGDEEIIDKELKLSQNLQNRTYLVVLDGLISISDWNSLLDVLPDTNGSWILITTHLNVKEINHIDPQ

SEQ ID NO: 79275 - protein, 304 aa, Setaria italica
  misc_feature (38)..(38): Xaa can be any naturally occurring amino acid
  Transcript Sequence Number=SeqID_13301
  Gene Ontology: Mol. function=structural constituent of ribosome; Cellular component=intracellular; Biological process=translation
  Homolog annotation: Hit_ID=B6TSU1; Match level="QueryCoverage=80%, HitCoverage=79%, E-value=1e-103, Identity=80%"; Hit description =Ribosomal protein S6 containing protein
  Pfam annotation: Domain name=Ribosomal_S6; Domain location=122-212; Score=91.8; E_value=2.4e-24; Accession=PF01250.9; Description =Ribosomal protein S6
  Subcellular localization annotation: CTP_CleavageSite=42; ConfidenceScore=5.31e-01
MEATAAPRALSLLAPSPPLTLRMNCWRVAVGSVRRRGXVAVRGKKKRGRGGDGEAEERVDTHSFAPKAGEASGLFPEAVLLRKKMAREDGQVAPEFADAEEEKLYEFLNIQLESDLNLKRMRHYEVVYLIHEDRVEEVEDVVSKVQDFVRAKKGRIWRLNDWGLRRLAYKIKKATHANYILMNFEIESRYINDFKTLLDKDERIIRHLVMKRDEAITEDCPPPPEFHTLRAQQYFDDEYEDEEEEGWDARSELESADYGEDNAETGDEPEIIYVDEADQDNYEDTRRRNRKLKVKKYTAEKVLR

SEQ ID NO: 79276 - protein, 50 aa, Setaria italica
  Transcript Sequence Number=SeqID_13302
MDPELLELQRQLEAAQSARSSVRLSERNVVELVQKLQERGIIDFDLLHTT

SEQ ID NO: 79277 - protein, 44 aa, Setaria italica
  Transcript Sequence Number=SeqID_13303
  Gene Ontology: Mol. function=binding
  Homolog annotation: Hit_ID=Q8W378; Match level="QueryCoverage=100%, HitCoverage=8%, E-value=5e-17, Identity=90%"; Hit description =Putative tetratricopeptide repeat protein
MKEEMIGKLKDLGNSVLGHFGMSVDNFKAVKDPNTGSYSVQFQK

SEQ ID NO: 79278 - protein, 201 aa, Setaria italica
  Transcript Sequence Number=SeqID_13304
  Gene Ontology: Mol. function=binding; Biological process=protein folding
  Homolog annotation: Hit_ID=Q8W378; Match level="QueryCoverage=88%, HitCoverage=32%, E-value=1e-83, Identity=84%"; Hit description =Putative tetratricopeptide repeat protein
  Pfam annotation: Domain name=TPR_1; Domain location=104-137; Score =34.7; E_value=3.7e-07; Accession=PF00515.20; Description =Tetratricopeptide repeat
  Pfam annotation: Domain name=TPR_1; Domain location=29-62; Score =13.8; E_value=0.13; Accession=PF00515.20; Description=Tetratricopepti de repeat
  Pfam annotation: Domain name=TPR_1; Domain location=70-103; Score =37.9; E_value=4.1e-08; Accession=PF00515.20; Description =Tetratricopeptide repeat
  Pfam annotation: Domain name=TPR_2; Domain location=104-137; Score =34.9; E_value=3.3e-07; Accession=PF07719.9; Description =Tetratricopeptide repeat
  Pfam annotation: Domain name=TPR_2; Domain location=29-62; Score =16.7; E_value=0.094; Accession=PF07719.9; Description=Tetratricopepti de repeat
  Pfam annotation: Domain name=TPR_2; Domain location=70-103; Score =23.2; E_value=0.0011; Accession=PF07719.9; Description =Tetratricopeptide repeat
  Pfam module annotation: Pfam domain module=TPR_1::TPR_1::TPR_1::TPR _2::TPR_2::TPR_2; Domain location=104-137::29-62::70-103::104-137::29- 62::70-103
PRAEEGEEEDAFEDALTDEQLREKARSQANDAKAEGNKLFSAGQYEEALSQYEMALQIAAELESAEDIRSACHSNRAVCFLKMGKHDETIKECTKALELNPSYLKALLRRAEAHEKLEHYDEAIADMKKVIELDPSNQQAKRSLFRLEPLAAEKREKMKEEMIAKLKDLGNSVLGRFGMSVDNFKAVQDPNTGSYSIQFQK

SEQ ID NO: 79279 - protein, 137 aa, Setaria italica
  misc_feature (85)..(85): Xaa can be any naturally occurring amino acid
  misc_feature (96)..(96): Xaa can be any naturally occurring amino acid
  Transcript Sequence Number=SeqID_13305
  Gene Ontology: Mol. function=aspartic-type endopeptidase activity
  Homolog annotation: Hit_ID=Q2QXK3; Match level="QueryCoverage=100%, HitCoverage=36%, E-value=8e-41, Identity=58%"; Hit description =Eukaryotic aspartyl protease family protein, expressed
VDPRIYSTAMTIVDTGTTDTYILSPLFHALDKEVTTAMLAKGYARGSLKDKICFVTSGEPIDWNDLPTIEMEFGMSTLLLRMGNXFYVNSDNDICXTFRPDDAGVKGAQVLGNRAMRSFRVVYDIQDRIFGFEAGAC

SEQ ID NO: 79280 - protein, 66 aa, Setaria italica
  Transcript Sequence Number=SeqID_13306
  Gene Ontology: Cellular component=mitochondrion
  Subcellular localization annotation: CTP_CleavageSite=41; ConfidenceScore=5.05e-01
MPVVRRYIKGPMWMHFLVGAPPVIVFSSACAGLAGGTIPAAAQLVSSSYHAAMSSPSFARSSSTIV

SEQ ID NO: 79281 - protein, 155 aa, Setaria italica
  Transcript Sequence Number=SeqID_13307
  Gene Ontology: Cellular component=mitochondrion
  Homolog annotation: Hit_ID=Q8W0T8; Match level="QueryCoverage=60%, HitCoverage=9%, E-value=1e-11, Identity=34%"; Hit description=Gb protein
MAAAGDAARCSEIPGRCHHCAGPLSKDMETSSWTVPPMVRDSFSMIGSAVGGIAGAFYGFNHTMPVVRRYIKGPMWMHFLVGAPPVIVFSSACAGLAGGTIPAAAQLVSSSYHAAMSSPSFARSSSHATIPSQSFARSCSASHDDMHKARSSSPL

SEQ ID NO: 79282 - protein, 185 aa, Setaria italica
  Transcript Sequence Number=SeqID_13308
  Gene Ontology: Mol. function=metallopeptidase activity; Biological process=reproduction
  Homolog annotation: Hit_ID=Q5CUN0; Match level="QueryCoverage=82%, HitCoverage=63%, E-value=2e-11, Identity=31%"; Hit description=SprT like metalloprotease (Fragment)
  Pfam annotation: Domain name=SprT-like; Domain location=1-184; Score =169.6; E_value=9e-48; Accession=PF10263.1; Description =Uncharacterized conserved protein (SprT-lik
  Subcellular localization annotation: CTP_CleavageSite=58; ConfidenceScore=5.09e-01
TRNLFQHYDRLYFRGALAGAGFIVKWASSPAFSSFGSCTFSKPRNTITLSEPVLKYLSCTDRKNALLHEMIHAIIYVKHHRKDRSHGPLFRAWMDAINSCSIIQDHQKPDGGYNITTRHDFSPEEPHSLLKGTLWKCGSCGDTHFRATNQGPPSDACCIENVKSGTPCGNMLCHWHNYKNDCRGT

SEQ ID NO: 79283 - protein, 84 aa, Setaria italica
  Transcript Sequence Number=SeqID_13309
  Gene Ontology: Mol. function=structural constituent of ribosome; Cellular component=ribonucleoprotein complex; Biological process =translation
  Homolog annotation: Hit_ID=P0C482; Match level="QueryCoverage=100%, HitCoverage=35%, E-value=1e-40, Identity=96%"; Hit description=30S ribosomal protein S2, chloroplastic
  Pfam annotation: Domain name=Ribosomal_S2; Domain location=1-77; Score=4.0; E_value=8.5e-07; Accession=PF00318.12; Description =Ribosomal protein S2
GGIKYMTRLPDIVIVLDQQKEYIALRECAILGIPTISLVDTNCDPDLANISIPANDDTMTSIRLILNKLVFAISEGRSLYIRNR

SEQ ID NO: 79284 - protein, 134 aa, Setaria italica
  Transcript Sequence Number=SeqID_13310
  Gene Ontology: Mol. function=DNA-directed RNA polymerase activity; Cellular component=DNA-directed RNA polymerase III complex; Biological process=transcription
  Homolog annotation: Hit_ID=B9FFW1; Match level="QueryCoverage=100%, HitCoverage=9%, E-value=5e-62, Identity=83%"; Hit description=DNA -directed RNA polymerase
  Pfam annotation: Domain name=RNA_pol_Rpb1_1; Domain location=20-134; Score=-137.6; E_value=0.0011; Accession=PF04997.4; Description=RNA polymerase Rpb1, domain 1
AKPEEKLRCTKEPFIEDVGARRIKSIRFSVLSGSEIRKSAEVQVWNSRIYEHDMKPVPNGLLDMRMGLASKKDTELKCSTCHGPFAECPGHFGYLKLALPVFNVGFFNCILDVLKCICKGCSRVLLAEKDRREF

SEQ ID NO: 79285 - protein, 454 aa, Setaria italica
  misc_feature (178)..(178): Xaa can be any naturally occurring amino acid
  misc_feature (421)..(421): Xaa can be any naturally occurring amino acid
  Transcript Sequence Number=SeqID_13311
  Gene Ontology: Cellular component=mitochondrion
  Homolog annotation: Hit_ID=Q6F2D0; Match level="QueryCoverage=86%, HitCoverage=54%, E-value=9e-95, Identity=46%"; Hit description =Putative selenium-binding protein, related
  Pfam annotation: Domain name=PPR; Domain location=198-232; Score=5.0; E_value=2.2; Accession=PF01535.12; Description=PPR repeat
  Pfam annotation: Domain name=PPR; Domain location=264-298; Score =37.0; E_value=7.7e-08; Accession=PF01535.12; Description=PPR repeat
  Pfam annotation: Domain name=PPR; Domain location=335-368; Score=2.0; E_value=5.1; Accession=PF01535.12; Description=PPR repeat
  Pfam module annotation: Pfam domain module=PPR::PPR::PPR; Domain location=198-232::264-298::335-368
QYGYGPSGQGPNSVGYDQQVFRQQQYVDHRSGGGYPDRPGNPTSQYANPTHSHKEHVAGFQQGSSSNYGYNAPQANQSPYVPSQADTRNTPQGYSMYLNTDAQRLPHGIHQEKHPHVQPTTSFGNHSNSVPHQGGICFQPLPGNPSNDGSPSEVSNEVSRIRKGTVEELEKLCEDGNXKEALEVQAMLQGNGTVLHAHQYFRLMQACVDATALEEARVIHSQMLESSIVVDTDVQNKILEMYAKCGSMEDAKKLFSTMDHRSLASWNTMISGFVHNGHGEEATDFFDQFKQTGDKPDAVMFMHIFLACGILGSVDEGMLHFESMQKDFGITPTMEHYASIVSMLGQSGYIAEAHEFVERMPVEPSIEVWENLMNMCRLNGFLELGDRCAQIIERLDSSRLNEQSKMGLFPVGASDLAKEKXRKKASVAEARSKVHEYRAGDRSHPDTPKIYEED

SEQ ID NO: 79286 - protein, 139 aa, Setaria italica
  Transcript Sequence Number=SeqID_13312
  Homolog annotation: Hit_ID=Q6F2D0; Match level="QueryCoverage=94%, HitCoverage=17%, E-value=4e-53, Identity=73%"; Hit description =Putative selenium-binding protein, related
KVKVKRTSVAEARSKVHEYRAGDRSHPDTPKIYEELRYLSAHMKEAGYIADTRFVLHDVDQETKEDALLAHSERLAISYGLITSAPRSPIRVFKNLRSCGDCHTAFKIISKLVGRLIIARDAKRFHHFENGVCSCKDYW

SEQ ID NO: 79287 - protein, 96 aa, Setaria italica
  Transcript Sequence Number=SeqID_13313
  Subcellular localization annotation: CTP_CleavageSite=72; ConfidenceScore=5.37e-01
HTHIAPGLIRKPVDASDRSLARHLPQQSDPPFPAAMAASTALSTAANPTQSGSHISVCMRCARLQWQLCRPRAASSLGKPVKGLGLGMGPAEHHVP

SEQ ID NO: 79288 - protein, 79 aa, Setaria italica
  Transcript Sequence Number=SeqID_13314
  Subcellular localization annotation: CTP_CleavageSite=69; ConfidenceScore=5.71e-01
LARHLPQQSDPPFPAAMAASTALSTAANPTQVSAQLPLLLLLRLASPLSPPLLATAVTFFRERRVHRLCCMSSLTQRRS

SEQ ID NO: 79289 - protein, 170 aa, Setaria italica
  Transcript Sequence Number=SeqID_13315
  Gene Ontology: Mol. function=plastoquinol-plastocyanin reductase activity; Cellular component=integral to membrane; Biological process=electron transport chain
  Homolog annotation: Hit_ID=B4FSD8; Match level="QueryCoverage=71%, HitCoverage=55%, E-value=1e-45, Identity=81%"; Hit description =Cytochrome b6-f complex iron-sulfur subunit
  Pfam annotation: Domain name=CytB6-F_Fe-S; Domain location=52-90; Score=81.5; E_value=3e-21; Accession=PF08802.2; Description =Cytochrome B6-F complex Fe-S subunit
  Subcellular localization annotation: CTP_CleavageSite=42; ConfidenceScore=5.49e-01
MAASTALSTAANPTQLCRPRAASSLGKPVKGLGLGMGRRSITCQAASSIPADRVPDMEKRKLMNLLLLGAISLPTVGMVVPYGAFFIPAGSGSAGGGTYAKDKLGNDIKVDEWLKTHGPNDQVSAQLPLLLLLRLASPLSPPLLATAVTFFRERRVHRLCCMSSLTQRRS

SEQ ID NO: 79290 - protein, 108 aa, Setaria italica
  Transcript Sequence Number=SeqID_13316
  Gene Ontology: Mol. function=plastoquinol-plastocyanin reductase activity; Cellular component=integral to membrane; Biological process=electron transport chain
  Homolog annotation: Hit_ID=B4FSD8; Match level="QueryCoverage=82%, HitCoverage=40%, E-value=8e-32, Identity=78%"; Hit description =Cytochrome b6-f complex iron-sulfur subunit
  Pfam annotation: Domain name=CytB6-F_Fe-S; Domain location=57-95; Score=81.5; E_value=3e-21; Accession=PF08802.2; Description =Cytochrome B6-F complex Fe-S subunit
MFKSGSHISVCMRCARLQWQLCRPRAASSLGKPVKGLGLGMGRRSITCQAASSIPADRVPDMEKRKLMNLLLLGAISLPTVGMVVPYGAFFIPAGSGSAGGGTYAKEQ

SEQ ID NO: 79291 - protein, 73 aa, Setaria italica
  Transcript Sequence Number=SeqID_13317
YRKVAPNPAEASHLYNQYQLQSASIPQMELARSDMTDSDAFNGLEGSAPEPLMQQLSVSNFTDPHQGTALRRI

SEQ ID NO: 79292 - protein, 266 aa, Setaria italica
  misc_feature (79)..(79): Xaa can be any naturally occurring amino acid
  Transcript Sequence Number=SeqID_13318
  Gene Ontology: Mol. function=DNA binding; Biological process =regulation of transcription
LTTLSNNEPTAAQEGDPLLDVLAQLPDLQPEQTYDGFPTITSPMRPYTDHPFLGNVGGQDLSAYIDSIIAHQDLEDLLXNPSLAKTVEHPTGNFEPIPTSLLVPSSSSSNNNRSPENSWANLDTERLLLIQGADGTDAAACCSSATKILQFDTGDANHDTGPQTDSASGVSAEASHLYNQYQLQSASIPQMELARSDMTDSDAFNGLEGSAPEPLMQQLSVSNFTDPHQGTALRRIRLVHSIQRASVTEPVTKLTKLRKGRKNRKK

SEQ ID NO: 79293 - protein, 138 aa, Setaria italica
  misc_feature (32)..(32): Xaa can be any naturally occurring amino acid
  misc_feature (108)..(108): Xaa can be any naturally occurring amino acid
  Transcript Sequence Number=SeqID_13319
  Gene Ontology: Mol. function=catalytic activity; Cellular component =peroxisome; Biological process=metabolic process
  Homolog annotation: Hit_ID=B6SV48; Match level="QueryCoverage=95%, HitCoverage=18%, E-value=2e-38, Identity=68%"; Hit description=4 -coumarate--CoA ligase 2
HFCLLYWQIAPAELEGLLLSHPEILDAVVIPXVEPLNLGGLLADYSIPFPIFVLLYLNGELYLFPRFPDAKAGEVPIAYVVRSPVSSLTEVDVQKFIEKQVAYYKKIXRVTFVDSVPKSASGKILRRELIAKVRSSKL

SEQ ID NO: 79294 - protein, 546 aa, Setaria italica
  Transcript Sequence Number=SeqID_13320
  Gene Ontology: Mol. function=catalytic activity; Cellular component =peroxisome; Biological process=metabolic process
  Homolog annotation: Hit_ID=B6SV48; Match level="QueryCoverage=89%, HitCoverage=95%, E-value=0.0, Identity=84%"; Hit description=4 -coumarate--CoA ligase 2
  Pfam annotation: Domain name=AMP-binding; Domain location=61-472; Score=407.6; E_value=2.1e-119; Accession=PF00501.20; Description=AMP- binding enzyme
MAGTAPPAAGYGADGVYRSPRPAVRIDSNPGLSLTDLLFRRADACPSALALADAASGQTLTFAAFRSAVLTTAVALASRAGVRPGDVVLLLAPNCVLYPVCFFAVTALGAVATTANPLYTPREIAKQATDARAKLAITVSELLPKIAELRLPAILLDGDAASATASSVTLYSDLIAGAQEKEYRRPPIKQSDTAALLYSSGTTGASKGVILTHRNFISAAAMVTADQDEHGEGPNVFLCFLPMFHIFGLSVITFAQMQRGNAIVVMSRFDMDSVMAAVERYRVTYLFCVPPVMIALAKLGRAGKYDLSSLKFIGSGAAPLGKDVMEVVARNFPGTVIAQGYGMTETSGIISLEYPENGQARQFGSTGSLVSGVEAKIVDIETLKCMPPNQLGEICVRGPNIMQGYFNNVQATEFTIKEGWLHTGDIGYFDEGGQLYVVDRLKELIKYKGFQIAPAELEGLLLSHPEILDAVVIPFPDAKAGEVPIAYVVRSPVSSLTEVDVQKFIEKQVAYYKKLKRVTFVDSVPKSASGKILRRELIAKVRSSKL

SEQ ID NO: 79295 - protein, 197 aa, Setaria italica
  Transcript Sequence Number=SeqID_13321
  Homolog annotation: Hit_ID=Q9ZVF7; Match level="QueryCoverage=97%, HitCoverage=34%, E-value=2e-89, Identity=76%"; Hit description =Similar to axi 1 protein
  Pfam annotation: Domain name=DUF246; Domain location=1-148; Score= -19.5; E_value=1.9e-13; Accession=PF03138.6; Description=Plant protein family
TRPGRVIRPGAIRMNGKCPLTPLEVGLMLRGMGFSNNTAIYLASGRIYKAEKNMAPLLEMFPLLQTKETLASDEELSPFKNFSSRMAAIDYSVCVHSEVFVTTQGGNFPHFLIGHRRYLYGGHAKTIKPDKRRLAILFDSPRIGWKSLKRQLFNMRAHSDAKGIEIKRANESVYTFPCPDCMCRSNKSEHSKSIQSR

SEQ ID NO: 79296 - protein, 75 aa, Setaria italica
  Transcript Sequence Number=SeqID_13322
KGAILLVCFGLDPSACCCAADCLGACLRSACLASSNSGVKVSWMVSVVWVPRKLDSSCTARRIPPKLFHLSATDA

SEQ ID NO: 79297 - protein, 75 aa, Setaria italica
  Transcript Sequence Number=SeqID_13323
  Gene Ontology: Cellular component=plasma membrane; Biological process= protein transport
  Homolog annotation: Hit_ID=B6TFV6; Match level="QueryCoverage=97%, HitCoverage=26%, E-value=3e-26, Identity=85%"; Hit description =Charged multivesicular body protein 6
SSLYSIWTSSDHDVQKLMDDTAEAKAYQDEINAVLGEQLSAEDEEAVMTEFENLEAQLAVESLPDAPVTEVRPPS

SEQ ID NO: 79298 - protein, 131 aa, Setaria italica
  misc_feature (124)..(124): Xaa can be any naturally occurring amino acid
  Transcript Sequence Number=SeqID_13324
  Gene Ontology: Cellular component=plasma membrane; Biological process= protein transport
  Homolog annotation: Hit_ID=B6TFV6; Match level="QueryCoverage=82%, HitCoverage=39%, E-value=7e-49, Identity=94%"; Hit description =Charged multivesicular body protein 6
GLGKLSCPFNLLLVIVVLNIDDVQKLMDDTAEAKAYQDEINAVLGEQLSAEDEEAVMTEFENLEAQLAVESLPDAPVTEVRPEEKMKAPADTEAASEDIDEVIELPDVPTKAPERPQAPEKTKXLEEPLPA

SEQ ID NO: 79299 - protein, 264 aa, Setaria italica
  misc_feature (12)..(12): Xaa can be any naturally occurring amino acid
  misc_feature (28)..(28): Xaa can be any naturally occurring amino acid
  Transcript Sequence Number=SeqID_13325
  Gene Ontology: Mol. function=protein binding; Cellular component =plasma membrane; Biological process=protein transport
  Homolog annotation: Hit_ID=B6TFV6; Match level="QueryCoverage=100%, HitCoverage=93%, E-value=1e-103, Identity=76%"; Hit description =Charged multivesicular body protein 6
  Pfam annotation: Domain name=Snf7; Domain location=51-213; Score =168.6; E_value=1.9e-47; Accession=PF03357.13; Description=Snf7
  Subcellular localization annotation: CTP_CleavageSite=32; ConfidenceScore=5.09e-01
CRDRLVPVQSTXFPSSSPTPPPSRHLAXAQPRAAEMGNIFVKKPKITDVDRAILTLKTQRRKLAQFQQQLEKVIEAEKEAARQLVQQKKRDRALIALKKKKAQEELLKQVDSWQINVEQQLADIELASKQKALFESLKAGNAALKSIQNEINIDDVQKLMDDTAEAKAYQDEINAVLGEQLSAEDEEAVMTEFENLEAQLAVESLPDAPVTEVRPEEKMKAPADTEAASEDIDEVIELPDVPTKAPERPQAPRKNEVLEEPLPA

SEQ ID NO: 79300 - protein, 551 aa, Setaria italica
  Transcript Sequence Number=SeqID_13326
  Gene Ontology: Cellular component=intracellular; Biological process =intracellular protein transport
  Homolog annotation: Hit_ID=B6U266; Match level="QueryCoverage=100%, HitCoverage=88%, E-value=1e-133, Identity=49%"; Hit description =Protein transporter
  Pfam annotation: Domain name=GAT; Domain location=114-211; Score =93.5; E_value=7.5e-25; Accession=PF03127.6; Description=GAT domain
LTLLETMMKNCGEYVRFEVAEQHVLQEMVKIIQKKNDMQVRDKILLLLDSWQEAFGGPGSKYPQYHWAYLEVKTTGVVFPKRPIDAPPIFTPPATYNSSSPRYAAGSLSDRMSSDVETLSLGDLNSIRNVTDLLNDMVHALNPSDRTAVNDEIITDLVTQCRSNQQKLLQLVSSTGNEQLLKQGLEINDLLQSVLSKYDAVVSGAPLAVEAPVRETIEAPREAPAVKPSAPPEHNDTADEEEDEFAQLAQRKNKSVVSSDDALSSTGDLALVPIDPVGSESPSSIASNALVPLDPVPSSSSESKELDMINLLSLTLCSPSPETSTDSPTQSQNAPQQPTITHNQNGPQQPTVTDGQQYPSGVPQYPLNYQPHTINQGYARQNSNYVAPWAQTGAYPPQPPAYASGYGYPAPPWAAPAPPAVDSNPFLLANYQDPRPATAPVAQAATYAPPPASYPPSSMPYAPFATPQSIQHNSSVGSPPSNGLTTTQAHMNVNYQQPKDSSAASSRPYYIPDNLFSDLIDVKNLSGGNKIGGPTAMGSSNGGQPMIGGKK

SEQ ID NO: 79301 - protein, 90 aa, Setaria italica
  Transcript Sequence Number=SeqID_13327
FPLQQVLALVCYFGLHRFNQSVIVGCVLDIVSSCICLSIHRFTQWNICMNNGSNTGTFHLHAWFLLLFLPLLVTSSSVLFCVCSQFCFVW

SEQ ID NO: 79302 - protein, 156 aa, Setaria italica
  misc_feature (20)..(20): Xaa can be any naturally occurring amino acid
  Transcript Sequence Number=SeqID_13328
  Gene Ontology: Mol. function=DNA-directed RNA polymerase activity; Cellular component=cytoplasm; Biological process=transcription
  Homolog annotation: Hit_ID=B9FFW1; Match level="QueryCoverage=100%, HitCoverage=11%, E-value=8e-68, Identity=82%"; Hit description=DNA -directed RNA polymerase
RMVDEDCELLNLGDRPEKLXIVTEIAVPPVPIRPSVVVGNTRTSNEDSITAILKSIVNTNSILKETLQTGGLFSKCFDCWQQLQLQVVEFVNSDAPCLPESQHRGLVQRLKGKTGRFRGNLSGKRTEYTGRTVISPDPNLRITEVAIPVLMARVLT

SEQ ID NO: 79303 - protein, 413 aa, Setaria italica
  Transcript Sequence Number=SeqID_13329
  Gene Ontology: Mol. function=receptor activity
  Homolog annotation: Hit_ID=B6T6I2; Match level="QueryCoverage=94%, HitCoverage=95%, E-value=5e-86, Identity=50%"; Hit description=F-box domain containing protein
  Pfam annotation: Domain name=F-box; Domain location=15-62; Score =21.4; E_value=0.0038; Accession=PF00646.25; Description=F-box domain
MDRPEGSGSASASASAVGDIPEGPLVEILSRVPGKSVCRFECVSKAWLGLIADNRKKLRQAMQGLFYRTLEYPEGYDITAFELYDLEYIYSFIDLTTRSVPLDIDPGFSFLTELPEIQCLVSRNSCNGLILFENRHKIYSLPQSTLGYIVCNPTTKQWVAVPTCGSTASFTYTYLAFDPAVSSHFHLVHFKVGSNDRLVSVNIYSSETGTWSRNQIDEQEELGQSEGWRDYQVRLCMSGGVGTEGSRCAFVNGFLHLVVWDSGQPKVLAVDLQGKARRMITLPQVAYSPGCYLGQSQGLLHYTTQGFSDAHQERYQLRIWVLQDYDTQEWVLKDTLELSGENCIGNMWGFFVFNIHQDCNVVFFTKSGRELMSYDMGRKEVSVIATFEGRNHLTDAFQYVPYFSKLPALTNNH

SEQ ID NO: 79304 - protein, 95 aa, Setaria italica
  Transcript Sequence Number=SeqID_13330
  Homolog annotation: Hit_ID=B6TGI7; Match level="QueryCoverage=65%, HitCoverage=46%, E-value=1e-22, Identity=75%"; Hit description=DNL zinc finger family protein
  Pfam annotation: Domain name=zf-DNL; Domain location=34-76; Score =6.7; E_value=0.00034; Accession=PF05180.4; Description=DNL zinc finger
MCDFCKKFFFLHLGVSFPGTSFSIWLFAFMFIHIMLNFGLLLQCCGCNIFHKLVDNLNLFHEMKCYVSPDFRYEGDAPFNYLDNNEDGDTIFPLF

SEQ ID NO: 79305 - protein, 209 aa, Setaria italica
  Transcript Sequence Number=SeqID_13331
  Homolog annotation: Hit_ID=B6TGI7; Match level="QueryCoverage=63%, HitCoverage=100%, E-value=9e-62, Identity=83%"; Hit description=DNL zinc finger family protein
  Pfam annotation: Domain name=zf-DNL; Domain location=128-191; Score =121.5; E_value=2.8e-33; Accession=PF05180.4; Description=DNL zinc finger
  Subcellular localization annotation: CTP_CleavageSite=36; ConfidenceScore=5.30e-01
MESVAAAAIATTSRSLPLPFSSTPLHRRCRPVFLPVAASKRHNDDDKEVANGPGREPTSLAPYGGLSISPLSKDAAMGLVVSAATGSGWTTGSGMEGPPAASRAGGADRPEVSTLPWSLFTKSPRRRMRVAFTCNVCGQRTTRAINPHAYTDGTVFVQCCGCNIFHKLVDNLNLFHEMKCYVSPDFRYEGDAPFNYLDNNEDGDTIFPL

SEQ ID NO: 79306 - protein, 84 aa, Setaria italica
  misc_feature (27)..(27): Xaa can be any naturally occurring amino acid
  Transcript Sequence Number=SeqID_13332
SWSDPVRCVDCRHIYEKGPVFHYIRSXKPPQCPIAGCPRVLQIGKVVCDPLLLIEIDELRSSGPAAPNATNIDDFTDLLDEDDE

SEQ ID NO: 79307 - protein, 173 aa, Setaria italica
  misc_feature (133)..(133): Xaa can be any naturally occurring amino acid
  Transcript Sequence Number=SeqID_13333
  Gene Ontology: Mol. function=ubiquitin thiolesterase activity
  Homolog annotation: Hit_ID=Q2R140; Match level="QueryCoverage=93%, HitCoverage=6%, E-value=3e-15, Identity=34%"; Hit description =Retrotransposon protein, putative, unclassified
  Pfam annotation: Domain name=DUF594; Domain location=91-155; Score =76.6; E_value=9e-20; Accession=PF04578.5; Description=Protein of unknown function, DUF594
NRQVATTLSGYAAYLVVSRPELLPDNIEGTKRVYSDTKDELKDVLGGCWRYHVSQQGTRFDKLVEVAERPEEETAAAAAAVVRKGAKLGNKLMQMAEAGRGEDQVWELLADLWMELTVYLAPSSGELHVKAHXDRLALGGEFITVLWALCTHTGITRPAVAPWEATAGVSCHP

SEQ ID NO: 79308 - protein, 250 aa, Setaria italica
  Transcript Sequence Number=SeqID_13334
MDEDWELLLASPKAAAAAEPYAGGGGEDDAGAIKHDYFDLGSDAKYPRRTSLSKEDEEEEEEEVEGLLAASDNASWVEPDPDDLLFPGRDRAALWSDSSSDGERPEVEVTEPVERARAEAGAAAAAAAAEAEAEGAEGAVAKGGGPEPWWKLPLDALRVWALRAARSAWSVPFAVALLGFAVLGRRLYRMRRQSKAVGRVRLVLDEKKASQFKGQASRLKESTAMLRRAPIIKPMLPANAVTPWPVLGHL

SEQ ID NO: 79309 - protein, 45 aa, Setaria italica
  Transcript Sequence Number=SeqID_13335
LDCSVMWHYIYLCKYNDTNLMPSPLLYRVVVLAQVNVMHMTEQSS

SEQ ID NO: 79310 - protein, 106 aa, Setaria italica
  Transcript Sequence Number=SeqID_13336
  Subcellular localization annotation: CTP_CleavageSite=64; ConfidenceScore=5.71e-01
PAAGIADLDLPFTAPPSPSLVASFLSAPPSSSGPSPATSIHQVRPLPFRSLPSPLRETEHPKPYCKQPVSGSDPITCACYPLISTIRPLAAQDPERATTSPAIRHD

SEQ ID NO: 79311 - protein, 244 aa, Setaria italica
  Transcript Sequence Number=SeqID_13337
  Gene Ontology: Mol. function=oxidoreductase activity; Biological process=oxidation reduction
  Homolog annotation: Hit_ID=B9RYX6; Match level="QueryCoverage=99%, HitCoverage=69%, E-value=5e-97, Identity=65%"; Hit description=1 -aminocyclopropane-1-carboxylate oxidase, putative
  Pfam annotation: Domain name=2OG-FeII_Oxy; Domain location=95-194; Score=174.0; E_value=4.2e-49; Accession=PF03171.12; Description=2OG -Fe(II) oxygenase superfamily
ERLKCYSDDPKKAIRLSTSFNVRTEKVSNWRDFLRLHCYPLESFIEQWPSNPPSFREVVGTYATEARALALRLLEAISESLGLERSHMVAAMGRQAQHMAVNYYPPCPQPELTYGLPGHKDPNAITLLLQDGVSGLQVQRDGRWVAVNPVPNALVINIGDQLQALSNDRYKSVLHRVIVNSESERISVPTFYCPSPDAVIAPAGALVDDAHPLAYRPFTYQEYYDEFWNMGLQSASCLDRFRPG

SEQ ID NO: 79312 - protein, 44 aa, Setaria italica
  Transcript Sequence Number=SeqID_13338
NGKESELPTAKFKSMTIPSCVHKAAKDQCLLGLSTTSLTKCCCS

SEQ ID NO: 79313 - protein, 111 aa, Setaria italica
  Transcript Sequence Number=SeqID_13339
  Gene Ontology: Mol. function=Rab GTPase activator activity; Cellular component=intracellular; Biological process=regulation of Rab GTPase activity
MAEQERRRFANLRSVRWRVDLGILPASPEASVDELRRATADSRRRYVSLRRRLMVDPHLPKEEDRSSNLVVDNPLSQNPDSSWGRFFRGAELEKTVDQDLSRLYPEDGSYF

SEQ ID NO: 79314 - protein, 134 aa, Setaria italica
  Transcript Sequence Number=SeqID_13340
  Gene Ontology: Mol. function=ATP-dependent peptidase activity; Cellular component=chloroplast; Biological process=ATP-dependent proteolysis
  Homolog annotation: Hit_ID=B6SMG8; Match level="QueryCoverage=100%, HitCoverage=46%, E-value=2e-53, Identity=79%"; Hit description =Peptidase S16, lon
RVARVVRTKPYLVAAVQWLEDRPPAEAPAPAEDAEALAADVEALMRDVIRIANRLNGKPEKEVGDLRRGLFPTPFSFYVGNTFEGAPREQQALLELEDTAARLRRERDTLRNTLNYLTAASAVKDAFPSSPSSG

SEQ ID NO: 79315 - protein, 132 aa, Setaria italica
  misc_feature (120)..(120): Xaa can be any naturally occurring amino acid
  Transcript Sequence Number=SeqID_13341
  Gene Ontology: Mol. function=quinolinate synthetase A activity; Biological process=NAD biosynthetic process
  Homolog annotation: Hit_ID=Q94IP8; Match level="QueryCoverage=97%, HitCoverage=57%, E-value=3e-35, Identity=55%"; Hit description =Possible quinolinate synthetase A (Fragment)
DQARFNKVGVYRMSSEQIGCSLADAASSSEYTHFLREASGSYPSLHVIYINTSLETKAHAHELVPTITCTSSNVVPTILQAFAQIPDLTVWYGPDSYMGANIADLFQRMATMSDEEIAKXHRDHNRKSISSL

SEQ ID NO: 79316 - protein, 222 aa, Setaria italica
  Transcript Sequence Number=SeqID_13342
  Gene Ontology: Cellular component=integral to membrane
  Homolog annotation: Hit_ID=Q10RR9; Match level="QueryCoverage=43%, HitCoverage=26%, E-value=9e-11, Identity=39%"; Hit description =UPF0496 protein 3
LALIPHSPQLAVAHCDCAFDAFLLFDQMPNPFPAPAAGFQGMHQSFAGLKEHLDLRLLSVRRRRRWLRCAKRGSGICLIACATGAAIAGLVLATHAITALLATAPACAASSSSCCPLAASMKRLQKHMDRLDATARGTYVLNNDVATIERLVGRLHATVESDKMLVRLGLERGRGQHHTIEEVVRQLRKNHPSLLRQLADLEEHICLYFAAVNRARMITVAL

SEQ ID NO: 79317 - protein, 66 aa, Setaria italica
  misc_feature (19)..(19): Xaa can be any naturally occurring amino acid
  misc_feature (26)..(26): Xaa can be any naturally occurring amino acid
  Transcript Sequence Number=SeqID_13343
MWEKMANCIRKVTSEVLGXSRGVEAXDKDTWWWNEEVQRAIKEKKECYRCLFHDRSVDNIEKYKEA

SEQ ID NO: 79318 - protein, 138 aa, Setaria italica
  misc_feature (113)..(113): Xaa can be any naturally occurring amino acid
  Transcript Sequence Number=SeqID_13344
  Gene Ontology: Mol. function=RNA-directed DNA polymerase activity; Biological process=RNA-dependent DNA replication
  Homolog annotation: Hit_ID=Q2HVM1; Match level="QueryCoverage=76%, HitCoverage=20%, E-value=5e-13, Identity=38%"; Hit description=RNA -directed DNA polymerase (Reverse transcriptase)
ILPSAPPVPSQQIRSVVFSALGRKEGEDANNTWEKMANCIRKVVSEVLGVTKGGRGVDKDTWWWNEEVQRTIKEKKECYKRLFHDRSVDNIEKYKEAKKIAKQAVSAVKGRAXNEDLYQRLGTKEGEKDIYRMARVRE

SEQ ID NO: 79319 - protein, 161 aa, Setaria italica
  misc_feature (114)..(114): Xaa can be any naturally occurring amino acid
  misc_feature (119)..(119): Xaa can be any naturally occurring amino acid
  Transcript Sequence Number=SeqID_13345
  Gene Ontology: Mol. function=RNA-directed DNA polymerase activity; Biological process=RNA-dependent DNA replication
  Homolog annotation: Hit_ID=Q2HVM1; Match level="QueryCoverage=85%, HitCoverage=26%, E-value=7e-44, Identity=62%"; Hit description=RNA -directed DNA polymerase (Reverse transcriptase)
NENTTLQLDDSFDDTNKHFVRKIQESEVRETLKRMKSGKAMSPDGIPIKVWRCLGDIAIVWLTKLFNHIFRSNKMPEEWRSILVPIYKNKGDIQSCTNYRGIKLMSHTMKLWKXIEHRXLTRITRVSMNQFGFMPGRSTMEGIFLIRQAMERRLLKKEPNN

SEQ ID NO: 79320 - protein, 262 aa, Setaria italica
  misc_feature (187)..(187): Xaa can be any naturally occurring amino acid
  Transcript Sequence Number=SeqID_13346
  Gene Ontology: Mol. function=RNA-directed DNA polymerase activity; Biological process=RNA-dependent DNA replication
  Homolog annotation: Hit_ID=Q2HVM1; Match level="QueryCoverage=96%, HitCoverage=45%, E-value=1e-53, Identity=46%"; Hit description=RNA -directed DNA polymerase (Reverse transcriptase)
VGNEEVQRTIKEKKECYRRLFHDRSVNNIEKYKEAKKIAKRAVSVVKGRAYEDLYQRLGTKEGEKDIYRMAKVRERKTRDFNQVKCIKDEMENILVKEDEIKHRWQEYFDKLFNGENENTTLQLDDSFDDTNRHFVRKIQESEVGEALKRMKSSKVIGSDGIPIKEWRCLGDIAIVWLTKLFNHIYXEQDAERVPIYKNKGDIQSCTNYRGIKLMSRTMKLWERVIEHRLRMITRVSMNQFAFMPGRSTMEAIFLMTSYGVV

SEQ ID NO: 79321 - protein, 91 aa, Setaria italica
  Transcript Sequence Number=SeqID_13347
  Pfam annotation: Domain name=Tryp_alpha_amyl; Domain location=31-91; Score=18.0; E_value=0.0064; Accession=PF00234.14; Description =Protease inhibitorseed storageLTP f
  Subcellular localization annotation: CTP_CleavageSite=17; ConfidenceScore=5.53e-01
MVARVMPFWLLAAVLVAAASAQSSGSGGSDCTSALVSLSPCMDYISGNGSSSPSASCCSQLKSVVQSKPQCLCAAIGGGASSSLGGVTIDR

SEQ ID NO: 79322 - protein, 252 aa, Setaria italica
  Transcript Sequence Number=SeqID_13348
  Gene Ontology: Mol. function=calcium ion binding; Cellular component =intracellular; Biological process=guanosine tetraphosphate metabolic process
  Homolog annotation: Hit_ID=Q9AYT4; Match level="QueryCoverage=100%, HitCoverage=43%, E-value=1e-131, Identity=88%"; Hit description =Chloroplast RelA homologue 2
  Pfam annotation: Domain name=RelA_SpoT; Domain location=161-252; Score=72.9; E_value=1.2e-18; Accession=PF04607.9; Description=Region found in RelA  SpoT proteins
MRDVKAQIGISTAHLLHESLRLKHAPSKLDVLDDESASALRKFCLTYYDIRAVILELALKLDIMRHLDELPKYLQRIKSLEVMKIYAPLAHAVGAGNLSLELEDLSFRYMFPHSYDHVDQWLRSQESECKALINLYKEQLLQALKADDELNRIVLDISVQGRYKSRFSTMKKLVKDGRKPEEVKDILALRVILEPRCDGNSSDWGPRACHRTHEIIQALCKEVPGRTKDYISRPKENGYQSLHVAIDVSEPG

SEQ ID NO: 79323 - protein, 666 aa, Setaria italica
  Transcript Sequence Number=SeqID_13349
  Gene Ontology: Mol. function=two-component response regulator activity; Cellular component=nucleus; Biological process=two -component signal transduction system (phosphorelay)
  Homolog annotation: Hit_ID=B9SBZ1; Match level="QueryCoverage=82%, HitCoverage=83%, E-value=1e-107, Identity=44%"; Hit description=Two -component system sensor histidine kinase/response regulator, putative
  Pfam annotation: Domain name=Myb_DNA-binding; Domain location=220 -270; Score=49.2; E_value=1.6e-11; Accession=PF00249.23; Description =Myb-like DNA-binding domain
  Pfam annotation: Domain name=Response_reg; Domain location=29-140; Score=92.8; E_value=1.2e-24; Accession=PF00072.16; Description =Response regulator receiver domain
  Pfam module annotation: Pfam domain module=Myb_DNA-binding::Response _reg; Domain location=220-270::29-140
MLLGAARMEEKKGLMMGRERDRFPVGMRVLAVDDDPVCLKVLETLLRRCHYHVTTTNQAITALKLLRENRDMFDLVISDVHMPDMDGFKLLELVGLEMDLPVIMLSVNGETKSVMKGITHGACDYLLKPVRIEELRNIWQHVVRRKFSKRERSNLEIYKDFNKPPSADSCHGHSQIVGGASDQSGRICKKRKEMHSDEEDDGEENDLQEGDEPSAAKKPRVVWSVELHRKFVAAVNQLGIDKAVPKRILELMNVEKLTRENVASHLQKYRLYLKRLSAVASQQASIVAAFGGRDPSFLHMGAFEGIQSYQPFVPSAALSSFNPHGLLTGASAATFGVQELAPAMTVQTATNNGIISHCGSDGSKFQYVGLQENQHANLAQGSTTSLGLPQLEQKWIHQENNDLSTVFSGSALANSLSGALQRVTSSSLPPQELLECTQAKLSIQTSMPMPSMNSELVERTIGISCNLQDSSVSHQGALPINEGFSADKLQLHDPFDGTSGTKFSVTMPVCPSGSLTATNNTKSGASSSCGTVLLAPDTGRHSNYMQFGGASNSRREMDGMKQDHLQNQGLSIGGFSHDFGACMTQQTNASMLPLTPEVKIHSLTSEDKLKQKNVCDFGIPKLHGGVSSTSCNFDGLLSSMIKAEKDDFSFTDNDLGCDFFPLGACI

SEQ ID NO: 79324 - protein, 78 aa, Setaria italica
  Transcript Sequence Number=SeqID_13350
  Gene Ontology: Mol. function=nucleoside-triphosphatase activity; Biological process=small GTPase mediated signal transduction
  Homolog annotation: Hit_ID=Q9FK38; Match level="QueryCoverage=96%, HitCoverage=15%, E-value=2e-23, Identity=67%"; Hit description=DNA repair protein-like
EFPIPNDVAFIGEIGLGGELRSVPRMDKRVMAIAKLGYKKCVVPKTSEKLLKPLKLDIEILPCSNLKQFINAIFRPQD

SEQ ID NO: 79325 - protein, 175 aa, Setaria italica
  misc_feature (30)..(30): Xaa can be any naturally occurring amino acid
  misc_feature (134)..(134): Xaa can be any naturally occurring amino acid
  Transcript Sequence Number=SeqID_13351
  Gene Ontology: Mol. function=RNA-directed DNA polymerase activity; Biological process=RNA-dependent DNA replication
  Homolog annotation: Hit_ID=Q8W0U6; Match level="QueryCoverage=99%, HitCoverage=93%, E-value=1e-57, Identity=62%"; Hit description =Putative GAG-POL
SFNILYAETLDAMGMDRSRLRPSKAPFHGXVPGKQAMPLGQIDLPVTFGTPSNYRKEVLTFEVVGFRGTYHAILGRPCYAKFIAIPNYTYLKLKLPGPNGVITVGTSFQKAYECDVECCEYAAAITFTEELAVXLAEGAEKQPDSKQSATSFEATEGVKEVLLDPSSSDGRTVRI

SEQ ID NO: 79326 - protein, 315 aa, Setaria italica
  misc_feature (12)..(12): Xaa can be any naturally occurring amino acid
  misc_feature (144)..(144): Xaa can be any naturally occurring amino acid
  Transcript Sequence Number=SeqID_13352
  Pfam annotation: Domain name=PHD; Domain location=45-101; Score=19.5; E_value=0.00019; Accession=PF00628.21; Description=PHD-finger
CGVRFPMPQPGXAKPKRRPVRPLSSLWRIVLLCAECLSLVRSAAVCSYCLSLDNPPPEDSTVSCRRCKHSVHQSCIPAEHRTSLIQPVEVEDFLCVDCYPTVRPKIGGFNLGLNLEGYPRDPTSVAGGDILKSPSKGVRKALAXSVCGRGSGDPVLLDEDLALQLHLAMNGSQRISRSGNSCSGASTGPGKGKNGVVAGRDGNGNQEICITNVMAQLGDEEPGSNRVLKCFRRSDSFVTVVLALECVKGKHGEESMKAKRKGPSVTLQQDDLVNCYKKKYSKRSSIKQEKVEYISSRTMCDGKDMDGDHGVAPMK

SEQ ID NO: 79327 - protein, 263 aa, Setaria italica
  Transcript Sequence Number=SeqID_13353
  Gene Ontology: Mol. function=nucleic acid binding; Cellular component= intracellular
  Homolog annotation: Hit_ID=B9S3N2; Match level="QueryCoverage=85%, HitCoverage=46%, E-value=7e-63, Identity=55%"; Hit description=RNA binding protein, putative
  Pfam annotation: Domain name=RRM_1; Domain location=53-131; Score =40.7; E_value=5.7e-09; Accession=PF00076.14; Description=RNA recognition motif. (a.k.a. RRM, RBD, o
  Pfam annotation: Domain name=zf-RanBP; Domain location=180-211; Score= 34.5; E_value=4.1e-07; Accession=PF00641.10; Description=Zn-finger in Ran binding protein and others
  Pfam module annotation: Pfam domain module=RRM_1::zf-RanBP; Domain location=53-131::180-211
RIHWLNFSHTEDLCCSQPTDKPFRTVHRRRRLELAFWFKMAGYMSRGPPNGSVYVCNLPPGTDETMLAEYFGTIGLLKKDKRTGRPKIWIYRDKVTNEPKGDATVTYEDPHAASAAVDWFNNKDFHGSIIQVHIAESKGKDTFDSSTNLAITADLGRQDLDNGVGRGRGSGDGPGKAWQQDGDWMCPNTSCGNVNFAFRGVCNRCGAARPAGVGGATGGGVGRGRGRGSTDARGSSRAGAAAAVGGPPGLFGPNDWTCPMCGN

SEQ ID NO: 79328 - protein, 38 aa, Setaria italica
  Transcript Sequence Number=SeqID_13354
YYEILVEDVKRIEAGKVPFPAYRCPGGGAPANMTMGGY

SEQ ID NO: 79329 - protein, 248 aa, Setaria italica
  Transcript Sequence Number=SeqID_13355
  Gene Ontology: Mol. function=protein serine/threonine kinase activity; Cellular component=integral to plasma membrane; Biological process=protein amino acid phosphorylation
  Homolog annotation: Hit_ID=B9RKQ3; Match level="QueryCoverage=99%, HitCoverage=36%, E-value=1e-101, Identity=67%"; Hit description=ATP binding protein, putative
  Pfam annotation: Domain name=Pkinase; Domain location=1-222; Score =10.8; E_value=3.9e-09; Accession=PF00069.17; Description=Protein kinase domain
  Pfam annotation: Domain name=Pkinase_Tyr; Domain location=1-222; Score=-23.4; E_value=3.6e-12; Accession=PF07714.9; Description =Protein tyrosine kinase
  Pfam module annotation: Pfam domain module=Pkinase::Pkinase_Tyr; Domain location=1-222::1-222
HHKNLVSLVGYCLYGEQRLLVYEYVPNKTLEFHLHGSSRPTLDWPRRWKIAVGSAKGLAYLHEDCHPKIIHRDIKAANILLDYNYEPKVADFGLARYQAAEVTAVSTRIMGTFGYLAPEYAATGKVSDRSDVFSFGVMLLELITGRKPIMTSSAYQPETLVSWARPLLTRAVEEENYDELIDPRLETNYDAYDMARLIACAAAAVRQTARSRPRMTQIVRYLEGELSVEDLNAGVRPGQSALRQAGGG

SEQ ID NO: 79330 - protein, 113 aa, Setaria italica
  misc_feature (14)..(14): Xaa can be any naturally occurring amino acid
  misc_feature (32)..(32): Xaa can be any naturally occurring amino acid
  Transcript Sequence Number=SeqID_13356
FFLGFFSFTGFPNXLTKLTLFHVGFPDGPRGXLEALISVSPLLEKLSLLFLEVPCSNDEYLQWAIQAPKLQYLLIDELRDYVWQTNDLPSLEEAQIHAAMYSTHRDVIKLMTG

SEQ ID NO: 79331 - protein, 76 aa, Setaria italica
  Transcript Sequence Number=SeqID_13357
  Gene Ontology: Mol. function=pyridoxal phosphate binding
  Homolog annotation: Hit_ID=B6UF40; Match level="QueryCoverage=90%, HitCoverage=13%, E-value=1e-32, Identity=92%"; Hit description =Aminotransferase y4uB
LVKQDVIHSQSNKLGSFAHGFTYSGHPVACAVAIEALKIYRERDIPGHVKQIAPKFQDGIRAFADSPIIGEVRLYF

SEQ ID NO: 79332 - protein, 89 aa, Setaria italica
  Transcript Sequence Number=SeqID_13358
  Gene Ontology: Mol. function=pyridoxal phosphate binding
  Homolog annotation: Hit_ID=B6T579; Match level="QueryCoverage=69%, HitCoverage=12%, E-value=5e-26, Identity=91%"; Hit description =Aminotransferase y4uB
CQSQRKPCRVICIAVVKSISLWLVISGVGAIFGAECEKRGMLIRVAGDSIMLSPPLIMTPGEVEEIISKFGHALKATEERISELKSKKI

SEQ ID NO: 79333 - protein, 149 aa, Setaria italica
  misc_feature (36)..(36): Xaa can be any naturally occurring amino acid
  Transcript Sequence Number=SeqID_13359
  Gene Ontology: Mol. function=pyridoxal phosphate binding
  Homolog annotation: Hit_ID=B6T579; Match level="QueryCoverage=98%, HitCoverage=28%, E-value=2e-72, Identity=91%"; Hit description =Aminotransferase y4uB
RSFAHGFTYSGHPVSCAVAIETLKIYKERNIVEHVXKIAPRFQEGIKAFSGSPIVGEIRGQGLILGTEFVDNKSPNDPFPAEWGVGAIFGAECEKRGMLIRVAGDSIMLIMLSPPLIMTPGEVEEIISKFGHALKATEERISELKSKKI

SEQ ID NO: 79334 - protein, 119 aa, Setaria italica
  Transcript Sequence Number=SeqID_13360
  Gene Ontology: Mol. function=pyridoxal phosphate binding
  Homolog annotation: Hit_ID=B6T579; Match level="QueryCoverage=93%, HitCoverage=21%, E-value=5e-52, Identity=89%"; Hit description =Aminotransferase y4uB
LTLHLIAVRERNIVEHVNKIAPRFQEGIKAFSGSPIVGEIRGQGLILGTEFVDNKSPNDPFPAEWGVGAIFGAECEKRGMLIRVAGDSIMLSPPLIMTPGEVEEINKQIRPCLKATEER

SEQ ID NO: 79335 - protein, 512 aa, Setaria italica
  Transcript Sequence Number=SeqID_13361
  Gene Ontology: Mol. function=pyridoxal phosphate binding
  Homolog annotation: Hit_ID=B6UF40; Match level="QueryCoverage=99%, HitCoverage=99%, E-value=0.0, Identity=94%"; Hit description =Aminotransferase y4uB
  Pfam annotation: Domain name=Aminotran_3; Domain location=82-437; Score=319.9; E_value=5.4e-93; Accession=PF00202.13; Description =Aminotransferase class-III
  Subcellular localization annotation: CTP_CleavageSite=49; ConfidenceScore=5.06e-01
MMIARRLLRSNASAQASSLVKYVTSTASLQGHTECLPDASVRHFSSAPSAQSDSTEENGFKGHGMLAPFTAGWQSNELHPLIIERSEGSYVYDINGNKYLDSLAGLWCTALGGSEPRLVKAATDQLNKLPFYHSFWNRTTRPSLDLAQEILSMFTAREMGKVFFTNSGSEANDSQVKLVWYYNNALGRPNKKKFIARTKAYHGSTLISASLTGLPALHQKFDLPAPFVLHTDCPHYWRYHLPGETEEEFATRLATNLENLILKEGPETIAAFIAEPVMGAGGVIPPPKTYFDKVQAVVKKYDILFIADEVITAFGRLGTMFGSDYYNIKPDLVSLAKALSNAYVPIGATLVSPEISDVIHSQSNKLGSFAHGFTYSGHPVACAVAIEALKIYRERDIPGHVKQIAPKFQDGIRAFADSPIIGEIRGLGMIMGTEFTNNKSPTDLFPAEWGVGAIFGQECQKRGMLVRVAGDAIMMSPTLIMTPGEVDELVSIYGEALKATEARVAELKSKKN

SEQ ID NO: 79336 - protein, 80 aa, Setaria italica
  Transcript Sequence Number=SeqID_13362
LNKPARPGGRRHRKRQGLRRRRRSRSAYARHAQHSTTPLRAWAEEEELLPQCATATSVEEKQLVMASEGEGWLRYDGRHD

SEQ ID NO: 79337 - protein, 123 aa, Setaria italica
  misc_feature (38)..(38): Xaa can be any naturally occurring amino acid
  Transcript Sequence Number=SeqID_13363
  Subcellular localization annotation: CTP_CleavageSite=40; ConfidenceScore=5.68e-01
PPPIPNPFVPIQAHLTSFLSSLPRALPPPPPWARIPCXSSASATASASTALRVTEIEERLAGVPVYALANAAQEFVLVSSAREGGQGGDGARQPPALGLLCFRKEDADALLEQMEGDMRAGSS

SEQ ID NO: 79338 - protein, 386 aa, Setaria italica
  misc_feature (375)..(375): Xaa can be any naturally occurring amino acid
  Transcript Sequence Number=SeqID_13364
  Gene Ontology: Mol. function=metallopeptidase activity; Cellular component=plasma membrane; Biological process=proteolysis
  Homolog annotation: Hit_ID=Q6K4E7; Match level="QueryCoverage=100%, HitCoverage=44%, E-value=0.0, Identity=83%"; Hit description =Putative puromycin-sensitive aminopeptidase
  Pfam annotation: Domain name=DUF2268; Domain location=150-269; Score=- 27.5; E_value=0.029; Accession=PF10026.1; Description=Predicted Zn -dependent protease (DUF226
  Pfam annotation: Domain name=Peptidase_M1; Domain location=1-308; Score=441.5; E_value=1.3e-129; Accession=PF01433.12; Description =Peptidase family M1
  Pfam module annotation: Pfam domain module=DUF2268::Peptidase_M1; Domain location=150-269::1-308
LVLGFDRELPIGEGVLTMDFTGTLNDQMRGFYRSKYVYNGESRNMATTQFEAADARRCFPCWDDPAFKAKFKLTLEVPSDLVALSNMPVVKETVSGPTKTVYYEESPLMSTYLVAIVVGLFDYIESSTSEGTKVRVYTQVGKTNQGKFALDVAVKSLDLYKDYFATPYPLPKLDMIAIPDFAAGAMENYGLVTYRDTALLYDELLSSASNKQQVAITVAHELAHQWFGNLVTMEWWTHLWLNEGFASWVSYLAVESLFPEWNNWTQFLDETTSGLRLDALAESHPIEVEVNHASEIDAIFDSISYDKGASVIRMLQSYLGAERFQKALASYIKKYAYSNAKTEDLWAVLEEESGEPVKDLMTTWTKQQGYPVIYXKLNGHDLELEQ

SEQ ID NO: 79339 - protein, 562 aa, Setaria italica
  Transcript Sequence Number=SeqID_13365
  Gene Ontology: Mol. function=metallopeptidase activity; Cellular component=plasma membrane; Biological process=proteolysis
  Homolog annotation: Hit_ID=Q6K4E7; Match level="QueryCoverage=98%, HitCoverage=63%, E-value=0.0, Identity=67%"; Hit description =Putative puromycin-sensitive aminopeptidase
NKTMEWWTIPLLNSLPRKQNPHLAVESLFPEWNNWTQFLDETTSGLRLDALAESHPIEVEVNHASEIDAIFDSISYDKGASVIRMLQSYLGAERFQKALASYIKKYAYSNAKTEDLWAVLEEESGEPVKDLMTTWTKQQGYPVIYAKLNGHDLELEQAQFLSDGSSGPGMWIVPITSCSGSYDAQKKFLLKDKTDKIHIKEFTASQSSDGEKGENIWIKLNIDQTGFFRVKYDDELAAGLVNAIKTKKLSLMDKIGIVEDSYALSVARKQTLTSLLRLLNAYHDESDYTVLSHVTSVCLSISTISVDATPDLNKDIKQLLINLLLPTAIKLGWDPKDGESHLDVMLRSLLLIALVRLGHNETINEGVRRFHIFFEDRKTSLLPPDTRKAAYLAVMRTVSTSKRSGYDALLKIYREAAEPQEKSRVLGSLSSSPDKDIVLEALNFIFTDEVRNQDSYYILGGISLEGREVAWTWLKKNWDHVLKTWKSSSLISDFINSIISPFTSEEKAAEVSEFFAGRIKPSFQRALKQSLERVRISARWIESIRSEPSLGQTVQELLQAGA

SEQ ID NO: 79340 - protein, 180 aa, Setaria italica
  Transcript Sequence Number=SeqID_13366
  Gene Ontology: Mol. function=metal ion binding; Cellular component =nuclear matrix; Biological process=oxygen transport
  Homolog annotation: Hit_ID=Q3S3T0; Match level="QueryCoverage=86%, HitCoverage=81%, E-value=7e-75, Identity=89%"; Hit description=Non -symbiotic hemoglobin 2
  Pfam annotation: Domain name=Globin; Domain location=30-140; Score =80.0; E_value=8.5e-21; Accession=PF00042.14; Description=Globin
MEAAGAEKDANPSMSKPADATATGVFGEEQEALVLGAWNAMKGDSASLALKFFLRIFEIAPGAKQMFSFLRDAVDAPLENHPKLKAHAVSVFVMACESATQLRNTGDVKVREAALKRLGATHVKAGVADAHFEVVKTALLDTIRDAVPDMWTPEMKAAWEEAYDQLAAAIKEEMKNAAAA

SEQ ID NO: 79341 - protein, 150 aa, Setaria italica
  Transcript Sequence Number=SeqID_13367
  Gene Ontology: Mol. function=zinc ion binding; Biological process=DNA integration
  Homolog annotation: Hit_ID=Q10NX3; Match level="QueryCoverage=98%, HitCoverage=55%, E-value=5e-49, Identity=55%"; Hit description=FAR1 family protein, expressed
  Pfam annotation: Domain name=FAR1; Domain location=50-143; Score =130.6; E_value=5.1e-36; Accession=PF03101.7; Description=FAR1 family
ELDSLTELPRSMETLVAHHHEVEKLIGLEDDTELTPCEGMEFESEDAARDFYSTYARNAGFRIRISRYTRSRRDNSIISRRIVCSKEGFHETRACDGLHSDQKQQERAGTRVGCKAMIMIKKFGPGKWMVTKFVKNHNHGPVPPRKLDSG

SEQ ID NO: 79342 - protein, 125 aa, Setaria italica
  Transcript Sequence Number=SeqID_13368
  Subcellular localization annotation: CTP_CleavageSite=57; ConfidenceScore=5.01e-01
ASIDQLYVYKLNIKTMSSSDSFITQCSIAIKQSQTVRGRRIDSSSLTMHGEPNLMTSVHHRGSLPVSAVPINPLTCVGPTSLGARFHRPGLCHSVTTLATTCGRRGTSFQRQWIKPLTSRFNQVL

SEQ ID NO: 79343 - protein, 89 aa, Setaria italica
  Transcript Sequence Number=SeqID_13369
VMHLWFQTTPIRKCTSMLKKACASLVKHRGFMHPGLAFEQGGRELLVFFGSFGFWKQELSYTVVFWRRVQLIVAVSETQLYTNATHWLA

SEQ ID NO: 79344 - protein, 78 aa, Setaria italica
  Transcript Sequence Number=SeqID_13370
  Gene Ontology: Cellular component=exocyst; Biological process =exocytosis
  Homolog annotation: Hit_ID=B6U0J9; Match level="QueryCoverage=91%, HitCoverage=10%, E-value=2e-20, Identity=60%"; Hit description =Protein binding protein
VLVDICVETYASARRNFIDESIARLGVHAKLAERFKSASWEELETQIMRWIPAIRVVFHILIPSERNLCNCIFDGFTS

SEQ ID NO: 79345 - protein, 166 aa, Setaria italica
  Transcript Sequence Number=SeqID_13371
  Gene Ontology: Mol. function=transporter activity; Cellular component= membrane; Biological process=oligopeptide transport
  Homolog annotation: Hit_ID=B6TSV4; Match level="QueryCoverage=100%, HitCoverage=28%, E-value=1e-72, Identity=80%"; Hit description =Peptide transporter PTR2
GISHLQRIGTGLVLSIVAMAVAAVVEVKRKNVAADNGMLDSAKPLPISFFWIAFQYLFLGSADLFTLAGLLEFFFSEAPSRMRSMATSLSWASLALGYYLSSVLVSIVNSATAHGGHRPWLQGASLNHYHLERFYWVMCVLSTLNYLVFLFWAIRYKYRNAGVIKG

SEQ ID NO: 79346 - protein, 59 aa, Setaria italica
  misc_feature (36)..(36): Xaa can be any naturally occurring amino acid
  Transcript Sequence Number=SeqID_13372
LDRPSYVRFGFFSVAALLVYVLYSVHASYDAEESGXRRRRGKGAGRSVHGVAGHVWLTS

SEQ ID NO: 79347 - protein, 282 aa, Setaria italica
  Transcript Sequence Number=SeqID_13373
  Gene Ontology: Mol. function=catalytic activity; Cellular component =chloroplast envelope; Biological process=cellular metabolic process
  Homolog annotation: Hit_ID=Q7X998; Match level="QueryCoverage=99%, HitCoverage=69%, E-value=1e-133, Identity=80%"; Hit description=MRNA- binding protein (Fragment)
  Pfam annotation: Domain name=Epimerase; Domain location=15-234; Score= -21.9; E_value=1.7e-05; Accession=PF01370.13; Description=NAD dependent epimerasedehydratase family
  Pfam annotation: Domain name=LMWPc; Domain location=13-152; Score= -34.1; E_value=0.059; Accession=PF01451.13; Description=Low molecular weight phosphotyrosine protein phosphatase
  Pfam module annotation: Pfam domain module=Epimerase::LMWPc; Domain location=15-234::13-152
GFFPVVGRPEAKKSVLIVNTNSGGHAVIGFYFAKELLAAGHAVTVLTVGDEGSDKMKKPPFSRFSELTGAGGKTVWGDPADVGAAVSGASFDVVLDNNGKDLDAVKPVADWAKASGVGQFLFISSAGIYKPTDEPPHVEGDAVKESAGHVGVEKYIAEQFSSWASFRPQYMIGSGNNKDCEEWFFDRIVRGRPVPIPGNGMQLTNIAHVRDLSSMLALAVENPGAAAGKIFNCVSDRAVTLDGMARLCAAAAGAAVEIVHYDPAAVGVDAKKAFPFRSMHFY

SEQ ID NO: 79348 - protein, 98 aa, Setaria italica
  Transcript Sequence Number=SeqID_13374
FPSLRFLPPHRRRRPPYAPPSFLLLSDSDRPYSARIEPQAPQIGVLPLESSPKRPGSSPKRSDLAGHPLPSSPSAAVDSVLEVDKGTCQGGGRVLRGR

SEQ ID NO: 79349 - protein, 82 aa, Setaria italica
  Transcript Sequence Number=SeqID_13375
TTFFLAHISCLVLCNHIYVPFCNVWDFSFEIGGLHICFPKKILYLLYLTRFIHAVFLLDYVFFKKNTITCITVVGLHYTRVP

SEQ ID NO: 79350 - protein, 73 aa, Setaria italica
  Transcript Sequence Number=SeqID_13376
  Subcellular localization annotation: CTP_CleavageSite=53; ConfidenceScore=5.01e-01
TRRMKQSISTSSQTINLIVHLSCHMLITTETSATNFHQCPTVSFSSLLYFCPKSTEKNAPPKSQPRLPSEVNQ

SEQ ID NO: 79351 - protein, 244 aa, Setaria italica
  Transcript Sequence Number=SeqID_13377
  Homolog annotation: Hit_ID=Q7XPZ8; Match level="QueryCoverage=92%, HitCoverage=46%, E-value=4e-58, Identity=58%"; Hit description =OSJNBa0004N05.10 protein
YENAVLPHQEEEQPEEDEKHVQKTVVLPENHRYRNCSDSDDDVEDEYAEDDVYSDDGDEEEEDFMDCKIDLVDEEELITEENKQESRESLFSLSVSNDQQNDQEVSSPAPKSNGTSVDAESPLIMRNNLHDRSQYVHPVLNPVQNLSQWKEVKSQKTQAVPGKKLDKENVNLVPNVGVSQTRMSPSISGKKEVSVDASLSTWLNSSENSTAGKGQSSKSPCSISSVSRAERPVLGALTVDDLKQ

SEQ ID NO: 79352 - protein, 387 aa, Setaria italica
  Transcript Sequence Number=SeqID_13378
DSSKALQQQIIFDGQNDEHGDTNYDSDEAESRLSVLEPEDSVDEDNFAAVLSQLSNAPNPKEESEGYGESGHGMHEEKSLAESVGSLNFVVDSESVDSTPQNHDKESYSTHSATDQCSRTRTAKCSLSSEESDSISSHLAFEIDKNDPELNAHPVEDSERIYDGHVKSLDHSIQGNGETLADHPKKEGECIQKDTGTMNLHCDTLACDRESVCSSCEESRHGLNGEPSDLSSESHSGLNPTHTTGGKLPMVSEDPVNNIEPSMIGMTNDSTSEELNPEFSDTNQMEGSQSVDKPVESENIAQDSIAAQRPEDDAPKSGKGVLKSVAGGITLVGAVFFMVHLRRSKERSFTRVMPSLSEKSIQSDSRRAKNMDNEKVSDVYPGARLKV

SEQ ID NO: 79353 - protein, 56 aa, Setaria italica
  Transcript Sequence Number=SeqID_13379
KCRDPSARLFWDGVHLTEAAYRYIAAGWLNRIKSPGSDGGVTNRTTAATANVESSC

SEQ ID NO: 79354 - protein, 132 aa, Setaria italica
  Transcript Sequence Number=SeqID_13380
  Gene Ontology: Mol. function=nucleic acid binding
  Homolog annotation: Hit_ID=B6UEB5; Match level="QueryCoverage=97%, HitCoverage=22%, E-value=3e-38, Identity=62%"; Hit description =Nucleic acid binding protein
MDAWEATKVVFDRVRALDPDNASKIMGLFLIQDNSDKELIRLAFGPDHLLHAFVATARAELAAKPASPPSPVLGSPWGGVPSPGGGDHQSPFAADQVGSDSGDAFYPEGEYDCWSPASGGHRRSFSLSDAEV

SEQ ID NO: 79355 - protein, 74 aa, Setaria italica
  Transcript Sequence Number=SeqID_13381
WSHGGGCETGRGIRPRWQPGKQAYAASHVTTSCLLQMLCAELFCQLQKNFKLIIHIPIKHVYSSESTICSKTIV

SEQ ID NO: 79356 - protein, 81 aa, Setaria italica
  Transcript Sequence Number=SeqID_13382
GGGTNGLVGWLGDGMERKQTNLFCGVRGSAMITSWSHGGGCETGRGIRPRWQPGKQAYPASQEVAFFIPRWLIYSERRLKA

SEQ ID NO: 79357 - protein, 85 aa, Setaria italica
  Transcript Sequence Number=SeqID_13383
  Gene Ontology: Mol. function=catalytic activity; Biological process =metabolic process
  Homolog annotation: Hit_ID=B9RF09; Match level="QueryCoverage=80%, HitCoverage=21%, E-value=8e-18, Identity=63%"; Hit description =Phosphoglycerate mutase, putative
GRAFPRDRVIGAREECRVREQDFGNFQVEERMRAVKETRQRFGRFFFRFPEGESAADVFDRVASTIRSHLSSLLRSEPCELIANQ

SEQ ID NO: 79358 - protein, 339 aa, Setaria italica
  misc_feature (260)..(260): Xaa can be any naturally occurring amino acid
  Transcript Sequence Number=SeqID_13384
  Gene Ontology: Mol. function=catalytic activity; Biological process =metabolic process
  Homolog annotation: Hit_ID=B9RF09; Match level="QueryCoverage=77%, HitCoverage=82%, E-value=2e-99, Identity=65%"; Hit description =Phosphoglycerate mutase, putative
  Pfam annotation: Domain name=PGAM; Domain location=58-231; Score =100.8; E_value=4.7e-27; Accession=PF00300.14; Description =Phosphoglycerate mutase family
MSHDAAARHPIATPREAEEGEEGHHPGRDSVDSPSSECRFCEMTRQHHPQCARRLPKRIILVRHGESQGNLDMSAYTTTPDYRIPLTALGAEQARAAGRGIRDVVASGGGNWKVYFYVSPYARTRATLREIGRAFPRDRVIGAREECRVREQDFGNFQVEERMRAVKETRQRFGRFFFRFPEGESAADVFDRVASFLESLWRDIDMGRLDQDPSCETNLVIVSHGLTSRVFLMKWFKWTVAQFERLNNFDNCEFRVMQLXGPGGEYSLLVHHTKEELEQWGMSPEMIADQQWRASANRRSWAEECSSFIDSFFEDPKDSESSSEDEEEEKENGKIKHLE

SEQ ID NO: 79359 - protein, 80 aa, Setaria italica
  Transcript Sequence Number=SeqID_13385
HHSQLQATHISLNTSILTTKKLHTSSTLTINQLEPQHQVTNCDVRNIINQNETMAYKYGLPIMVTNTRKIPSTTQTGQQE

SEQ ID NO: 79360 - protein, 87 aa, Setaria italica
  Transcript Sequence Number=SeqID_13386
  Pfam annotation: Domain name=CHCH; Domain location=13-56; Score=14.8; E_value=0.054; Accession=PF06747.5; Description=CHCH domain
MKERKPAASSSALARILASCASQAKDYGRCIASKVPEIEHNMCSKEFLALRACMQTVVIFSANRLLLLVQLNHKVRCMYLSAQIVSK

SEQ ID NO: 79361 - protein, 124 aa, Setaria italica
  Transcript Sequence Number=SeqID_13387
  Homolog annotation: Hit_ID=Q6YWQ1; Match level="QueryCoverage=98%, HitCoverage=20%, E-value=2e-42, Identity=69%"; Hit description =Putative aluminum-activated malate transporter
  Pfam annotation: Domain name=UPF0005; Domain location=3-124; Score =1.0; E_value=5.2e-06; Accession=PF01027.12; Description =Uncharacterised protein family UPF0005
PGVGATLSKGFNRGLGTLTAGALALAVAELSKNLGKLEEVILITSIIVVAFVTTLTKLHPKMKPYEYGFRVFLLTFCYVMVSGYNTGKFTDTATSRFILIAIGAAVSLGINIGIYPIWAGEDLH

SEQ ID NO: 79362 - protein, 87 aa, Setaria italica
  Transcript Sequence Number=SeqID_13388
FHTISSSTGTFSQHVWSSRRIPELKKCDNTMGVLYNLHPKHSNQILARGPAHTMYHKNSINSQRNTILVSTYRASGEALPTFPCNIW

SEQ ID NO: 79363 - protein, 89 aa, Setaria italica
  misc_feature (9)..(9): Xaa can be any naturally occurring amino acid
  Transcript Sequence Number=SeqID_13389
  Gene Ontology: Mol. function=homoserine dehydrogenase activity; Cellular component=chloroplast; Biological process=methionine biosynthetic process
  Homolog annotation: Hit_ID=P49079; Match level="QueryCoverage=100%, HitCoverage=9%, E-value=4e-27, Identity=71%"; Hit description =Homoserine dehydrogenase
MRTLAVAGXHPGAAFTARHRRLHPSAADRDSISQRCWRCERTQDRSFGNSLRISRLPGTPHRDVGKNLLTPTAAVSVEQAEATADLPKG

SEQ ID NO: 79364 - protein, 81 aa, Setaria italica
  misc_feature (14)..(14): Xaa can be any naturally occurring amino acid
  Transcript Sequence Number=SeqID_13390
  Gene Ontology: Mol. function=transcription regulator activity; Cellular component=nucleus; Biological process=regulation of transcription
  Homolog annotation: Hit_ID=Q8GRJ1; Match level="QueryCoverage=100%, HitCoverage=19%, E-value=4e-26, Identity=74%"; Hit description =Transcription factor BHLH9-like protein
SILDEAIEYLKSLXQMQVQIMWMSTGMAPMMLPGAHQLMPPISMGLSSACMPPAAQFLSQMQRVPPFMSNPLPNQMPQISS

SEQ ID NO: 79365 - protein, 176 aa, Setaria italica
  misc_feature (24)..(24): Xaa can be any naturally occurring amino acid
  Transcript Sequence Number=SeqID_13391
  Gene Ontology: Mol. function=thiosulfate sulfurtransferase activity; Cellular component=chloroplast; Biological process=sulfate transport
  Homolog annotation: Hit_ID=Q94C43; Match level="QueryCoverage=89%, HitCoverage=51%, E-value=3e-67, Identity=74%"; Hit description =Thiosulfate transferase
  Pfam annotation: Domain name=Rhodanese; Domain location=24-144; Score= 100.9; E_value=4.3e-27; Accession=PF00581.12; Description=Rhodanese -like domain
SCPATSVSLLARRSARAQDDPVVXAQWLHQHLGAPDVKVLDASWYMPVENRNPWEEYQVAHIPGAVFFDIDAIVDRTTDLPHMLPSEEAFAAAVSALDIKNQDKVIVYDGKGFFSAPRVWWMFRVFGHNKVWVLDGGLPQWRASGFDLGSASPDDAVLKSKAASKAVERVYNSEPT

SEQ ID NO: 79366 - protein, 127 aa, Setaria italica
  misc_feature (79)..(79): Xaa can be any naturally occurring amino acid
  Transcript Sequence Number=SeqID_13392
  Gene Ontology: Mol. function=thiosulfate sulfurtransferase activity; Cellular component=chloroplast; Biological process=sulfate transport
  Homolog annotation: Hit_ID=Q94C43; Match level="QueryCoverage=87%, HitCoverage=49%, E-value=1e-37, Identity=52%"; Hit description =Thiosulfate transferase
  Pfam annotation: Domain name=Rhodanese; Domain location=24-102; Score= 20.9; E_value=0.0041; Accession=PF00581.12; Description=Rhodanese -like domain
SCPATSVSLLARRSAMAQDDPVVSAQWLHQHLGAPDVKVLDASWYMPVENRNPWEEYQVAHIPGAVFFDIDAIVDRTTXMFRVFGHNKVWVLDGGLPQWRASGFDLGSASPDDAVLKSKAASKAVER

SEQ ID NO: 79367 - protein, 142 aa, Setaria italica
  misc_feature (74)..(74): Xaa can be any naturally occurring amino acid
  Transcript Sequence Number=SeqID_13393
AETAEEGWGLDVSDDDFFMSGSSSDEEADDEWTDKSAKEPASSAGRAASGMSSDEKNQRQRDARVLMPPPRSLXAPNRARSADKRVISSSSNTSNSTSGESFKNRRVPNHPGDHNSNLSSNSDAHKPTSQRRKDNKERKKKD

SEQ ID NO: 79368 - protein, 314 aa, Setaria italica
  Transcript Sequence Number=SeqID_13394
  Homolog annotation: Hit_ID=Q015G9; Match level="QueryCoverage=39%, HitCoverage=44%, E-value=2e-11, Identity=37%"; Hit description=[S] KOG4484 Uncharacterized conserved protein
  Pfam annotation: Domain name=DUF2361; Domain location=39-146; Score =165.9; E_value=1.2e-46; Accession=PF10153.1; Description =Uncharacterised conserved protein (DU
  Subcellular localization annotation: CTP_CleavageSite=31; ConfidenceScore=5.24e-01
MAHGGYPRRGAAVRRPKSSASAAVADRKRKRAAATKTASLKNQIRSTERFLRKDLPDDVRIAQEKKLEELKRQQELQNQLAVQRTVQLRDRKIKFFERRKIERMIRRLEKQQRSNGDDVSNKLSKLREDLEYVRFFPKNEKYVSLFAGGNNADVDKWRKQIKENLMAAAANGKDLEETASDDDTLDVSDDDFFMSGSSSDEEADDEWTDKSAKEPASSAGRAASGMSSDEKNQRQRDARVLMPPPRSLAPNRARSADKRVISSSSNTSNSTSGESFKNRRVPNHPGDHNSNLSSNSDAHKPRRKRRHKKKKKLA

SEQ ID NO: 79369 - protein, 178 aa, Setaria italica
  misc_feature (11)..(11): Xaa can be any naturally occurring amino acid
  misc_feature (146)..(146): Xaa can be any naturally occurring amino acid
  Transcript Sequence Number=SeqID_13395
  Gene Ontology: Mol. function=DNA binding; Cellular component=nucleus; Biological process=regulation of transcription
  Homolog annotation: Hit_ID=B9SU87; Match level="QueryCoverage=100%, HitCoverage=18%, E-value=1e-23, Identity=34%"; Hit description =Transcription factor, putative
LETLRAIQRRXSHYQSSTSTSSPKAMKPEASQGVHGELFVDRNDDESAAQKQNAKAHNRTGFPKAALLLVDALKKNRACQKLIRRKLINIEAKIEENKDLRDRVKCLLGYQLSCRRSAGRSLSQKEDPRIRLISSRKPTQLSEKKXPALFLGPAENPRVSKYRMVLEQFPMSFKKQPW

SEQ ID NO: 79370 - protein, 86 aa, Setaria italica
  Transcript Sequence Number=SeqID_13396
  Gene Ontology: Mol. function=magnesium ion binding; Cellular component=chloroplast; Biological process=photosynthesis, light harvesting
  Homolog annotation: Hit_ID=B6SZ37; Match level="QueryCoverage=73%, HitCoverage=23%, E-value=4e-26, Identity=88%"; Hit description =Chlorophyll a-b binding protein 4
  Pfam annotation: Domain name=Chloroa_b-bind; Domain location=1-68; Score=-42.5; E_value=0.033; Accession=PF00504.13; Description =Chlorophyll A-B binding protein
MYLSDIVKPLLLPHLLQFTYFGSYPGGPLFNPLGLAKDIENAHEEKLKEIKNGSLAMAQFIGFMVQASVTHVGPIDNLLTHLSDPF

SEQ ID NO: 79371 - protein, 48 aa, Setaria italica
  Transcript Sequence Number=SeqID_13397
  Gene Ontology: Cellular component=chloroplast; Biological process =photosynthesis, light harvesting
  Homolog annotation: Hit_ID=B6SZ37; Match level="QueryCoverage=81%, HitCoverage=14%, E-value=5e-10, Identity=76%"; Hit description =Chlorophyll a-b binding protein 4
GEEPASLKWYVQAELVHCRFAMAGVAGILVTDVSYFAANLPLQPFCSY

SEQ ID NO: 79372 - protein, 264 aa, Setaria italica
  Transcript Sequence Number=SeqID_13398
  Gene Ontology: Mol. function=magnesium ion binding; Cellular component=chloroplast; Biological process=photosynthesis, light harvesting
  Homolog annotation: Hit_ID=B6SZ37; Match level="QueryCoverage=100%, HitCoverage=100%, E-value=1e-113, Identity=79%"; Hit description =Chlorophyll a-b binding protein 4
  Pfam annotation: Domain name=Chloroa_b-bind; Domain location=65-235; Score=264.6; E_value=2.2e-76; Accession=PF00504.13; Description =Chlorophyll A-B binding protein
  Subcellular localization annotation: CTP_CleavageSite=52; ConfidenceScore=5.69e-01
MASAVTGANSHGRALHTCAASSRPRALTGWSRRTLAVPAHRAPSPRARVVVRASAQRATWLPGLDPPAHLDGTLPGDYGFDPLGLGEEPASLKWYVQAELVHCRFAMAGVAGILVTDLLRVSGIRDLPVWFEAGAAKFDFANTTSLFFVQLLLMGFAETKRYMDFINPGSQAEEGTFIGLEAALVGSQPGYPGGPLFNPLGLAKDIENAHEEKLKEIKNGRLAMVAMLGFMVQASVTHVGPIDNLLTHLSDPFNKNIIHTLSSS

SEQ ID NO: 79373 - protein, 598 aa, Setaria italica
  Transcript Sequence Number=SeqID_13399
  Gene Ontology: Mol. function=AMP deaminase activity; Cellular component=integral to membrane; Biological process=purine ribonucleoside monophosphate biosynthetic process
  Homolog annotation: Hit_ID=B9T1I5; Match level="QueryCoverage=99%, HitCoverage=72%, E-value=0.0, Identity=82%"; Hit description=AMP deaminase, putative
  Pfam annotation: Domain name=A_deaminase; Domain location=142-548; Score=755.7; E_value=3.3e-224; Accession=PF00962.14; Description =AdenosineAMP deaminase
DEIEVFKILQKCLELRDSYLFREEVAPWEKEVINDPCTPKPNPNPFTYVPEPKSEHVFQMVDGVVHVYEDKDYTESIYPVADATAFFTDLHYILRVTAAGNTRTVCHNRLNLLEHKFKFHLMLNADREFLAQKTAPHRDFYNVRKVDTHVHHSACMNQKHLLRFIKSKLRKEPDEVVIFRDGTYMTLKEVFESLDLTGYDLNVDLLDVHADKSTFHRFDKFNLKYNPCGQSRLREIFLKQDNLIQGRFLAELTKQVFSDLSASKYQMAEYRISIYGRKQSEWDQLASWIVNNELYSENVVWLVQIPRLYNVYKEMGIVTSFQNLLDNIFLPLFEVTIDPASHPQLHVFLKQVVGLDLVDDESKPERRPTKHMPTPEQWTNVFNPAFSYYAYYCYANLYTLNKLRESKGMTTIKFRPHAGEAGDIDHLAATFLLCHNISHGINLRKSPVLQYLYYLGQIGLAMSPLSNNSLFLDYHRNPFPMFFQRGLNVSLSTDDPLQIHLTKEPLVEEYSIAASLWKLSSCDLCEIARNSVYQSGFSHALKAHWIGKNYFKRGPAGNDIHRTNVPHIRVQFRDMIWRNEMKLVYLNNNILISEDLDQ

SEQ ID NO: 79374 - protein, 98 aa, Setaria italica
  Transcript Sequence Number=SeqID_13400
  Homolog annotation: Hit_ID=Q5N7R8; Match level="QueryCoverage=71%, HitCoverage=15%, E-value=9e-21, Identity=72%"; Hit description =Myosin heavy chain-like
MALLQAAEAELDGAEEGAGEYQGGGGSEFMTSMDSARTEIMRVSEEVGRLKAQEKKADAQVQKLNAKLLKARSRLEALTATNERSKAIVSSLTSALQQ

SEQ ID NO: 79375 - protein, 140 aa, Setaria italica
  misc_feature (132)..(132): Xaa can be any naturally occurring amino acid
  misc_feature (138)..(138): Xaa can be any naturally occurring amino acid
  Transcript Sequence Number=SeqID_13401
  Gene Ontology: Mol. function=binding; Cellular component=plasma membrane
  Homolog annotation: Hit_ID=B7FF20; Match level="QueryCoverage=100%, HitCoverage=21%, E-value=3e-59, Identity=82%"; Hit description=ARO1 -like protein 2
QLAEQVIKWSDEAYTFRQECMELKAKVERLAGLLRQAARADLYERPARRIFDDTEKALDKALALVDKCRAHGLVRRVFTIIPAGSFKKMTNQLDNSIGDLSWLLRVSSSANDDDDFDAHIGLPPIAQNEPIXLFLIWXQI

SEQ ID NO: 79376 - protein, 93 aa, Setaria italica
  Transcript Sequence Number=SeqID_13402
  Gene Ontology: Mol. function=kinase activity
  Homolog annotation: Hit_ID=B9T6U1; Match level="QueryCoverage=88%, HitCoverage=7%, E-value=3e-09, Identity=45%"; Hit description=Myosin- 1, putative
NISMAEVTERIDELVNKVVDLELMVSSQTSQIDRLCRENSELENSLQNLDDENTVLASGSSELTEKLRQVEEELTRVQALESSFHKDESTIRS

SEQ ID NO: 79377 - protein, 125 aa, Setaria italica
  misc_feature (116)..(116): Xaa can be any naturally occurring amino acid
  Transcript Sequence Number=SeqID_13403
  Gene Ontology: Mol. function=molecular_function; Cellular component =membrane; Biological process=auxin mediated signaling pathway
  Homolog annotation: Hit_ID=B4FK55; Match level="QueryCoverage=84%, HitCoverage=28%, E-value=5e-47, Identity=89%"; Hit description =Nodulin-like protein
MRTRTPAKTRREMRMLHRHQVPVLKRYPARLSVLSLTCIFGLLQFLVIAAFTEEDLSRWKVRSGGELFTILYAGLVASGVAFALQIWCIDRGGPLFTAVFQPVQTVAVAVMAAAIXLGDQLYTGG

SEQ ID NO: 79378 - protein, 254 aa, Setaria italica
  Transcript Sequence Number=SeqID_13404
  Gene Ontology: Mol. function=molecular_function; Cellular component =membrane; Biological process=auxin mediated signaling pathway
  Homolog annotation: Hit_ID=B4FK55; Match level="QueryCoverage=98%, HitCoverage=68%, E-value=6e-96, Identity=73%"; Hit description =Nodulin-like protein
  Pfam annotation: Domain name=DUF6; Domain location=75-204; Score =51.3; E_value=3.6e-12; Accession=PF00892.12; Description=Integral membrane protein DUF6
  Pfam annotation: Domain name=TPT; Domain location=66-204; Score= -29.9; E_value=0.036; Accession=PF03151.8; Description=Triose -phosphate Transporter family
  Pfam module annotation: Pfam domain module=DUF6::TPT; Domain location= 75-204::66-204
AAVLRLEQVDLSRRYGVAKVVGTVVSIGGATVITLYKGLPLFHHNLTIKSLLTLSSSSPILNWTLGCVFILGHCLSWSGWMVLQVPVLKRYPARLSVLSLTCIFGLLQFLVIAAFTEEDLSRWKVRSGGELFTILYAGLVASGVAFALQIWCIDRGGPLFTAVFQPVQTVAVAVMAAAILGDQLYTGGIIGAVLIVIGLYFVLWGKSAEKKKAAMNHQDQEQGGGGGDMTRHLLGGDGDASAKEEEAPAIDMLA

SEQ ID NO: 79379 - protein, 111 aa, Setaria italica
  Transcript Sequence Number=SeqID_13405
  Gene Ontology: Mol. function=zinc ion binding
  Homolog annotation: Hit_ID=B9RW74; Match level="QueryCoverage=90%, HitCoverage=10%, E-value=7e-36, Identity=62%"; Hit description =Vacuolar membrane protein pep3, putative
MDAGGGGSGSGQLFSVDPLERQAARGHGVVTSMAAGSDVIVLGTSRGWLVRHDYTFEDAHDLDLGSGRSGDHSVHRVFLDPGGKHCVATVVHPGGAETYYHHARWPRPKPL

SEQ ID NO: 79380 - protein, 76 aa, Setaria italica
  Transcript Sequence Number=SeqID_13406
  Gene Ontology: Mol. function=chlorophyllase activity
  Homolog annotation: Hit_ID=B6U4J0; Match level="QueryCoverage=96%, HitCoverage=21%, E-value=2e-26, Identity=79%"; Hit description =Chlorophyllase-2
DDTPGARGMLTRAICRSGGARAPMRRFVGGATVAFLKRWVGGDGAALDGIRARPEQAPVALSVVEFLGDEAMAQIA

SEQ ID NO: 79381 - protein, 207 aa, Setaria italica
  Transcript Sequence Number=SeqID_13407
  Gene Ontology: Mol. function=oxidoreductase activity; Cellular component=extracellular region; Biological process=lignin catabolic process
  Homolog annotation: Hit_ID=Q2QYS3; Match level="QueryCoverage=100%, HitCoverage=36%, E-value=1e-106, Identity=87%"; Hit description =Laccase-23
  Pfam annotation: Domain name=Cu-oxidase_2; Domain location=55-191; Score=194.6; E_value=2.7e-55; Accession=PF07731.6; Description =Multicopper oxidase
  Subcellular localization annotation: CTP_CleavageSite=40; ConfidenceScore=5.47e-01
VGVGLFNCSSGQKCGGPNNTRFAASMNNVSFVLPSTVSILQAHYGGAQQGVFTADFPANPPVQFDYTAQNVSRALWQPAPGTKVYRLKYGAAVQLVLQGTNIFAGENHPIHIHGYDFYILAEGFGNFDAATDTAKFNLDDPPMRNTVGVPVNGWAVIRFVADNPGVWLMHCHLDVHITWGLAMAFLVEDGVGELQSLEAPPPDLPLC

SEQ ID NO: 79382 - protein, 226 aa, Setaria italica
  Transcript Sequence Number=SeqID_13408
  Gene Ontology: Mol. function=metal ion binding; Cellular component =intracellular
  Pfam annotation: Domain name=BRCT; Domain location=15-101; Score =16.5; E_value=0.069; Accession=PF00533.18; Description=BRCA1 C Terminus (BRCT) domain
  Pfam annotation: Domain name=PHD; Domain location=152-206; Score =31.0; E_value=4.9e-06; Accession=PF00628.21; Description=PHD-finger
  Pfam module annotation: Pfam domain module=BRCT::PHD; Domain location= 15-101::152-206
SLDAPENRRNIRQQMGHGAFYGMQIVVYGQLILPTLDTVKRAVKAGDGTILATSPPYSRFLDSGFDFAVVSASLPRADAWVQEFIRHGIPCVSADYLVDYVCKPGHPLDRHVLFKTNDLANKSLEKLMKNQQEMATDMEQSEDEEDDPEDLSCSACGCKDRGEVMLICGDEDGETGCGIGMHIDCCDPPLDAVPDDDWLCPKCAVPKAKRKPTRGTERKARGSRRR

SEQ ID NO: 79383 - protein, 152 aa, Setaria italica
  Transcript Sequence Number=SeqID_13409
  Gene Ontology: Cellular component=integral to membrane
  Homolog annotation: Hit_ID=O24564; Match level="QueryCoverage=99%, HitCoverage=10%, E-value=3e-34, Identity=50%"; Hit description =Embryogenesis transmembrane protein
DDNQTVENMIGQSLSTDDHESIFMPVECLPEDKLLANNHNGATNNLKEEKESLEKPMVSIEIEEVENKNATRPIENGNTGMHEVAPRQYASNGNAGANPTDEHLKKSRTYLLLLAILAVSLTYQSGLNPPGGFWSQRENNNSTRDPIPKNNH

SEQ ID NO: 79384 - protein, 98 aa, Setaria italica
  Transcript Sequence Number=SeqID_13410
  Gene Ontology: Mol. function=kinase activity
  Homolog annotation: Hit_ID=B6TU35; Match level="QueryCoverage=58%, HitCoverage=15%, E-value=2e-26, Identity=89%"; Hit description =Choline/ethanolamine kinase
MRAVLTFFPCVPTFHDSPLLFLLQDYEYASFNPVAYDIANHFCEMAADYHSEKPHILDYNKYPDIDEQKRFVKTYLSISGKYEFIVLIDCLNLFARFL

SEQ ID NO: 79385 - protein, 351 aa, Setaria italica
  Transcript Sequence Number=SeqID_13411
  Gene Ontology: Mol. function=kinase activity; Biological process =phosphatidylcholine biosynthetic process
  Homolog annotation: Hit_ID=Q1KL28; Match level="QueryCoverage=100%, HitCoverage=96%, E-value=1e-160, Identity=78%"; Hit description =Choline kinase
  Pfam annotation: Domain name=APH; Domain location=35-272; Score=27.5; E_value=9.3e-06; Accession=PF01636.15; Description=Phosphotransferase enzyme family
  Pfam annotation: Domain name=Choline_kin_N; Domain location=1-34; Score=16.1; E_value=0.058; Accession=PF04428.6; Description=Choline kinase N terminus
  Pfam annotation: Domain name=Choline_kinase; Domain location=71-274; Score=295.8; E_value=9.4e-86; Accession=PF01633.12; Description =Cholineethanolamine kinase
  Pfam module annotation: Pfam domain module=APH::Choline_kin _N::Choline_kinase; Domain location=35-272::1-34::71-274
AAAEVAGPRIPKEARRLLHELAAAWADVADCRALQVVPLKGAMTNEVYQVRWLTGVPSVGGEAGEPRGEREVRKVLVRIYGDGVDLFFDREDEVRTFECMSRHGQGPRLLGRFPNGRVEEFIHARTLSAADLRDPEISALVASKLREFHNLDMPGPKSVLIWDRLRNWLKTAKNLCSTDEAKEFRLDSLESEITALQNEVSGDYHWIGFCHNDLQYGNIMIDEESNMLTIIDYEYASFNPVAYDIANHFCEMAADYHSEKPHILDYNKYPDIDEQKRFVKTYLSISGEEPDAEEVESLLQSIEKYTLASHLVWGLWGIISDHVNDIDFDYKEYARQRFEQYWQKKPANLQS

SEQ ID NO: 79386 - protein, 361 aa, Setaria italica
  Transcript Sequence Number=SeqID_13412
  Gene Ontology: Mol. function=protein binding
  Homolog annotation: Hit_ID=B0R0B1; Match level="QueryCoverage=98%, HitCoverage=96%, E-value=6e-74, Identity=42%"; Hit description=Novel CobW/HypB/UreG, nucleotide-binding domain containing protein
  Pfam annotation: Domain name=CobW_C; Domain location=264-360; Score =101.1; E_value=3.7e-27; Accession=PF07683.6; Description=Cobalamin synthesis protein cobW C-termina
  Pfam annotation: Domain name=MMR_HSR1; Domain location=31-195; Score=- 14.9; E_value=0.024; Accession=PF01926.15; Description=GTPase of unknown function
  Pfam annotation: Domain name=cobW; Domain location=31-219; Score =246.5; E_value=6.6e-71; Accession=PF02492.11; Description=Cobalamin synthesis proteinP47K
  Pfam module annotation: Pfam domain module=CobW_C::MMR_HSR1::cobW; Domain location=264-360::31-195::31-219
MEDDDDCPPLAVPQRAPSPPTPDPSEASPVGVTVITGYLGAGKSTLVNYILNEQHGKRIAVILNEFGEEIGVERAMINEGQGGALVEEWVELANGCVCCSVKHSLVQALEQLVQRKDRMDHILLETTGLADPAPLVSVLWLDDQLESSIRLDSIITVIDAKNFRVQIDEHKNSSSFPEAFHQIAFADVVILNKIDLVEDNLEDLEKHIHDVNTLVTVVRSVRCQVDLNEVFNRQAYGAKNSSHLQELLDYSKSIPPNRRHDNSISTLCIYEQDPVYLAKVESWLEDLLWEKNSSMDIYRCKGILHIQDSDQIHTLQAVREVYEVVPARKWSETESRMNKIVVIGRNLDINVLQDSFSGCKG

SEQ ID NO: 79387 - protein, 66 aa, Setaria italica
  Transcript Sequence Number=SeqID_13413
SVVGIVRRSCQRGYVCSSRKQRYEPNRGGQIHGMFVASPTERLQLDRGRRGRARAALTCAADDVLE

SEQ ID NO: 79388 - protein, 411 aa, Setaria italica
  misc_feature (172)..(172): Xaa can be any naturally occurring amino acid
  Transcript Sequence Number=SeqID_13414
  Gene Ontology: Mol. function=serine-type endopeptidase activity; Cellular component=plasma membrane; Biological process=negative regulation of catalytic activity
  Homolog annotation: Hit_ID=B9RYG6; Match level="QueryCoverage=96%, HitCoverage=51%, E-value=1e-107, Identity=48%"; Hit description =Xylem serine proteinase 1, putative
  Pfam annotation: Domain name=Inhibitor_I9; Domain location=1-54; Score=19.6; E_value=0.0019; Accession=PF05922.8; Description =Peptidase inhibitor I9
  Pfam annotation: Domain name=PA; Domain location=313-408; Score=69.9; E_value=9.3e-18; Accession=PF02225.14; Description=PA domain
  Pfam annotation: Domain name=Peptidase_S8; Domain location=57-355; Score=-22.9; E_value=1.7e-05; Accession=PF00082.14; Description =Subtilase family
  Pfam module annotation: Pfam domain module=Inhibitor_I9::PA::Peptidase _S8; Domain location=1-54::313-408::57-355
DDGAGESAPPPVHLYTYTHVMHGFSAALTTAQLEALKAVDGHVAAFPETYGRLHTTRTPEFLGLSAGAGLWPASKYGDDVIIGIVDTGVWPESESFSDAGIKKPVPARWKGACEAGQKFNASACNRKLIGARSFSKGLKQSGLGISPDDYDSPRDYYGHGSHTSSTAAGAAXVGGASYFGYANGTATGVAPVARVAMYKAVFSADTLESASTDVLAAMDRAVADGVDVMSLSLGFPETSYDTNVIAIGAFAAMQKGVFVACSAGNDGSDGYTIMNGAPWIATVGASSIDRDFTATVTLGSGATIHGKSVYPQVSPAIAGGNLYYGHGNRSKQRCEYSSLSRKDVRGKYVLCTAAGDVSIGQQMDEVQSNGARGAIIAGDTKEFLQPSEYTMPVVLVTASDGAAIAKYMTAA

SEQ ID NO: 79389 - protein, 88 aa, Setaria italica
  Transcript Sequence Number=SeqID_13415
  Gene Ontology: Mol. function=sequence-specific DNA binding; Cellular component=nucleus; Biological process=regulation of transcription, DNA-dependent
  Homolog annotation: Hit_ID=Q9SD38; Match level="QueryCoverage=54%, HitCoverage=15%, E-value=5e-16, Identity=79%"; Hit description=GATA transcription factor 9
  Pfam annotation: Domain name=GATA; Domain location=1-23; Score=14.8; E_value=0.0055; Accession=PF00320.19; Description=GATA zinc finger
EGPEGRSTLCNACGVRYRSGRLVPEYRPASSPTFSPELHSNRHSRVVEMRRRREAAAGASLAAAGKGEEKGNEKLECLSNKGEFLAVQ

SEQ ID NO: 79390 - protein, 123 aa, Setaria italica
  Transcript Sequence Number=SeqID_13416
  Gene Ontology: Mol. function=binding
LHARGEVPRLVALLCAPDPRVRTLALEFALRVGYYGRKEVVDALLAEGLVKRLLCLQRSDDLGGSLADADDPYCSPKAKPDAKGVSLLARLLGRRCEDDGAAALASERPFASAVARFAVQVEV

SEQ ID NO: 79391 - protein, 89 aa, Setaria italica
  Transcript Sequence Number=SeqID_13417
  Gene Ontology: Mol. function=hydrolase activity, hydrolyzing O -glycosyl compounds; Cellular component=vacuole; Biological process =carbohydrate metabolic process
  Homolog annotation: Hit_ID=Q8RZL1; Match level="QueryCoverage=74%, HitCoverage=14%, E-value=2e-25, Identity=81%"; Hit description =Putative beta-glucosidase
MAAAIAAFSLLLFLSVQGASPVLGFTRSDFPEDFVFGSATSAYQYEGAVAEDGRSPSIWDTFTHAGRMRDKSNGDVAADGYHKYKDDVK

SEQ ID NO: 79392 - protein, 185 aa, Setaria italica
  misc_feature (67)..(67): Xaa can be any naturally occurring amino acid
  Transcript Sequence Number=SeqID_13418
  Gene Ontology: Cellular component=plasma membrane
  Homolog annotation: Hit_ID=A2Q269; Match level="QueryCoverage=100%, HitCoverage=54%, E-value=9e-55, Identity=53%"; Hit description=Trp repressor/replication initiator (Fragment)
VIDADMRFTDIVTGWPGSMKESSILHSSGLFKLCEKGERLNGSKLKVSDGSEIGEYLIGDAGYPLFXWLMTPYQEKDLTESNTEFNRRHLAARTVAPRTLAKFKDTWKFLQGEMWRPDKHKLPRIIHVCCLLHNIIIDLQEAAVDEQRAASSSDHDVNYRQQVCQLADENGVRARDKLSEHLISR

SEQ ID NO: 79393 - protein, 110 aa, Setaria italica
  Transcript Sequence Number=SeqID_13419
  Pfam annotation: Domain name=DUF630; Domain location=1-60; Score =131.2; E_value=3.2e-36; Accession=PF04783.4; Description=Protein of unknown function (DUF630)
MGCSNSKVDNEEPVRRCKDRRQLMKQLVRRRPELAAAHIAYLHALRNTGATLRDFAELESALSQQPPVGLAAPASPPPPPPPPPPEPLDDILNAQLPPSAAPPARPPRPF

SEQ ID NO: 79394 - protein, 95 aa, Setaria italica
  Transcript Sequence Number=SeqID_13420
  Gene Ontology: Mol. function=protein serine/threonine kinase activity; Biological process=protein amino acid phosphorylation
  Homolog annotation: Hit_ID=Q6I5Q6; Match level="QueryCoverage=68%, HitCoverage=13%, E-value=1e-23, Identity=83%"; Hit description =Putative serine/threonine protein kinase
YFCLDKSRSQGGSDSKDIIIHRDGNSQNIAAQTFTFRELAAATKNFRQDCLLGEGGFGRVYKGRLENGQVSLSETILAHWHVVCNAKSSQFWVLS

SEQ ID NO: 79395 - protein, 52 aa, Setaria italica
  Transcript Sequence Number=SeqID_13421
  Gene Ontology: Mol. function=protein serine/threonine kinase activity; Cellular component=plasma membrane; Biological process =protein amino acid phosphorylation
  Homolog annotation: Hit_ID=B9GMP8; Match level="QueryCoverage=86%, HitCoverage=9%, E-value=9e-18, Identity=93%"; Hit description =Serine/threonine protein kinase PBS1
GVSFCNIDLPKDKEALDWNTRMKIAAGAAKGLEYLHDKASPPVIYRDFKSSN

SEQ ID NO: 79396 - protein, 159 aa, Setaria italica
  Transcript Sequence Number=SeqID_13422
  Gene Ontology: Mol. function=protein serine/threonine kinase activity; Biological process=protein amino acid phosphorylation
  Homolog annotation: Hit_ID=Q6I5Q6; Match level="QueryCoverage=87%, HitCoverage=28%, E-value=3e-65, Identity=89%"; Hit description =Putative serine/threonine protein kinase
  Pfam annotation: Domain name=Pkinase_Tyr; Domain location=65-159; Score=-138.6; E_value=0.00016; Accession=PF07714.9; Description =Protein tyrosine kinase
QVADAKDPRKDGPPDRGVARVGSDKSRSQGGSDSKDIIIHRDGNSQNIAAQTFTFRELAAATKNFRQDCLLGEGGFGRVYKGRLENGQAVAVKQLDRNGLQGNREFLVEVLMLSLLHHTNLVNLIGYCADGDQRLLVYEFMPLGSLEDHLHGLCIFPVI

SEQ ID NO: 79397 - protein, 186 aa, Setaria italica
  Transcript Sequence Number=SeqID_13423
  Gene Ontology: Mol. function=protein serine/threonine kinase activity; Cellular component=plasma membrane; Biological process =protein amino acid phosphorylation
  Homolog annotation: Hit_ID=Q6I5Q6; Match level="QueryCoverage=100%, HitCoverage=38%, E-value=1e-58, Identity=66%"; Hit description =Putative serine/threonine protein kinase
RRKFPKMADPKLQGRFPMRGLYQALAVAAMCLQEQAATRPHIGDVVTALSYLASQAYDPNAPVQHSRSNSSTPRARNPAGWNDDQRSVRSPNHHSPDLRRRDAARASKYGAEVSRTSSTGGSGRRSGLDEMDMTGSQMGSPAQTGRRRETPRAAADRQRAIAEAKMWGEYSRERSNGHGSFDSTNE

SEQ ID NO: 79398 - protein, 380 aa, Setaria italica
  Transcript Sequence Number=SeqID_13424
  Gene Ontology: Mol. function=protein serine/threonine kinase activity; Cellular component=plasma membrane; Biological process =protein amino acid phosphorylation
  Homolog annotation: Hit_ID=Q6I5Q6; Match level="QueryCoverage=99%, HitCoverage=77%, E-value=0.0, Identity=88%"; Hit description =Putative serine/threonine protein kinase
  Pfam annotation: Domain name=APH; Domain location=11-163; Score= -14.0; E_value=0.022; Accession=PF01636.15; Description =Phosphotransferase enzyme family
  Pfam annotation: Domain name=Pkinase; Domain location=1-256; Score =78.5; E_value=2.5e-20; Accession=PF00069.17; Description=Protein kinase domain
  Pfam annotation: Domain name=Pkinase_Tyr; Domain location=1-256; Score=43.4; E_value=1.3e-16; Accession=PF07714.9; Description =Protein tyrosine kinase
  Pfam module annotation: Pfam domain module=APH::Pkinase::Pkinase_Tyr; Domain location=11-163::1-256::1-256
HNSTSQAVAVKQLDRNGLQGNREFLVEVLMLSLLHHTNLVNLIGYCADGDQRLLVYEFMPLGSLEDHLHDIPPDKEPLDWNTRMKIAAGAAKGLEYLHDKASPPVIYRDFKSSNILLGEGFHPKLSDFGLAKLGPVGDKTHVSTRVMGTYGYCAPEYAMTGQLTVKSDVYSFGVVFLELITGRKAIDNSKPHGEQNLVAWARPLFKDRRKFPKMADPLLQGRFPMRGLYQALAVAAMCLQEQAATRPHIGDVVTALSYLASQTYDPNAPVQHNRSNSSTPRASRGGGSNDQRRLRSPNHHSPDLRRREATTGPKYEAEVSRTNSGSGSGRQSGLDDVDMTVSQLGSPGHGGRKRESPRTAERQGAIAEAKTWGENSRGRN

SEQ ID NO: 79399 - protein, 466 aa, Setaria italica
  misc_feature (452)..(452): Xaa can be any naturally occurring amino acid
  Transcript Sequence Number=SeqID_13425
LESYQQSVAQAATTPAASDGFAGAGHSLAPCTQDSYASSYGQQSQWQPDSLGNTMQPDVSGGNSLLGSSYSSNQQAENQIGQQANAESLQSSVNYKPHIDTFVPSTGQYTGSEGNQASYEGFKPFTGNQSWYKGSEHSTSQEVGYRAFASSTNFQTGHKEFQPPKDHQAGHMAYEPSTRVGYGNSNGPQDFVPKESMYNTQTHAGSSAHTYVPNNYGGTQTAMDFAQQQLIGTNGPSQQFGFSPHEQRSSAGRPPHAVVTFGFGGRLVVLKEMSSITANFDSGNKGNSGRMVSVHNISEIVADKIDHSSVANGSALSYFHALCRQPIPGPLVGGSAASKDVNKWLDDMIAVYESSLTEFQRGDVQKVLISLLKILCQHYGKLRSPFGSDPSQEVSIDGLDMAVTKLLSSCKSSADMKGYGVHCMRNLPSESQIQATAQEVQNLLVSGRRKEXALQYAQEGQLWGPA

SEQ ID NO: 79400 - protein, 57 aa, Setaria italica
  Transcript Sequence Number=SeqID_13426
  Gene Ontology: Mol. function=oxidoreductase activity; Biological process=oxidation reduction
  Homolog annotation: Hit_ID=B6TDN5; Match level="QueryCoverage=100%, HitCoverage=14%, E-value=2e-24, Identity=87%"; Hit description =Alcohol dehydrogenase 2
GDFKGKSQLPDLVDKCINGSVNINFDGFITHKLPFSDINKAFQLLEEGKSLRCLLNF

SEQ ID NO: 79401 - protein, 130 aa, Setaria italica
  Transcript Sequence Number=SeqID_13427
  Gene Ontology: Mol. function=oxidoreductase activity; Cellular component=cytoplasm; Biological process=oxidation reduction
  Homolog annotation: Hit_ID=Q7G753; Match level="QueryCoverage=98%, HitCoverage=90%, E-value=9e-62, Identity=85%"; Hit description =Putative alcohol dehydrogenase
DKPVHEVIREITDGGVDYSFECTGINDVLREAFLSTHDGWGLTVVLGIHATPKMMPLHPMELFDGRRITGCVFGDFKGKSQLPDIVDKCMSGELKVNFDGFITHKMPFSDTNKAIQLLEEGKSLRCVLHF

SEQ ID NO: 79402 - protein, 251 aa, Setaria italica
  Transcript Sequence Number=SeqID_13428
  Gene Ontology: Mol. function=oxidoreductase activity; Cellular component=cytoplasm; Biological process=oxidation reduction
  Homolog annotation: Hit_ID=B6TDN5; Match level="QueryCoverage=99%, HitCoverage=64%, E-value=1e-102, Identity=71%"; Hit description =Alcohol dehydrogenase 2
  Pfam annotation: Domain name=ADH_zinc_N; Domain location=81-241; Score=122.3; E_value=1.6e-33; Accession=PF00107.18; Description=Zinc- binding dehydrogenase
SDGGTRFAVVDASSGERQPVYHFLNTSTFAEYTVLDAACAVKVHPKAPLEKMCLLSCGISTVVLCLASGVGAAWNTANVSTGSTVAVFGLGAVGLAVAEGARLRGAARIIGVDINPEKFTKGKEMGVTDFIDSKACDKPVHEVIREMTDGGVDYSFECTGINDVLREAFLSTHDGWGLTVVLGIHATPKMMPLHPMELFDGRRITGCVFGDFKGAEGNFDGFITHKMPFSDTNKAIQLLEEGKSLRCVLHF

SEQ ID NO: 79403 - protein, 403 aa, Setaria italica
  Transcript Sequence Number=SeqID_13429
  Gene Ontology: Mol. function=oxidoreductase activity; Cellular component=cytoplasm; Biological process=oxidation reduction
  Homolog annotation: Hit_ID=B6TDN5; Match level="QueryCoverage=94%, HitCoverage=94%, E-value=1e-169, Identity=75%"; Hit description =Alcohol dehydrogenase 2
  Pfam annotation: Domain name=ADH_N; Domain location=46-182; Score =148.3; E_value=2.4e-41; Accession=PF08240.4; Description=Alcohol dehydrogenase GroES-like doma
  Pfam annotation: Domain name=ADH_zinc_N; Domain location=213-355; Score=130.9; E_value=4.1e-36; Accession=PF00107.18; Description=Zinc- binding dehydrogenase
  Pfam module annotation: Pfam domain module=ADH_N::ADH_zinc_N; Domain location=46-182::213-355
MASNGNGSLANGASTHGKPIKCKAAVAWGPGEPLAMEEVEVAPPGRREVRVKLLFTSICHTDLSFLKGENEQQRKFPRILGHEAAGVVESVGDGVEDLAPGDHVVPIFNGECGACAYCKSGKTNLCGTYRVNPFKSTMTSDGGTRFSVVDASSGERRPVYHFLNTSTFAEYTVLDAACAVKVHPKAPLEKMCLLSCGISTGVGAAWNTANVSTGSTVAVFGLGAVGLAVAEGARLRGAARIIGVDINPEKFTKGKEMGVTDFIDSKACDKPVHEVIREITDGGVDYSFECTGINDVLREAFLSTHDGWGLTVVLGIHATPKMMPLHPMELFDGRRITGCVFGDFKGKSQLPDIVDKCMSGELKVNFDGFITHKMPFSDTNKAIQLLEEGKSLRCVLHFLELGK

SEQ ID NO: 79404 - protein, 92 aa, Setaria italica
  Transcript Sequence Number=SeqID_13430
  Gene Ontology: Mol. function=transferase activity, transferring glycosyl groups; Biological process=metabolic process
  Homolog annotation: Hit_ID=A1IWC6; Match level="QueryCoverage=72%, HitCoverage=14%, E-value=8e-22, Identity=77%"; Hit description =Putative glucosyl transferase
TFHVLPPPAPADDSSSSSDGTVAHRIVMMFDYLKAMCAPLRDFLRSLPAVDALVLDMFCGDALDVAAELKLPVYYLYSSAAGDLAVFVNLAR

SEQ ID NO: 79405 - protein, 546 aa, Setaria italica
  Transcript Sequence Number=SeqID_13431
  Gene Ontology: Mol. function=serine-type carboxypeptidase activity; Cellular component=extracellular region; Biological process =proteolysis
  Homolog annotation: Hit_ID=B9R6Y4; Match level="QueryCoverage=80%, HitCoverage=93%, E-value=1e-125, Identity=49%"; Hit description =Serine carboxypeptidase, putative
  Pfam annotation: Domain name=Peptidase_S10; Domain location=107-542; Score=511.3; E_value=1.2e-150; Accession=PF00450.14; Description =Serine carboxypeptidase
MKCGTAYIYKGKEVARVTDKERNKEIKAYESEAGMGRTRDMLCGAAVASSALSSSPASGGRRRRSPPPLLPLVAALLIIATSSSLVWCAAAAAKGGAGRNVITHIKGFEGPLPFHLETGYVEVDEEHGARLFYYFIASERNPAEDPLILWITGGPGCSALSGLLFEIGPLKFDVAGYTEGFPRLVYFEDSWTKVSNVIFLDAPVGTGFSYSREEAGLNVSLTGSGRQHHTFLRKWLAEHPEFASNPLYIGGDSYSGYTVPVTALDIATHNDDPKLNLVGYLVGNAGTDDRYDSGGKVPFMHGMGLISDELYEAAKDGCGGDFYRRPDPANARCASAMMAINMVTFAVNPVHILEPFCGAAVRGPSIFQGYGGGRRSMLVQDDVGHPGFLEKSRLNLPVECRDNGYRLSYIWADDPEVRETLGIHEGSIGSWSRCTMLTHFTHDLTTVIPHHVNLTKAGYKALVYNGDHDMDMTFVGSQEWIRSIGYPIVSDWRPWFANRQVAGFTRTYAHNLTFATVKGGGHTAPEYRPKECQAMLDRWTSAAGQL

SEQ ID NO: 79406 - protein, 114 aa, Setaria italica
  Transcript Sequence Number=SeqID_13432
  Gene Ontology: Mol. function=binding
  Homolog annotation: Hit_ID=Q2QNV7; Match level="QueryCoverage=93%, HitCoverage=10%, E-value=9e-16, Identity=44%"; Hit description =Retrotransposon protein, putative, unclassified, expressed
YSLALVQGALLCYRAIFSISMREQVFVNATLERYHFKGDAVQSALDYFHDTMAGCEKNPSFARGTNLITYASDLMGSTSPDRYLSGIRILDTLLMKEKEGPIRTLVVQRLLVSE

SEQ ID NO: 79407 - protein, 132 aa, Setaria italica
  Transcript Sequence Number=SeqID_13433
  Gene Ontology: Mol. function=ubiquitin-protein ligase activity; Cellular component=ubiquitin ligase complex; Biological process =ubiquitin-dependent protein catabolic process
  Homolog annotation: Hit_ID=B6TRN1; Match level="QueryCoverage=100%, HitCoverage=29%, E-value=1e-46, Identity=70%"; Hit description =Photoperiod responsive protein
  Pfam annotation: Domain name=U-box; Domain location=20-94; Score =70.4; E_value=6.6e-18; Accession=PF04564.7; Description=U-box domain
MVRKETAMRLPPQHQGLEVKIPSFFRCPISLDVMRSPVSLCTGVTYDRASIQRWLDSGNTTCPATMLPLPSTDLVPNLTLRRLIALWASTAAPASPSSSSPPAPSAVGPTPAAAASELLRRVAAPGADPCPP

SEQ ID NO: 79408 - protein, 88 aa, Setaria italica
  Transcript Sequence Number=SeqID_13434
  Subcellular localization annotation: CTP_CleavageSite=6; ConfidenceScore=5.01e-01
ASSASSAAAASARAQIHMVVRAEPDPRYVFQFGGEPECGPVVYQVPGGAAGGGQRQPVFTCRFSAGRRATRSRSLTPQSSMTRSTSRR

SEQ ID NO: 79409 - protein, 355 aa, Setaria italica
  misc_feature (150)..(150): Xaa can be any naturally occurring amino acid
  misc_feature (265)..(265): Xaa can be any naturally occurring amino acid
  Transcript Sequence Number=SeqID_13435
  Gene Ontology: Mol. function=ubiquitin thiolesterase activity; Cellular component=nucleus; Biological process=ubiquitin-dependent protein catabolic process
  Homolog annotation: Hit_ID=B9GAM6; Match level="QueryCoverage=100%, HitCoverage=38%, E-value=1e-155, Identity=74%"; Hit description =Ubiquitin carboxyl-terminal hydrolase
  Pfam annotation: Domain name=DUF1055; Domain location=1-127; Score =231.8; E_value=1.7e-66; Accession=PF06337.4; Description=Domain of Unknown Function (DUF1055)
  Pfam annotation: Domain name=UCH; Domain location=214-353; Score =34.2; E_value=1.7e-09; Accession=PF00443.21; Description=Ubiquitin carboxyl-terminal hydrolase
  Pfam module annotation: Pfam domain module=DUF1055::UCH; Domain location=1-127::214-353
DTLVEGRDYILLPQQVWEKLHGWYGGGPTIPRKAINTGFSQTDLAIEVYPLRLQLLLTSTGERTFIRISKKDTVGQLHKRACDAFDLIPDEVCIWDYYGRTKHTLMDNLEKTLDDANIQMDQDILVEITTDANGSVDGGCMSLVKGNDFXEQESTSLIADAPRSGLPNDNFAANNYSSRNYNSSLTPNLHLRSPNGDLDNVHGSSGMITRGSPSGLTGLLNLGNTCYMNSAIQCLVHTPQFTRYFCEDYHREINRQNPLGNVPCXGELALAFGELLRKLWAPGGRAPVSPRPFKMKLSRFASQFSGYNQHDSQELLAFLLDGLHEDLNRVKHRPYINSGDADGRSDEEVADEYWA

SEQ ID NO: 79410 - protein, 482 aa, Setaria italica
  Transcript Sequence Number=SeqID_13436
  Gene Ontology: Mol. function=cysteine-type peptidase activity; Cellular component=transcription factor TFIID complex; Biological process=ubiquitin-dependent protein catabolic process
  Homolog annotation: Hit_ID=B9GAM6; Match level="QueryCoverage=99%, HitCoverage=51%, E-value=0.0, Identity=80%"; Hit description =Ubiquitin carboxyl-terminal hydrolase
  Pfam annotation: Domain name=UCH; Domain location=195-455; Score =101.6; E_value=2.7e-27; Accession=PF00443.21; Description=Ubiquitin carboxyl-terminal hydrolase
TGDADGRSDEEVADEYWANHIARNNSIIVDVCQGQYKSTLVCPVCGKVSVTFDPFMYLSLPLQFASTRSMTAVVFSCDGSSPPTPFTVNVPKQGRCRDLLQALGNACSLKNGEKLLIAEIRNHKIYRFLDDPVLQLSTVSDDDRLAVYRLPKLEKRANYIQFVHRHEDLDHGNNNSLTSWKPYGVPLIAQIPRNETVTGFDIHELVHKMLVPMLRNQDSPHLAAHSSLSTRMHSYNTDSSKFELQLIDDSNTVIEKSNDSIRVPQSSLATVFFVNWSKADLKKINTDPLEHLPEVFMYAPPAKRTRGEALSLYACLDAFLREEPLVPEDMWYCPRCKEQRQASKKLDLWRLPEVLVIHLKRFSFSRSTKQKLETFVNFPIHNLDLTKYIANKKSSERQMYELYAVSNHYGSMASGHYTAHIKLVDENRWYNFDDSHVAAIDEDEVRTAAAYVLFYRRVREQDGATSNGSQLYAKRSHRSSHR

SEQ ID NO: 79411 - protein, 296 aa, Setaria italica
  Transcript Sequence Number=SeqID_13437
  Gene Ontology: Cellular component=nuclear speck
  Homolog annotation: Hit_ID=B6TD70; Match level="QueryCoverage=85%, HitCoverage=81%, E-value=2e-92, Identity=70%"; Hit description =Coiled-coil domain containing 55
  Pfam annotation: Domain name=DUF2040; Domain location=38-161; Score =195.8; E_value=1.2e-55; Accession=PF09745.1; Description=Coiled-coil domain-containing protein
SSRAPPPPARPLAAFADDDDDDVEAEILRQAAKKRALQKVEEQKKKAIEEDPSVYAYDEVYDDMKEKEARPKMQAKVVRESKYIAQLKEKAEQRKREQDIIYERKLQKERSKEDHLFGDKDKFVTSAYRKKLEEQQKWLEEERMRQLREEREDVTKKKDLSDFYFGLEKNVAFGARTHGNAKAADPQKSDNKPEDTKSNSVDAEVSEPSPKRRRESSVGPERAKSVEEPSGSQPKDSTAAASTEKTGADAPSNASQTPQNIQPAKVTDDHYKRSDDALAAARARALARKKAKEQQL

SEQ ID NO: 79412 - protein, 77 aa, Setaria italica
  misc_feature (1)..(1): Xaa can be any naturally occurring amino acid
  Transcript Sequence Number=SeqID_13438
XFLSDCTIIKCLCNNPENRVPLASFDKCTPRLVTGRKNPGCCCFSASLFTNFSSYLYSYTFIKNQYVICTFIISATY

SEQ ID NO: 79413 - protein, 125 aa, Setaria italica
  Transcript Sequence Number=SeqID_13439
  Subcellular localization annotation: CTP_CleavageSite=17; ConfidenceScore=5.21e-01
PPPPWGSPSLRPRPAVHGSARTRCRSPCLAGCPAFWRPAQPPRRPDVQQQWQDSSKAASNQTFGEAAPHLGPLRDWRHPVNCRSVYLGRFGSSSVGYFSDCPITISLQLDICRYLNMWSKARQSA

SEQ ID NO: 79414 - protein, 71 aa, Setaria italica
  Transcript Sequence Number=SeqID_13440
  Subcellular localization annotation: CTP_CleavageSite=25; ConfidenceScore=5.24e-01
QQQQQQQDPPSYIYPVGCTPQRPCRSAVLPSTASRIYSLAANNNHGAMMDGAQATGGAESVCRLATTMATV

SEQ ID NO: 79415 - protein, 77 aa, Setaria italica
  Transcript Sequence Number=SeqID_13441
  Subcellular localization annotation: CTP_CleavageSite=58; ConfidenceScore=5.47e-01
SPHTLSLSCGACSMISHSIYQSPSPFPGHHSNSVHHVLMLVSWFACRSWRSREAAGMAAEEEEGRRRRRSSSTSTSR

SEQ ID NO: 79416 - protein, 117 aa, Setaria italica
  Transcript Sequence Number=SeqID_13442
  Gene Ontology: Mol. function=protein serine/threonine kinase activity; Biological process=protein amino acid phosphorylation
  Subcellular localization annotation: CTP_CleavageSite=16; ConfidenceScore=5.01e-01
TGDPPGFRSVLLLLVNIMMAPSGRKRPPAATTFILLCILSSLCVCKAQFKPADSYLVDCGSPKSTTVGQRTFASDGASPVKVSTSQEILAGTSANGVASFDNSALYQTARIFTSHQS

SEQ ID NO: 79417 - protein, 40 aa, Setaria italica
  Transcript Sequence Number=SeqID_13443
LEGQFPSIAAMAMMGRAMNKLRPCELQKRGPSVVWKTQGL

SEQ ID NO: 79418 - protein, 96 aa, Setaria italica
  Transcript Sequence Number=SeqID_13444
  Gene Ontology: Mol. function=protein dimerization activity
  Homolog annotation: Hit_ID=B9REN7; Match level="QueryCoverage=87%, HitCoverage=11%, E-value=2e-14, Identity=44%"; Hit description=DNA binding protein, putative
IVKFEKELHQMVTSNKWVKSTYAKGGVGKDVTAIIWKDVDFWAQCKHVVKVTEPLLRVLRLVDSNENPSMGYLYDAMEKAKESIRARMMHKACLYG

SEQ ID NO: 79419 - protein, 73 aa, Setaria italica
  Transcript Sequence Number=SeqID_13445
  Subcellular localization annotation: CTP_CleavageSite=52; ConfidenceScore=5.29e-01
IMNGGASQLTIYGTSTGANKRKHKGQTFKSLFSQCPFSGYFNAATTWILQVQAAGHKKWEPQRKFSVLSGLNS

SEQ ID NO: 79420 - protein, 87 aa, Setaria italica
  Transcript Sequence Number=SeqID_13446
  Gene Ontology: Mol. function=transferase activity, transferring glycosyl groups; Biological process=metabolic process
  Homolog annotation: Hit_ID=P16166; Match level="QueryCoverage=97%, HitCoverage=17%, E-value=4e-21, Identity=65%"; Hit description =Anthocyanidin 3-O-glucosyltransferase
GGRPFFGDQRMNARSVAHVWGFGAAFEGATMTRAGVATAVGEMLRGEEGVRMRARARDLQAAVAAAFAPGGACRRNFDKFVEIVCRA

SEQ ID NO: 79421 - protein, 89 aa, Setaria italica
  Transcript Sequence Number=SeqID_13447
  Gene Ontology: Mol. function=nucleic acid binding
  Homolog annotation: Hit_ID=B6U9Q3; Match level="QueryCoverage=97%, HitCoverage=18%, E-value=3e-18, Identity=50%"; Hit description=F-box domain containing protein
MPKKKDLLCQEDDRSEGGKISRYSGSGLPEDIWCHIHSLMPLRDAAHSACVSRTFLRSWRCHPNLNFTKETLCVKRNACGKGWCSKVFH

SEQ ID NO: 79422 - protein, 99 aa, Setaria italica
  Transcript Sequence Number=SeqID_13448
PLPQSPTESMGIEVFPKLQKLFHHHRRPHMAPHAPALLVPDQQLKWNLGELLTVMLLSVFCLHRVSIGVPSDVTGVCCRPTELLCTAAYPPICATQVGP

SEQ ID NO: 79423 - protein, 55 aa, Setaria italica
  Transcript Sequence Number=SeqID_13449
LFNLLVPMAWIIALSKTLQYLNHINKARKFFHKTKLTPSKLENSEANTFGFELLV

SEQ ID NO: 79424 - protein, 104 aa, Setaria italica
  Transcript Sequence Number=SeqID_13450
LIPSHGLSVAENGMPGKETVSKIKAEYLGVEAKDQPSIKAAQAVIERDYGGSMSPSEENAFKAAFVVYVMSLLLSPGAKYDHASVDYWNTLRDPLVYIHLTGQK

SEQ ID NO: 79425 - protein, 65 aa, Setaria italica
  misc_feature (8)..(8): Xaa can be any naturally occurring amino acid
  Transcript Sequence Number=SeqID_13451
  Gene Ontology: Mol. function=metal ion binding
  Homolog annotation: Hit_ID=Q53PX0; Match level="QueryCoverage=95%, HitCoverage=3%, E-value=2e-14, Identity=56%"; Hit description=PHD -finger family protein, expressed
HFPSIVAXFSQHGESLRGLLVGSLQDAQQKERWHQQLREASDCRTVIPLLLEVSYSIQLITFCIL

SEQ ID NO: 79426 - protein, 471 aa, Setaria italica
  Transcript Sequence Number=SeqID_13452
  Gene Ontology: Mol. function=metal ion binding; Cellular component =nucleus; Biological process=proteolysis
  Homolog annotation: Hit_ID=Q53PX0; Match level="QueryCoverage=99%, HitCoverage=24%, E-value=1e-179, Identity=65%"; Hit description=PHD -finger family protein, expressed
  Pfam annotation: Domain name=PHD; Domain location=317-368; Score=2.1; E_value=0.016; Accession=PF00628.21; Description=PHD-finger
LVGSLQDAQQKERWHQQLREASNCRTVIPLLLELESNIRGVAFSASWLKPIDDWPVESPGLSAGASRPAQYQKRGAGGRRGRRRSLASECGTATATATDDDNSWTWWTGGNISKRTLQRGAVLCSTIRKVARQGGKTRIAGLPYHEASNFPRRSRQFAWRACVGLSQTSSQLALQVRYLDAHIRWKEFIPPDQIPSDGKSSDADFSALRNAVICDKKIIDNKIRYALKFPNQKHLPVRVTKNILEAEGDQDENSKLWFSENHVPLYMLREFEQNYGSSSLPSPGISNSNCFTNLYPRVKAYTGDVFSYLFHKGDVYPCTSCKKDVLYRDVVKCSSCQGYCHKECTSRSIVSKGVSATSNLTCKLCLQKRNLMLTSYNTNASYIRPQQKSTGQQQVTAPKIIFKVSSSHSAEPTLKVEAQTVPKVKAQPAANVEAQPIMNVKAQPIAKVESQTLAKVEALPITNVATPNINL

SEQ ID NO: 79427 - protein, 250 aa, Setaria italica
  Transcript Sequence Number=SeqID_13453
  Gene Ontology: Mol. function=metal ion binding; Biological process =proteolysis
  Homolog annotation: Hit_ID=Q53PX0; Match level="QueryCoverage=95%, HitCoverage=12%, E-value=4e-90, Identity=69%"; Hit description=PHD -finger family protein, expressed
STTYPLTLEGNGMPREGTVSTISAKAESFCPSYQGKQHLQLFAERSGNMSGGKAAKFSSFKPQAYMNLYNHGNIAASAAANLAVITSDEGKVSASKQTANPRKRMAADNSLQLKAFSSAAAQFVWPSTEKKLMEVPRDRCGWCLACRSSAIGNKKACFLNMATANAAKGSARILSVMHVIKNSDSHFPSIVAYLANMEESLRGLLVGSLQDAQQKERWHQQLREASDCRTLIPLLLELESNIRGVAFCIL

SEQ ID NO: 79428 - protein, 59 aa, Setaria italica
  Transcript Sequence Number=SeqID_13454
RLLPLLPPFLRVLSVGTGVTSSEETKNWSGYIKQCKNCILPNSTGKPGKFRFVTYLSKR

SEQ ID NO: 79429 - protein, 69 aa, Setaria italica
  Transcript Sequence Number=SeqID_13455
  Gene Ontology: Mol. function=UDP-glucuronate decarboxylase activity; Biological process=cellular metabolic process
  Homolog annotation: Hit_ID=Q6IVK5; Match level="QueryCoverage=98%, HitCoverage=19%, E-value=9e-23, Identity=73%"; Hit description=UDP -glucuronate decarboxylase 1
ELAENVKELINPEVTVTMTENTPDDPRQRKPDITKAKEVLGWEPKVVLRDGLVFMEDDFRERLAVPKKA

SEQ ID NO: 79430 - protein, 47 aa, Setaria italica
  misc_feature (37)..(37): Xaa can be any naturally occurring amino acid
  Transcript Sequence Number=SeqID_13456
  Homolog annotation: Hit_ID=Q10N94; Match level="QueryCoverage=93%, HitCoverage=17%, E-value=4e-10, Identity=75%"; Hit description=RmlD substrate binding domain containing protein, expressed
TNGSNGEHTTRPPPTPSPLRFSKFFQANLRILVTGGXGFIGSHLVDK

SEQ ID NO: 79431 - protein, 49 aa, Setaria italica
  Transcript Sequence Number=SeqID_13457
  Gene Ontology: Mol. function=UDP-glucuronate decarboxylase activity; Biological process=cellular metabolic process
  Homolog annotation: Hit_ID=Q6T7C9; Match level="QueryCoverage=85%, HitCoverage=23%, E-value=5e-13, Identity=76%"; Hit description=Fiber dTDP-glucose 4-6-dehydratase (Fragment)
MILLAYPFLSQCCSGEPLTVQKPGTQTRSFCYVADMVDGLIKLMNGNNT

SEQ ID NO: 79432 - protein, 64 aa, Setaria italica
  misc_feature (42)..(42): Xaa can be any naturally occurring amino acid
  Transcript Sequence Number=SeqID_13458
RFCRSSLLPLDLMIQSFKVNDKGCIRFIGTQIPIQGRPFCVXLLPQILWQHCYNRFRECIGYKQ

SEQ ID NO: 79433 - protein, 64 aa, Setaria italica
  Transcript Sequence Number=SeqID_13459
  Gene Ontology: Mol. function=UDP-glucuronate decarboxylase activity; Biological process=cellular metabolic process
  Homolog annotation: Hit_ID=Q9FIE8; Match level="QueryCoverage=67%, HitCoverage=12%, E-value=5e-13, Identity=79%"; Hit description=DTDP -glucose 4-6-dehydratase
PRQRIIRSVLGHCHCHFGVDPRQRKPDITKAKEVLGWEPKVVLRDGLVFMEDDFRERLAVPKKA

SEQ ID NO: 79434 - protein, 130 aa, Setaria italica
  misc_feature (76)..(76): Xaa can be any naturally occurring amino acid
  Transcript Sequence Number=SeqID_13460
  Gene Ontology: Mol. function=UDP-glucuronate decarboxylase activity; Biological process=cellular metabolic process
  Homolog annotation: Hit_ID=Q10N94; Match level="QueryCoverage=98%, HitCoverage=49%, E-value=1e-68, Identity=97%"; Hit description=RmlD substrate binding domain containing protein, expressed
  Pfam annotation: Domain name=Epimerase; Domain location=1-125; Score=- 37.7; E_value=0.00026; Accession=PF01370.13; Description=NAD dependent epimerasedehydratase family
LNMLGLAKRVGARILLTSTSEVYGDPLEHPQTEAYWGNVNPIGVRSCYDEGKRVAETLMFDYHRQHGIEIRIARIXFNTYGPRMNIDDGRVVSNFIAQAVRGEPLTVQKPGTQTRSFCYVADMVCLPLHL

SEQ ID NO: 79435 - protein, 131 aa, Setaria italica
  Transcript Sequence Number=SeqID_13461
  Gene Ontology: Mol. function=UDP-glucuronate decarboxylase activity; Biological process=cellular metabolic process
  Homolog annotation: Hit_ID=Q6IVK5; Match level="QueryCoverage=81%, HitCoverage=30%, E-value=2e-42, Identity=75%"; Hit description=UDP -glucuronate decarboxylase 1
TNLDLQGCSWRTPELVPRKTKEQQTRSFCYVADMVDGLIKLMNGNNTGPINLGNPGEFTMLELAENVKELINPEVTVTMTENTPDDPRQEGKPDITKAKEVLGWEPKVVLRDGLVFMEDDFRERLAVPKKA

SEQ ID NO: 79436 - protein, 131 aa, Setaria italica
  Transcript Sequence Number=SeqID_13462
  Gene Ontology: Mol. function=UDP-glucuronate decarboxylase activity; Biological process=cellular metabolic process
  Homolog annotation: Hit_ID=Q9FIE8; Match level="QueryCoverage=100%, HitCoverage=37%, E-value=2e-58, Identity=81%"; Hit description=DTDP -glucose 4-6-dehydratase
  Pfam annotation: Domain name=Epimerase; Domain location=2-109; Score=- 36.0; E_value=0.00019; Accession=PF01370.13; Description=NAD dependent epimerasedehydratase family
KAYWGNVNPIGVRSCYDEGKRVAETLMFDYHRQHGIEIRIARIFNTYGPRMNIDDGRVVSNFIAQAVRGEPLTVQKPGTQTRSFCYVADMVDGLIKLMNGNNTGPINLGNPGKIHLCITFVATQFTVQSAL

SEQ ID NO: 79437 - protein, 350 aa, Setaria italica
  misc_feature (43)..(43): Xaa can be any naturally occurring amino acid
  misc_feature (110)..(110): Xaa can be any naturally occurring amino acid
  misc_feature (160)..(160): Xaa can be any naturally occurring amino acid
  Transcript Sequence Number=SeqID_13463
  Gene Ontology: Mol. function=UDP-glucuronate decarboxylase activity; Biological process=cellular metabolic process
  Homolog annotation: Hit_ID=Q9FIE8; Match level="QueryCoverage=92%, HitCoverage=94%, E-value=1e-163, Identity=85%"; Hit description=DTDP- glucose 4-6-dehydratase
  Pfam annotation: Domain name=3Beta_HSD; Domain location=37-283; Score= -116.0; E_value=0.0054; Accession=PF01073.11; Description=3-beta hydroxysteroid dehydrogenaseisomerase family
  Pfam annotation: Domain name=Epimerase; Domain location=36-273; Score= 187.6; E_value=3.5e-53; Accession=PF01370.13; Description=NAD dependent epimerasedehydratase family
  Pfam annotation: Domain name=NAD_binding_4; Domain location=38-259; Score=-56.0; E_value=1.8e-05; Accession=PF07993.4; Description=Male sterility protein
  Pfam annotation: Domain name=Polysacc_synt_2; Domain location=36-319; Score=-151.7; E_value=0.00029; Accession=PF02719.7; Description =Polysaccharide biosynthesis protein
  Pfam annotation: Domain name=RmlD_sub_bind; Domain location=34-342; Score=-158.2; E_value=0.0019; Accession=PF04321.9; Description=RmlD substrate binding domain
  Pfam module annotation: Pfam domain module=3Beta_HSD::Epimerase::NAD _binding_4::Polysacc_synt_2::RmlD_sub_bind; Domain location=37 -283::36-273::38-259::36-319::34-342
  Subcellular localization annotation: CTP_CleavageSite=25; ConfidenceScore=5.03e-01
MAQKETNGSNGEHTTRPPPTPSPLRFSKFFQANLRILVTGGAXGFIGSHLVDKLMENEKHEVIVADNFFTGSKDNLKKWIGHPRFELIRHDVTQPLLVEVDQIYHLALPXPSPIFYKHNPVKTIKTNVIGTLNMLGLAKRVGARILLTSTSEVYGDPLEXTPQTEAYWGNVNPIGVRSCYDEGKRVAETLMFDYHRQHGIEIRIARIFNTYGPRMNIDDGRVVSNFIAQAVRGEPLTVQKPGTQTRSFCYVADMVDGLIKLMNGNNTGPINLGNPGEFTMLELAENVKELINPEVTVTMTENTPDDPRQRKPDITKAKEVLGWEPKVVLRDGLVFMEDDFRERLAVPKKA

SEQ ID NO: 79438 - protein, 532 aa, Setaria italica
  misc_feature (484)..(484): Xaa can be any naturally occurring amino acid
  misc_feature (524)..(524): Xaa can be any naturally occurring amino acid
  Transcript Sequence Number=SeqID_13464
  Gene Ontology: Cellular component=plasma membrane
  Homolog annotation: Hit_ID=Q5GAP5; Match level="QueryCoverage=94%, HitCoverage=64%, E-value=0.0, Identity=76%"; Hit description =Putative paramyosin
  Pfam annotation: Domain name=DUF827; Domain location=140-532; Score =490.3; E_value=2.6e-144; Accession=PF05701.3; Description=Plant protein of unknown function (DUF827)
SSPTGSSETSTAKEVPSDIAHEGPSQHEVLQMRLPDPTEDHVGSIVPSDKGPEILSNAGPTEAFISSTNDKTDHPSSADAIEMNSMPVNVLNGTGTALRDEMKPKEDEIHYQTDMATKLKRKEDSETTPASPYKGLIDTAAPFESVREAVTKFGGIVDWKAHKAQMIERRKLIQLELENIRTEIPLCKEELEAAEMAKSQVVDELEHTKRLIEELKHHLEKVQVEEAQAKQDSELAELRAQEIEHGVADEASAIARTQMEVAKERHEKAVAELKSVKEELTSVHKQYATLIDERDTAIKRAEEVISAGKEIERRVEELTLELIASKGSLELAHAAHHEAEERRISAALTKEQDCLAWERELRQAQEELQQLDSKLASNNDMQHLIDANLLKLLSLNSELSAYVEKKLTEEAEGASKEHESEDAKQISNSIKEALASKQKELQEVKENIEKAKAEANVLRFAASTLKSELDNEKASLVVLQQGEXAMACVAVSSLEDELNRTKQEIESVRCKEAEAQEKMVELPXVLQQATQE

SEQ ID NO: 79439 - protein, 106 aa, Setaria italica
  misc_feature (29)..(29): Xaa can be any naturally occurring amino acid
  Transcript Sequence Number=SeqID_13465
SVEHYTNRPFTFSFHQMNPNTDYHCLKTXFGSHFTEDIPIPAGTKIDFCQTSDGKLITEIDGRQIGAVQSKDLCKAFFDMYIGDSPISLEAKRNIAQNVAGLIARR

SEQ ID NO: 79440 - protein, 416 aa, Setaria italica
  Transcript Sequence Number=SeqID_13466
  Gene Ontology: Mol. function=isomerase activity; Cellular component =chloroplast envelope
  Homolog annotation: Hit_ID=B6TFR7; Match level="QueryCoverage=45%, HitCoverage=66%, E-value=2e-25, Identity=32%"; Hit description =Chalcone isomerase
  Pfam annotation: Domain name=Chalcone; Domain location=231-416; Score= -52.1; E_value=0.00016; Accession=PF02431.7; Description=Chalcone -flavanone isomerase
MKPNQLILSNLDIDRGYVYKFPSELPMSHDLGLSLFSHAGTVMGTSLRHHRKICSSGNVMVHGAFNRLNKLSRAIFCWLSRPSDPKVFHWLSAIAASGSRSCQLRMKQVSSHMQNLTRLQFGFLVREEQAMQLLLARLANATIVRLCNDFEKQGACNLLTLAGAAAIVPPLETISPIMLAEAIALRNTDGYISRPVGQPYVEGKCVSCASPPVPSTIFKEDAIEPKTGIKFPPFLEDDSSSSATVLVGVGLKGMRVMRVKNLNLYAFGLYVQPNSIHEKLGPKYASVPTDKLMENPDFYRDLLRENLHMRVRLVVNYNGLSVGAVRDVFEKSLGLRLQKMNPNTDYHCLKTFGSHFTEDIPIPAGTKIDFCQTSDGKLITEIDGRKIGAVQSKDLCRAFFDLCLKLNYFTIKLFVL

SEQ ID NO: 79441 - protein, 104 aa, Setaria italica
  Transcript Sequence Number=SeqID_13467
LSHSFCSFFWYITVSIPCGGRVPCYHTRNGWLCALSHDVIATSVLYAQFFIYTVESYTFAPFCTERIDRIYSDCHNLVSWKNGTYTLTCFFEPLRTSVVGMNPL

SEQ ID NO: 79442 - protein, 55 aa, Setaria italica
  misc_feature (55)..(55): Xaa can be any naturally occurring amino acid
  Transcript Sequence Number=SeqID_13468
  Gene Ontology: Mol. function=metalloendopeptidase activity; Biological process=proteolysis
  Homolog annotation: Hit_ID=Q8RZ80; Match level="QueryCoverage=98%, HitCoverage=8%, E-value=4e-22, Identity=88%"; Hit description =Endopeptidase-like protein
SRFSALRLEGDFAEIPSLLLENWCFESISLKMMSGFHQDITRSVTSEACQSLKRX

SEQ ID NO: 79443 - protein, 301 aa, Setaria italica
  misc_feature (163)..(163): Xaa can be any naturally occurring amino acid
  misc_feature (172)..(172): Xaa can be any naturally occurring amino acid
  Transcript Sequence Number=SeqID_13469
  Gene Ontology: Mol. function=metalloendopeptidase activity; Cellular component=cytoplasm; Biological process=proteolysis
  Homolog annotation: Hit_ID=Q8RZ80; Match level="QueryCoverage=100%, HitCoverage=48%, E-value=1e-165, Identity=90%"; Hit description =Endopeptidase-like protein
  Pfam annotation: Domain name=Peptidase_M3; Domain location=1-298; Score=5.7; E_value=3.5e-10; Accession=PF01432.12; Description =Peptidase family M3
FDEIKDAEVWHDTVRVFSVWDASSSDLLGYFFLDIFAREGKYAHTCVVTLQNGCLCSNGTRKVPAAVLLSQCPKEFDGNSALLRFPEVVRLFHEFSHVVHHISNRATFSRFSALRLEGDFAEIPSLLLENWCFESISLKMMSGFHQDITRSVTSEACQSLKRXRDLFAGLKXKQEILLCLVDQIIHSSENVDIDDLIKELHPKVMLGIPLLEGTSPASCFPRIAVGYDAVCYSYIWSEVFAADLFVSKFKDDLLNQHAGLRFRNKVLAPGGSKDPLEIITDYLGREPSLQPFIQSRTGNSL

SEQ ID NO: 79444 - protein, 215 aa, Setaria italica
  misc_feature (24)..(24): Xaa can be any naturally occurring amino acid
  Transcript Sequence Number=SeqID_13470
  Gene Ontology: Mol. function=zinc ion binding; Cellular component =nucleus; Biological process=regulation of transcription, DNA -dependent
  Homolog annotation: Hit_ID=Q7XTS2; Match level="QueryCoverage=95%, HitCoverage=19%, E-value=9e-35, Identity=38%"; Hit description =OSJNBa0008M17.13 protein
  Pfam annotation: Domain name=FAR1; Domain location=15-103; Score =123.6; E_value=6.5e-34; Accession=PF03101.7; Description=FAR1 family
NQRKFKKNRKNEAYEFYSMYAGKXGFNVRRASMTVNTENVITRRMFVCSKEGFREKKRGAKRVKKPRPETRTGCPACMVIRLGTNGKYQVTEFVTFHNHQLGAAAASDLAMASQSTENDQEDGVDLADRSPDDSVHKQNLINESATLNSIEGRSCKRYKCTKTPHYGDVGATLEYLQKMQHDNPSFFYAVKSDENGNFTNFFWADSKSTVDFVHF

SEQ ID NO: 79445 - protein, 87 aa, Setaria italica
  Transcript Sequence Number=SeqID_13471
  Subcellular localization annotation: CTP_CleavageSite=15; ConfidenceScore=5.17e-01
NPPPPPPTPPPPPPSGGEHGERRRALARFRRALLQRLASARLLHKVYNVQVTTSQESLNFFWIRRRLQRAHPAGCLRHADGWGTQDP

SEQ ID NO: 79446 - protein, 71 aa, Setaria italica
  Transcript Sequence Number=SeqID_13472
  Gene Ontology: Mol. function=nucleotide binding
  Homolog annotation: Hit_ID=B6TN07; Match level="QueryCoverage=77%, HitCoverage=19%, E-value=1e-19, Identity=87%"; Hit description=SNF1 -related protein kinase regulatory subunit beta-1
SLPDLSNALLDVHDYVPESLDSVAEFEAPPSPEHSYDLQYPGDEEFAKEPPTLPPQLLMSVISVIRITIAE

SEQ ID NO: 79447 - protein, 187 aa, Setaria italica
  misc_feature (111)..(111): Xaa can be any naturally occurring amino acid
  misc_feature (154)..(154): Xaa can be any naturally occurring amino acid
  Transcript Sequence Number=SeqID_13473
  Gene Ontology: Mol. function=kinase activity; Cellular component =nucleoplasm; Biological process=fatty acid biosynthetic process
  Homolog annotation: Hit_ID=B6TN07; Match level="QueryCoverage=95%, HitCoverage=62%, E-value=3e-78, Identity=84%"; Hit description=SNF1 -related protein kinase regulatory subunit beta-1
  Pfam annotation: Domain name=AMPKBI; Domain location=90-180; Score =102.2; E_value=1.7e-27; Accession=PF04739.7; Description=5'-AMP -activated protein kinase, beta subunit, complex-interacting region
WSQGGNEVFLEGSWDNWTSRRALERSGKDHAILLVLPSGVYHYRIIVDGDLRYIPEQPYVTDELGQVANLLDVHDYVPESLDSVAEFEAPPSPEHSYDLQYPGDEEFAKEXPPTLPPQLLMSVLGDGDPDNADDQPPKPQHVVLNHLFIEKGWXSQSLLALGVTHRFESKCVSFVLYNRELKGKGKR

SEQ ID NO: 79448 - protein, 229 aa, Setaria italica
  misc_feature (71)..(71): Xaa can be any naturally occurring amino acid
  misc_feature (152)..(152): Xaa can be any naturally occurring amino acid
  misc_feature (195)..(195): Xaa can be any naturally occurring amino acid
  Transcript Sequence Number=SeqID_13474
  Gene Ontology: Mol. function=kinase activity; Cellular component =nucleoplasm; Biological process=fatty acid biosynthetic process
  Homolog annotation: Hit_ID=Q18PR8; Match level="QueryCoverage=86%, HitCoverage=66%, E-value=3e-80, Identity=77%"; Hit description=Beta subunit 2 of SnRK1
  Pfam annotation: Domain name=AMPKBI; Domain location=168-229; Score =19.2; E_value=3.1e-06; Accession=PF04739.7; Description=5'-AMP -activated protein kinase, beta subunit, complex-interacting region
AYVNIAQRIFSWDKSHLLALRLVLLQLTGNCTLQVPVAPLQRPTEFSPVFNHSPINGTDESTTNHALEKGXIPTLITWSQGGNEVFLEGSWDNWTSRRALERSGKDHAILLVLPSGVYHYRIIVDGDLRYIPEQPYVTDELGQVANLLDVHXDYVPESLDSVAEFEAPPSPEHSYDLQYPGDEEFAKEPPTLPPXLLMSVLGDGDPDNADDQPPKPQHVVLNHLFIEKG

SEQ ID NO: 79449 - protein, 133 aa, Setaria italica
  Transcript Sequence Number=SeqID_13475
  Pfam annotation: Domain name=AIG2; Domain location=1-77; Score=21.3; E_value=0.00012; Accession=PF06094.4; Description=AIG2-like family
  Subcellular localization annotation: CTP_CleavageSite=17; ConfidenceScore=5.06e-01
ASLVIGPYSVPFLLPTSSSSSSSGRVVSGELYAPSPAALAELDAFEGTHIGVYERRPITVVADGSGEVVEAEAYFAHPSYAEALWRRCGGEAAEIGEYTADHANRYIPITERITDATGLIDAIHRFLATAPDN

SEQ ID NO: 79450 - protein, 49 aa, Setaria italica
  Transcript Sequence Number=SeqID_13476
MRLLPLLLLLLAGAAARAASDDPFLSGAANHSYNIDCGGAADFTSSFGR

SEQ ID NO: 79451 - protein, 310 aa, Setaria italica
  misc_feature (189)..(189): Xaa can be any naturally occurring amino acid
  misc_feature (277)..(277): Xaa can be any naturally occurring amino acid
  Transcript Sequence Number=SeqID_13477
  Gene Ontology: Mol. function=histone-lysine N-methyltransferase activity; Cellular component=nucleus; Biological process=chromatin modification
  Homolog annotation: Hit_ID=Q6GV25; Match level="QueryCoverage=95%, HitCoverage=39%, E-value=1e-114, Identity=69%"; Hit description=SET domain protein
  Pfam annotation: Domain name=YDG_SRA; Domain location=174-310; Score =227.7; E_value=3e-65; Accession=PF02182.9; Description=YDGSRA domain
TVGSENAAVGDQGCAGGQSAAHWTSDVSANANGPIDATPISAYRATRPNVISLDDDDDDDENYIANQTSASGRKIKRPSRLSGYNMNDGMGSDSSNSMKTKRPKPSHKKASANNELAVVPPSGDPRVIVEAVLMTYEALRRRHLQMDEEQETSKRADLKAGAIMMARNLRANTGKRIGVVPGVEIGDIXFYFRMELCIIGLHAPSMAGIDYMTAKFGDEDDSIAICIVAAGGYDNKDDDTDVLVYSGSGGNSRNNEERHDQKLERGNLALERSLSRXNLIRVVRGYKDPGCLTGKVYIYDGLYRIHESWK

SEQ ID NO: 79452 - protein, 239 aa, Setaria italica
  misc_feature (25)..(25): Xaa can be any naturally occurring amino acid
  Transcript Sequence Number=SeqID_13478
  Gene Ontology: Mol. function=binding; Cellular component=nucleus
  Homolog annotation: Hit_ID=B9IH01; Match level="QueryCoverage=93%, HitCoverage=38%, E-value=1e-23, Identity=31%"; Hit description =Tetratricopeptide repeat-containing protein
  Pfam annotation: Domain name=SHNi-TPR; Domain location=137-174; Score= 8.7; E_value=0.062; Accession=PF10516.1; Description=SHNi-TPR
FLFNFLFCCPQRNCLGAISESTYYXRSKENFVNVSLGGSYVSKLSLPDISKVGKDMEEVARSLFGNSDVSLNIDPGCCMNCRSHIDVASAAATSHREASKVDRLKEITLLDKTLILEALQSLKQLKKLRHPYSKALAQAEDTIAEAFVKIGDQEQAQKHCEASIQILEKLYHPKHIAIAHELIKLISILLSLGDTASAAATFARAEAIFSLYYGSHMEKILAYLGTLKRAVRCESTEAC

SEQ ID NO: 79453 - protein, 82 aa, Setaria italica
  Transcript Sequence Number=SeqID_13479
  Gene Ontology: Mol. function=binding; Cellular component =mitochondrial inner membrane; Biological process=transport
  Homolog annotation: Hit_ID=B9S901; Match level="QueryCoverage=97%, HitCoverage=26%, E-value=4e-10, Identity=38%"; Hit description =Mitochondrial uncoupling protein, putative
  Pfam annotation: Domain name=Mito_carr; Domain location=1-81; Score =52.7; E_value=1.4e-12; Accession=PF00153.19; Description =Mitochondrial carrier protein
TAGTLVTTPVDMIKTRLMLQRESKGVRVYRNGFHCAYQVVVTEGVKSLYKGGFATFARLGPQTTITFIVCEKLRELAGMTAI

SEQ ID NO: 79454 - protein, 635 aa, Setaria italica
  Transcript Sequence Number=SeqID_13480
  Homolog annotation: Hit_ID=Q7XQQ0; Match level="QueryCoverage=89%, HitCoverage=77%, E-value=1e-139, Identity=52%"; Hit description =OSIGBa0160I14.5 protein
GGAVGAVGWGQLPPPPPLPAGQEAPEYYNARSGRRQVDDECGIRNARSRRNRGGDYGSSNSSNYNGRGKRKFGADNRYSDSGRDRGRNRGYLDTRSYDEDDEDGAPGFKRERRSSGGIDEVGSSVSGVAGEGPSSKVEAMGESELEDTGSKASSNSNLRQKADALQEVEDENEANKMQEDSVVSNSEVVEQVLNLEGNINNDSSGAVQEAETKHLPVFSGEKVSDGRPEDSGILSEKVEDDKTLHEKAEDDTTSDEVSIMENNLPNDSINLLGYCSFARVPKRPRSVLANRNAAPARREFAVSGQINLVTAEEISQTTMDGEANTNLITNIQEDSKDEVVRQEHAEQSTTCNHVSESMTFQEKGTQDETEEMEEQKNIPQHYGVEDKEPNEPSPSFASHQNSFSLQVEKGIEIYNLDTPPQDEVLIDPPDKGKTVDSELLPNMKAEAGVTMEEEKLGQSSSFKIRDLNLVGSPEVADMRADPRLGQSSTAGCPVELQDNQQVEFGTTLGNNSSNADTFLLGNKAVQVIDIEDDPPIEAGACDTSKAKGEMVYSSMENLTNPPTNTDALHGIQDGYSLAISDYLGYQSIQTDLQAGMDLNGSEGITVMDDPIYSSLGDIGFMEVWDQQPQDYEKFF

SEQ ID NO: 79455 - protein, 74 aa, Setaria italica
  Transcript Sequence Number=SeqID_13481
  Gene Ontology: Mol. function=nucleoside-triphosphatase activity; Cellular component=nucleus; Biological process=regulation of transcription, DNA-dependent
  Homolog annotation: Hit_ID=A9TL22; Match level="QueryCoverage=91%, HitCoverage=14%, E-value=9e-26, Identity=77%"; Hit description=DNA helicase, TBP-interacting protein
VVETSLRYAIHLITSAALACQKRKGKVVEMEDISRVYQLFLDVKRSTQYLMEYQSQYMFNEVPGEADGDDAMQS

SEQ ID NO: 79456 - protein, 138 aa, Setaria italica
  misc_feature (92)..(92): Xaa can be any naturally occurring amino acid
  Transcript Sequence Number=SeqID_13482
  Gene Ontology: Mol. function=nucleoside-triphosphatase activity; Cellular component=nucleus; Biological process=regulation of transcription, DNA-dependent
  Homolog annotation: Hit_ID=A9TL22; Match level="QueryCoverage=95%, HitCoverage=25%, E-value=5e-30, Identity=55%"; Hit description=DNA helicase, TBP-interacting protein
  Pfam annotation: Domain name=TIP49; Domain location=25-137; Score= -129.9; E_value=5.6e-06; Accession=PF06068.5; Description=TIP49 C -terminus
FASVAASELFSLDLSKTEALTQAFRRSIGVRIKEEAEIIEGEVVEISIDRPLSASSAGGSSSAPSGATAAGKSGRLTLKTTDMETVYELGGXMIEALGKEKVQSGDVIALDKASGKVTKLGRSIGRSRDYDACLVPTN

SEQ ID NO: 79457 - protein, 488 aa, Setaria italica
  Transcript Sequence Number=SeqID_13483
  Gene Ontology: Mol. function=nucleoside-triphosphatase activity; Cellular component=nucleus; Biological process=regulation of transcription, DNA-dependent
  Homolog annotation: Hit_ID=A9TL22; Match level="QueryCoverage=96%, HitCoverage=98%, E-value=0.0, Identity=74%"; Hit description=DNA helicase, TBP-interacting protein
  Pfam annotation: Domain name=AAA; Domain location=82-436; Score=12.7; E_value=1.8e-06; Accession=PF00004.21; Description=ATPase family associated with various cellular activities (AAA)
  Pfam annotation: Domain name=TIP49; Domain location=134-457; Score =715.0; E_value=5.9e-212; Accession=PF06068.5; Description=TIP49 C -terminus
  Pfam module annotation: Pfam domain module=AAA::TIP49; Domain location=82-436::134-457
RTTEPAAARRVVAMAELKRLSESRDLTRIERIGAHSHIRGLGLDSSMEARDASEGMVGQLPARRAAGLILQLIRQGKIAGRAVLIAGQPGTGKTALAMGIAKSLGAETPFASVAASELFSLDLSKTEALTQAFRRAIGVRIKEEAEIIEGEVVEISIDRPLSAAAGSAAPSGATAPGKTGRLTLKTTDMETVYELGGKMIEALGKEKVQSGDVVALDKASGKVTKLGRSIGRSRDYDAVGPHTKFVKCPDGELQKRKEVVHCVTLHEIDVINSRTQGFLALFTGDTGEIRAEVREQIDTKVAEWREEGKAEIVPGVLFIDEVHMLDIECFSFLNRALENDMAPILVIATNRGITSIRGTNYRSPHGIPPDFLDRLLIITTQPYTEDDIRKILDIRCDEEDVEMSADAKVLLTKIGVETSLRYAIHLITSAALACQKRKGKVVEMEDISRVYQLFLDVKRSTQYLMEYQSQYMFNEVSGEADGNDAMQS

SEQ ID NO: 79458 - protein, 74 aa, Setaria italica
  Transcript Sequence Number=SeqID_13484
RSPSCWAGLRPGQKRAPRRASGPRAIWTFVILAVCSTAARKTDCYGEDDCLVRIEWWSMYAVICSLWHKLFPPL

SEQ ID NO: 79459 - protein, 119 aa, Setaria italica
  Transcript Sequence Number=SeqID_13485
  Subcellular localization annotation: CTP_CleavageSite=24; ConfidenceScore=5.36e-01
WRRKQDKPSPPSPSPKPLADSDPAAARRSSRHAVHPGPLLRRQHPRPRGEGVGLRRWRRLREHQALHPQGDETQKGGSTCSSLRMTGMRVKLQCKNVINWQCTCSPYVHLGYDLWTSSL

SEQ ID NO: 79460 - protein, 81 aa, Setaria italica
  Transcript Sequence Number=SeqID_13486
  Gene Ontology: Mol. function=hydrolase activity, hydrolyzing O -glycosyl compounds; Cellular component=anchored to membrane; Biological process=carbohydrate metabolic process
  Homolog annotation: Hit_ID=B6TCY1; Match level="QueryCoverage=96%, HitCoverage=15%, E-value=2e-36, Identity=93%"; Hit description =Glucan endo-1,3-beta-glucosidase 4
STYFRSLSPNGQISDPNTNLFYTNMFDAIIDATYNSIQAMNFTGIPVLVTASGWPWRGGQNEKAATVDNALAYNTNLIRHV

SEQ ID NO: 79461 - protein, 216 aa, Setaria italica
  Transcript Sequence Number=SeqID_13487
  Gene Ontology: Biological process=protein localization
  Homolog annotation: Hit_ID=A2Q3V3; Match level="QueryCoverage=71%, HitCoverage=9%, E-value=5e-26, Identity=41%"; Hit description=C-5 cytosine-specific DNA methylase; Vacuolar protein sorting-associated protein
TDLLLTVTESSYERSGSTLVIPPSFELDGHARHLLEKSGLSLVDPSIQHVVGKMPVLDLMDGSSSVISCTNNSESVKKEFDKEVKAYMFAPDGHTPATELSVKLNAYPPNNGTETTRRDWSNPFLLVPGSGSTNITIPQSSTSGAFLVAAASIPVSTELFGRTRAIAFRPRYVICNACSNDLFFRQKGTRFSKHLSSGQHSFLHWSDTARELLVSI

SEQ ID NO: 79462 - protein, 142 aa, Setaria italica
  Transcript Sequence Number=SeqID_13488
  Gene Ontology: Mol. function=molecular_function; Cellular component =cellular_component; Biological process=biological_process
  Homolog annotation: Hit_ID=B6SZP9; Match level="QueryCoverage=76%, HitCoverage=97%, E-value=3e-54, Identity=93%"; Hit description=Brain protein 44-like protein
  Pfam annotation: Domain name=UPF0041; Domain location=1-111; Score =146.1; E_value=1.1e-40; Accession=PF03650.5; Description =Uncharacterised protein family (UPF0041)
  Subcellular localization annotation: CTP_CleavageSite=93; ConfidenceScore=5.11e-01
MSAAFKAFLNSPLGPKTTHFWGPVSNWGIILASVADTKKPPEMISGNMTGVLCVYSALFVRFAWMVRPRNYFLMVTHSCNECVQLYQLSRWARAQGFLGKKKEPEAPRVKKMTLRPRKGNSEAHASIIQIMYYYHRLNNVTT

SEQ ID NO: 79463 - protein, 93 aa, Setaria italica
  Transcript Sequence Number=SeqID_13489
  Subcellular localization annotation: CTP_CleavageSite=61; ConfidenceScore=5.55e-01
FFFFIIQWFIGHLTSYIYSKNTREAVLPNTFKTTLSTPKKPLHPRSQSRNRFRTSRSPAKLAMSIRPTLSMNDPKIFDLTRSEQSARSCLPVP

SEQ ID NO: 79464 - protein, 72 aa, Setaria italica
  misc_feature (19)..(19): Xaa can be any naturally occurring amino acid
  misc_feature (32)..(32): Xaa can be any naturally occurring amino acid
  Transcript Sequence Number=SeqID_13490
QGNNCILLLLSSSTSLIRXRNRKTKKQDKCLXIYQIFLFNMKELSWYATIKLIRRCPFQSFTSYRSLDLKKT

SEQ ID NO: 79465 - protein, 78 aa, Setaria italica
  Transcript Sequence Number=SeqID_13491
SLVLVPFATECGVDTYFSRMNLEHHINPSPSLKILSAFPRLTRALVEVVGASIGVSGVRILSKLEPGQTNVSMCLRPE

SEQ ID NO: 79466 - protein, 127 aa, Setaria italica
  Transcript Sequence Number=SeqID_13492
YKRSAEPSEFNMGYLMDLWRAYRSSRPGRTVVEWALLYQVAFHANNRELTPSGPDTAQKRPTIVCQLCFKLRHHLFFSFTTLLWYTILGYTSVKIYCLDIQWGGWWEALSSYPFNLPTPKLCFHDPS

SEQ ID NO: 79467 - protein, 65 aa, Setaria italica
  Transcript Sequence Number=SeqID_13493
  Subcellular localization annotation: CTP_CleavageSite=39; ConfidenceScore=5.31e-01
CSSNLGTDDLGSFNSVNCSFKWPQKHTHTVRTRYWRQCLAVRVKMMLMLTLIFVKCFIPLTFLQI

SEQ ID NO: 79468 - protein, 461 aa, Setaria italica
  Transcript Sequence Number=SeqID_13494
  Gene Ontology: Mol. function=protein serine/threonine kinase activity; Cellular component=cytoplasm; Biological process=protein amino acid phosphorylation
  Homolog annotation: Hit_ID=B9S7L3; Match level="QueryCoverage=95%, HitCoverage=95%, E-value=1e-155, Identity=62%"; Hit description =Casein kinase, putative
  Pfam annotation: Domain name=Pkinase; Domain location=9-287; Score =136.8; E_value=6.7e-38; Accession=PF00069.17; Description=Protein kinase domain
  Pfam annotation: Domain name=Pkinase_Tyr; Domain location=9-273; Score=-153.1; E_value=0.0015; Accession=PF07714.9; Description =Protein tyrosine kinase
  Pfam module annotation: Pfam domain module=Pkinase::Pkinase_Tyr; Domain location=9-287::9-273
MEHVIGGKFKLGKKIGSGSFGELYLGVNIQSGEEVAIKLESVKSRHPQLHYESKLYMLLQGGTGIPHLKWFGVEGEYNVMVIDLLGPSLEDLFNFCSRRFSLKTVLMLADQMIARVEYMHTRGFLHRDIKPDNFLMGLGRKASQVYVIDYGLAKKYRDLQTHKHIPYRENKNLTGTARYASVNTHLGVEQSRRDDLESLGYVLMYFLRGSLPWQGLKAGTKKQKYDKISEKKMLTSIEALCKSYPSEFGTYFHYCRSLRFEDKPDYTYLKRLFRDLFIREGYQHDYVFDWTARQAADNDRLRLSGRGGLVGPSADRAAARQAVPDRFPGPVDAFGRRIDSGSGHYGEQHTKHRTLLDTLLAPKTTVDSDRRRPSSSRNGSTSRKALLSSSRGSGDPSDPNRSSHLLPTSSGSSRPSTNQRLHQSTGLEGRTSSFSKPGRIVHDDTTMRNFERLTISADRRK

SEQ ID NO: 79469 - protein, 298 aa, Setaria italica
  Transcript Sequence Number=SeqID_13495
AGESEDGDDAGGGRGSSRGNSVGVGLEDDDVLVSPRGKKRAAARVVTSDSEDEAVNDGELGSGKDGVDDQEEGGKPSKKRGFCGICDSDDEDTAEGVEVVTSKAASPAQIESGEDEDETIPICQVLKKMRKERANHDGGGDDELGEAKGCSTPPTRRSARLVKNQSKGGRAARRVLNFVEPKEYEGSEDDMEEDDDMEDFIINDEDSSENASESVEESCDEPEVSGTSVLNEESSPGPEESDSEVDYADVMARIGRKNKAKDWKFEGDMLAAFDEHPELCLKAVCALYRKQTEEEQMH

SEQ ID NO: 79470 - protein, 111 aa, Setaria italica
  Transcript Sequence Number=SeqID_13496
LTESDCICKYLGLWKPACLLSLLPQPAPIPPSAFQLIGISSCDLDSNACFFRLSTFSSACAARRHLTEERKSGGIKVRAGLPAADLTEVLLAPAAVPCLLQLHSRPWKTQN

SEQ ID NO: 79471 - protein, 77 aa, Setaria italica
  Transcript Sequence Number=SeqID_13497
  Gene Ontology: Mol. function=DNA binding; Biological process =regulation of transcription
  Homolog annotation: Hit_ID=Q8LA15; Match level="QueryCoverage=70%, HitCoverage=18%, E-value=7e-26, Identity=100%"; Hit description=ARR1 protein-like
  Pfam annotation: Domain name=Myb_DNA-binding; Domain location=27-77; Score=44.5; E_value=4.3e-10; Accession=PF00249.23; Description=Myb -like DNA-binding domain
AAAAAGRGDEADSSAAATTANNSKRPRLVWTPQLHKRFVDVVAHLGIKNAVPKTIMQLMNVEGLTRENVASHLQKYR

SEQ ID NO: 79472 - protein, 143 aa, Setaria italica
  Transcript Sequence Number=SeqID_13498
  Gene Ontology: Mol. function=calmodulin binding; Cellular component =integral to membrane; Biological process=cell death
  Homolog annotation: Hit_ID=Q94CH2; Match level="QueryCoverage=100%, HitCoverage=28%, E-value=1e-46, Identity=65%"; Hit description=Seven transmembrane protein Mlo3
  Pfam annotation: Domain name=Mlo; Domain location=1-143; Score= -205.6; E_value=3.9e-09; Accession=PF03094.7; Description=Mlo family
KRVVGIKWYYWIFVMIFLLVNITGWHSYFWISLVPLSLLLLIGAKLEHIINKLAYEVASKHAAGRGEGGAVVRPSDKLFWFHSPRLVLVLIHFILFQNAFEFAYFIWTLATFGINSCIMDKLGYSVSRIVVCVIVQVLCSYST

SEQ ID NO: 79473 - protein, 160 aa, Setaria italica
  misc_feature (31)..(31): Xaa can be any naturally occurring amino acid
  misc_feature (44)..(44): Xaa can be any naturally occurring amino acid
  misc_feature (151)..(151): Xaa can be any naturally occurring amino acid
  Transcript Sequence Number=SeqID_13499
  Gene Ontology: Mol. function=calmodulin binding; Cellular component =integral to membrane; Biological process=cell death
  Homolog annotation: Hit_ID=Q94CH2; Match level="QueryCoverage=94%, HitCoverage=29%, E-value=6e-41, Identity=62%"; Hit description=Seven transmembrane protein Mlo3
  Pfam annotation: Domain name=Mlo; Domain location=1-157; Score= -237.1; E_value=9.6e-08; Accession=PF03094.7; Description=Mlo family
RSSWYKWYYWIFSTMIFLLVNITGWHYLIYXEYYVRYPLVLLAXLLIGAKLEHIINKLAYEVASKHAAGRGEGGAVVRPSDKLFWFHSPRLVLVLIHFILFQNAFEFAYFIWTLATFGINSCIMDKLGYSVSRIVVCVIVQVLCSYSTLPXYAIVSPYWG

SEQ ID NO: 79474 - protein, 179 aa, Setaria italica
  Transcript Sequence Number=SeqID_13500
  Gene Ontology: Mol. function=hydrolase activity, acting on ester bonds; Cellular component=vacuole; Biological process=metabolic process
  Homolog annotation: Hit_ID=A6N0Q7; Match level="QueryCoverage=90%, HitCoverage=67%, E-value=4e-88, Identity=96%"; Hit description =Hydrolase (Fragment)
  Pfam annotation: Domain name=Phosphoesterase; Domain location=2-114; Score=-52.8; E_value=1.2e-06; Accession=PF04185.6; Description =Phosphoesterase family
CPSRFRSKVSCYCSTLRASPQWNETALLITYDEHGGFYDHVPTPVVGVPQPDGIVGPDPYYFKFERLGVRVPSFLISPWIEKGTVIHEPSGPQESSQYEHSSIPATVKKLFNLHSNFLTKRDAWAGTFENYFKIRKTPRTDCPETLPEVTKSLRPFGPKEDSSLSEFQVELIQLASTRL

SEQ ID NO: 79475 - protein, 117 aa, Setaria italica
  Transcript Sequence Number=SeqID_13501
  Gene Ontology: Mol. function=serine-type endopeptidase activity; Biological process=proteolysis
  Homolog annotation: Hit_ID=B9RNE4; Match level="QueryCoverage=47%, HitCoverage=6%, E-value=2e-11, Identity=58%"; Hit description =Dipeptidyl-peptidase, putative
  Subcellular localization annotation: CTP_CleavageSite=53; ConfidenceScore=5.37e-01
MLLPRFDQRMCFSRANFIAGPSYSAPFRTHTPLRLLPRRRIARRIGLATAEFAAGSFSGPALEEDDGDLGYRLPPKEIQEIVDVPPTPSYYISPRRDRIMFLKRRAMPPLSDLAKPD

SEQ ID NO: 79476 - protein, 122 aa, Setaria italica
  Transcript Sequence Number=SeqID_13502
EKSHGTRGMRALSLVIEFLPKVAHIIPFLEGKDYIKTYELDRIGMKLNNKRFYTPTSGSRWELSPQEMERLTERGVSTRRGQHTRYAVHRAVCSLSSVNLSGASPHLEAPYSMTSHGSARYL

SEQ ID NO: 79477 - protein, 125 aa, Setaria italica
  misc_feature (9)..(9): Xaa can be any naturally occurring amino acid
  misc_feature (17)..(17): Xaa can be any naturally occurring amino acid
  misc_feature (101)..(101): Xaa can be any naturally occurring amino acid
  Transcript Sequence Number=SeqID_13503
  Gene Ontology: Mol. function=nucleic acid binding; Cellular component= chromatin; Biological process=chromatin assembly or disassembly
  Homolog annotation: Hit_ID=Q5SML0; Match level="QueryCoverage=100%, HitCoverage=6%, E-value=8e-36, Identity=65%"; Hit description =Chromatin-remodeling factor CHD3
EYNTVHRVXLTGTPVQXNLDELFMLMHFLEGESFGSITELQEEFKDINQDKQIEKLHGMLKPHLLRSANLLQFNDCLIGCPCSKDFKLIAWETRIIVHEYXFKKDVMKELPPKKELILRVELTSK

SEQ ID NO: 79478 - protein, 72 aa, Setaria italica
  Transcript Sequence Number=SeqID_13504
  Gene Ontology: Mol. function=nucleic acid binding; Cellular component= chromatin; Biological process=chromatin assembly or disassembly
  Homolog annotation: Hit_ID=B9HAU9; Match level="QueryCoverage=98%, HitCoverage=5%, E-value=4e-26, Identity=82%"; Hit description =Chromatin remodeling complex subunit (Fragment)
GLLAEGTIEERMMQLTKKKMILEHLVVGRLTKANNVNQEELDDIIRYGSKELFDDENDESRQIHYDDAAIEK

SEQ ID NO: 79479 - protein, 176 aa, Setaria italica
  misc_feature (108)..(108): Xaa can be any naturally occurring amino acid
  Transcript Sequence Number=SeqID_13505
  Gene Ontology: Mol. function=nucleic acid binding; Cellular component= chromatin; Biological process=chromatin assembly or disassembly
  Homolog annotation: Hit_ID=Q5SML0; Match level="QueryCoverage=93%, HitCoverage=12%, E-value=2e-64, Identity=72%"; Hit description =Chromatin-remodeling factor CHD3
  Pfam annotation: Domain name=DUF1086; Domain location=2-139; Score =138.8; E_value=1.7e-38; Accession=PF06461.3; Description=Domain of Unknown Function (DUF1086)
GNVSGRGANILKEKSRNVDLIPLMEGEGRTLRVLGFNTAQRAMFLQTLNRYGFQNYDWKEYLPRLKGKSVEEIQRYAELVMAHLVEDINDSDYFSDGVPKEGIRVDEXLVRIANISLIEEKVAAMGQGKITNLFPNYLLCEFQGLSGGRIWKAEHDLLLLKGILKYVSVDISLCYN

SEQ ID NO: 79480 - protein, 114 aa, Setaria italica
  Transcript Sequence Number=SeqID_13506
  Gene Ontology: Mol. function=nucleic acid binding; Cellular component= chromatin; Biological process=chromatin assembly or disassembly
  Homolog annotation: Hit_ID=Q5SML0; Match level="QueryCoverage=85%, HitCoverage=7%, E-value=2e-40, Identity=87%"; Hit description =Chromatin-remodeling factor CHD3
  Pfam annotation: Domain name=C1_3; Domain location=56-82; Score=7.6; E_value=0.075; Accession=PF07649.4; Description=C1-like domain
  Pfam annotation: Domain name=PHD; Domain location=57-101; Score=24.5; E_value=5.4e-05; Accession=PF00628.21; Description=PHD-finger
  Pfam annotation: Domain name=zf-C3HC4; Domain location=58-98; Score =1.6; E_value=0.066; Accession=PF00097.17; Description=Zinc finger, C3HC4 type (RING finger)
  Pfam module annotation: Pfam domain module=C1_3::PHD::zf-C3HC4; Domain location=56-82::57-101::58-98
MSSLVERLRVRSERRPLYTLDESDDDLPPRGGAGKGKDRQNEAPAERIEREDAKEEACQRCGKSDNLVPCSTCTYAFHRKCLVPCLNITSDKWSCPECVSPLTEMEKILDCEMR

SEQ ID NO: 79481 - protein, 1277 aa, Setaria italica
  misc_feature (1077)..(1077): Xaa can be any naturally occurring amino acid
  Transcript Sequence Number=SeqID_13507
  Gene Ontology: Mol. function=nucleic acid binding; Cellular component= chromatin; Biological process=chromatin assembly or disassembly
  Homolog annotation: Hit_ID=Q5SML0; Match level="QueryCoverage=98%, HitCoverage=92%, E-value=0.0, Identity=74%"; Hit description =Chromatin-remodeling factor CHD3
  Pfam annotation: Domain name=C1_3; Domain location=3-29; Score=7.6; E_ value=0.075; Accession=PF07649.4; Description=C1-like domain
  Pfam annotation: Domain name=Chromo; Domain location=140-191; Score =67.5; E_value=5e-17; Accession=PF00385.16; Description='chromo' (CHRromatin Organisation MOdifier)
  Pfam annotation: Domain name=Chromo; Domain location=50-121; Score =30.0; E_value=9.9e-06; Accession=PF00385.16; Description='chromo' (CHRromatin Organisation MOdifier)
  Pfam annotation: Domain name=DEAD; Domain location=225-413; Score= -41.5; E_value=0.041; Accession=PF00270.21; Description=DEADDEAH box helicase
  Pfam annotation: Domain name=DUF1086; Domain location=854-1003; Score= 161.6; E_value=2.3e-45; Accession=PF06461.3; Description=Domain of Unknown Function (DUF1086)
  Pfam annotation: Domain name=DUF1087; Domain location=777-842; Score =106.1; E_value=1.2e-28; Accession=PF06465.5; Description=Domain of Unknown Function (DUF1087)
  Pfam annotation: Domain name=Helicase_C; Domain location=582-661; Score=95.8; E_value=1.5e-25; Accession=PF00271.23; Description =Helicase conserved C-terminal domain
  Pfam annotation: Domain name=PHD; Domain location=4-48; Score=24.5; E_ value=5.4e-05; Accession=PF00628.21; Description=PHD-finger
  Pfam annotation: Domain name=ResIII; Domain location=221-407; Score =10.3; E_value=7.3e-06; Accession=PF04851.7; Description=Type III restriction enzyme, res subunit
  Pfam annotation: Domain name=SNF2_N; Domain location=227-525; Score =363.0; E_value=5.4e-106; Accession=PF00176.15; Description=SNF2 family N-terminal domain
  Pfam annotation: Domain name=zf-C3HC4; Domain location=5-45; Score =1.6; E_value=0.066; Accession=PF00097.17; Description=Zinc finger, C3HC4 type (RING finger)
  Pfam module annotation: Pfam domain module=C1_3::Chromo::Chromo::DEAD: :DUF1086::DUF1087::Helicase_C::PHD::ResIII::SNF2_N::zf-C3HC4; Domain location=3-29::140-191::50-121::225-413::854-1003::777-842::582 -661::4-48::221-407::227-525::5-45
KEEACQRCGKSDNLVPCSTCTYAFHRKCLVPCLNITSDKWSCPECVSPLTEMEKILDCEMRDASREDTSSSEPESKKIRHYLIKWKGLSHIHCSWVSEKEYLEAAKIHPRLKTRLNNFRKQMDSVEKSDDEFIAIRPEWTTVDRILSSRKSSTGEQEYYVKWKELTYEECTWESESDISAFQPQIERFNEIQSRRKKYGDKGKAVSRDPRHFKESPQFLSGGTLHPYQLEGLNFLRYSWHHNKRVILGDEMGLGKTIQSIAFLASLFEDKFGPHLVVAPLSTLRNWEREFATWAPQMNVVMYFGAAASREIIKKYEFYYPKEKAKKLKKKKSSPSNEEKKHLRIKFDVLLTSYEMINMDSAVLKNIEWECLVVDEGHRLKNKDSKLFGQLKEYNTVHRVLLTGTPVQNNLDELFMLMHFLEGESFGSITELQEEFKDINQDKQIEKLHGMLKPHLLRRFKKDVMKELPPKKELILRVELTSKQKEYYKAILTKNYEVLARRNGGQISLINVVMELRKLCCHGFMTDEPDSEPANPEEGLRRLLDSSGKMQLLDKMMVKLKEQGHRVLIYSQFQHMLDLLEDYLSYRKWSYERIDGKIGGAERQIRIDRFNAPTSTRFCFLLSTRAGGLGINLATADTVIIYDSDWNPHADLQAMARAHRLGQTSKVMIYRLVSRGTIEERMMQLTKKKMILEHLVVGRLTKANNVNQEELDDIIRYGSKELFDDENDESRQIHYDDAAIEKLLDRKQVDDEESVEDDEDDEFLKGFKVANFEYIDEAKAQAEKEEARRKAAAEAANSARANYWDELLKDKYDVQKVEEHTAMGKGKRSRKQMAAADEDDIHDLSSEDEDYSFEEDVSDNDTSLQGNVSGRRGQYSKRKSRNVDLIPLMEGEGRTLRVLGFNTAQRAMFLQTLNRYGFQNYDWKEYLPRLKGKSVEEIQRYAELVMAHLVEDINDSDYFSDGVPKEGIRVDDVLVRIANISLIEEKVAAMGQGKITNLFPNYLLCEFQGLSGGRIWKAEHDLLLLKGILKHGYARWQYISDDRDNGLFEAARRELNLPSINEIMGPQLNVENGNLEGXREAQVNSAGAHFKEIQRKIVEFLRKRYHILERCLDLEYAVIKSNTPVPDDIAEQGVPAGHAPAVRDINELLVELQELQNLEPIPTNEVAPDGTGGPSEVPHLYNKMCGVLEDSGASALNSFFGAKSASSSLASSLHQFETLCEGVVQALQPQQNGTASAIKEEAVDANSKEAAAPPQDSGPAAANGEPPAAKTEAMEIDG

SEQ ID NO: 79482 - protein, 336 aa, Setaria italica
  misc_feature (39)..(39): Xaa can be any naturally occurring amino acid
  Transcript Sequence Number=SeqID_13508
  Gene Ontology: Cellular component=viral envelope
  Homolog annotation: Hit_ID=Q4LDF9; Match level="QueryCoverage=86%, HitCoverage=88%, E-value=3e-79, Identity=48%"; Hit description=Outer envelope protein
  Subcellular localization annotation: CTP_CleavageSite=48; ConfidenceScore=5.09e-01
MAAPALLPPPPMDGDGAAPPVPATPDPASPPPAPEPKPXLLRRRPPVRVTSEFDSERRLFSHRFSCRVLDGLAKLRLRVSHGAGGGGIAWGPPDVALLARNFSVVVDPASRGAVLRGAADLAGSLRLRASHNTKEQQGEVSVTANLGDSPCKIELSSLVPPNGLPRATFFFPNGEVSIKEKILDEGNKILSVNGLVKSRVLKGVCTTAYNDNAMNIKYRYKDDEISFIPSISLPSNSLAFAFKRQLTPSDKLSYWYNFDTNYWGAIYKHKENKHLKWKAGYESDNRLGWASLWVGDAGGSTKEVPLKAKAHFTLKVPQGNIKNSVVVFHVKKRWDF

SEQ ID NO: 79483 - protein, 85 aa, Setaria italica
  Transcript Sequence Number=SeqID_13509
  Gene Ontology: Mol. function=nucleotide binding; Biological process =defense response
  Homolog annotation: Hit_ID=Q5VN70; Match level="QueryCoverage=98%, HitCoverage=6%, E-value=2e-23, Identity=61%"; Hit description =Putative NBS-LRR disease resistance protein
NGSLLDLPKWFGNLKQLVKMHLSRSRLKEGKTMEVLGTLPNLMLLRLYRNAYVGEKLVFRREAFPNLKEIDIYFLKQLREMRFEE

SEQ ID NO: 79484 - protein, 69 aa, Setaria italica
  Transcript Sequence Number=SeqID_13510
ATSSALTPPSTAAGDSLTCCKKGTSSELNLNLDLEDPDDDTDADMSTDEPRDVEDSNPRPESRLKRKAF

SEQ ID NO: 79485 - protein, 102 aa, Setaria italica
  Transcript Sequence Number=SeqID_13511
KQILLQLLTLFGTRHRSLRELPGEGLRTADCFDVPGGDIEVSMKFQEHAQYLKEQANCCYWCKIFHDSNTICTVLLMLQLMLFLREVQFWCNYNPISAGRNA

SEQ ID NO: 79486 - protein, 163 aa, Setaria italica
  Transcript Sequence Number=SeqID_13512
  Gene Ontology: Mol. function=protein binding; Cellular component =cytoplasm; Biological process=regulation of mitotic metaphase/anaphas e transition
  Homolog annotation: Hit_ID=Q9P2D0-2; Match level="QueryCoverage=100%, HitCoverage=13%, E-value=2e-21, Identity=40%"; Hit description =Isoform 2 of Inhibitor of Bruton tyrosine kinase
  Pfam annotation: Domain name=RCC1; Domain location=40-87; Score=9.7; E_value=0.073; Accession=PF00415.10; Description=Regulator of chromosome condensation (RCC1)
  Pfam annotation: Domain name=RCC1; Domain location=90-144; Score =19.2; E_value=0.0068; Accession=PF00415.10; Description=Regulator of chromosome condensation (RCC1)
  Pfam module annotation: Pfam domain module=RCC1::RCC1; Domain location=40-87::90-144
LLQFGASLTLEDTKGRTPVDLLSCPVSQANGDSPDAVATEVFSWGSGTNYQLGTGNAHIQKLPCKVDTLHGSYIKTVAASKFHSVAVSSDGELYTWGFGRGGRLGHPDIHSGQTTAVITPRQVTVGLGRKRVNVVAAAKHHTVIATEVGELFTWGSNREGQLG

SEQ ID NO: 79487 - protein, 1031 aa, Setaria italica
  misc_feature (224)..(224): Xaa can be any naturally occurring amino acid
  misc_feature (760)..(760): Xaa can be any naturally occurring amino acid
  Transcript Sequence Number=SeqID_13513
  Gene Ontology: Mol. function=protein binding; Cellular component =cytoplasm
  Homolog annotation: Hit_ID=Q9P2D0; Match level="QueryCoverage=29%, HitCoverage=21%, E-value=5e-32, Identity=32%"; Hit description =Inhibitor of Bruton tyrosine kinase
  Pfam annotation: Domain name=Ank; Domain location=60-92; Score=40.1; E_value=9.1e-09; Accession=PF00023.22; Description=Ankyrin repeat
  Pfam annotation: Domain name=Ank; Domain location=94-126; Score=21.3; E_value=0.0041; Accession=PF00023.22; Description=Ankyrin repeat
  Pfam annotation: Domain name=RCC1; Domain location=153-200; Score =9.7; E_value=0.073; Accession=PF00415.10; Description=Regulator of chromosome condensation (RCC1)
  Pfam annotation: Domain name=RCC1; Domain location=203-265; Score =13.5; E_value=0.029; Accession=PF00415.10; Description=Regulator of chromosome condensation (RCC1)
  Pfam annotation: Domain name=RCC1; Domain location=268-319; Score =30.1; E_value=9.2e-06; Accession=PF00415.10; Description=Regulator of chromosome condensation (RCC1)
  Pfam annotation: Domain name=RCC1; Domain location=322-375; Score =4.1; E_value=0.3; Accession=PF00415.10; Description=Regulator of chromosome condensation (RCC1)
  Pfam module annotation: Pfam domain module=Ank::Ank::RCC1::RCC1::RCC1: :RCC1; Domain location=60-92::94-126::153-200::203-265::268-319::322 -375
  Subcellular localization annotation: CTP_CleavageSite=12; ConfidenceScore=5.03e-01
METSISPPGTSKQSAVRKPSPGSSLKDLCLVSKQGSIAEVESALALLKKSGGNIDGRNAFGLSALHLATWRNHLPIVRRLLDAGADPDARDGESGWSSLHRALHFGHLCIAGVLLQFGASLTLEDTKGRTPVDLLSCPVSQANGDSPDAVATEVFSWGSGTNYQLGTGNAHIQKLPCKVDTLHGSYIKTVAASKFHSVAVSSDGELYTWGFGRGGRLGHPDIHXSNREGQLGYPSVDTQSTPRRVSSLKQRIIAVAAANKHSAAVADTGEVFTWGCNKEGQLGYGTSNSASNCIPRMVEYLKGKVFRGVSAAKYHTIVLGVDGEVFTWGHRLVTPRRVVIARCLKKGGNTNLKFHRMERLQVISVAAGTMHSTALTADGALFYWVSSDPDLKCQQIFSMCGRNIVSISAGKYWTAVATSTGDVFMWDAKKRKDEMPLFTRVHGVKRATSVCVGETHMLVLSSIYHPEYPPKPKIQSINSMSEWNSGMEELDEDILFNDVQPDSGLSGSSGEMSKTVPSLKSLCEKVAVEYLLEPKNAIQLLEVADSLEAKELKKHCEDLAIRNLDYIFTVGAPSIMNASPEILASLEKLLDEKSSEAWCQRRLPTMTATYPAVIDSDGEEDEAIEFLKPRKCGKSASRPSGMSSQENFLQKDCTAEQAVSKQIRALRKKLQQIEILEAKQLTGHQLDDQQLAKLESRAALEGELAELGVPSEAYSRTSSVCPAESRTNRKPEVSKKQKRKNKQAQQSNTPSAKSETEQQXLLRTSRKSYQLMSLQKKEVCAADPIKHTEDAAFSNTKGIASPLEKKPSQPTSSKKKNRKGGLSLFLSGALDDTPKPSLPAPVVHVTPKHEGPAWGGAKITKGPASLRDIQSEQRKTNEPVLAKAKDRFENSPDSAGRVRLSSFIPDAHSSPIAVTPARSLPSSEGDRSTPPWSSSATSPNVSRPSLRDIQMQQEKRHHSISHSPKTRTSGFAIPSHGGSPEVGGVKDNVPNRWFKPETDAPSSIRSIQIEEQAMKDFKRFYSSVRIVKPQV

SEQ ID NO: 79488 - protein, 80 aa, Setaria italica
  Transcript Sequence Number=SeqID_13514
TIWIILLHGLVRSIQLHKWFPLRFCCYSVHIRRVCNILDKFLPMHVLKSQKMLLFTIQVVIRYSGTCIFYLLFVLFLFCE

SEQ ID NO: 79489 - protein, 55 aa, Setaria italica
  Transcript Sequence Number=SeqID_13515
MPTLTVELDKDRKALLDRKARGRAADKAKGKFTADDVAAAAGGAAATGASLQEID

SEQ ID NO: 79490 - protein, 46 aa, Setaria italica
  Transcript Sequence Number=SeqID_13516
RVSVNGSTVNVGIHPSKVIVTKLKLDKDRKALLDRKARGRAADKAK

SEQ ID NO: 79491 - protein, 58 aa, Setaria italica
  Transcript Sequence Number=SeqID_13517
RRSTRRCRWRRRHQQRRRRRRRCLPPGDRLGAARGSDGGCTVFYSLSLSSRHFKDTKA

SEQ ID NO: 79492 - protein, 171 aa, Setaria italica
  Transcript Sequence Number=SeqID_13518
QMPMQKLLRLLHRTSAPSEHACLLQRTKLEQKNRGSCTTKLCSKFISTRAAPTTAAQAATLRAINRVPCQYNTCTRRLHRQTQHRSVPACCLDLVLLLTAGLSRRSARKNHGSGRVFFRIGIIRSRPRLGNYRMEENGCLVSQLPRLLAPDLPSNGSSLRDLDCTHSNYQT

SEQ ID NO: 79493 - protein, 990 aa, Setaria italica
  misc_feature (144)..(144): Xaa can be any naturally occurring amino acid
  Transcript Sequence Number=SeqID_13519
  Gene Ontology: Mol. function=transferase activity, transferring phosphorus-containing groups; Cellular component=membrane; Biological process=two-component signal transduction system (phosphorelay)
  Homolog annotation: Hit_ID=Q2ACB8; Match level="QueryCoverage=99%, HitCoverage=98%, E-value=0.0, Identity=85%"; Hit description =Histidine kinase
  Pfam annotation: Domain name=CHASE; Domain location=101-312; Score =298.3; E_value=1.6e-86; Accession=PF03924.5; Description=CHASE domain
  Pfam annotation: Domain name=HATPase_c; Domain location=485-665; Score=127.8; E_value=3.5e-35; Accession=PF02518.18; Description =Histidine kinase-, DNA gyrase B-, and HSP90-like ATPase
  Pfam annotation: Domain name=HisKA; Domain location=373-438; Score =88.5; E_value=2.3e-23; Accession=PF00512.17; Description=His Kinase A (phosphoacceptor) domain
  Pfam annotation: Domain name=Response_reg; Domain location=845-980; Score=101.3; E_value=3.4e-27; Accession=PF00072.16; Description =Response regulator receiver domain
  Pfam module annotation: Pfam domain module=CHASE::HATPase _c::HisKA::Response_reg; Domain location=101-312::485-665::373 -438::845-980
EVAVSAPAEEAGKDEGEGGGGGWRVKAKLIRVLVVVWVLVAASVWTGLHYRFRRAAMRKAEEGLVSMCEERARMLQDQFAVSVNHVHALAILVATFHYEKHPPALDQDTFADYTARTSFERPLLSGVAYAQRVVHADRESFERXRGWIIKTMKHEPSPVQDEYAPVIYSQETVSYIEGLDMMSGEEDRENILRSRASGKAVLTRPFRLMSNHLGVVLTFPVYRDDLPSDAKEEDRVTATAGYLGGAFDVESLVENLLRQLAGNQELVVNVYDVTNNSNPLVMYGSEVPLGNPSPSHICMLDFGDPYRKHHMICRYRNKPHVPWSAITTPSGVFVIFMLVGYILYAAWSRYDNVKEDCRKMEELKKRAEAADVAKSQFLATVSHEIRTPMNGVLGMLDMLLDTDLKSTQRDYAQTAQVCGKALISLINEVLDRAKIEAGKLDLESVPFDLRSILDDVISLFSSKSREKGIELAVYVSERVPEILLGDPGRFRQIITNLVGNSIKFTERGHIFVQVHLADHSNLATEAKVEPVANGMNGHKDETTAVATSVSRNTLSGFEAADSRNSWENFKLLLSYEKNEMPYENVSDKVTLVVSVEDTGIGIPLDAQGKVFTPFMQADSSTSRTYGGTGIGLSISKCLVEIMGGQINFVSRPHVGSTFTFTAVLQRCDRRAISDSKPVMLHPLPSSFQGLSALLVDRRPVRATVTKYHLQRLGITSEVVATTELALGVLFGRNGHSLTSTKLPCMLLIESDSWSSKMDVSLRSRLLEMKQNGHKPVLPKIILLAAAESDKLKANYAVDSVITKPLKASTLAACLFQALGITQTQPNHEKRDSTGSLRGLLLGKSILVVDDNKVNLRVAAGTLKKFGAKVECVESGKDALALLKVPYKFDLCLMDIQMPEMDGFEATRQIRAMEAKVNEEQADAGDDSEADGATRAVKWHLPVLAMTADVIQATHEECTKCGMDGYVTKPFEEKQLFQAVQKFLDPGNMSS

SEQ ID NO: 79494 - protein, 64 aa, Setaria italica
  Transcript Sequence Number=SeqID_13520
IRSTTAEMRLKSIVWYLIPVKLRSLFISGVSQLVLVRHTLHLQYRFLLRVSIRLVMSHETKLKL

SEQ ID NO: 79495 - protein, 123 aa, Setaria italica
  misc_feature (69)..(69): Xaa can be any naturally occurring amino acid
  Transcript Sequence Number=SeqID_13521
  Homolog annotation: Hit_ID=B9R8C3; Match level="QueryCoverage=97%, HitCoverage=14%, E-value=5e-28, Identity=58%"; Hit description =Vacuolar sorting protein, putative
GERVLLCLKRALRIANAAQQMASATRGSSGSVTLFIEILNNLIPSPFSGTCTSFRKEITQIKNTTKQLXQDLIELIRTEKQSESTVADPSTEAFFSSTLRYIEFQKQKGGSIGEKYEQIKTSS

SEQ ID NO: 79496 - protein, 126 aa, Setaria italica
  misc_feature (99)..(99): Xaa can be any naturally occurring amino acid
  Transcript Sequence Number=SeqID_13522
  Gene Ontology: Mol. function=protein binding; Cellular component =cytoplasm; Biological process=retrograde transport, endosome to Golgi
  Homolog annotation: Hit_ID=B9R8C3; Match level="QueryCoverage=98%, HitCoverage=16%, E-value=2e-43, Identity=68%"; Hit description =Vacuolar sorting protein, putative
THRLLGIDQDGIMDGERVLLCLKRALRIANAAQQMASATRGSSGSVTLFIEILNKYLYFFEKGIPQITNTVIQDLIELIRTEKQSESTVADPSTEAFFXSTLRYIEFQKQKGGSIGEKYEQIKTSS

SEQ ID NO: 79497 - protein, 598 aa, Setaria italica
  Transcript Sequence Number=SeqID_13523
  Gene Ontology: Mol. function=protein binding; Cellular component =nucleus; Biological process=ubiquitin-dependent protein catabolic process
  Homolog annotation: Hit_ID=B6TPN4; Match level="QueryCoverage=100%, HitCoverage=100%, E-value=0.0, Identity=90%"; Hit description =Coronatine-insensitive protein 1
  Pfam annotation: Domain name=LRR_1; Domain location=174-196; Score =5.2; E_value=31; Accession=PF00560.25; Description=Leucine Rich Repeat
  Pfam annotation: Domain name=LRR_1; Domain location=229-250; Score =6.2; E_value=19; Accession=PF00560.25; Description=Leucine Rich Repeat
  Pfam annotation: Domain name=LRR_1; Domain location=301-327; Score =0.2; E_value=2.8e+02; Accession=PF00560.25; Description=Leucine Rich Repeat
  Pfam annotation: Domain name=LRR_1; Domain location=496-517; Score =6.0; E_value=22; Accession=PF00560.25; Description=Leucine Rich Repeat
  Pfam annotation: Domain name=LRR_2; Domain location=174-201; Score =8.8; E_value=1.2; Accession=PF07723.5; Description=Leucine Rich Repeat
  Pfam annotation: Domain name=LRR_2; Domain location=301-325; Score =12.1; E_value=0.45; Accession=PF07723.5; Description=Leucine Rich Repeat
  Pfam module annotation: Pfam domain module=LRR_1::LRR_1::LRR_1::LRR _1::LRR_2::LRR_2; Domain location=174-196::229-250::301-327::496 -517::174-201::301-325
MGGEAPEPRRLTRALSIGGGDGGWVPEEMLHLVMGFVEDPRDREAASLVCRRWHRIDALSRKHVTVPFCYAVSPARLLARFPRLESLAVKGKPRAAMYGLIPEDWGAYARPWVTELAAPLECLKALQLRRMVVTDDDLAELVRARGHMLQELKLDKCTGFSTDGLRLVARSCRSLRTLFLEECQIIDQGSEWIRDLAASCPVLATLNFHMTDLEVMPSDLELLARNCKSLISLKISDCDLSDLIGFFQSATALEEFAGGTFNEQGELAKYGNVKFPSRLCSLGLTFMGTNEMPIIFPFSAILKKLDLQYTVLTTEDHCQLISKCPNLLVLAVRNVIGDRGLGVVADTCKKLQRLRIERGDDEGGAQEEQGGVSQVGLTAIAVGCRELEYIAAYVSDITNGALESIGTFCKKLYDFRLVLLDREERITELPLDNGVRALLRGCTKLRRFALYLRPGGLSDVGLEYIGQCSGNIQYMLLGNVGETDDGLIGFALGCVNLRKLELRSCCFSERALALAMLHMRSLRYVWVQGYKASQTGRDLMLMARPFWNIEFTPPNPENVQLNEDGEPCVDSQAQILAYYSLAGKRLDCPQSVVPLYPA

SEQ ID NO: 79498 - protein, 88 aa, Setaria italica
  Transcript Sequence Number=SeqID_13524
  Gene Ontology: Mol. function=microtubule motor activity; Cellular component=microtubule associated complex; Biological process =microtubule-based movement
  Homolog annotation: Hit_ID=Q9SS42; Match level="QueryCoverage=100%, HitCoverage=9%, E-value=1e-34, Identity=80%"; Hit description =Kinesin-like protein
  Pfam annotation: Domain name=Kinesin; Domain location=1-88; Score= -115.7; E_value=9.4e-08; Accession=PF00225.15; Description=Kinesin motor domain
KDIAGNVSRSSLHLVDLAGSERVDRSEATGERLKEAQHINKSLSCLGDVINALAQKNSHIPYRNSKLTQLLQSSLGGNAKTLIFAHIT

SEQ ID NO: 79499 - protein, 92 aa, Setaria italica
  Transcript Sequence Number=SeqID_13525
MKDQTRFSDSLHISRINTVCLTCSPLLRLQLHIKYQIEDLAPKQRASSVQVSLGIEWSKSTRHQKRIEKNVLSSSSARLKEMFNLASKGALT

SEQ ID NO: 79500 - protein, 427 aa, Setaria italica
  misc_feature (115)..(115): Xaa can be any naturally occurring amino acid
  Transcript Sequence Number=SeqID_13526
  Gene Ontology: Biological process=pollen maturation
  Homolog annotation: Hit_ID=Q9ZVT9; Match level="QueryCoverage=99%, HitCoverage=41%, E-value=1e-143, Identity=57%"; Hit description =F15K9.2 protein
  Pfam annotation: Domain name=GRAM; Domain location=98-164; Score =70.8; E_value=4.9e-18; Accession=PF02893.12; Description=GRAM domain
MDDPPSVMSVHVYDFDGPFDEVTSLGHAEINFVKSNLSALADVWVPLKGNLAQSWQSKLHLRVFLNNSKGTGMVTEYLSKMEKEVGKKMTLRSPRTNTAFQELFSLPAEEFLISXFTCYLRRKLPTQGHLFLSPRTIGFYSSMFGRKTKFYFLWEDIEDIQGIPQSISSWSPSVVITLHRGRGMDAKHGAKSVDNGKLKFCLQSFASFSVAHRTIMALWKARSLSTELKVQLAEEQSQNNTLQSEDSGIFVGIEDAKGLQMTEVFSSTISTNMASLMEVFEGGPLEMKVMEKVGCQKYSATQWESDKPNEYQRQIHYKFSKKLSPVGGEVTGTQQKSPMPNKKGWIIEEVMELQGVLLGDFFTLHIKYQIEDLAPKQRASSVQVSLGIEWSKSTRHQKRIEKNVLSSSSARLKEMFNLASRELSHAR

SEQ ID NO: 79501 - protein, 595 aa, Setaria italica
  Transcript Sequence Number=SeqID_13527
  Gene Ontology: Mol. function=nucleotide binding; Cellular component =intracellular
  Homolog annotation: Hit_ID=B9SGN3; Match level="QueryCoverage=99%, HitCoverage=89%, E-value=0.0, Identity=76%"; Hit description=GTP -binding protein typa/bipa, putative
  Pfam annotation: Domain name=EFG_C; Domain location=383-473; Score =82.8; E_value=1.2e-21; Accession=PF00679.16; Description=Elongation factor G C-terminus
  Pfam annotation: Domain name=GTP_EFTU; Domain location=1-180; Score =171.5; E_value=2.4e-48; Accession=PF00009.19; Description=Elongation factor Tu GTP binding domain
  Pfam annotation: Domain name=GTP_EFTU_D2; Domain location=203-277; Score=40.1; E_value=8.8e-09; Accession=PF03144.17; Description =Elongation factor Tu domain 2
  Pfam annotation: Domain name=MMR_HSR1; Domain location=1-108; Score= -6.1; E_value=0.0036; Accession=PF01926.15; Description=GTPase of unknown function
  Pfam module annotation: Pfam domain module=EFG_C::GTP_EFTU::GTP_EFTU _D2::MMR_HSR1; Domain location=383-473::1-180::203-277::1-108
TLMDRLLRQCGADIPHERAMDSISLERERGITIASKVTSVSWKENELNMVDTPGHADFGGEVERVVGMVEGAVLVVDAGEGPLAQTKFVLSKALKYGLRPILLLNKVDRPSVSEETCNEVESLVFDLFANLGATEEQLDFPVLYASAKEGWASLTFTKSPPDNAKNMSSLLDSIIQHIPSPKADLEAPFQMLVSMMERDFYLGRILTGRVRSGVVRVGDKVHGLRSTDDGVQKIEDGKVIKLMKKKGTSMVTVETAGAGDIISMAGLAAPAIGHTVSNSEVMTALPTIELDPPTISMTFGVNDSPLAGRDGTHLTGAKIGNRLMAEAETNLAINVLPGPLSESYEVQGRGELQLGILIENMRREGFELSVSPPKVMYKTERGERLEPIEEVTVEVDEEHVGFVLETLTHRKGEILDMGPVPGTTGRTRIFMTCPSRGLVGVKGIFSSFTRGTGFMHRAFQAYAKYRGALGSVRKGVLISVGKGLITSHALMSLEARGILFVSPGMEAYEGMIVGEHSRDSDLEVNPVRTKELTNIRAPGKDENVRLTPPRLMTLEEAIGYVAADELIEVTPKVIRLRKKYLDSTKRKMMKNKPMD

SEQ ID NO: 79502 - protein, 37 aa, Setaria italica
  Transcript Sequence Number=SeqID_13528
DSSGGEAMAGIPLFSCHSVPLRIMFFTEHVDILRCSI

SEQ ID NO: 79503 - protein, 204 aa, Setaria italica
  Transcript Sequence Number=SeqID_13529
  Gene Ontology: Mol. function=iron ion transmembrane transporter activity; Cellular component=flagellum; Biological process=iron ion transport
  Homolog annotation: Hit_ID=B9N487; Match level="QueryCoverage=78%, HitCoverage=28%, E-value=3e-38, Identity=44%"; Hit description =Ferroportin protein family
  Subcellular localization annotation: CTP_CleavageSite=57; ConfidenceScore=5.36e-01
MGMLAAAAAASALLASPQAPAVRRRLSGAWTLRLRPAAALRLHNFGPKCYIANVEVDVSTLSKEEAFDDHAPLPSGCSIPVLNLRGDVLDSSPFPLHDRASCPSSFEELPVLSEGEQHTLASTPAHPAGLHALYASYLFGNLVEQLWNFAWPAALAILHPSLLPVAIVGFFTKLSVFIGAPIVGKLMDHFPRIPMYTALNAVQV

SEQ ID NO: 79504 - protein, 123 aa, Setaria italica
  misc_feature (17)..(17): Xaa can be any naturally occurring amino acid
  misc_feature (85)..(85): Xaa can be any naturally occurring amino acid
  misc_feature (117)..(117): Xaa can be any naturally occurring amino acid
  Transcript Sequence Number=SeqID_13530
  Gene Ontology: Mol. function=nucleoside-triphosphatase activity; Cellular component=nucleus; Biological process=tetrapyrrole biosynthetic process
  Homolog annotation: Hit_ID=B9SGR4; Match level="QueryCoverage=100%, HitCoverage=16%, E-value=2e-50, Identity=82%"; Hit description=DNA replication licensing factor MCM8, putative
  Pfam annotation: Domain name=MCM; Domain location=1-123; Score=-25.3; E_value=4.9e-15; Accession=PF00493.15; Description=MCM235 family
  Pfam annotation: Domain name=Mg_chelatase; Domain location=7-113; Score=-155.3; E_value=0.1; Accession=PF01078.13; Description =Magnesium chelatase, subunit ChlI
  Pfam module annotation: Pfam domain module=MCM::Mg_chelatase; Domain location=1-123::7-113
VTVAVVKDSMTNDYAFXGAMVLADRGICCIDEFDKMSAEHQALLEAMEQQCVSVAKAGLVASLSARTSVLAAANPVGGHYDRAKXVNENLKMSAALLSRFDLVFILLDKPDELLDKXVSDHII

SEQ ID NO: 79505 - protein, 127 aa, Setaria italica
  Transcript Sequence Number=SeqID_13531
  Gene Ontology: Cellular component=extracellular region; Biological process=response to biotic stimulus
  Homolog annotation: Hit_ID=Q00008; Match level="QueryCoverage=83%, HitCoverage=73%, E-value=5e-48, Identity=76%"; Hit description =Pathogenesis-related protein PRMS
  Pfam annotation: Domain name=SCP; Domain location=34-125; Score=57.1; E_value=6.6e-14; Accession=PF00188.18; Description=SCP-like extracellular protein
MEPSSKLVALLVLAMVAAMAVQPSSAQNSPQDYLTPHNQARAAVGVGPVTWSTKLQHSGGPYGENIFWGSAGANWKAADAVKSWVDEKQWYNYASNSCAAGKVCGHYTQVVWRATTTIGCARVVCRD

SEQ ID NO: 79506 - protein, 166 aa, Setaria italica
  Transcript Sequence Number=SeqID_13532
  Gene Ontology: Cellular component=extracellular region; Biological process=response to biotic stimulus
  Homolog annotation: Hit_ID=Q00008; Match level="QueryCoverage=87%, HitCoverage=86%, E-value=2e-74, Identity=89%"; Hit description =Pathogenesis-related protein PRMS
  Pfam annotation: Domain name=SCP; Domain location=34-154; Score =121.2; E_value=3.5e-33; Accession=PF00188.18; Description=SCP-like extracellular protein
MEPSSKLVALLVLAMVAAMAVQPSSAQNSPQDYLTPHNQARAAVGVGPVTWSTKLQQFAESYAAQRAGDCRLQHSGGPYGENIFWGSAGANWKAADAVKSWVDEKQWYNYASNSCAAGKVCGHYTQVVWRATTTIGCARVVCRDNRGVFIICNYEPRGNIVGQKPY

SEQ ID NO: 79507 - protein, 90 aa, Setaria italica
  Transcript Sequence Number=SeqID_13533
  Homolog annotation: Hit_ID=Q2QX78; Match level="QueryCoverage=84%, HitCoverage=11%, E-value=1e-15, Identity=44%"; Hit description=Nrap protein, expressed
ALRAAAQAADAVAELIKRVPQQQATPEAARGFIRDLGLEAEKLAFTFRPPEEVRLAGSHAAGAVARPDVAADLLVRLPKECFHEKDFLNH

SEQ ID NO: 79508 - protein, 218 aa, Setaria italica
  Transcript Sequence Number=SeqID_13534
  Gene Ontology: Mol. function=protein transporter activity; Cellular component=mitochondrial inner membrane; Biological process=protein transport
  Homolog annotation: Hit_ID=B6TP97; Match level="QueryCoverage=100%, HitCoverage=100%, E-value=4e-60, Identity=57%"; Hit description =Mitochondrial import inner membrane translocase subunit Tim17
  Pfam annotation: Domain name=Tim17; Domain location=4-133; Score =200.1; E_value=6.1e-57; Accession=PF02466.11; Description =Tim17Tim22Tim23 family
MGTPETSREPCPDRILDDVGGAFGMGAVGGSVFHFLKGTYNSPNGMRLSGGAQAVRMNAPRVGGSFAVWGGLFSTFDCAMVYARQKEDPWNSIIAGAATGGFLSMRQGAGAAGRSALMGGILLALIEGAGLMLNRVLANPPLPAEDPNLMGGGAFPGLPAPPVVPPPEAASSSGAGGWLGGLFGKKEEEKKAGAGGGKSEILESFDTPSTPIPSFEYK

SEQ ID NO: 79509 - protein, 65 aa, Setaria italica
  Transcript Sequence Number=SeqID_13535
  Subcellular localization annotation: CTP_CleavageSite=57; ConfidenceScore=5.51e-01
QLTRHLQVHLSSPQPSRFFCCFLCCFFFCFLRCFFASLVPINSSCHSCRSLLDRLLRSTTEEVHK

SEQ ID NO: 79510 - protein, 89 aa, Setaria italica
  Transcript Sequence Number=SeqID_13536
  Subcellular localization annotation: CTP_CleavageSite=39; ConfidenceScore=5.23e-01
PVRAAPRHATPRVAQSTVARATTVNSWFSGSPALDSTIAAEFAWGSLLGCGSSGGRKGSASGLVGGWRWHDGPPTAAGDGDGEGGVAAG

SEQ ID NO: 79511 - protein, 89 aa, Setaria italica
  misc_feature (75)..(75): Xaa can be any naturally occurring amino acid
  misc_feature (83)..(83): Xaa can be any naturally occurring amino acid
  Transcript Sequence Number=SeqID_13537
  Gene Ontology: Biological process=response to stress
  Homolog annotation: Hit_ID=B6TC12; Match level="QueryCoverage=96%, HitCoverage=49%, E-value=1e-11, Identity=51%"; Hit description=USP family protein
MHVDGFFTLHIILHYGRLVAQYPQCFGLLTVVALIPLSELSDPLIAKKYGAKPDAETLDLLNTLAKEKEVVMVVXKVLWGDPXREKLCQ

SEQ ID NO: 79512 - protein, 165 aa, Setaria italica
  Transcript Sequence Number=SeqID_13538
  Gene Ontology: Cellular component=plasma membrane; Biological process= response to stress
  Homolog annotation: Hit_ID=B6TC12; Match level="QueryCoverage=98%, HitCoverage=97%, E-value=8e-62, Identity=74%"; Hit description=USP family protein
  Pfam annotation: Domain name=Usp; Domain location=6-161; Score=74.4; E_value=4.2e-19; Accession=PF00582.18; Description=Universal stress protein family
MAGAGGERWVGLATDFSGGSRAALRWAADNLLRAGDQVLLLHVVKEPDYEQSEAILWESTGSPLIPLSELSDPLIAKKYGAKPDAETLDLLNTLAKEKEVMVVVKVLWGDPREKLCQAISDTPLSCLVIGSRGLGKLKRVLLGSVSDYVVNNATCPVTVVKSHDG

SEQ ID NO: 79513 - protein, 77 aa, Setaria italica
  Transcript Sequence Number=SeqID_13539
QQSTVTMDEDVVDDHFETDAVHADEHKKVVTADEVPELTGTDDEVVEEDKAVVTAEEVPQNTGTDEEVEEDQFQNFF

SEQ ID NO: 79514 - protein, 102 aa, Setaria italica
  Transcript Sequence Number=SeqID_13540
  Gene Ontology: Mol. function=catalytic activity; Biological process =metabolic process
  Homolog annotation: Hit_ID=B6TV22; Match level="QueryCoverage=97%, HitCoverage=42%, E-value=6e-49, Identity=91%"; Hit description =Phosphoglycerate mutase gpmB
  Pfam annotation: Domain name=PGAM; Domain location=8-98; Score=40.7; E_value=5.7e-09; Accession=PF00300.14; Description=Phosphoglycerate mutase family
ASGGDFTEVVIVRHGETSWNAARIIQGHMDAELNDIGRQQAVAVAHRLSKEVKPAAIYSSDLKRAAETAQTIARICNLPNVVFDPALRERHIGDLQGMKFQD

SEQ ID NO: 79515 - protein, 234 aa, Setaria italica
  Transcript Sequence Number=SeqID_13541
  Gene Ontology: Mol. function=glutathione transferase activity
  Homolog annotation: Hit_ID=Q3MUP2; Match level="QueryCoverage=91%, HitCoverage=94%, E-value=3e-43, Identity=48%"; Hit description =Glutathione-S-transferase
  Pfam annotation: Domain name=GST_C; Domain location=107-207; Score =34.4; E_value=4.6e-07; Accession=PF00043.17; Description=Glutathione S-transferase, C-terminal domain
  Pfam annotation: Domain name=GST_N; Domain location=11-84; Score =75.2; E_value=2.4e-19; Accession=PF02798.12; Description=Glutathione S-transferase, N-terminal domain
  Pfam module annotation: Pfam domain module=GST_C::GST_N; Domain location=107-207::11-84
MAGVKSDGSDSGLVLLDVFGSPFAQRVSIALAEKGLAYERAEQDLTAKSDLLRRSNPVHGKVPVLLHDGRPVCESLAILQYLDEAFPGTPPLLPPVSDPYARAGARFWGEYADRLHFCGKRLWLSAPGGDGGEAEPGARAEMATVLRALEAELGEGDFFGGAAFGYVDVAAAPFAAWFLTYERHGGPSVAEECPALAAWAARCSRRESVAANVYPPEKVHELVQEYRRWMLGRK

SEQ ID NO: 79516 - protein, 85 aa, Setaria italica
  Transcript Sequence Number=SeqID_13542
  Subcellular localization annotation: CTP_CleavageSite=30; ConfidenceScore=5.29e-01
LPSTPHSLAPTNLLQSPNHLPLPTTQQEPQGEAARTARLRRACGLICYNNLSSSISAWFQFEADLPQAMKLHTAVFAHLDLGDLD

SEQ ID NO: 79517 - protein, 93 aa, Setaria italica
  Transcript Sequence Number=SeqID_13543
SEFKRILENFKPEKHENYTRSFTSLSLTPLQPESPTSQGQQHTAHFNLTSWNNSVVPQGSHPHKAPKKEGGAGKEGRKGEATALQASSLREQT

SEQ ID NO: 79518 - protein, 426 aa, Setaria italica
  misc_feature (71)..(71): Xaa can be any naturally occurring amino acid
  Transcript Sequence Number=SeqID_13544
  Gene Ontology: Mol. function=protein serine/threonine kinase activity; Biological process=protein amino acid phosphorylation
  Homolog annotation: Hit_ID=Q39019; Match level="QueryCoverage=100%, HitCoverage=100%, E-value=0.0, Identity=77%"; Hit description=Shaggy- related protein kinase kappa
  Pfam annotation: Domain name=Pkinase; Domain location=88-372; Score =316.8; E_value=4.3e-92; Accession=PF00069.17; Description=Protein kinase domain
  Pfam annotation: Domain name=Pkinase_Tyr; Domain location=88-368; Score=-20.4; E_value=2.3e-12; Accession=PF07714.9; Description =Protein tyrosine kinase
  Pfam module annotation: Pfam domain module=Pkinase::Pkinase_Tyr; Domain location=88-372::88-368
MAYSGQRHRGVASSSRQGNGFEGSASSVEFLGREMLEMHLWDAKADADDERDMGSGSDVTDSSSNEASHIXATTIRGHNGLPKQSVTYIAEHVVGTGSFGVVYQAKCRETGEIVAIKKVLQDKRYKNRELQIMHMLDHPNIIGLKHYFFSTTERDELYLNLVLEFVPETVNRIARQYNRMNQRMPHIYVKLYTYQICRALAYIHNCIGICHRDIKPQNVLVNPHTHQLKICDFGSAKVLVKGEPNISYICSRYYRAPELIFGATEYTTAIDLWSTGCVMAELLLGQPLFPGESGVDQLVEIIKVLGTPTREEIKCMNPNYTEFKFPQIKAHPWHKVFQKKLPPEAVDLVSRFLQYSPNLRCTALEACMHPFFDELRDPNTRLPNGRPLPPLFNFRSQELKGVPPGVVERLVPEHARRQSLFMALRT

SEQ ID NO: 79519 - protein, 32 aa, Setaria italica
  Transcript Sequence Number=SeqID_13545
LIVIVTKRIFLTAKAKFCTALPHSLIHSMLNQ

SEQ ID NO: 79520 - protein, 126 aa, Setaria italica
  Transcript Sequence Number=SeqID_13546
  Gene Ontology: Mol. function=transferase activity, transferring glycosyl groups; Cellular component=membrane; Biological process =cell wall biogenesis
  Homolog annotation: Hit_ID=B9HI99; Match level="QueryCoverage=99%, HitCoverage=17%, E-value=4e-40, Identity=57%"; Hit description =Glycosyltransferase family-37
FLQGVPWLIIRTDMYFVPSLFLIPAFQDELSRLFPEKDTVFHHLARYLFHPTNNVWYSVTKYYRSYLAKAEKRVGIQIRIYETKGILQRNGPFPHILNQILSCAQNQKLLPEIAMTEGAAAETQNK

SEQ ID NO: 79521 - protein, 90 aa, Setaria italica
  Transcript Sequence Number=SeqID_13547
  Subcellular localization annotation: CTP_CleavageSite=72; ConfidenceScore=5.36e-01
FLSLHPPISEPSSSSQTLGLTGESAPLRQLCRSPWRLDGAGPPSLSLRRRARRGCCGRPGGGGAEMEPRRISASPRPCSGRRVVARKRPR

SEQ ID NO: 79522 - protein, 101 aa, Setaria italica
  Transcript Sequence Number=SeqID_13548
LTAEFYSNPSMYNQGHQHWLLICVSNKVAAGSLDCFYVLKQMRNDIPVLHPRQVRMPYLIALKHVLVPISTITCTLNFLRSRSGTNDLRCQIVFFPYLKQH

SEQ ID NO: 79523 - protein, 326 aa, Setaria italica
  Transcript Sequence Number=SeqID_13549
  Gene Ontology: Mol. function=protein binding; Cellular component =mitochondrion; Biological process=ubiquitin-dependent protein catabolic process
  Homolog annotation: Hit_ID=B6U5W1; Match level="QueryCoverage=100%, HitCoverage=97%, E-value=0.0, Identity=94%"; Hit description=F-box only protein 9
  Pfam annotation: Domain name=F-box; Domain location=56-103; Score =49.9; E_value=1e-11; Accession=PF00646.25; Description=F-box domain
MASDISVDIRPDFNSFDHFLSMRYVATDRPWMKLYGIRVQPVLPFRSLSCKPDPALIHQCLPDELLLEIFTRMNPYTLGRAACVCRKWKYTARNPTLWRAACLKTWQRSGMEANYMMVRSLYDSSWRRMWLQRPRIRIDGLYVSRNTYIHTGVTEWQFKKTVNVVCYYRYLRFFPSGKFLYKISPDKVKDAVKCMHFRASKADCVFKGDYVLSEDGQIEMALLYPGHRYTLVRMCLRLRGTKIGANNRLDVLKILTTGVNATELKNWTGSILELVEGWEEDETHDPDVPAVSHSRGLSPFVFVPFEEADTSVLNLPVEKMDYYVPG

SEQ ID NO: 79524 - protein, 96 aa, Setaria italica
  misc_feature (86)..(86): Xaa can be any naturally occurring amino acid
  misc_feature (93)..(93): Xaa can be any naturally occurring amino acid
  Transcript Sequence Number=SeqID_13550
  Gene Ontology: Mol. function=magnesium ion binding; Cellular component=chloroplast; Biological process=photosynthesis, light harvesting
  Homolog annotation: Hit_ID=Q41746; Match level="QueryCoverage=76%, HitCoverage=25%, E-value=1e-34, Identity=97%"; Hit description =Chlorophyll a/b-binding apoprotein CP26
  Pfam annotation: Domain name=Chloroa_b-bind; Domain location=2-79; Score=22.9; E_value=4.9e-07; Accession=PF00504.13; Description =Chlorophyll A-B binding protein
SDPFNLVVAVIAEVVLVGGAEYYRIINGLDLEDKLHPGGPFDPLGLASDPDQAAILKVKEIKNGRLAMFSMFAFFIQAYVTGEGPXENLAKHXSRT

SEQ ID NO: 79525 - protein, 206 aa, Setaria italica
  Transcript Sequence Number=SeqID_13551
  Gene Ontology: Mol. function=actin binding; Cellular component =chloroplast; Biological process=actin cytoskeleton organization and biogenesis
  Homolog annotation: Hit_ID=Q013H6; Match level="QueryCoverage=71%, HitCoverage=31%, E-value=1e-19, Identity=37%"; Hit description =Profilin
  Subcellular localization annotation: CTP_CleavageSite=42; ConfidenceScore=5.44e-01
PLVPRPLHRTSGHLLCSPRRRALPPPPCPARSPRRLLAAPPRASNNNDNSGAVEAPDRLVAAVAYLYPFLDGAHHGRFLLAQFPFFSALLRPLGPAARLFHSSPLTPFLLFLTLYFAVVRNQQAFSRFVRFNAMQAVVLDVLLIFPDLFAQSFAPSGGVGFEIFQSMESTVFLFLLVCLVYGGGACLLGKTPRLPIVADAAERQVM

SEQ ID NO: 79526 - protein, 88 aa, Setaria italica
  Transcript Sequence Number=SeqID_13552
ARHVPVHADTTRRPCAANEACGALQGSSNPRAKSLLPNSRDNATIDGMSQGSAEMDCSDDEGNTVSRFPTTNKPHGELLALISSSLVV

SEQ ID NO: 79527 - protein, 1153 aa, Setaria italica
  Transcript Sequence Number=SeqID_13553
PPQVPSRAGFDLNSEIFPNNGIHVITKGKGITDTQIQDHANRSFTSLSMTSGHGGLFNASSEIPSAESAARRFPPVVESQRQNFLALDLQLPSRQNGKDSNYGSIVKEEKVDQALSGLSSAEAHNNVHVASELNASSYSNSSDGRLPNLDLNVPLDPADSLEGLPTMHESGNGLFHHRTIQHQKAQVAPAAPISTTSNGVGQNVGSTVNMSNSFGLSHKCGPADVTLDLQLKPPTRPELGINWKGLVPAPELSLSLFGKPMDECKSLGAPNALFDSEIAGSSKKGSEETASTPGSDKVLVEKIVTPGPCNANPQDTTSATVSGIDQMTSHNLVKKEPEETPQQHILKGAEKAHLLERQSVVPASNCAESEMTDSPPQVPSRAGFDLNSEIFPNNGIHDGLNVATDNVPIPAESLLDITQAKTMPAVPEVEIDVKREESTNPVVAPVGGHSASLMEAKSLPSLSTVASPAVGLCESSSQPSVSTVCKPPARHVPVHADTTRRPCAANEACGALQGSSNPRAKSLLPNSRDNATIDGMSQGSAEMDCSDDEGNTVSRFPTTNKPHGESLGNGPTTKEDDINANNFCKELKKEQDSDMHEDCSSVTNKVNTQAVDGDKRIKTRVSVVSHAGEQGHRNEVFVTEKSKDKQSLNSGKNSPPTKTDNTMDDVKAATGSGSTDLQRPSALQKSTAPKLQPTRQSPKTSDLCLEKDRSSDIKSEMSPHGKQAASFNENHAKTAAVKMEHQTENEEVARHSDLQRRDSVLGKDSEVDGASSSQPHSECTKGKSAFEKLEHDKFQPDLCKTSPLQNERDGQLVGSHWRDLGHAYVNRNERWERFMESEREKNNGEWHGGRHASDMTNQRMTDHRGGWRGAGPRGHPRNFRGPRMRNEFADEPIGGRRRSFEDEPGHLNRVPHRRRRSPPPDSLMREVDIDGFHGREIPDHRLLAHGQIEDLPDDMMEDRFFMPRSHRHRGQGDHGFIQRDRSHSPAQRRGGHVHFHRGRSPEAMPRSPPLMRNERPYLSHCRHSRGHDERGGMQRNARRRGMEGDAFEPLLHPADLAELHAEEELTGRRKYTERRTYLRSSVSDEDEMLSYHTEDDMEFAEAGGGPREHDSRFRNRMAHDRARGEQEDGYRHRAHQGWRDGDSNDGRPKRRRY

SEQ ID NO: 79528 - protein, 59 aa, Setaria italica
  Transcript Sequence Number=SeqID_13554
LISKLGMSAIVAVFVVHPCLVWARDFVACHFLPSNIVNLRNKIFTLYQKLILQLESRHS

SEQ ID NO: 79529 - protein, 51 aa, Setaria italica
  Transcript Sequence Number=SeqID_13555
IFAFLLAESIFTTLHTSTKFSSHSLHDIVAKSRVVISSCAILQFIGSLVKR

SEQ ID NO: 79530 - protein, 78 aa, Setaria italica
  Transcript Sequence Number=SeqID_13556
DTPNIVSDIIPYKNLFSVEGSLHSSSGEKHQLPCITKPQLAHLVGAVHVADQVDHTGAEKTMGNETGFRNLSAQKCNS

SEQ ID NO: 79531 - protein, 119 aa, Setaria italica
  Transcript Sequence Number=SeqID_13557
  Gene Ontology: Mol. function=glyceraldehyde-3-phosphate dehydrogenase (phosphorylating) activity; Cellular component=cytoplasm; Biological process=glucose metabolic process
  Homolog annotation: Hit_ID=Q43247; Match level="QueryCoverage=99%, HitCoverage=34%, E-value=3e-41, Identity=74%"; Hit description =Glyceraldehyde-3-phosphate dehydrogenase, cytosolic 3
  Pfam annotation: Domain name=Gp_dh_C; Domain location=2-98; Score =67.2; E_value=6.3e-17; Accession=PF02800.12; Description =Glyceraldehyde 3-phosphate dehydrogenas
SLSLLIGKVCTGNWSFPLFPTVDVSVVDLTVRLEKSATYDEIKAAIKAEAEGNLKGILGYVDEDLVSTDFQGDNRSSIFDAKAGIALNGNFVKLVSWYDNEWGYSSRVIDLIRHMHSTN

SEQ ID NO: 79532 - protein, 162 aa, Setaria italica
  Transcript Sequence Number=SeqID_13558
  Gene Ontology: Mol. function=electron carrier activity; Biological process=oxidation reduction
  Homolog annotation: Hit_ID=B6SXS5; Match level="QueryCoverage=100%, HitCoverage=30%, E-value=4e-83, Identity=90%"; Hit description =Cytochrome P450 CYP72A123
FAGMETTSVLLTWTMILLSMHPEWQDRAREEVLSLFGKNRPGYDGLSRLKIVAMILHEVLRLYPPAIAFSRKTYKEMEIGDATYPAGVILELPVLFIHHDPDIWGSDVHEFRPERFAEGIAKASKDRLAFFPFGWGPRICIGQNFALLEAKMALSMILQSFE

SEQ ID NO: 79533 - protein, 241 aa, Setaria italica
  Transcript Sequence Number=SeqID_13559
  Gene Ontology: Mol. function=glyceraldehyde-3-phosphate dehydrogenase (phosphorylating) activity; Cellular component=cytoplasm; Biological process=glucose metabolic process
  Homolog annotation: Hit_ID=Q43247; Match level="QueryCoverage=55%, HitCoverage=39%, E-value=2e-62, Identity=87%"; Hit description =Glyceraldehyde-3-phosphate dehydrogenase, cytosolic 3
  Pfam annotation: Domain name=DapB_N; Domain location=4-169; Score= -33.8; E_value=0.034; Accession=PF01113.12; Description =Dihydrodipicolinate reductase, N-terminus
  Pfam annotation: Domain name=Gp_dh_N; Domain location=4-136; Score =217.1; E_value=4.7e-62; Accession=PF00044.16; Description =Glyceraldehyde 3-phosphate dehydrogenas
  Pfam module annotation: Pfam domain module=DapB_N::Gp_dh_N; Domain location=4-169::4-136
MAKIKIGINGFGRIGRLVARVALQSDDVELVAVNDPFITTDYMTYMFKYDTVHGQWKHHEVKVKDSKTLLFGEKEVAVFGCRNPEEIPWGAAGAEYVVESTGVFTDQEKAAAHLKGGAKKVVISAPSKDAAAFSWSVKTPVDSTTYYKTTKTSTPRDLLRVPAAKHSNLLLPKEKGLGVLDLDLMVLPLSVDSVILEHVGHVVSGDEGVVDGDELDIVALQGHPGHQPADPAEPVDPDLDL

SEQ ID NO: 79534 - protein, 163 aa, Setaria italica
  Transcript Sequence Number=SeqID_13560
  Gene Ontology: Mol. function=glyceraldehyde-3-phosphate dehydrogenase (phosphorylating) activity; Cellular component=cytoplasm; Biological process=glucose metabolic process
  Homolog annotation: Hit_ID=Q43247; Match level="QueryCoverage=100%, HitCoverage=48%, E-value=9e-78, Identity=86%"; Hit description =Glyceraldehyde-3-phosphate dehydrogenase, cytosolic 3
  Pfam annotation: Domain name=Gp_dh_C; Domain location=1-142; Score =319.0; E_value=9.8e-93; Accession=PF02800.12; Description =Glyceraldehyde 3-phosphate dehydrogenas
  Subcellular localization annotation: CTP_CleavageSite=76; ConfidenceScore=5.39e-01
GLMTTVHAITATQKTVDGPSAKDWRGGRAASFNIIPSSTGAAKAVGKVLPALNGKLTGMAFRVPTVDVSVVDLTVRLEKSATYDEIKAAIKAEAEGNLKGILGYVDEDLVSTDFQGDNRSSIFDAKAGIALNGNFVKLVSWYDNEWGYSSRVIDLIRHMHNTN

SEQ ID NO: 79535 - protein, 59 aa, Setaria italica
  Transcript Sequence Number=SeqID_13561
FCRFCNVNLTAVNCMQNPVLKGVEWRNRAKIKEHQLGLTKLPLVCLLASLCKSVCKFSS

SEQ ID NO: 79536 - protein, 80 aa, Setaria italica
  misc_feature (36)..(36): Xaa can be any naturally occurring amino acid
  Transcript Sequence Number=SeqID_13562
  Gene Ontology: Mol. function=phosphoprotein phosphatase activity; Cellular component=intracellular
  Homolog annotation: Hit_ID=B6UE64; Match level="QueryCoverage=77%, HitCoverage=11%, E-value=5e-27, Identity=88%"; Hit description=CPL3
MFGQPEMIFFQVWQKHKENLILMERYHYFASSCRQXGFGVKSLSESMQDERESDGALATVLYVLKRIHTIFFDTVCCFSI

SEQ ID NO: 79537 - protein, 543 aa, Setaria italica
  Transcript Sequence Number=SeqID_13563
  Gene Ontology: Mol. function=phosphoprotein phosphatase activity; Cellular component=intracellular
  Homolog annotation: Hit_ID=B6UE64; Match level="QueryCoverage=94%, HitCoverage=93%, E-value=0.0, Identity=76%"; Hit description=CPL3
  Pfam annotation: Domain name=BRCT; Domain location=375-454; Score =47.3; E_value=6.1e-11; Accession=PF00533.18; Description=BRCA1 C Terminus (BRCT) domain
  Pfam annotation: Domain name=NIF; Domain location=154-365; Score=6.9; E_value=8.6e-09; Accession=PF03031.10; Description=NLI interacting factor-like phosphatase
  Pfam module annotation: Pfam domain module=BRCT::NIF; Domain location= 375-454::154-365
MSLAEAPSPSPSSSSGSDDFAALLDSELELASGADSAFPGDPSSASPDTDDEGEDEDSEEVEVELLEQNSAKRRRVEEQSQDQGTSIRPDKIATGPSKNVQVEVCPHPGYFGGLCFRCGKPQDEEDASGVAFGYIHKGLRLGTSEIDRLRGADLKNLLRERKLVLILDLDHTLINSTKLQDISSAENELGIRTAALKDDPDRSIFSLDSMQMLTKLRPFVRNFLKEASNMFEMYIYTMGDKAYAIEIAKLLDPSNVYFPSKVISNSDCTQRHQKGLDVILGAESVAVILDDTEYVWQKHKENLILMERYHYFASSCRQFGFGVKSLSESMQDERESDGALATVLYVLKRIHTIFFDTAVETALSSRDVRQVIKTVRKEVLEGCKLVFSRVFPNTSRPQEQMMWKMAEHLGAVCSTDVDSTVTHVVAVDLGTEKARWAVKNKKFLVHPRWIEAANFRWHRQPEEDFPVIPPKEKSTDKEPSKDKEENAVAGQKETSNDKKEENAVAGQKETSNDQEDNDVAGQKEKDGAKENAVATTATGPADS

SEQ ID NO: 79538 - protein, 120 aa, Setaria italica
  Transcript Sequence Number=SeqID_13564
  Gene Ontology: Mol. function=methyltransferase activity; Cellular component=plasma membrane; Biological process=metabolic process
  Homolog annotation: Hit_ID=Q00TN0; Match level="QueryCoverage=81%, HitCoverage=10%, E-value=1e-19, Identity=55%"; Hit description =UbiE/COQ5 methyltransferase (ISS)
DPVVAMPAWMREAAGGEARRRPFHVALTATDAAYSRWQCRVMYYWYKRMQARPGGEAMGGFTRVLHSGKPDGLMDEIPTFVVDPLPAGKDHGYVVLNRPWAFVQWLQKAKIEEEYILMAE

SEQ ID NO: 79539 - protein, 236 aa, Setaria italica
  Transcript Sequence Number=SeqID_13565
  Gene Ontology: Mol. function=methyltransferase activity; Cellular component=plasma membrane; Biological process=metabolic process
  Homolog annotation: Hit_ID=Q00TN0; Match level="QueryCoverage=95%, HitCoverage=24%, E-value=6e-58, Identity=46%"; Hit description =UbiE/COQ5 methyltransferase (ISS)
HFNTLVHGYVVLNRPWAFVQWLQKAKIEEEYILMAEPDHVFVKPLPNLALDNDPAAFPFFYITPSEHEKVIRKYYPKERGPVTDVDPIGNSPVIIKKTLLEKIAPTWMNVSIQMKEDEETDKAFGWVLEMYAYAVASALHGVQHILRKDFMIQPPFDTKLGNTFIIHFTYGCDYSLKGELTYGKIGEWRFDKRSFQDGPPPRNLTLPPPGVPESVVTLVKMVNEASANLPRWDDGI

SEQ ID NO: 79540 - protein, 289 aa, Setaria italica
  misc_feature (53)..(53): Xaa can be any naturally occurring amino acid
  misc_feature (134)..(134): Xaa can be any naturally occurring amino acid
  Transcript Sequence Number=SeqID_13566
  Gene Ontology: Mol. function=nucleic acid binding; Cellular component= chloroplast envelope; Biological process=response to DNA damage stimulus
  Homolog annotation: Hit_ID=Q7XNH0; Match level="QueryCoverage=100%, HitCoverage=25%, E-value=1e-134, Identity=82%"; Hit description =OSJNBa0096F01.3 protein
  Pfam annotation: Domain name=Helicase_C; Domain location=158-236; Score=82.2; E_value=1.8e-21; Accession=PF00271.23; Description =Helicase conserved C-terminal domain
  Pfam annotation: Domain name=zf-C3HC4; Domain location=51-92; Score =33.4; E_value=9.2e-07; Accession=PF00097.17; Description=Zinc finger, C3HC4 type (RING finger)
  Pfam module annotation: Pfam domain module=Helicase_C::zf-C3HC4; Domain location=158-236::51-92
ADPPKYADLDQLAQRFLEGVQSCSGRQNALPSRAYVEEVAEEIRQGATTECPXICLESASDDPVLTPCAHRMCRECLLSSWRTPDGGPCPLCRSHISKSDLIILPAQCRFQVDAENNWKDSCKVSKLIMILGGXLRRKREKSIVFSQFTSFFDLLEIPFNHKGIKFLRYDGKLNQKHKGKVLKEFSESQDKLVLLMSLKAGGVGLNLTAASNVFLMDPWWNPAVEEQAIMRIHRIGQKRAVQVRRFIVKDTVEERMQQVQVRKQRMISGALTDEEVRGARIEQLQMLFT

SEQ ID NO: 79541 - protein, 239 aa, Setaria italica
  Transcript Sequence Number=SeqID_13567
MPTSVCLDVQNSSYLSNETTRLVKNTCIGDTPTNEGAAALNDNSERCTSVPEEVNSVETSFIVGSVTRERGHDDVATNVSLTPTVECTNDAVNEGVDNTSLLGCKTTPVASLKSQGCQEKQQHIPSNEKPSGPPKKQRSALEKLRGATRSPLTSPVPYAHDSPLTRGRTTSLSMSTPESLKLRKTRSGRVVVPTLDKGCQRIVYDMDGAIVGVVGLDSPSPKGSKLETNARKKKNAEPA

SEQ ID NO: 79542 - protein, 62 aa, Setaria italica
  Transcript Sequence Number=SeqID_13568
MGRLSAKSDYESLRDARISENMARMEMLGLRRCAGELSDIAAVSSQRTAGSATPRKTPRPRV

SEQ ID NO: 79543 - protein, 170 aa, Setaria italica
  misc_feature (150)..(150): Xaa can be any naturally occurring amino acid
  Transcript Sequence Number=SeqID_13569
  Gene Ontology: Mol. function=binding
KGLMSTVSHGSAIEVLSRITIPTCDSIFGSPETRLLMHITGLLPWLGLQLTKEVQAPSLGPASPLQEQNQKAYYVASNISVWCRAKSLDDLAEVFGAYSYGEIMSLEDLFTRASPAICAEWFPKHSSLAFGHLLRLLERGPLDYQRVVLXMLKSLLQQTPVDPSQIPQVV

SEQ ID NO: 79544 - protein, 231 aa, Setaria italica
  Transcript Sequence Number=SeqID_13570
  Gene Ontology: Mol. function=binding
LRKTIYYVASNISVWCRAKSLDDLAEVFGAYSYGEIMSLEDLFTRASPAICAEWFPKHSSLAFGHLLRLLERGPLDYQRVVLLMLKSLLQQTPVDPSQIPQVYNVVSQLVESTLCSEALNVLEALLRSCSGVTGGQSEEVGFGENGHGAGEKVLQSMSSFKARSGPLQYAGGSGLGSLMGQSGGSAADSGVVARDVALQNTRLLLGRVLDTCALGRKRDHKRLVPFVANIG

SEQ ID NO: 79545 - protein, 112 aa, Setaria italica
  Transcript Sequence Number=SeqID_13571
GPIPSVNPLPSRWRLVVAVVLQTPVLALLLLNLHCSYMVLVSYAYSMQHYSLLEFLLSIFRLYCAMTLSLDSKVILNWILQTYRGILQFLDRFLVANEQPCLTSCFRLEFSP

SEQ ID NO: 79546 - protein, 201 aa, Setaria italica
  Transcript Sequence Number=SeqID_13572
  Gene Ontology: Mol. function=receptor activity; Cellular component =integral to membrane
  Homolog annotation: Hit_ID=B9SRH2; Match level="QueryCoverage=100%, HitCoverage=39%, E-value=2e-36, Identity=39%"; Hit description=ATP binding protein, putative
  Pfam annotation: Domain name=S_locus_glycop; Domain location=54-144; Score=-35.7; E_value=0.018; Accession=PF00954.12; Description=S -locus glycoprotein family
FAMRLGSNYFGLYIEPPPPSSSGVAAAMYFKHTALEAKAQIVAGGGPTYARVEPDGFLAMYQKEGPPADVLSFDTFNRGVRAFRRMTLEPDGNLRAYYWDGTRWALDYTAITEPCELPTTCGAYSVCRAQPSGRCECLANATDGSGCATAAAPAASVGGSLCGTTGGEVGGLYRAVRRQGVEPVNKELLGFERAASAADCE

SEQ ID NO: 79547 - protein, 48 aa, Setaria italica
  Transcript Sequence Number=SeqID_13573
NLLKTASYALRVAAANTWAKWIVHDEIYSLTSRLCLIVSTEANRYTQT

SEQ ID NO: 79548 - protein, 88 aa, Setaria italica
  Transcript Sequence Number=SeqID_13574
SNFFPFVFYHLQGFHFCPKTPTPCDLHPSEINSKFGHILLFSDLAIFSKAAYCEQSADFRPPFEMVPSTIPDQQHPNLGVQSPYFNMV

SEQ ID NO: 79549 - protein, 305 aa, Setaria italica
  Transcript Sequence Number=SeqID_13575
  Gene Ontology: Mol. function=zinc ion binding; Cellular component =intracellular
  Homolog annotation: Hit_ID=A6N0Z8; Match level="QueryCoverage=74%, HitCoverage=99%, E-value=1e-35, Identity=42%"; Hit description =Constans-like b-box zinc finger protein (Fragment)
  Pfam annotation: Domain name=CCT; Domain location=259-303; Score =81.8; E_value=2.4e-21; Accession=PF06203.6; Description=CCT motif
CLCADCDFEEGHRRDGDPPPLHDRRAVEVYAGCPSIAELAAVLGVGGRKKATTVAGDGNGVGWWPDWEELQVLRLEDVIVPTTSCHGLQPLLAPSSAPKHRSSGGKLAEEVIRQLGELAKSEAAAEAAEAEQFPSWASSEYGIGDGDFEVFHNKAASMSVPSCEEAWMTTDDSNGACGMAHDAAHDQAPAAASSPAEPSLSSFVAMSEICPSMAIGNSVGDVVDNGSSKRDAAEATAPRQHAAPAPAKKAGYDVAYPDRGTVISRYKEKRKNRRFDKQIRYESRKARADGRLRIKGRFARSGEAS

SEQ ID NO: 79550 - protein, 211 aa, Setaria italica
  Transcript Sequence Number=SeqID_13576
  Gene Ontology: Mol. function=protein serine/threonine kinase activity; Cellular component=integral to membrane; Biological process=protein amino acid phosphorylation
  Homolog annotation: Hit_ID=Q30KI3; Match level="QueryCoverage=90%, HitCoverage=23%, E-value=3e-96, Identity=87%"; Hit description=RLK1 (Fragment)
  Pfam annotation: Domain name=Pkinase; Domain location=1-149; Score= -101.8; E_value=0.02; Accession=PF00069.17; Description=Protein kinase domain
  Pfam annotation: Domain name=Pkinase_Tyr; Domain location=1-149; Score=-150.0; E_value=0.00094; Accession=PF07714.9; Description =Protein tyrosine kinase
  Pfam module annotation: Pfam domain module=Pkinase::Pkinase_Tyr; Domain location=1-149::1-149
LHRDVKSNNILLDSDFEAHVADFGLAKFLQDSGASQCMSAIAGSYGYIAPEYAYTLKVDEKSDVYSFGVVLLELVTGKKPVGEFGDGVDIVQWVKTMTDSNKEQVIKIMDPRLSTVPVHEVMHIFYVALLCVEEQSVQRPTMREVVQMLSELPKPTSRQGDELPSGDDGAAPNPPVSADSVEALNDEAKEHQQQKQPSSSQSSPTRDLISI

SEQ ID NO: 79551 - protein, 41 aa, Setaria italica
  Transcript Sequence Number=SeqID_13577
SLMPCFVVRELKTRHVGVRIYLLIPNALFRGTRAQNDSRYI

SEQ ID NO: 79552 - protein, 124 aa, Setaria italica
  Transcript Sequence Number=SeqID_13578
  Gene Ontology: Mol. function=electron carrier activity; Cellular component=chloroplast; Biological process=tRNA processing
  Homolog annotation: Hit_ID=B6SXL7; Match level="QueryCoverage=100%, HitCoverage=20%, E-value=2e-35, Identity=67%"; Hit description =Carotenoid isomerase
GVRQGALASERPPAVAVAEEAGEDAGGGEGEGPYDTIVIGSGIGGLVGRTTQLAAKGARVLVLEKYLIPGGSSGYYRRDGFTFDVGSSVMFGFSDKGNLNLITQALEAVGRKMEVLPDPSTVHF

SEQ ID NO: 79553 - protein, 86 aa, Setaria italica
  misc_feature (54)..(54): Xaa can be any naturally occurring amino acid
  misc_feature (71)..(71): Xaa can be any naturally occurring amino acid
  misc_feature (79)..(79): Xaa can be any naturally occurring amino acid
  Transcript Sequence Number=SeqID_13579
  Gene Ontology: Mol. function=binding
  Pfam annotation: Domain name=SH3_1; Domain location=32-74; Score=8.4; E_value=0.0061; Accession=PF00018.20; Description=SH3 domain
KRKESFENPLAGRGGRSFGSHDDEDKSSSNPQSGKALYDFTAGGDDELSLTTGXEVEIEYEVDGWYYVKKXRPGRDGRXAGLVPVL

SEQ ID NO: 79554 - protein, 110 aa, Setaria italica
  Transcript Sequence Number=SeqID_13580
  Gene Ontology: Mol. function=binding
RTTVACECVYVRAMVIKALIWMQNPHESFEELKSIIACELSDPAWPSSLLNDVLLTLHARFKATPDMAVTLLEIARIFATKVPGKIDADVLQLLWKTCLVGAGPDGKHTA

SEQ ID NO: 79555 - protein, 162 aa, Setaria italica
  Transcript Sequence Number=SeqID_13581
  Gene Ontology: Mol. function=binding
RNWDALADIDAVGGVTRADVVPRIVDQLSAESSSDDVEFHARRLAALKALTSASPGSSEMMEKLNEIVFGILEKVADTKQKRKKGIFTKQGGDKESIIRGNLQYASVSALRRLPLDLGNPAFLHRAVQGVEFSDPVAVRHSLSIISEIAAKDPYSVAMALGK

SEQ ID NO: 79556 - protein, 115 aa, Setaria italica
  Transcript Sequence Number=SeqID_13582
  Homolog annotation: Hit_ID=B6SLK0; Match level="QueryCoverage=97%, HitCoverage=55%, E-value=2e-24, Identity=57%"; Hit description=TMV response-related protein
  Subcellular localization annotation: CTP_CleavageSite=22; ConfidenceScore=5.33e-01
MGSGLSSNHHRRSSASLHQPPPAAAAPALVVAADGSLREFAPASSPVSASDVLNGAGSSNAFVCSSDALYFDADVPALGADELLRPGQIYFVLPAEMLGRPLSSADMAALAVTTV

SEQ ID NO: 79557 - protein, 126 aa, Setaria italica
  misc_feature (63)..(63): Xaa can be any naturally occurring amino acid
  misc_feature (105)..(105): Xaa can be any naturally occurring amino acid
  Transcript Sequence Number=SeqID_13583
  Gene Ontology: Mol. function=binding
HIKTGALQDILHLHDVLARVYLAKLCHSISRARVLDRKCFIFACPEFRCVIHNIRGRISNWFXSYTIYAERPDIKSQYSSLLYQLLLDPSDRVCFEAINCVLGKXVDNTEKVLNDVCVCVVFGGGR

SEQ ID NO: 79558 - protein, 897 aa, Setaria italica
  misc_feature (30)..(30): Xaa can be any naturally occurring amino acid
  misc_feature (440)..(440): Xaa can be any naturally occurring amino acid
  Transcript Sequence Number=SeqID_13584
  Gene Ontology: Mol. function=binding
  Pfam annotation: Domain name=HEAT; Domain location=477-513; Score =19.4; E_value=0.015; Accession=PF02985.14; Description=HEAT repeat
  Pfam annotation: Domain name=SH3_1; Domain location=839-897; Score =22.6; E_value=0.00025; Accession=PF00018.20; Description=SH3 domain
  Pfam module annotation: Pfam domain module=HEAT::SH3_1; Domain location=477-513::839-897
DLQYASVSALRRLPLDLGNPAFLHRAVQGXEFSDPVAVRHSLSIISEIAAKDPYSVAMALGKSAQPGGALQDILHLHDVLARVYLAKLCHSISRARVLDQRPDIKSQYSSLLYQLLLDPSDRVCFEAINCVLGKVDNTESMEDRAGGWIRLTREILKLPEAPSVASKGVLSKSSEKSSKARRPQPLIKLVMRRLESSFRSFSRPVLHAAARVVQEMGKSRAAAYALGAYDEGAPLDVESLDSELENPTAEATRKPNPLSNGHGGMDTIAGLLASLMEVVRTTVACECVYVRAMVIKALIWMQNPHESFEELKSIIACELSDPAWPSSLLNDVLLTLHARFKATPDMAVTLLEIARIFATKVPGKIDADVLQLLWKTCLVGAGPDGKHTALEAVTIVLDLPPPQPGSMSGFTSVDMVSASDPKSAMALQRLVQAAVWFLGXNANYAASEYAWESATPPGTALMMLDADKMVAAASSRNPTLASALTRLQRCAFSGSWEIRIAAVQALTTIAIRSGEPYRLQIYEFLHALALGGVQLNFSELQLSNGENQGASGTGLGSLISPMLKVLDEMYRAQDDLARDIRQHDNSKQEWSDEELKKLYETHERLLDFVSLFCFVPRAKYLPLGPTSSKLIEIYRNRHNISASGGLSDPAVATGISDLMYESKDVRKETTTMQSGIDPDLAMAWAAGLEDDDWANNAPAVDKVKDFLAGAGTDAPDVDDEEYMNSRPSVGYDDMWAKTILETYEAEEDDGRYSGGSSPESTGSVETSISSHFGGMNYPSLFSSKPSSHGASQQTIREEPPSYSTSVLQRKESFENPLAGRGGRSFGSHDDEDKSSSNPQSGKALYDFTAGGDDELSLTTGEEVEIEYEVDGWYYVKKRRPGRDGKMAGLVPVLYVSS

SEQ ID NO: 79559 - protein, 71 aa, Setaria italica
  Transcript Sequence Number=SeqID_13585
LGGAAGLSLAAMGGTGARHDRRLQRGMGGVAAWHDRPLRWGIGGTAGRCSQATGGAAGPYGGARAAQVDGG

SEQ ID NO: 79560 - protein, 123 aa, Setaria italica
  Transcript Sequence Number=SeqID_13586
  Subcellular localization annotation: CTP_CleavageSite=56; ConfidenceScore=5.30e-01
LRTGHPAHTRTHTTATGGRSSCIVLYLHSPFGRAEMLRRQVAQRPTNRGLPPRPCRPAAVTGARATTTPSQTNPHHPFPFGMLYQTAANGALLTPWRRCGRGARRGGRRGRRRRPSWRGGSGP

SEQ ID NO: 79561 - protein, 348 aa, Setaria italica
  Transcript Sequence Number=SeqID_13587
  Gene Ontology: Mol. function=alpha-1,4-glucan-protein synthase (UDP -forming) activity; Cellular component=plant-type cell wall; Biological process=cellulose biosynthetic process
  Homolog annotation: Hit_ID=B6U219; Match level="QueryCoverage=100%, HitCoverage=100%, E-value=0.0, Identity=92%"; Hit description=Alpha -1,4-glucan-protein synthase
  Pfam annotation: Domain name=RGP; Domain location=1-348; Score =1005.7; E_value=1.8e-299; Accession=PF03214.5; Description =Reversibly glycosylated polypeptide
MSTGIQDSEVDIVIAALQPNLNTFFEAWRPFFSRFHIIVVKDPDMKEDLQIPTGFDLKVYTKSDIDGMLGATSINFSGHSCRYFGYLVSRKKYVISIDDNCLPAKDTAGSTVDAVAQHMVNLKTPATPFFFNTLYDPYRKGADFVRGYPFSLREGVDCMLSCGLWLHNADYDPMTHVVKRNQRNTTYVDAVMTVPLGAMMPVSGINVAFNREVLGPAMFPALRLRNEGKHRWDTLEDVWNGLCAKVVCDSLGYGMKTGLPYVMRSDAEAGKALESLKEWEGVKVMDDVLPFFQSLKLSRTAVTVEDCVKELASIVREKLGPKNAIFTKAADAMVEWNNLWKSHGARNA

SEQ ID NO: 79562 - protein, 156 aa, Setaria italica
  misc_feature (7)..(7): Xaa can be any naturally occurring amino acid
  Transcript Sequence Number=SeqID_13588
MEEYGGXDLLTEAMGSAARLVVVEDCVEAPGAFVLHLLLKRALAGGGAAAFLALAQPFTHYDRILRKMGCNLSLHRRNERLHFFELQAFPGGARDGAIADSFVRLYSEIQRVAEATRSGENAGQFTIVIDDVSLLEVAAHGSIDNVLDFLHYCVTL

SEQ ID NO: 79563 - protein, 140 aa, Setaria italica
  Transcript Sequence Number=SeqID_13589
  Gene Ontology: Biological process=intracellular signaling cascade
  Homolog annotation: Hit_ID=Q69T67; Match level="QueryCoverage=99%, HitCoverage=16%, E-value=1e-68, Identity=82%"; Hit description =Lustrin A-like
RIPRLNPADMLERLRGKRLVFVGDSLNRNMWESLICILRNSVKDKSKVFEVSGRHQFKAEGSYSFLFQDYNCTVEFFRSPFLVQEWEMPIGNGNGTRETLRLDIVDRAFPRYKNADIIIFNTGHWWTHDKTSLGKDYYQE

SEQ ID NO: 79564 - protein, 211 aa, Setaria italica
  Transcript Sequence Number=SeqID_13590
  Gene Ontology: Mol. function=AMP deaminase activity; Cellular component=integral to membrane; Biological process=purine ribonucleoside monophosphate biosynthetic process
  Homolog annotation: Hit_ID=O80452; Match level="QueryCoverage=72%, HitCoverage=17%, E-value=4e-21, Identity=39%"; Hit description=AMP deaminase
RRAAGGSASLPDLSAFYDVGGRGGGGGLAAGGYLVEEEEEEGLVGPHANGGALDPADFLQIPEGLPRLHVGPDGNKQLARSGSNRRVAVIRPNSPKSPAASASAFGSADGSDEDDATQNGGKLDNGYINTNGNLEGEHKGNASVENGATKPLAAANLIRSHSISNDLHAVQPDPVAADILRKEPQQESFIKLLTAPKEIPTADEIEVFKIL

SEQ ID NO: 79565 - protein, 129 aa, Setaria italica
  misc_feature (119)..(119): Xaa can be any naturally occurring amino acid
  Transcript Sequence Number=SeqID_13591
  Gene Ontology: Mol. function=aminoacyl-tRNA ligase activity; Cellular component=cytoplasm; Biological process=tRNA aminoacylation for protein translation
  Homolog annotation: Hit_ID=Q017U6; Match level="QueryCoverage=97%, HitCoverage=14%, E-value=5e-46, Identity=75%"; Hit description =Isoleucyl-tRNA synthetase (ISS)
DWLIRLALISYNQAEVPVNWCPALGTVLANEEVIDGLSERGGYPVIRKPMRQWMLRITSYADRLLEDLNDLDWPESIKEMQRNWIGRSKGAELEFSAVDQEGHDLGAKLLVYTTRPDTXIFGATYLVVA

SEQ ID NO: 79566 - protein, 36 aa, Setaria italica
  Transcript Sequence Number=SeqID_13592
IASLQVEASDLANFLTMESEWGLPRCLQKVHQLTKD

SEQ ID NO: 79567 - protein, 59 aa, Setaria italica
  Transcript Sequence Number=SeqID_13593
FLYGKQDWIEGERRNTVTWSLSPNHSNLFQQPPDHWLIYMVLILGGVSKAYTGPLLPCK

SEQ ID NO: 79568 - protein, 75 aa, Setaria italica
  Transcript Sequence Number=SeqID_13594
LSPVCLSYPLLRVSGWCFQSIYGAFAPMVRFDFNLTLDVQAYVTACVVRNLYACKPVTLFQSGYWRSGTYLFVLL

SEQ ID NO: 79569 - protein, 114 aa, Setaria italica
  misc_feature (52)..(52): Xaa can be any naturally occurring amino acid
  Transcript Sequence Number=SeqID_13595
  Gene Ontology: Mol. function=protein binding; Cellular component =nucleus; Biological process=multicellular organismal development
  Homolog annotation: Hit_ID=Q9AWL7; Match level="QueryCoverage=90%, HitCoverage=8%, E-value=2e-38, Identity=72%"; Hit description =Protein GIGANTEA
SSRFPDPRLQAVVRVLTHYNRPIFKVERQHSEAECSSTSDQATSSDSTDKKXDDSPGTEPDRKPLRPLTPWITDILLAAPLGIRSDYFRWCGGVMGKYAAGGELKPPTTACSRG

SEQ ID NO: 79570 - protein, 50 aa, Setaria italica
  Transcript Sequence Number=SeqID_13596
HTLVAQEPVNQHRVEVASQFIHLCHQDPTLSNATCLETKIQLLAMLLVSY

SEQ ID NO: 79571 - protein, 103 aa, Setaria italica
  misc_feature (51)..(51): Xaa can be any naturally occurring amino acid
  misc_feature (77)..(77): Xaa can be any naturally occurring amino acid
  misc_feature (93)..(93): Xaa can be any naturally occurring amino acid
  Transcript Sequence Number=SeqID_13597
  Gene Ontology: Mol. function=protein binding; Cellular component =nucleus; Biological process=multicellular organismal development
  Homolog annotation: Hit_ID=Q9AWL7; Match level="QueryCoverage=100%, HitCoverage=8%, E-value=2e-51, Identity=91%"; Hit description =Protein GIGANTEA
MSASNEKWIDGLQFTSLFCPPPQDVAQKQAQILAYVEYFGQFTADSEQFPXDVAQLIQSCYPSKEKRLVDEVLATFXLHHPEHGHAVVHPILXRIIDGTLCYD

SEQ ID NO: 79572 - protein, 99 aa, Setaria italica
  Transcript Sequence Number=SeqID_13598
  Gene Ontology: Mol. function=protein binding; Cellular component =nucleus; Biological process=multicellular organismal development
  Homolog annotation: Hit_ID=Q9AWL7; Match level="QueryCoverage=100%, HitCoverage=8%, E-value=2e-40, Identity=86%"; Hit description =Protein GIGANTEA
HDSPEALVILASASDLLLRATDGMLVDGEACTLPQLELLEVTARAVHLIIEWGDSGLSHSMLTNYDLQCRLSPTIRCLSHPSAHVRALSMSVLRDILNN

SEQ ID NO: 79573 - protein, 88 aa, Setaria italica
  Transcript Sequence Number=SeqID_13599
LVQKNEEKDGGERNRNHTVPCDLHHRVMFLDYVFYSTYVIDGKQDWIEGERRNTVTWSLSPNHSNLFQQPPDHWLTRLDSIHIPIPIE

SEQ ID NO: 79574 - protein, 187 aa, Setaria italica
  misc_feature (8)..(8): Xaa can be any naturally occurring amino acid
  Transcript Sequence Number=SeqID_13600
  Gene Ontology: Mol. function=protein binding; Cellular component =nucleus; Biological process=multicellular organismal development
  Homolog annotation: Hit_ID=Q9AWL7; Match level="QueryCoverage=96%, HitCoverage=15%, E-value=6e-96, Identity=97%"; Hit description =Protein GIGANTEA
VGYRGSQXTLLRSVLSEKQELCFSVVSLLWQKLIASPEMQMSAESTSAHQGWRKVVDALCDVVSASPTKASAAIVLQADKDLQPWIARDDEQGQKMWRVNQRIVKLIAELMRNHDSPEALVILASASDLLLRATDGMLVDGEACTLPQLELLEVTARAVHLIIEWGDSGLSVADGLSNLLKHALFSD

SEQ ID NO: 79575 - protein, 450 aa, Setaria italica
  misc_feature (308)..(308): Xaa can be any naturally occurring amino acid
  Transcript Sequence Number=SeqID_13601
  Gene Ontology: Mol. function=protein binding; Cellular component =nucleus; Biological process=multicellular organismal development
  Homolog annotation: Hit_ID=Q9AWL7; Match level="QueryCoverage=97%, HitCoverage=35%, E-value=0.0, Identity=84%"; Hit description=Protein GIGANTEA
LKDSMKIIVPGKTNGINKELHNSISSAILHTRRILGILEALFSLKPSSVGTSWSYSSNEIVAAAMVAAHVSELFRRSRPCLNALSSLMRCKWDTGISTRASSLYHLIDLHGKTVSSIVNKAEPLEAHLTLTPVKKDNQQDSEENSTSSSDSGKLENKNGSTSHKKNGFSRPLLKCAEEVRNGNVASTSGKAIASLQVEASDLANFLTMDRNGGYRGSQTLLRSVLSEKQELCFSVVSLLWQKLIASPEMQMSAESTSAHQGWRKVVDALCDVVSASPTKASAAIVLQVKILLCTIIRYPMSSFLTHIXVSQADKDLQPWIARDDEQGQKMWRVNQRIVKLIAELMRNHDSPEALVILASASDLLLRATDGMLVDGEACTLPQLELLEVTARAVHLIIEWGDSGLSVADGLSNLLKCRLSPTIRCLSHPSAHVRALSIVLVPYDEQYLETN

SEQ ID NO: 79576 - protein, 359 aa, Setaria italica
  misc_feature (103)..(103): Xaa can be any naturally occurring amino acid
  Transcript Sequence Number=SeqID_13602
  Gene Ontology: Mol. function=protein binding; Cellular component =nucleus; Biological process=multicellular organismal development
  Homolog annotation: Hit_ID=Q9AWL7; Match level="QueryCoverage=91%, HitCoverage=28%, E-value=1e-165, Identity=90%"; Hit description =Protein GIGANTEA
EKIGFSRPLLKCAEEVRNGNVASTSGKAIASLQVEASDLANFLTMDRNGGYRGSQTLLRSVLSEKQELCFSVVSLLWQKLIASPEMQMSAESTSAQPKDRKKXVVDALCDVVSASPTKASAAIVLQADKDLQPWIARDDEQGQKMWRVNQRIVKLIAELMRNHDSPEALVILASASDLLLRATDGMLVDGEACTLPQLELLEVTARAVHLIIEWGDSGLSVADGLSNLLKCRLSPTIRCLSHPSAHVRALSMSVLRDILNNGHITPSKIIQGEQQRNGIQNSSYRCLAASINWQADVERCIEWEAHSRRATGLTLAFLSAAAKELGCPPPLADKAIPGADIGGHGADGRQSLQGQRVGC

SEQ ID NO: 79577 - protein, 1175 aa, Setaria italica
  misc_feature (249)..(249): Xaa can be any naturally occurring amino acid
  misc_feature (302)..(302): Xaa can be any naturally occurring amino acid
  misc_feature (604)..(604): Xaa can be any naturally occurring amino acid
  misc_feature (736)..(736): Xaa can be any naturally occurring amino acid
  misc_feature (1128)..(1128): Xaa can be any naturally occurring amino acid
  Transcript Sequence Number=SeqID_13603
  Gene Ontology: Mol. function=protein binding; Cellular component =nucleus; Biological process=multicellular organismal development
  Homolog annotation: Hit_ID=Q9AWL7; Match level="QueryCoverage=98%, HitCoverage=99%, E-value=0.0, Identity=87%"; Hit description=Protein GIGANTEA
MSASNEKWIDGLQFTSLFCPPPQDVAQKQAQILAYVEYFGQFTADSEQFPEDVAQLIQSCYPSKEKRLVDEVLATFVLHHPEHGHAVVHPILSRIIDGTLCYDRHGAPFSSFISLFSHTSEKEYSEQWALACGEILRVLTHYNRPIFKVERQHSEAECSSTSDQATSSDSTDKKSDDSPGTEPDRKPLRPLTPWITDILLAAPLGIRSDYFRWCGGVMGKYAAGGELKPPTTACSRGSGKHPQLMPSTXPRWAVANGAGVILSVCDEEVARYETANLTAAAVPALLLPPPTPALDEHLVAGXLPPLEPFARLFHRYYAIATPSATQRLLFGLLEAPPSWAPDALDAAVQLVELLRAAEDYATGMRLPKNWMHLHFLRAIGTAMSMRAGIAADTAAALLFRILSQPTLLFPPLGHAEGVEVHHEPLGGYVSSYKRQLEVPASEATIDATAQGIASLLCAHGPDVEWRICTIWEAAYGLLPLSSSAVDLPEIVVAAPLQPPTLSWSLYLPLLKVFEYLPRGSPSEACLMRIFVATVEAILRRTFPSETLEQSRKPRSQSKNLAVAELRTMIHSLFVESCASMDLASRLLFVVLTVCVSHQALPGGXSKRPTGSDNHSSEEVTEDSRLTNGRNRCKKRQGPVATFDSYVLAAVCALSCELQLFPFISKNGSHSNLKDSMKIIVPGKTNGINKELHNSISSAILHTRRILGILEALFSLKPSSVGTSWSYSSNEIVAAAXMVAAHVSELFRRSRPCLNALSSLMRCKWDTGISTRASSLYHLIDLHGKTVSSIVNKAEPLEAHLTLTPVKKDNQQDSEENSTSSSDSGKLENKNGSTSHKKNGFSRPLLKCAEEVRNGNVASTSGKAIASLQVEASDLANFLTMDRNGGYRGSQTLLRSVLSEKQELCFSVVSLLWQKLIASPEMQMSAESTSAHQGWRKVVDALCDVVSASPTKASAAIVLQADKDLQPWIARDDEQGQKMWRVNQRIVKLIAELMRNHDSPEALVILASASDLLLRATDGMLVDGEACTLPQLELLEVTARAVHLIIEWGDSGLSVADGLSNLLKCRLSPTIRCLSHPSAHVRALSMSVLRDILNNGHITPSKIIQGEQQRNGIQNSSYRCLAASINWQXADVERCIEWEAHSRRATGLTLAFLSAAAKELGSPPSLADKAIPGADI

SEQ ID NO: 79578 - protein, 230 aa, Setaria italica
  Transcript Sequence Number=SeqID_13604
  Gene Ontology: Mol. function=electron carrier activity
  Homolog annotation: Hit_ID=B9SB85; Match level="QueryCoverage=56%, HitCoverage=48%, E-value=5e-40, Identity=61%"; Hit description =Copper ion binding protein, putative
  Pfam annotation: Domain name=Cu_bind_like; Domain location=43-145; Score=65.3; E_value=2.2e-16; Accession=PF02298.9; Description =Plastocyanin-like domain
MMLSGGRHRGLVLPCLAVVAALAAAPRGADAYKNYTVGDDKGWYDGLTLPGVDYQAWADGIKNFSLGDFLIFNTDKNHSVVQTRNATLFKSCDYNDSGPDDTVEWSAAAPEFSKDAVTVAVPLLREGRTYFFSGNYDGEQCENGQGFAIDVAHGQGLPPDLRPPAADAPAPSAKPADGAAVLDFSHPKNVTTPSASDGDLSGDDTTSGSSRTLARICLAVMPLVTALFAV

SEQ ID NO: 79579 - protein, 87 aa, Setaria italica
  Transcript Sequence Number=SeqID_13605
PGRRQEPASRPRTQGAGARILSVGVQAAVMAAAIAIFLLFAAASALLLLVLVVAARAFRHHRGSRYRVPSLDPSSPAPSPLRTGLSP

SEQ ID NO: 79580 - protein, 213 aa, Setaria italica
  Transcript Sequence Number=SeqID_13606
  Gene Ontology: Cellular component=mitochondrial matrix
  Homolog annotation: Hit_ID=B6T2U8; Match level="QueryCoverage=97%, HitCoverage=87%, E-value=6e-80, Identity=77%"; Hit description =Cation cation antiporter
  Pfam annotation: Domain name=Use1; Domain location=4-212; Score =248.2; E_value=1.9e-71; Accession=PF09753.1; Description=Membrane fusion protein Use1
MRLNKVEVNLRRLLEAAPRQQNPAKLVHYVTTARELLEQLGAETTPEGISSVSKAKLSEYSEKIEALAARLAASVPENEKPDVESREEEISEEIAKAESPISLSSGLRRRSAAHVEVRASQQERKGDIGAPIKLDAEAQAHIEKHRKLQEDLTDEMVELARQLKESSLMMNQSVQETEKILDSTERAVEHSLASTGRATSRAAEVLTSSCNFT

SEQ ID NO: 79581 - protein, 237 aa, Setaria italica
  Transcript Sequence Number=SeqID_13607
  Gene Ontology: Cellular component=mitochondrial matrix
  Homolog annotation: Hit_ID=B6T2U8; Match level="QueryCoverage=100%, HitCoverage=100%, E-value=3e-99, Identity=79%"; Hit description =Cation cation antiporter
  Pfam annotation: Domain name=Use1; Domain location=4-237; Score =375.1; E_value=1.2e-109; Accession=PF09753.1; Description=Membrane fusion protein Use1
MRLNKVEVNLRRLLEAAPRQQNPAKLVHYVTTARELLEQLGAETTPEGISSVSKAKLSEYSEKIEALAARLAASVPENEKPDVESREEEISEEIAKAESPISLSSGLRRRSAAHVEVRASQQERKGDIGAPIKLDAEAQAHIEKHRKLQEDLTDEMVELARQLKESSLMMNQSVQETEKILDSTERAVEHSLASTGRATSRAAEVYSLTSKTTCFQWLLILVMTCVFVMVVLLIRIT

SEQ ID NO: 79582 - protein, 86 aa, Setaria italica
  Transcript Sequence Number=SeqID_13608
  Homolog annotation: Hit_ID=B6T2U8; Match level="QueryCoverage=98%, HitCoverage=36%, E-value=1e-39, Identity=94%"; Hit description =Cation cation antiporter
  Pfam annotation: Domain name=Use1; Domain location=1-86; Score=-30.4; E_value=4.6e-05; Accession=PF09753.1; Description=Membrane fusion protein Use1
GTDEMVELARQLKESSLMMNQSVQETEKILDSTERAVEHSLASTGRATSRAAEVYSLTSKTTCFQWLLILVMTCVFVMVVLLIRIT

SEQ ID NO: 79583 - protein, 58 aa, Setaria italica
  Transcript Sequence Number=SeqID_13609
  Subcellular localization annotation: CTP_CleavageSite=22; ConfidenceScore=5.04e-01
NRTMAVTLPRACNNASVPLQCRDATTSAQSPAPGPVADAPAPSLAPLRKNLCRNLCNW

SEQ ID NO: 79584 - protein, 169 aa, Setaria italica
  Transcript Sequence Number=SeqID_13610
  Gene Ontology: Mol. function=peptidase activity; Cellular component =chloroplast envelope
  Homolog annotation: Hit_ID=B4FRS4; Match level="QueryCoverage=48%, HitCoverage=36%, E-value=3e-29, Identity=79%"; Hit description=Lipid binding protein
  Pfam annotation: Domain name=Tryp_alpha_amyl; Domain location=2-73; Score=14.7; E_value=0.013; Accession=PF00234.14; Description =Protease inhibitorseed storageLTP f
  Subcellular localization annotation: CTP_CleavageSite=62; ConfidenceScore=5.50e-01
LISSFTPCLNFIINSTASPTADCCRSLGALMKASTGCACLILTGSVPLGVPVNRTMAVTLPRACNNASVPLQCRDATTSAQSPAPGPVADAPAPSLAPLPPVTPAPVATPEPDTPAPAAPVVEPTATAPVSQGQTRPTVVPSAAWRASADVSMGPAIVLLLAVAGAAMV

SEQ ID NO: 79585 - protein, 248 aa, Setaria italica
  misc_feature (68)..(68): Xaa can be any naturally occurring amino acid
  Transcript Sequence Number=SeqID_13611
  Homolog annotation: Hit_ID=Q84YP6; Match level="QueryCoverage=98%, HitCoverage=58%, E-value=2e-29, Identity=32%"; Hit description=F-box protein-like protein
  Pfam annotation: Domain name=F-box; Domain location=18-65; Score =33.2; E_value=1e-06; Accession=PF00646.25; Description=F-box domain
MDRGGSQKKRHKSVANVDIISNLPDVIKDKILCCLPIKEAVGTCLLSRKWRYTWASMTELTFREDDFXLGNGIEEGESNKFVYFIIMVLSLHNGPILKFELNVRRVHLLSPGGHIHRWMLMLSRNGVKEIQIRTKIWRNYKIPSSFFSCEELEYACLQGCVFQLPPVFTGFKRIHTLHFIDFCATENNIGELVASCPNLEKLVLSRLLSFADIIIHSTKLKILRVDGMFKHLSLVTPHVSSAAINLQV

SEQ ID NO: 79586 - protein, 275 aa, Setaria italica
  Transcript Sequence Number=SeqID_13612
  Homolog annotation: Hit_ID=B9R7N7; Match level="QueryCoverage=94%, HitCoverage=62%, E-value=1e-19, Identity=28%"; Hit description =Ubiquitin-protein ligase, putative
LRLCPCLRFVVFSSLPPVFTGFKRIHTLHFIDFCATENNIGELVASCPNLEKLVLSRLLSFADIIIHSTKLKILRVDGMFKHLSLVTPHVSSAAINLQVNTGYVPRAGCNFNLSQFIGSLLDIENISLLGHAFECAAHGILPGKLPRLLNRLTEITLGIDLGNLKEANAAHCLFQVAPNLRCLELQLIYRGYGTPTSNFWDSIDHQSGLFNNLDTVVLNNFAGSCAESGFLKLLLEDAPVLRIAQIKDNNKLDKESLRRLLKMRRASKDAEVILL

SEQ ID NO: 79587 - protein, 39 aa, Setaria italica
  Transcript Sequence Number=SeqID_13613
YLTSHKAGGLQQNTETIANKMKWIIHSIGKSVSKSNKCI

SEQ ID NO: 79588 - protein, 182 aa, Setaria italica
  Transcript Sequence Number=SeqID_13614
  Gene Ontology: Mol. function=magnesium ion binding; Cellular component=chloroplast; Biological process=photosynthesis, light harvesting
  Homolog annotation: Hit_ID=Q41746; Match level="QueryCoverage=100%, HitCoverage=64%, E-value=8e-93, Identity=92%"; Hit description =Chlorophyll a/b-binding apoprotein CP26
  Pfam annotation: Domain name=Chloroa_b-bind; Domain location=83-182; Score=49.7; E_value=1.1e-11; Accession=PF00504.13; Description =Chlorophyll A-B binding protein
  Subcellular localization annotation: CTP_CleavageSite=36; ConfidenceScore=5.25e-01
MAALAPSKILGTQINFAGSSRYATAAPTAGAQKIVSLFSKKPAQKPKPAAVTSSSPDISDELAKWYGPDRRIYLPDGLLDRSEVPEYLTGEVPGDYGYDPFGLGKKPEDFAKYQAYELIHARWAMLGAAGAVIPEACNKFGANCGPEAVWFKTGALLLDGNTLSYFGNSIPINLVVAVIAEV

SEQ ID NO: 79589 - protein, 96 aa, Setaria italica
  Transcript Sequence Number=SeqID_13615
  Gene Ontology: Cellular component=nucleus
  Homolog annotation: Hit_ID=B6U4M9; Match level="QueryCoverage=100%, HitCoverage=17%, E-value=1e-28, Identity=80%"; Hit description=SET domain containing protein
RVVHMDELELYFAGGDIGPFSARNELESLNLLFKIMDKLLLTSNDAAKEVLQTLQNEIVVRLRSVGKTDDAQMVSQTENHEAEDSLLKWGEHRGVK

SEQ ID NO: 79590 - protein, 320 aa, Setaria italica
  misc_feature (54)..(54): Xaa can be any naturally occurring amino acid
  misc_feature (150)..(150): Xaa can be any naturally occurring amino acid
  Transcript Sequence Number=SeqID_13616
NNIGEIELPEPAYNNDMAIGSNDGPSDMNTSEKEAQIGSADYHNLDPNMINTTXCELESEEAFSETCAKNLDIIQGTKPSVPSISYHQIIHSKDNSEFSINVAPERADGLSSDCFDCSASELRNKKTPMDVSVNDINVNQEIEASRTSAXSSQTDHYKEFAHNMNMIGEEECKTSIVMDNVTSASSQGSREEPIDLKRDSMQLAQEPKPSISSWNDNQHRETESTRTLNNASTSSLYAPPEETVQHNFSKISTSEKKQEKRTSSNKKFRAHLSKNKVKLQKEVCSSKETETTQSEQGVPGTKAVNGPSNSVQKTKKVAKN

SEQ ID NO: 79591 - protein, 187 aa, Setaria italica
  Transcript Sequence Number=SeqID_13617
LWVNSNLLLLPVCIKLTICEFGLELDEPQQYLPEKQLVIPDPLLDFVQSYGSALTIDQNGRILFAGHGDEMRDLLSLFLEFNMSKRETSGCKTAFLVPYFERTPVKDIWKKRSRANSQVSNTNLASMATDISKSADVKSKSSSKKKQRGKNIKERELHQRNYIHASEAFLSILLDKDKSSSTILSLE

SEQ ID NO: 79592 - protein, 77 aa, Setaria italica
  Transcript Sequence Number=SeqID_13618
GHEDEMRDLLSLFLEFNMSKRETSGCKTAFLVPYFERKKRSRANSQVSNTNLASMATDISKSADVKSLSFFFDEDFD

SEQ ID NO: 79593 - protein, 430 aa, Setaria italica
  Transcript Sequence Number=SeqID_13619
  Homolog annotation: Hit_ID=Q9ZVT5; Match level="QueryCoverage=81%, HitCoverage=79%, E-value=2e-27, Identity=31%"; Hit description =F15K9.6
AASPVVLPPSKELHGVLPFQGKRPHDAAAAAVQLCAPLQQQQQHPHHHLEGLPVQMMMPCGNQAQAVPAAYQAFAMPDTATLIDVQDSHPDSVRLSLGIAEQCARQEKILKFLMSVTSGSDVKELDESLLSEFTGQQTLPINLGNQPYIPDDKLTICEFGLELDEPQQYLPEKQLVIPDPLLDFVQSYGSALTIDQNGRILFAGHGDEMRDLLSLFLEFNMSKRETSGCKTAFLVPYFERKKRSRANSQVSNTNLASMATDISKSADVKSKSSSKKKQRGKNIKERELHQRNYIHASEAFLSILLDKDKSSSTILSLKKAGPEINELLTQCSVGIAGTGLAILLSVMCKMATGMRTPFASARLLSTSVGFGLFWLSWAVNGLRDTIASIFRSPSNINMEEDEVAVRIQKSMNEILFRAITLLAITALKFA

SEQ ID NO: 79594 - protein, 306 aa, Setaria italica
  misc_feature (22)..(22): Xaa can be any naturally occurring amino acid
  Transcript Sequence Number=SeqID_13620
  Gene Ontology: Mol. function=ARF GTPase activator activity; Biological process=regulation of ARF GTPase activity
  Subcellular localization annotation: CTP_CleavageSite=63; ConfidenceScore=5.63e-01
FAGESCGSRTSNCSGSSMSDTXFRTAPQSPNFPDNGCFSPPVVKDQSNQQSSYGLTSSQRTVSAGNIDSISLKSGKSSLFDLIFEDDNVQRTQKSTNSAAPSFIAFSDAISAPNQDLFNSTAAQKHHVTNLDQSLDLFANRPTETPSADKAIPAAPSMDNAGWATFDTPPEQKQSSVTGLSYVPATSNDKQTLSRDLFSFESNDEPTWFESSKDNASVTNKSIATSLDTGSSQPWSAFDASSTSTQYTVKGDLSLQGSKGPVDENSSQLWHSFDDVNGAVSHDQLCAQRRIDEHSNVVSISLSTSQ

SEQ ID NO: 79595 - protein, 774 aa, Setaria italica
  Transcript Sequence Number=SeqID_13621
  Gene Ontology: Mol. function=protein binding; Cellular component =Golgi transport complex; Biological process=retrograde vesicle -mediated transport, Golgi to ER
  Homolog annotation: Hit_ID=Q655R9; Match level="QueryCoverage=98%, HitCoverage=93%, E-value=0.0, Identity=82%"; Hit description =Oligomeric golgi complex 7-like
  Pfam annotation: Domain name=COG7; Domain location=1-770; Score =1368.4; E_value=0; Accession=PF10191.1; Description=Golgi complex component 7 (COG7)
  Pfam annotation: Domain name=Lycopene_cycl; Domain location=447-735; Score=-204.4; E_value=0.065; Accession=PF05834.4; Description =Lycopene cyclase protein
  Pfam module annotation: Pfam domain module=COG7::Lycopene_cycl; Domain location=1-770::447-735
AADDAAAALERDSGDALRRVPLACRDALRLRDDAVALRAHLASVLQSLSLAEGSSAESIAALAQIDTVKQRMEAAYTTLQDAAGLAQLSQSVEDVFSSGNLPKAAETLATMRHCLSAVGEVAEFANVRKQLEVLEERLDEMVQPRLVDALSNRKVDAVQDLRGILIRIERFKSLEAQYTKIHVKPLKKLWEDFDLKQRASRVDMEKLGGESINALSFSSWLPNFYDETLLYLEQEWKWCLTAFPEEYKSLVPKVLVETMSELNSSFVSRVNIATGDVVPETRSVSKGILDVLSGDLPKSTKLQNKHLQALIELHNMTGTFARNIQHLFSESDLAVVLNTLKAIYSPYETFKARYGQMERAILSAEMAGIDIRGAVPRGVGAQGIELSETVRRMEESIPQMIVLLEAAVERCISLTGGSEADELVVALDDIMLQYISNLQEALKSLRIVCGLESDALKKDAGLEKKEAQRLVDVSEEEEWSIVQGALQILTVADCLTSRTSVFEASLRATLARIGTNFSLSGFVSSLDKSPAAIADENADLPLGGRAALDIAAIRLRDLPDKSKKLLTVLEQSKDPRFHALPLTSQRVAAFSDTVNDLVYDVLISKVRMRLSEVARLPIWSSVEEQGGLPLPSFSAYPQAYVTSVGEYLLTLPQQLEPLAEGISGNETGNDEAQFFATEWIFKVAEGATALFMEQLRGIHYITDRGAQQLAADIEYLNNVLSALSMPIPPFLSTFHACVSTPRDQVRGLIKSDGGSQLDLPTAHLVCKIRRISLD

SEQ ID NO: 79596 - protein, 56 aa, Setaria italica
  Transcript Sequence Number=SeqID_13622
RDWKRIEQFVATKTATQIRSHAQKYFLKAQKLGFEAALPPRRPSCRLRSLQQSEPP

SEQ ID NO: 79597 - protein, 298 aa, Setaria italica
  Transcript Sequence Number=SeqID_13623
  Gene Ontology: Mol. function=DNA binding; Cellular component =chromosome; Biological process=regulation of transcription
  Homolog annotation: Hit_ID=B6TMI8; Match level="QueryCoverage=100%, HitCoverage=100%, E-value=1e-111, Identity=72%"; Hit description =Single myb histone 1
  Pfam annotation: Domain name=Linker_histone; Domain location=121-192; Score=33.8; E_value=3.3e-07; Accession=PF00538.11; Description=linker histone H1 and H5 family
  Pfam annotation: Domain name=Myb_DNA-binding; Domain location=5-57; Score=33.8; E_value=6.9e-07; Accession=PF00249.23; Description=Myb -like DNA-binding domain
  Pfam module annotation: Pfam domain module=Linker_histone::Myb_DNA -binding; Domain location=121-192::5-57
MGAPKQRWTPEEEAALKAGVAKHGPGKWRTILRDPDFSTLLRLRSNVDLKDKWRNLSVVAGGYGSREKARMALKKGRRVVPKLTAEPMDVDANGLGNVHDAVIDAEPLAMAVEPLAVEESSEKSVARLDDLILEAIKKLKEPSGSNKAAIAVYIEEQYWPPADFPRLLSTKLKALVNSGKLMKVNQKYRIAPSSPSLGGISTKVYSAEEMTGENDTKQLTKPQVDAELEKLKGMTKEEAAAFAAKAVAEAEVAMAQAEEAARAAEVLENDAETAIAFLEALTLSLRDRNANSTMLRAC

SEQ ID NO: 79598 - protein, 53 aa, Setaria italica
  Transcript Sequence Number=SeqID_13624
GCHFRPVVFFFDVGGISFSWGSKRQRSQQIRPTFRIGKIVPSIAIGFTRHLGN

SEQ ID NO: 79599 - protein, 200 aa, Setaria italica
  Transcript Sequence Number=SeqID_13625
  Homolog annotation: Hit_ID=B6U055; Match level="QueryCoverage=91%, HitCoverage=76%, E-value=9e-73, Identity=76%"; Hit description=F-box domain containing protein
  Pfam annotation: Domain name=F-box; Domain location=17-65; Score =21.5; E_value=0.0035; Accession=PF00646.25; Description=F-box domain
MEQQQQLRDGDGGAAEGDIERLPADLLAHVLSLLPSFRDLSMAGGVSRRWRRAVERSLASRRRLSFAGQRTGDDTAARLVRAAVNLRDLGISRSCWGCQISDEGLIKISTADCVGKLTSISLWGLAGITDKGVVQLVSRAYSLQHLNIGGTFITDESLNAVANSCTDLKSIILWSCRHVTEAGLVALVNNCRRLECINVG

SEQ ID NO: 79600 - protein, 150 aa, Setaria italica
  misc_feature (28)..(28): Xaa can be any naturally occurring amino acid
  Transcript Sequence Number=SeqID_13626
  Gene Ontology: Mol. function=transferase activity, transferring phosphorus-containing groups; Cellular component=chloroplast; Biological process=phosphorylation
  Homolog annotation: Hit_ID=Q6AVA8; Match level="QueryCoverage=98%, HitCoverage=15%, E-value=2e-75, Identity=89%"; Hit description =Pyruvate, phosphate dikinase 1, chloroplastic
  Pfam annotation: Domain name=PPDK_N; Domain location=1-150; Score =92.2; E_value=1.8e-24; Accession=PF01326.11; Description=Pyruvate phosphate dikinase, PEPpyruvate bi
RSQGEPFPSDPTKQLELAVLAVFNSWDXPRANKYRSINQITGLKGTAVNVQSMVFGNMGDTSGTGVLFTRNPSTGEKKLYGEFLVNAQGEDVVAGIRTPEDLDAMKAQMPDAYVELVENCKILESHYKEMMDIEFTVQENRLWMLQCRFR

SEQ ID NO: 79601 - protein, 88 aa, Setaria italica
  Transcript Sequence Number=SeqID_13627
  Gene Ontology: Mol. function=transcription regulator activity; Cellular component=nucleus; Biological process=regulation of transcription
  Homolog annotation: Hit_ID=B9RB43; Match level="QueryCoverage=69%, HitCoverage=35%, E-value=4e-13, Identity=55%"; Hit description=DNA binding protein, putative
RKEGRGGGKGGAGAAAAPVGGGAGGVRMPVIEVRYQDGTLDVVLISEAERPFKLHEVITVLEQEGAEVVSASFSVVGDKIFYTVHSQA

SEQ ID NO: 79602 - protein, 60 aa, Setaria italica
  misc_feature (25)..(25): Xaa can be any naturally occurring amino acid
  Transcript Sequence Number=SeqID_13628
  Homolog annotation: Hit_ID=B6UEI4; Match level="QueryCoverage=80%, HitCoverage=8%, E-value=1e-18, Identity=91%"; Hit description=Appr-1- p processing enzyme family protein
LERKFVLCGLGFVQLFRYVPREQLXTIPDFVFQHDLEVNGGKGLIVDPRTKHIYQRASSS

SEQ ID NO: 79603 - protein, 145 aa, Setaria italica
  Transcript Sequence Number=SeqID_13629
  Gene Ontology: Mol. function=protein binding; Cellular component =integral to membrane; Biological process=vesicle-mediated transport
  Homolog annotation: Hit_ID=Q9FMR5; Match level="QueryCoverage=97%, HitCoverage=64%, E-value=5e-57, Identity=73%"; Hit description =Vesicle-associated membrane protein 714
  Pfam annotation: Domain name=Synaptobrevin; Domain location=48-136; Score=138.5; E_value=2e-38; Accession=PF00957.13; Description =Synaptobrevin
ILLYLEDIQMRFMKNYGRVAHSALAYAMNDEFSRVLHQQMEFFSSNPSADTLNRLRGEVSEIHTVMVDNIEKILDRGDRISLLVDKTSTMQDSAFHFRKQSKRLRRALWMKNAKLLAVLTVAIVVLLYLIISAFCGGLSLPSCRS

SEQ ID NO: 79604 - protein, 307 aa, Setaria italica
  Transcript Sequence Number=SeqID_13630
  Gene Ontology: Mol. function=double-stranded RNA binding; Cellular component=intracellular
SSSCPSDQDDEEHEQAIVTRTLASLNLANGGKTLHQRKQQSNNRPSSRRSYAKPNPSSYRSHLPNQAYPSVPPEQAMYHMWHQVQATQPAPRFPMVPSLGNTRFPPAAALLSMYTSPRGQFATTACQDGVGLLPCFPEAAPGLPRYFSPYPVTFVPRSPLPATVPKIHERRQDHAETVEFPDAAVFSQYGDQHKFQGKEDCTGTSASPCPRSGSSSTAHPSLQKRDPNEEKETLGSKHAEPNKSQGQQPKSSPSWVNPSIPAHGSIQRKHYTSSVQHDDPPQTSRSSLPELWSSRSPAAPRSGAAVP

SEQ ID NO: 79605 - protein, 81 aa, Setaria italica
  Transcript Sequence Number=SeqID_13631
  Gene Ontology: Mol. function=nucleic acid binding
  Homolog annotation: Hit_ID=Q10LF6; Match level="QueryCoverage=96%, HitCoverage=5%, E-value=1e-31, Identity=82%"; Hit description =Transcriptional activator, putative, expressed
GEYGGLLYQYNGINDASHGLHRKRKRHLDGASDDDEADGYSNRITEEHYRTMLSEHVQKYRRSKFKEGAFGSDPPRVASPK

SEQ ID NO: 79606 - protein, 170 aa, Setaria italica
  Transcript Sequence Number=SeqID_13632
  Gene Ontology: Mol. function=nucleotide binding; Cellular component =intracellular
DSPDGVELTIGQFDARVAGGKSAGGRGFARQMVEHLEDDGDEEFVVNSRDVFEVKRGRNARAVVPEVLDDDDDVVVFDPDYGVDSDDEEEFHMFPIKQSHEAGATPRTELGELEYDEEEDDDDDEIVVFHPDYDDEDEDEDEEAFEEDDDYEEGDGEAKEKGVPAVMRCF

SEQ ID NO: 79607 - protein, 126 aa, Setaria italica
  Transcript Sequence Number=SeqID_13633
  Gene Ontology: Mol. function=hydrolase activity; Cellular component =plasma membrane
  Homolog annotation: Hit_ID=B4FTK9; Match level="QueryCoverage=100%, HitCoverage=55%, E-value=1e-51, Identity=74%"; Hit description=Endo -1,3;1,4-beta-D-glucanase
  Pfam annotation: Domain name=DLH; Domain location=1-125; Score=-59.4; E_value=0.0039; Accession=PF01738.10; Description=Dienelactone hydrolase family
KPVIAAIKEKGVSKIGAAGYCWGAKVVVELAKVHEIRAAVLLHPSLLTVDDIEEVKCPISVLGAEIDKSSPPELLKQFEQIDHIVKIFPGVTHGWAVRYSEEDAAAVASAEEALQDMSHWFNKYLN

SEQ ID NO: 79608 - protein, 231 aa, Setaria italica
  misc_feature (100)..(100): Xaa can be any naturally occurring amino acid
  misc_feature (106)..(106): Xaa can be any naturally occurring amino acid
  Transcript Sequence Number=SeqID_13634
  Gene Ontology: Mol. function=hydrolase activity; Cellular component =plasma membrane
  Homolog annotation: Hit_ID=B4FTK9; Match level="QueryCoverage=92%, HitCoverage=89%, E-value=1e-101, Identity=84%"; Hit description=Endo- 1,3;1,4-beta-D-glucanase
  Pfam annotation: Domain name=DLH; Domain location=29-230; Score=66.4; E_value=1.1e-16; Accession=PF01738.10; Description=Dienelactone hydrolase family
MASSHCFENPPALNSAGGLGEVVDDFGGQKAYIAGSAGSKAAVVLISDAFGFEAPNLRKIADKVASSGYFVVVPDFLHGDPYDPSNPNNPGMWLQSHNPXKAFEEXKPVIAAIKEKGVSKIGAAGYCWGAKVVVELAKVHEIRAAVLLHPSLLTVDDIEEVKCPISVLGAEIDKSSPPELLKQFEQVLSANSGIDHIVKIFPGVTHGWAVRYSEEDAAAVASAEEALFVFP

SEQ ID NO: 79609 - protein, 93 aa, Setaria italica
  Transcript Sequence Number=SeqID_13635
SSNLFYKSCKQNRQNEKEIKQEPPYGHHPQAKSKNNRTTKGDESDGLPSSLIASAAPLVTRSHSRRLRRRAASTSAPRRGGRRRARRVRLVEE

SEQ ID NO: 79610 - protein, 90 aa, Setaria italica
  Transcript Sequence Number=SeqID_13636
FTQYLNTKIVHFYFTIIPARKRRKIRLPEFGGKASRTTLLSWEQNGNIYMIQPGPTGDPACFWCSNIYLQPFKPIHFSSHVVNSCNYQPL

SEQ ID NO: 79611 - protein, 136 aa, Setaria italica
  Transcript Sequence Number=SeqID_13637
  Gene Ontology: Mol. function=zinc ion binding
  Homolog annotation: Hit_ID=Q10NX9; Match level="QueryCoverage=100%, HitCoverage=13%, E-value=9e-56, Identity=81%"; Hit description =Transposon protein, putative, unclassified, expressed
  Pfam annotation: Domain name=FAR1; Domain location=3-59; Score=18.2; E_value=5.5e-07; Accession=PF03101.7; Description=FAR1 family
GTSYPLRSKRGAAAQEKKSRRGAAEKTGCKAMLLIRDKRVDDRWKVESVELEHNHPCTPDMVRFLKAYREMPESAKKKAKITDEMDGMVEKSLSEIAETRKFPTRPKRGASGGAAVGSHRFSRIESFVQRFGEDDL

SEQ ID NO: 79612 - protein, 81 aa, Setaria italica
  Transcript Sequence Number=SeqID_13638
FIIIKITQKNYHFPFSVWSVSHSDSYKQNVSTEKTLHTFHGDKTILQGFRSTTKRIQKQTPPTDACRNYKKKKPTRIIFRS

SEQ ID NO: 79613 - protein, 588 aa, Setaria italica
  Transcript Sequence Number=SeqID_13639
  Gene Ontology: Mol. function=serine-type peptidase activity; Cellular component=chloroplast; Biological process=proteolysis
  Homolog annotation: Hit_ID=B6UHC0; Match level="QueryCoverage=99%, HitCoverage=87%, E-value=0.0, Identity=91%"; Hit description=Acyl -peptide hydrolase-like
  Pfam annotation: Domain name=AXE1; Domain location=280-569; Score= -174.4; E_value=6.4e-05; Accession=PF05448.4; Description=Acetyl xylan esterase (AXE1)
  Pfam annotation: Domain name=Abhydrolase_3; Domain location=389-551; Score=-70.1; E_value=0.0047; Accession=PF07859.5; Description =alphabeta hydrolase fold
  Pfam annotation: Domain name=Peptidase_S15; Domain location=344-542; Score=-104.6; E_value=0.021; Accession=PF02129.10; Description=X-Pro dipeptidyl-peptidase (S15 family)
  Pfam annotation: Domain name=Peptidase_S9; Domain location=367-573; Score=176.9; E_value=5.9e-50; Accession=PF00326.13; Description =Prolyl oligopeptidase family
  Pfam module annotation: Pfam domain module=AXE1::Abhydrolase _3::Peptidase_S15::Peptidase_S9; Domain location=280-569::389 -551::344-542::367-573
RLQRNNGGGAFAVDKSVVVFSNYKDQRLYKQAIGIGDPPVPLTPDYGAPDVSYADGVFDPHFGRYVTVVEDRRKSSLNPTTTIAAINLSGDDTLEPKELISGNDFYAFPRIDQNKRRMAWIEWSHPNMPWDKSELWVGHFSESGDLAKRVCVAGGNPLLVESPTEPKWSPEGELFFVTDRGSGFWNIYKWVEQTNEIVPVYALDAEFTRPLWVFGISSYDFLGNSNIIFSYRQQGRSYLGVLDCDSGSVSMLDIPFSDLSNVVASDDYFYIEGASANIPMSIAKVTLNESKTKVVNFSIVWSSSPDVTQYKPFFSTPELVEFPTSKPGQKAYAYFYPPSNPNFQGLPDEKPPLLVKTHGGPTAETRAILDLSVQYWTSRGWAYVDVNYGGSTGYGREYRERLLEKWGIVDVDDCCGCARFLVESGKVDGRRLCITGRSAGGYTTLASLAFRDTFKAGASLYGVGDLTLLRAETHKFESHYLDNLVGNERAYYERSPINFVNQFTCPVILFQGLEDKVVPPDQARKIYNALKERGLPVALVEYEGEQHGFRKTENIKFTLEQQMVFFARLVGNFEVADDITPIKIENFD

SEQ ID NO: 79614 - protein, 75 aa, Setaria italica
  Transcript Sequence Number=SeqID_13640
MDTQKILDTSNRAVEFITYPKAGSVCKSWPNNLLMLSKFIHYLETYCIIYMHVASTYSLKSNPKNHMLQCCNQCE

SEQ ID NO: 79615 - protein, 439 aa, Setaria italica
  misc_feature (39)..(39): Xaa can be any naturally occurring amino acid
  misc_feature (143)..(143): Xaa can be any naturally occurring amino acid
  misc_feature (213)..(213): Xaa can be any naturally occurring amino acid
  Transcript Sequence Number=SeqID_13641
  Gene Ontology: Mol. function=sugar:hydrogen symporter activity; Cellular component=integral to membrane; Biological process =carbohydrate transport
  Homolog annotation: Hit_ID=Q8H6J2; Match level="QueryCoverage=100%, HitCoverage=75%, E-value=1e-169, Identity=63%"; Hit description =Putative sugar transporter protein
  Pfam annotation: Domain name=Sugar_tr; Domain location=2-429; Score= -81.3; E_value=9.2e-06; Accession=PF00083.16; Description=Sugar (and other) transporter
SGEISTIVEGVDFISDTAIGTAQAQSFSRISSSQIWPNXSFYWHLSDPLVDLLGSIHETMSEATGSRRNSFFPVFNSFSFPEHEHMNEHRDDNSDQQTRGVYYAGEANNGDGLRTSLLSQTANVEVNDTNTSFTSEGSSSYLXRHGTSAFAQEFVASFIDNDIEEEDEETHGMALPYQPAYRYMENTRRHPCRYRILRLSETADMKSKWRVLXQPGIRHALCYGMLSQAIQQSAGISVLLRYTPEILEQVGVVSLFSDIGLSPHSTSILISALNALLLLPCITAAMLLMDVCGRRALILATTPILMLSLSVMSLSTLVDMGSLERAILFHLALTICFCSYVVGLGPIPNILCSEMFPTKARATCVSFCSLSFWFGGLLSAYCFPVMLSTIGLGGACGIYALVCCIPLCLVYYRIPETRTLNLELIAEVFKLSRQLPYVQ

SEQ ID NO: 79616 - protein, 249 aa, Setaria italica
  Transcript Sequence Number=SeqID_13642
  Gene Ontology: Mol. function=substrate-specific transmembrane transporter activity; Cellular component=integral to membrane; Biological process=transmembrane transport
  Homolog annotation: Hit_ID=Q8LJX7; Match level="QueryCoverage=96%, HitCoverage=32%, E-value=1e-108, Identity=82%"; Hit description =Putative sugar transporter
  Pfam annotation: Domain name=Sugar_tr; Domain location=15-249; Score=- 145.6; E_value=0.003; Accession=PF00083.16; Description=Sugar (and other) transporter
NRDIVLGEMKSTVFSAVVVSIGYALLGWDFAALLEANGHMEKEFELENLPSIEGITIAVSAFGAIVITIFSGSLLDWLGRRAVLVQSSLLLLSGGLLMLWSPNIYILLLARLIVGSGSGLVFTCVPIYISEISPSTMRGLLVTMPQFMFFIGTIFSYCLIFWLTLMPSPKWRIMIGAIFAPSIVYLALLVYYLPESPRWLVSDGKISEARVSLQWLRGKKHDISGEISTIVEGVDFISDTACCQLPTAS

SEQ ID NO: 79617 - protein, 55 aa, Setaria italica
  Transcript Sequence Number=SeqID_13643
  Homolog annotation: Hit_ID=A0ZS64; Match level="QueryCoverage=76%, HitCoverage=3%, E-value=4e-13, Identity=88%"; Hit description=Na+/H+ antiporter
LVHFTTPIETSHIPVGLVSIGVVKWTSQRLSRRHSLDPILSHGSTLGLYEVLIGK

SEQ ID NO: 79618 - protein, 270 aa, Setaria italica
  misc_feature (142)..(142): Xaa can be any naturally occurring amino acid
  Transcript Sequence Number=SeqID_13644
  Gene Ontology: Mol. function=solute:hydrogen antiporter activity; Cellular component=integral to membrane; Biological process =regulation of pH
  Homolog annotation: Hit_ID=A0ZS64; Match level="QueryCoverage=99%, HitCoverage=22%, E-value=1e-126, Identity=82%"; Hit description =Na+/H+ antiporter
  Pfam annotation: Domain name=cNMP_binding; Domain location=5-95; Score=36.9; E_value=8.1e-08; Accession=PF00027.21; Description =Cyclic nucleotide-binding domain
LITKETVRGHGTVLYREGSRPTGIWLVSIGVVKWTSQRLSRRHSLDPILSHGSTLGLYEVLIGKPHICDMITDSVVHCFFIEAEKIEELRQSDHSIELFLWQESALVIARLLLPQIFEKMAMHEIRVLVAERSTMNIYIKGXDIELEQNYVGILLEGFLKTRSQLITPPGVLLPSNADLSLFGLESSAVNHIDYCHNAPSYQVEARARIIFFDMVRTSEAEADLQRSVSLLSHGHEPPRSVSLLSHGHEPPPRTMSKEHSGLLCWPESFR

SEQ ID NO: 79619 - protein, 327 aa, Setaria italica
  Transcript Sequence Number=SeqID_13645
  Gene Ontology: Mol. function=ATPase activity, coupled to transmembrane movement of substances; Cellular component=integral to membrane; Biological process=transport
  Homolog annotation: Hit_ID=Q8GU74; Match level="QueryCoverage=100%, HitCoverage=76%, E-value=0.0, Identity=66%"; Hit description=MDR -like ABC transporter
  Pfam annotation: Domain name=ABC_tran; Domain location=236-327; Score= -44.1; E_value=0.0091; Accession=PF00005.19; Description=ABC transporter
QSALSEKVGNYIHNMATFFGGLVIGLVNCWQIALLTLATGPFIVAAGGISNIFLHRLAENIQDAYGEAASIAEQAILYIRTLYSFTNETLAKYSYATSLQATLRYGILISLVQGLGLGFTYGLAICSCALQLWVGRFLISHGRANGGEVVVALFAIILSGLGLNQAATNFYSFEQGRIAAYRLYEMISRSTSIVNQDGRTLPSVQGNIAELNVYFSYLSRPEIPILSGFYLTVPARKTVALVGRNGSGKSSIIPLMERFYDPTLGEVLLDGENIKNLKLEWLRSQIGLVTQEPALLSLSIRENIAYGRSATTDQIEEAAKTAHVHAF

SEQ ID NO: 79620 - protein, 151 aa, Setaria italica
  Transcript Sequence Number=SeqID_13646
  Gene Ontology: Mol. function=ATPase activity, coupled to transmembrane movement of substances; Cellular component=integral to membrane; Biological process=transport
  Homolog annotation: Hit_ID=Q8GU74; Match level="QueryCoverage=94%, HitCoverage=63%, E-value=7e-73, Identity=74%"; Hit description=MDR -like ABC transporter
  Pfam annotation: Domain name=ABC_tran; Domain location=3-151; Score =46.5; E_value=1e-10; Accession=PF00005.19; Description=ABC transporter
MHMSCFGCLFNLKLEWLRSQIGLVTQEPALLSLSIRENIAYGRSATTDQIEEAAKTAHVHAFISSLEKGYDTQVGRAGLSLTEEQKIKLSIARAVLSNPSILLLDEVTGALDFEAEKAVQEALDILMLGRSTIIIARRLSLIRNADYIAVM

SEQ ID NO: 79621 - protein, 149 aa, Setaria italica
  Transcript Sequence Number=SeqID_13647
AAAGRPPTRDPLGPGIGFLPCAAPVDPSLDRCWSPARMKRKRGRKPAGKKAAPASAAAESPSPDTPSSPSTEATNSTPDQAEEDSAPPATQAPVPAPEPPQSAAVVAPPPHSEPPQKPAAAAAPVNPPVDIPYAKPKVGAVYGRVKLKF

SEQ ID NO: 79622 - protein, 96 aa, Setaria italica
  Transcript Sequence Number=SeqID_13648
LAATCYNALAPKTCLNGSKPSIMYLLKVNYIHFSGKCHIIAAAGIFKNDLCCTWAPKVKYSNSQAHVLFCGPPCSNYRILPQKQVIVSMISSIYEL

SEQ ID NO: 79623 - protein, 131 aa, Setaria italica
  misc_feature (77)..(77): Xaa can be any naturally occurring amino acid
  Transcript Sequence Number=SeqID_13649
MGNAMNKDKVHDKETHGTSSDINENTSVDKVKGPNLLERAKEEIEALAGAVHTKMEHHSSPLEKDESHKEDKEGSLXKIKTHTNETHGTSADISENTPVDKVKGPNVFERAKEEIEAIAEAIHPKKGSGSN

SEQ ID NO: 79624 - protein, 180 aa, Setaria italica
  Transcript Sequence Number=SeqID_13650
MDSGSDSDSAPEELTAVQGVEKHEKISKVEKDSAIRVTREGKERRKRWAQRRTSSKPDNPAPEEIEDQGTNQREENEETHTMPGMLPSSVIEMLAAREKQTFSSDSEEENVKQKVQKKKKRTETSGPETILLKDVRSTQHVKNALDFLEQRKNQVPRSNAVLKNANKALRLLSSKGNFLS

SEQ ID NO: 79625 - protein, 184 aa, Setaria italica
  Transcript Sequence Number=SeqID_13651
  Gene Ontology: Mol. function=small conjugating protein ligase activity; Biological process=regulation of protein metabolic process
  Homolog annotation: Hit_ID=Q9AWU5; Match level="QueryCoverage=95%, HitCoverage=16%, E-value=6e-60, Identity=70%"; Hit description =P0044F08.17 protein
LVSLKSTRCFCYREDIVSLKSKEDARGLVLEVAGEYDSEGSITDDDESEPEVRERKASCGAENGGADGDDASNGAEVGSQSSLPDNKVRVLWIDGSEKTEDIDDVVVVDRSFLHGDLVASASDPTGQMGLVVDVDLVVDLQGPNGDMIKGVSSKDLRRIREFHVGDYVVSGQWLGRVDEVLDNV

SEQ ID NO: 79626 - protein, 39 aa, Setaria italica
  Transcript Sequence Number=SeqID_13652
IELYKVILYKINNELRISNNVERYENIIIHSEFYYCDLY

SEQ ID NO: 79627 - protein, 96 aa, Setaria italica
  Transcript Sequence Number=SeqID_13653
  Gene Ontology: Mol. function=acyltransferase activity; Biological process=metabolic process
  Homolog annotation: Hit_ID=B6TWM4; Match level="QueryCoverage=84%, HitCoverage=20%, E-value=2e-27, Identity=70%"; Hit description=JD1
TERIQRAHQQKNAPMMLLFPEGTTTNGDYLLPFKTGAFLAKAPVQPVILRYPYKRFNPAWESMSGVSITGNYLFLIEICKLNANNKEAGEQYHEIC

SEQ ID NO: 79628 - protein, 118 aa, Setaria italica
  misc_feature (18)..(18): Xaa can be any naturally occurring amino acid
  misc_feature (35)..(35): Xaa can be any naturally occurring amino acid
  Transcript Sequence Number=SeqID_13654
  Gene Ontology: Mol. function=acyltransferase activity; Cellular component=endoplasmic reticulum membrane; Biological process =metabolic process
  Homolog annotation: Hit_ID=B6TWM4; Match level="QueryCoverage=94%, HitCoverage=28%, E-value=4e-40, Identity=73%"; Hit description=JD1
KWDYLLPFKTGAFLAKRXTKLQPVILRYTLTKRIXIPAWESMSGARHVFLLLCQFVNYVEVTHLPVYYPSEQEKDDPKLYANNVRKLMAVEGNLILSDLGLAEKRVYHAALNGLLCQS

SEQ ID NO: 79629 - protein, 395 aa, Setaria italica
  misc_feature (131)..(131): Xaa can be any naturally occurring amino acid
  Transcript Sequence Number=SeqID_13655
  Gene Ontology: Mol. function=acyltransferase activity; Cellular component=endoplasmic reticulum membrane; Biological process =metabolic process
  Homolog annotation: Hit_ID=B6TWM4; Match level="QueryCoverage=66%, HitCoverage=70%, E-value=1e-118, Identity=77%"; Hit description=JD1
  Pfam annotation: Domain name=Acyltransferase; Domain location=170 -299; Score=75.4; E_value=2e-19; Accession=PF01553.13; Description =Acyltransferase
  Subcellular localization annotation: CTP_CleavageSite=41; ConfidenceScore=5.04e-01
MAPNDAATTAPSEPESVGGRMSSEDTVATRPLLSSPSTSPSAASTAPVQESIEELDRRYAPYARRDAYGPMGLGPVGAAEAFRLAFAAVVLIPLRVVAGMLVLVVYYLVCRVCTLRVEEEREGGEGDGYAXRLEGWRREGVVWCGRALARAMLFVFGFYWIREYDCRFPDAEVEHVDQSKEMERPGAIVSNHVSYVDILYHMSAFFPSFVAKRSVARLPLVGLISKCLGCIFVQRESKTSDFKGVSGAVTERIQRAHQQKNAPMMLLFPEGTTTNGDYLLPFKTGAFLAKAPVQPVILRYPYKRFNPAWESMSGARHVFLLLCQFVNYVEVTHLPVYYPSEQEKDDPKLYANNVRKLMAVEGNLILSDLGLAEKRVYHAALNGNSLPRALHQKDD

SEQ ID NO: 79630 - protein, 356 aa, Setaria italica
  misc_feature (117)..(117): Xaa can be any naturally occurring amino acid
  Transcript Sequence Number=SeqID_13656
  Gene Ontology: Mol. function=nucleoside-triphosphatase activity; Cellular component=nucleus; Biological process=DNA replication initiation
  Homolog annotation: Hit_ID=B6SWS8; Match level="QueryCoverage=99%, HitCoverage=41%, E-value=0.0, Identity=96%"; Hit description=DNA replication licensing factor mcm4
  Pfam annotation: Domain name=MCM; Domain location=272-356; Score= -157.8; E_value=5.5e-07; Accession=PF00493.15; Description=MCM235 family
YPVMDEGKYMRAIHRILELEGGESLDVDAHDVFDHDPDLYSKMVRYPLEVLAIFDIVLMDLVARIEPLFEKHIQTRIYNLKSSICLRNLNPSDIEKMVSIKGMIIRCSSVIPELREXAVFRCLVCGFYSEPIMVDRGRVTEPHICQKEQCKATNSMTLVHNRCRFADKQIIKLQETPDEIAEGGTPHTVSVLMHDKLVDAGKPGDRVEITGIYRAMSIRVGPAQRTVKSIFKTYIDCLHVKKTDKSRLHVDTMDIDNSNANNSTEEDFLSDKVEKLKELSKLPDIYDRLTRSLAPNIWELDDVKRGLLCQLFGGNPLKLPSGASFRGDINILLVGDPGTSKSQLLQYMHKLSPRGI

SEQ ID NO: 79631 - protein, 68 aa, Setaria italica
  Transcript Sequence Number=SeqID_13657
MQKLYPKPTRSKLSHCPVPGALLTALHACTVKLTFPGENGLPMISWHWEGRENLEQGATGDGPSGLQQ

SEQ ID NO: 79632 - protein, 122 aa, Setaria italica
  Transcript Sequence Number=SeqID_13658
  Gene Ontology: Mol. function=single-stranded DNA binding
  Subcellular localization annotation: CTP_CleavageSite=51; ConfidenceScore=5.14e-01
MLRRLAGGAATVHSSAAAAFRRLLHIGGRGGCGAGQPESVSYRMSMLRRPSSVGKKGLTWNSCSLIGRLDAPVRPYRNSSDEYPRVYTFLSVSPSSPASSSSSSTFKLSPSLLEHFQLRLLQ

SEQ ID NO: 79633 - protein, 328 aa, Setaria italica
  Transcript Sequence Number=SeqID_13659
  Gene Ontology: Mol. function=hydrolase activity
  Homolog annotation: Hit_ID=Q8LLN8; Match level="QueryCoverage=96%, HitCoverage=72%, E-value=1e-126, Identity=72%"; Hit description =OAJNBa0031O09.10
  Pfam annotation: Domain name=Abhydrolase_1; Domain location=104-321; Score=34.7; E_value=3.7e-07; Accession=PF00561.12; Description =alphabeta hydrolase fold
  Subcellular localization annotation: CTP_CleavageSite=24; ConfidenceScore=5.26e-01
ASGPSGKKGKASVVLRVPSGSPMVAARRQASARREIAIRRAREGGREYDLIPTPRGETLFTQCWWPYPPSSTIKPRALVVVMHGLNEHSGRYDHLARRLNEIGIKVYGMDWTGHGGSDGLHGYVQSLDHAVNDLKMYLKKVSAENPGLPCFCFGHSTGGGIILKAALDPEVETLISGVVLTSPAVRVQPAHPIIRVMAPVFALLAPRYQFTASHRNGPPVSRDPEALRAKYTDQLVFTGAIRVRTGYEILRLTSYLQQHLHRITVPILVLHGADDMVTDPDGSRALYEQSSSADKSLNLYPGLLHDLLIEPEKDKIMDDIVAWLSLRV

SEQ ID NO: 79634 - protein, 59 aa, Setaria italica
  Transcript Sequence Number=SeqID_13660
ETRYLSSKKELKEELKNKILKHDFQRRQNSRHKIVSIPRSRSLMNLAIRIRCNVLNMKT

SEQ ID NO: 79635 - protein, 39 aa, Setaria italica
  Transcript Sequence Number=SeqID_13661
  Subcellular localization annotation: CTP_CleavageSite=18; ConfidenceScore=5.07e-01
HCGLAQQPPRACLLRPPRGTSRAARSLPPRRGRGCRRRR

SEQ ID NO: 79636 - protein, 139 aa, Setaria italica
  Transcript Sequence Number=SeqID_13662
  Gene Ontology: Mol. function=2 iron, 2 sulfur cluster binding; Cellular component=chloroplast; Biological process=electron transport chain
  Homolog annotation: Hit_ID=Q0J8M2; Match level="QueryCoverage=79%, HitCoverage=79%, E-value=5e-32, Identity=64%"; Hit description =Ferredoxin-1, chloroplastic
  Pfam annotation: Domain name=Fer2; Domain location=50-124; Score =114.6; E_value=3.2e-31; Accession=PF00111.19; Description=2Fe-2S iron-sulfur cluster binding domain
  Subcellular localization annotation: CTP_CleavageSite=40; ConfidenceScore=5.30e-01
MATVLSSLRAPACFALRAAPAPAPSTVPLPAKAPRGARLRAQATYNVKLITPDGEVELQVPDDVYILDHAEEEGIELPYSCRAGSCSSCAGKLVSGSIDQSDQSFLDDDQVAAGWVLTCAAYPTSDVVIETHKEEELIV

SEQ ID NO: 79637 - protein, 128 aa, Setaria italica
  Transcript Sequence Number=SeqID_13663
  Gene Ontology: Mol. function=2 iron, 2 sulfur cluster binding; Cellular component=chloroplast; Biological process=electron transport chain
  Homolog annotation: Hit_ID=Q0J8M2; Match level="QueryCoverage=93%, HitCoverage=88%, E-value=2e-35, Identity=64%"; Hit description =Ferredoxin-1, chloroplastic
  Pfam annotation: Domain name=Fer2; Domain location=40-114; Score =113.4; E_value=7.6e-31; Accession=PF00111.19; Description=2Fe-2S iron-sulfur cluster binding domain
PRPGSSTRRSGTTPATVALPAKVARGARLRAQATYNVKLITPDGEVELQVPDDVYILDQAEEDGIDLPYSCRAGSCSSCAGKVVSGSVDQSDQSFLDDGQVAAGWVLTCHAYPTSDVVIETHKEEELI

SEQ ID NO: 79638 - protein, 110 aa, Setaria italica
  misc_feature (88)..(88): Xaa can be any naturally occurring amino acid
  Transcript Sequence Number=SeqID_13664
MVRASLLAAASGAAAATQQHAHLSGVAIVALAVAATVAVAAIAAFGCAQGAKKPPRHNNNNVYYYGQGYPPPPAGAYGYPAQQPGPRXGYAYPQQQSAGRPGRSGLGSDY

SEQ ID NO: 79639 - protein, 84 aa, Setaria italica
  Transcript Sequence Number=SeqID_13665
  Gene Ontology: Mol. function=phosphoenolpyruvate carboxykinase (ATP) activity; Biological process=gluconeogenesis
  Homolog annotation: Hit_ID=Q5VSV8; Match level="QueryCoverage=100%, HitCoverage=17%, E-value=9e-33, Identity=82%"; Hit description =OSJNBa0009P12.18 protein
KLLKLVTFHLSSISCLYVQDGAIGSSAECDAKVRIISDNPSAVMLLSNILWKIPDRAISHDTNPLTIYATSSISNNIKSLLGSG

SEQ ID NO: 79640 - protein, 52 aa, Setaria italica
  Transcript Sequence Number=SeqID_13666
EIAGVNDAFDANCVACFLIPSIRNYYFFLSTTTMPSAGDRYTSCPPRLHITS

SEQ ID NO: 79641 - protein, 236 aa, Setaria italica
  Transcript Sequence Number=SeqID_13667
  Gene Ontology: Cellular component=integral to membrane; Biological process=peroxisome organization and biogenesis
  Homolog annotation: Hit_ID=Q5VRJ8; Match level="QueryCoverage=98%, HitCoverage=100%, E-value=1e-112, Identity=85%"; Hit description =Peroxisomal membrane protein 11-5
  Pfam annotation: Domain name=PEX11; Domain location=14-229; Score =253.5; E_value=5.1e-73; Accession=PF05648.6; Description=Peroxisomal biogenesis factor 11 (PEX11)
IYTMTSLETVRGDLALVILYLNKAEARDKICRAIQYGSKFLSNGQPGPAQNVDKSTSLARKVFRLFKFVNDLHALISPPAKGTPLPLILLGKSKNAMLSTFLFLDQIVWAGRTGIYKNKERAEFLSRIAFYCFLGSNTCTTIIELAELQRLSKSMKKLEKELKHQELYKNEQYRMKLQKSNERLLALIKSSLDIVVAVGLLQLAPKKVTPRVTGAFGFASSLIACYQLLPSPAKSK

SEQ ID NO: 79642 - protein, 271 aa, Setaria italica
  misc_feature (13)..(13): Xaa can be any naturally occurring amino acid
  Transcript Sequence Number=SeqID_13668
  Gene Ontology: Mol. function=acyl-CoA binding; Biological process =proteolysis
  Homolog annotation: Hit_ID=B6SHQ7; Match level="QueryCoverage=99%, HitCoverage=81%, E-value=1e-123, Identity=81%"; Hit description=Acyl- CoA-binding domain-containing protein 6
  Pfam annotation: Domain name=ACBP; Domain location=26-113; Score =85.4; E_value=2e-22; Accession=PF00887.11; Description=Acyl CoA binding protein
  Pfam annotation: Domain name=Ank; Domain location=186-218; Score =44.0; E_value=5.8e-10; Accession=PF00023.22; Description=Ankyrin repeat
  Pfam annotation: Domain name=Ank; Domain location=219-251; Score =37.1; E_value=7e-08; Accession=PF00023.22; Description=Ankyrin repeat
  Pfam module annotation: Pfam domain module=ACBP::Ank::Ank; Domain location=26-113::186-218::219-251
PAPPQPPAGTTSXSDSDWEGVESTELDEEFSAASAFVAASAASGTSVPEEAQLRLYGLYKIATEGPCTAPQPSALKLKARAKWNAWHKLGAMPTEEAMQEYITIVHELFPNWDAGSSMKRKDEDSMASASGSKGPMGPVFSSLMYEEDEGNESELGDIHVLAREGATDDILKHLAAGEDVNVRDTEGRTPLHWAVDRGHLSAVEVLAKANADLNAKDNEGQTALHYAVVCEREDIAELLVKHHADLQIKDEDGNTARELCPSSWSFMNQAN

SEQ ID NO: 79643 - protein, 91 aa, Setaria italica
  Transcript Sequence Number=SeqID_13669
  Subcellular localization annotation: CTP_CleavageSite=71; ConfidenceScore=5.78e-01
GFKRLTGVGDTSGCSCSTRGSTNLPPSSRPSLSPFAPPIFLPVRILRFLSRIALRFGPTDSGPRPIRFPYSANSRGRLHVLSGILRPARRI

SEQ ID NO: 79644 - protein, 106 aa, Setaria italica
  Transcript Sequence Number=SeqID_13670
MASKWLQFITQRQIEIVLEASLISAFFNCWQNSLDTMATSRREPQPNARVNQGVRNMSPGLKSSESDQALRRARSVPTSPDRRLSPSPASSSSNTCRPSSSFSTRT

SEQ ID NO: 79645 - protein, 365 aa, Setaria italica
  Transcript Sequence Number=SeqID_13671
  Gene Ontology: Mol. function=transferase activity, transferring glycosyl groups; Biological process=metabolic process
  Homolog annotation: Hit_ID=B6TEH8; Match level="QueryCoverage=99%, HitCoverage=80%, E-value=1e-160, Identity=77%"; Hit description =Anthocyanidin 5,3-O-glucosyltransferase
  Pfam annotation: Domain name=UDPGT; Domain location=1-357; Score= -156.1; E_value=0.0049; Accession=PF00201.10; Description=UDP -glucoronosyl and UDP-glucosyl transferase
DALLLDMFCVDALDVAAELGVPAYFFFASAVGDLAVFLNLPYLYPTLPSFRDMGKTLVRCPGMPPIQALDMVITMQDKESDPTKVRLYQFRRIPEGSGVLVNSFDWLEPRALKALEDGVCVPGRPTPRVYCIGPLVNDGNKGENGEMHECLAWLDTQPERSVVFLCFGSKGAFSAAQLQEIAGGLESSGHRFLWAVRSPPEEHGQFPEPDLERLLLAGFLERTRGRGMVVKNWVPQAEVVRHEAVGAFVTHCGWNSALEAIMSGLPMICWPLYAEQGMNKVFMVEEMKIAVELQGYEELVKAEEVEAKVRLVMETEEGKILRERLAVAREKALEATKEGGSSEVAFAEFLRDLEKKSSYGNGKCR

SEQ ID NO: 79646 - protein, 150 aa, Setaria italica
  Transcript Sequence Number=SeqID_13672
  Gene Ontology: Mol. function=diacylglycerol kinase activity; Cellular component=plasma membrane; Biological process=activation of protein kinase C activity
  Homolog annotation: Hit_ID=B9T0H8; Match level="QueryCoverage=100%, HitCoverage=30%, E-value=6e-70, Identity=79%"; Hit description =Diacylglycerol kinase, alpha, putative
  Pfam annotation: Domain name=DAGK_acc; Domain location=4-149; Score= -14.9; E_value=6.8e-06; Accession=PF00609.11; Description =Diacylglycerol kinase accessory domain
FDGVFYNYFSIGMDAQVAYGFHQLRDEKPFLANGPLSNKLIYAGYTCKQGWFFTQCISDPELRGLRNIICLSIKRMDSSEWESIPVPSSVRAIVALNLHNYASGRNPWGNLKPEYLEKKGFVEAHSDDGLLEIFGLKQGWHASLVMVELI

SEQ ID NO: 79647 - protein, 200 aa, Setaria italica
  Transcript Sequence Number=SeqID_13673
  Gene Ontology: Mol. function=catalytic activity; Cellular component =chloroplast
  Homolog annotation: Hit_ID=B6TWI3; Match level="QueryCoverage=91%, HitCoverage=64%, E-value=1e-102, Identity=97%"; Hit description=HD domain containing protein
  Pfam annotation: Domain name=HD; Domain location=47-151; Score=51.5; E_value=3.3e-12; Accession=PF01966.14; Description=HD domain
ADAAAVAPTSAPSSAASAIDFLTLCHRLKTTKRKGWINHSIKGPESIADHMYRMALMALIAGDLPAVDRERCIKIAIVHDIAEAIVGDITPSDGIPKAEKSRREQAALDEMCEVLGGGPIADEIKELWEEYENNSSIEANLVKDFDKVEMILQALEYEKEHGKVLDEFFLSTAGKFQTEIGKSWAAEVNARRKEGCGKQK

SEQ ID NO: 79648 - protein, 95 aa, Setaria italica
  Transcript Sequence Number=SeqID_13674
  Gene Ontology: Mol. function=protein binding
  Homolog annotation: Hit_ID=A9NKD9; Match level="QueryCoverage=53%, HitCoverage=73%, E-value=8e-13, Identity=68%"; Hit description =UPF0582 protein
METEAAAARQAKESLELAFQLSQILDTGLDRHTLSLLMALCDRGANPEALAALVRELSSAAPPAAAAAAPSPMSNGTASPAPATASLFPSGLRRP

SEQ ID NO: 79649 - protein, 61 aa, Setaria italica
  Transcript Sequence Number=SeqID_13675
  Homolog annotation: Hit_ID=Q94HZ6; Match level="QueryCoverage=96%, HitCoverage=11%, E-value=6e-10, Identity=56%"; Hit description =Putative electron transfer oxidoreductase
MGGLEDRQILYSLTNTKDHRFSKYSAIVFQKFKQHPAVRKLLEGGTAIQYGARTLNEGGSS

SEQ ID NO: 79650 - protein, 72 aa, Setaria italica
  Transcript Sequence Number=SeqID_13676
SSLPELCQLSCIVVRTICHICCRTVVLIQLWSSVFMLFLHIFVCFYLVNVFQELHCSICILVYWIMTYELSL

SEQ ID NO: 79651 - protein, 172 aa, Setaria italica
  misc_feature (152)..(152): Xaa can be any naturally occurring amino acid
  Transcript Sequence Number=SeqID_13677
  Gene Ontology: Mol. function=electron-transferring-flavoprotein dehydrogenase activity; Cellular component=mitochondrial inner membrane; Biological process=electron transport chain
  Homolog annotation: Hit_ID=Q337B8; Match level="QueryCoverage=99%, HitCoverage=29%, E-value=3e-80, Identity=80%"; Hit description =Electron transfer flavoprotein-ubiquinone oxidoreductase ,mitochondrial, putative, expressed
  Pfam annotation: Domain name=ETF_QO; Domain location=43-152; Score =235.6; E_value=1.2e-67; Accession=PF05187.5; Description=Electron transfer flavoprotein-ubiquinone ox
AEATFKALIEGSSMELYWENLKKSWIWEELHKARNYRPAFEYGFIPGMGLSALERYIFKGKTPYTLKHGKPDHEATDAANMHAPIQYPKPDGQITFDVPTSLYRSNTNHEHDQPPHLRLRDPTLPEKVNLPVYAGPESRYCPARVYEYVSNXPLFPILAVQCTKNCLHCKAM

SEQ ID NO: 79652 - protein, 484 aa, Setaria italica
  Transcript Sequence Number=SeqID_13678
  Gene Ontology: Mol. function=electron-transferring-flavoprotein dehydrogenase activity; Cellular component=mitochondrial inner membrane; Biological process=electron transport chain
  Homolog annotation: Hit_ID=Q94HZ6; Match level="QueryCoverage=100%, HitCoverage=90%, E-value=0.0, Identity=88%"; Hit description =Putative electron transfer oxidoreductase
  Pfam annotation: Domain name=ETF_QO; Domain location=331-440; Score =239.4; E_value=8.6e-69; Accession=PF05187.5; Description=Electron transfer flavoprotein-ubiquinone ox
FETKALDELIPKWRQEDAPIRVPVSSDKFWLLTKNRAWTLPSPFDNKGNYVISLSQLVRWMATKAEELGVEVYPGFAASEILYDENQIVTGVATNDVGIAKDGTKRETFQPGVELRGRITLLAEGCRGSLSEKIIRNHKLRERGQGQHQTYALGIKEIWEIEEGKHEPGSVIHTVGWPLDKKTYGGSFLYHLDDRQLAIGLVVALNYRNPFLSPYDEFQKFKQHPAVRKLLEGGTAIQYGARTLNEGGFQSIPYPVFPGGAIIGCSAGFLNVPKIKGTHTAMKSGMLAAEATFKALIEGSSMELYWENLKKSWIWEELHKARNYRPAFEYGFIPGMGLSALERYIFKGKTPYTLKHGKPDHEATDAANMHAPIQYPKPDGQITFDVPTSLYRSNTNHEHDQPPHLRLRDPTLPEKVNLPVYAGPESRYCPARVYEYVSDEKGDPKLHINAQNCLHCKACDIKDPKQNIEWTVPEGGGGPGYTVM

SEQ ID NO: 79653 - protein, 91 aa, Setaria italica
  Transcript Sequence Number=SeqID_13679
  Gene Ontology: Cellular component=extracellular region
  Homolog annotation: Hit_ID=B4FL59; Match level="QueryCoverage=93%, HitCoverage=17%, E-value=9e-14, Identity=56%"; Hit description =Expansin-like 3
ELCARAAGSCGYGSLAASLNGGFLAAASPELYRGGVGCGACFQVGSSSFPELSATADGPDSSACRWAKRIKLSGDRPLQVRCRDSELCSAA

SEQ ID NO: 79654 - protein, 58 aa, Setaria italica
  Transcript Sequence Number=SeqID_13680
STAGELQSNVALLTSAFKLVMRKRRIKCLVWSGEKFAYRGDVDGDDVGLAALVQEPDG

SEQ ID NO: 79655 - protein, 361 aa, Setaria italica
  Transcript Sequence Number=SeqID_13681
  Gene Ontology: Cellular component=extracellular region; Biological process=sexual reproduction
  Homolog annotation: Hit_ID=B4FL59; Match level="QueryCoverage=68%, HitCoverage=89%, E-value=1e-114, Identity=85%"; Hit description =Expansin-like 3
  Pfam annotation: Domain name=DPBB_1; Domain location=154-233; Score =68.0; E_value=3.4e-17; Accession=PF03330.10; Description=Rare lipoprotein A (RlpA)-like double
  Pfam annotation: Domain name=Pollen_allerg_1; Domain location=245 -329; Score=22.8; E_value=1.5e-05; Accession=PF01357.13; Description =Pollen allergen
  Pfam module annotation: Pfam domain module=DPBB_1::Pollen_allerg_1; Domain location=154-233::245-329
  Subcellular localization annotation: CTP_CleavageSite=45; ConfidenceScore=5.37e-01
RVQNILRPVGGAAPSITSLGPTLVTRRSTRRHQLASALRPEPETRAAALRRPRGGVEHKAGARAAGSNPIPCSALFSRVITIQAFFDLELVVMRSAASLSLVLLLVFVAVPSPARGCDRCVRRSKATYQASSLALNAGSCGYGSLAASLNGGFLAAASPELYRGGVGCGACFQVRCRDSELCSAAGTKVVVTDQARTSSNRTGLVLSAAAYAAMARAGEAARLRAHRVVDVEYKRIPCEYANRNLSIRVEEKSRPPSQLSIRFLYQGGQTDIVAVDVATVGSSNWRFMTREHGPAWSTAQAPAGPLQFRLVVTGGYDGKWVWAESEVLPRRWEAGRVYDTGVQVADVAQEGCYPCDTHEWQ

SEQ ID NO: 79656 - protein, 68 aa, Setaria italica
  Transcript Sequence Number=SeqID_13682
  Gene Ontology: Mol. function=ammonium transmembrane transporter activity; Cellular component=membrane; Biological process=transport
  Homolog annotation: Hit_ID=Q947M9; Match level="QueryCoverage=100%, HitCoverage=13%, E-value=2e-19, Identity=70%"; Hit description =Ammonium transporter 1-3
MSTCAADLAPLLGPAAANATDYLCSQFTDTASAVDATYLLFSAYLVFAMQLGFAMLCAGSVRAKNTMN

SEQ ID NO: 79657 - protein, 158 aa, Setaria italica
  Transcript Sequence Number=SeqID_13683
  Gene Ontology: Mol. function=ammonium transmembrane transporter activity; Cellular component=membrane; Biological process=ammonium transport
  Homolog annotation: Hit_ID=Q947M9; Match level="QueryCoverage=99%, HitCoverage=32%, E-value=2e-64, Identity=74%"; Hit description =Ammonium transporter 1-3
AVICGFVSAWVLIGLNALAARLRFDDPLEAAQLHGGCGAWGVIFTGLFARREYVEQIYGGGAPGRPYGLFMGGGGRLLAANVVMVLVIAAWVSVTMAPLFLALSKMGLLRVSAEDEMAGMDQTRHGGFAYAYHDDEDPSVRPKAVMSTQIANASSGEF

SEQ ID NO: 79658 - protein, 496 aa, Setaria italica
  Transcript Sequence Number=SeqID_13684
  Gene Ontology: Mol. function=ammonium transmembrane transporter activity; Cellular component=membrane; Biological process=transport
  Homolog annotation: Hit_ID=Q56UT5; Match level="QueryCoverage=99%, HitCoverage=92%, E-value=0.0, Identity=76%"; Hit description =Ammonium transporter
  Pfam annotation: Domain name=Ammonium_transp; Domain location=37-460; Score=636.6; E_value=2.3e-188; Accession=PF00909.13; Description =Ammonium Transporter Family
  Subcellular localization annotation: CTP_CleavageSite=63; ConfidenceScore=5.03e-01
MAATCAASLAPLLGPAAANATGYLCDRFADTTSAVDSTYLLFSAYLVFAMQLGFAMLCAGSVRAKNTMNIMLTNVLDAAAGALFYYLFGFAFAYGTPSNGFIGRHFFGLKRLPQAGFDYDFFLFQWAFAIAAAGITSGSIAERTQFVAYLIYSAFLTGFVYPVVSHWVWSADGWASASRTSGKLLFGSGIIDFAGSSVVHMVGGIAGLWGALIEGPRIGRFDHAGRSVALNGHSASLVVLGTFLLWFGWFGFNPGSFLTILKSYGPAGSVHGQWSAVGRTAVTTTLAGSTAALTTLFGKRLQTGHWNVLDVCNGLLGGFAAITAGCSVVDPWAAVICGFVSAWVLIGLNALAARLRFDDPLEAAQLHGGCGAWGILFTALFARKRYVEEIYGAGRPYGLFMGGGGRLLAAHVIQILVIAGWVSCTMGPLFYALKKLDLLRISADDEMAGMDMTRHGGFAYVYHDEDPGDKAGVGGFMLRSAQNRVEPAAAATGNQV

SEQ ID NO: 79659 - protein, 86 aa, Setaria italica
  Transcript Sequence Number=SeqID_13685
  Homolog annotation: Hit_ID=Q93ZR8; Match level="QueryCoverage=100%, HitCoverage=16%, E-value=1e-35, Identity=74%"; Hit description =Putative auxin-independent growth promoter protein
  Pfam annotation: Domain name=BESS; Domain location=35-74; Score=7.6; E_value=0.1; Accession=PF02944.12; Description=BESS motif
ICDMVTIARYLNVTLIVPELDKASFWADPSDFQDIFDVDYFIASLRDEVRVLRQLPPRLKRRVEMGFLRSMPPVSWSDISYYHNQV

SEQ ID NO: 79660 - protein, 138 aa, Setaria italica
  misc_feature (124)..(124): Xaa can be any naturally occurring amino acid
  Transcript Sequence Number=SeqID_13686
  Homolog annotation: Hit_ID=Q93ZR8; Match level="QueryCoverage=100%, HitCoverage=26%, E-value=3e-61, Identity=76%"; Hit description =Putative auxin-independent growth promoter protein
  Pfam annotation: Domain name=BESS; Domain location=42-81; Score=7.6; E_value=0.1; Accession=PF02944.12; Description=BESS motif
  Pfam annotation: Domain name=DUF246; Domain location=1-138; Score= -30.7; E_value=8.5e-13; Accession=PF03138.6; Description=Plant protein family
  Pfam module annotation: Pfam domain module=BESS::DUF246; Domain location=42-81::1-138
LNQMRAAICDMVTIARYLNVTLIVPELDKASFWADPSDFQDIFDVDYFIASLRDEVRVLRQLPPRLKRRVEMGFLRSMPPVSWSDISYYHNQILPLIRKYKVLHLNRTDARLANNGLPMEIQKXRCRVNYNALRFTPE

SEQ ID NO: 79661 - protein, 77 aa, Setaria italica
  Transcript Sequence Number=SeqID_13687
  Gene Ontology: Mol. function=nucleic acid binding; Cellular component= ribonucleoprotein complex
  Homolog annotation: Hit_ID=C5KPR2; Match level="QueryCoverage=70%, HitCoverage=15%, E-value=2e-09, Identity=51%"; Hit description=Pre -mRNA-splicing factor SF2, putative
  Pfam annotation: Domain name=RRM_1; Domain location=25-77; Score =42.5; E_value=1.7e-09; Accession=PF00076.14; Description=RNA recognition motif. (a.k.a. RRM, RBD, o
MAAAQGGGSGPATGEEGAAGESRKLFVGGIPSGAQEGELREHFARYGEVRSVIVMRDRETGHGRGFGFVEFEDEADA

SEQ ID NO: 79662 - protein, 171 aa, Setaria italica
  Transcript Sequence Number=SeqID_13688
  Gene Ontology: Mol. function=protein disulfide oxidoreductase activity; Cellular component=chloroplast; Biological process =electron transport chain
  Homolog annotation: Hit_ID=B6TQU0; Match level="QueryCoverage=100%, HitCoverage=100%, E-value=2e-74, Identity=84%"; Hit description=Grx _S14-glutaredoxin subgroup II
  Pfam annotation: Domain name=Glutaredoxin; Domain location=82-146; Score=114.6; E_value=3.4e-31; Accession=PF00462.16; Description =Glutaredoxin
  Subcellular localization annotation: CTP_CleavageSite=53; ConfidenceScore=5.67e-01
MAASATASRPLAGAYVPLPLPARGLPSRVALLPRAPPAVQGLTLDRPAQLSVRARGRSVRCLAGLSPEMRATLDKVVGSSKVVLFMKGTKDFPQCGFSHTVVQILRSLDVPFETLDVLANEALRQGLKEYSSWPTFPQLYIDGEFFGGCDITVEAYKSGELQETLEKAMCS

SEQ ID NO: 79663 - protein, 40 aa, Setaria italica
  Transcript Sequence Number=SeqID_13689
LCPIKHVTITFSYYMLVQMIYYKDFKVVSKMVFSSLIVKH

SEQ ID NO: 79664 - protein, 106 aa, Setaria italica
  Transcript Sequence Number=SeqID_13690
  Gene Ontology: Mol. function=electron carrier activity; Biological process=oxidation reduction
  Homolog annotation: Hit_ID=B9H1E5; Match level="QueryCoverage=96%, HitCoverage=21%, E-value=2e-29, Identity=56%"; Hit description =Cytochrome P450
TALEWAMMHLVLDPAAQERLYDEVVGKVGKTARITEADVEAMPYLQAVVKETFRRHPPSHFVLSHAATRDTELGGYRVPADASVEFYTAWVNGRNPANVGPEPGRT

SEQ ID NO: 79665 - protein, 164 aa, Setaria italica
  Transcript Sequence Number=SeqID_13691
  Gene Ontology: Mol. function=electron carrier activity; Biological process=oxidation reduction
  Homolog annotation: Hit_ID=Q1WCN8; Match level="QueryCoverage=56%, HitCoverage=23%, E-value=3e-25, Identity=64%"; Hit description =Cytochrome P450 monooxygenase CYP77B5 (Fragment)
AIVGWYGRGRGVEMMSGPGEAYVDSLFDLEPPGRGKRLGEDELVTLCSEVMSAGTDTSATALEWAMMHLVLDPAAQERLYDEVVGKVGKTARITEADVEAMPYLQVNATTLCFATLQLSISSTFPNFSPSSSLAQFRNWNASIQLKRGVCTNFTIEVFDKRGAS

SEQ ID NO: 79666 - protein, 71 aa, Setaria italica
  Transcript Sequence Number=SeqID_13692
RIIELHMKFLVPTLAWYQDTSLGLHLEDRHAEESSMVAGYIILLVHPSAAKISEVHGSILNLMSPMISFYT

SEQ ID NO: 79667 - protein, 60 aa, Setaria italica
  Transcript Sequence Number=SeqID_13693
  Homolog annotation: Hit_ID=Q1EMP7; Match level="QueryCoverage=96%, HitCoverage=39%, E-value=1e-13, Identity=56%"; Hit description =Tubulin-folding cofactor (Fragment)
MASSKLQLPADDSVLLLVTHSNLSTFAADIRVSQQTTVEALKDKLWRKTGTAVASMRLQL

SEQ ID NO: 79668 - protein, 113 aa, Setaria italica
  Transcript Sequence Number=SeqID_13694
GPPWPWSPPHPSPTRKNKDGRDREREKEKEHKHPFKVVEITPPPRCLGVRCFPTNIHCGESVTIEGQAYTVSAVTHRYQLRKGRYEPSEKRLDVLSTGRYILNLYLQNLLDQS

SEQ ID NO: 79669 - protein, 80 aa, Setaria italica
  Transcript Sequence Number=SeqID_13695
RRLTTVVCRKNKDGRDREREKEKEHKHPFKVVEITPPPRCLGVRCFPTVRLSLAVCLFIAVIFVFRCISAAAKLPCATRN

SEQ ID NO: 79670 - protein, 118 aa, Setaria italica
  Transcript Sequence Number=SeqID_13696
MAMVASTSFAYKPRFAVVCRKNKDGRDREREKEKEHKHPFKVVEITPPPRCLGVRCFPTNIHCGESVTIEGQAYTVSAVTHRYQLRKGRYEPSEKRLDVLSTGRYILNLYLQNLLDQS

SEQ ID NO: 79671 - protein, 82 aa, Setaria italica
  Transcript Sequence Number=SeqID_13697
SASPPWLGTNRRRGKGLDPDSACRQPRTATEIRQWIVLGGATDCPCSRYGGDEHQARGGCIHAGHQLCCRRVLRSYFPTTST

SEQ ID NO: 79672 - protein, 92 aa, Setaria italica
  Transcript Sequence Number=SeqID_13698
  Subcellular localization annotation: CTP_CleavageSite=19; ConfidenceScore=5.24e-01
GGVEECLVGKLLTPRFILPCSCGWMPVNNRFLSFFSFFSLSPCFVESLRLKLIFCNFAFERGSSALLCKYTASISSEEEEKKEIEVSISSKF

SEQ ID NO: 79673 - protein, 91 aa, Setaria italica
  Transcript Sequence Number=SeqID_13699
  Gene Ontology: Mol. function=protein binding; Cellular component =chloroplast
  Homolog annotation: Hit_ID=B6T5E8; Match level="QueryCoverage=98%, HitCoverage=20%, E-value=2e-31, Identity=75%"; Hit description =Protein binding protein
VCKLAGPAGRLANLTLSGNYFTSVAPACAALIKDGVLDVKNNCIPGLANQRRPAECAAFHSQPKTCPAATPRVACPAASAKGAVAAPGEEG

SEQ ID NO: 79674 - protein, 418 aa, Setaria italica
  misc_feature (403)..(403): Xaa can be any naturally occurring amino acid
  Transcript Sequence Number=SeqID_13700
  Gene Ontology: Mol. function=protein binding; Cellular component =extracellular region
  Homolog annotation: Hit_ID=B6TL93; Match level="QueryCoverage=100%, HitCoverage=100%, E-value=0.0, Identity=77%"; Hit description =Protein binding protein
  Pfam annotation: Domain name=LRR_1; Domain location=120-141; Score =0.6; E_value=2.3e+02; Accession=PF00560.25; Description=Leucine Rich Repeat
  Pfam annotation: Domain name=LRR_1; Domain location=201-223; Score =7.1; E_value=13; Accession=PF00560.25; Description=Leucine Rich Repeat
  Pfam annotation: Domain name=LRR_1; Domain location=224-246; Score =12.9; E_value=1; Accession=PF00560.25; Description=Leucine Rich Repeat
  Pfam annotation: Domain name=LRR_1; Domain location=249-271; Score =5.4; E_value=28; Accession=PF00560.25; Description=Leucine Rich Repeat
  Pfam annotation: Domain name=LRR_1; Domain location=273-295; Score =6.4; E_value=18; Accession=PF00560.25; Description=Leucine Rich Repeat
  Pfam annotation: Domain name=LRR_1; Domain location=297-319; Score =9.4; E_value=4.7; Accession=PF00560.25; Description=Leucine Rich Repeat
  Pfam annotation: Domain name=LRR_1; Domain location=325-346; Score =10.0; E_value=3.6; Accession=PF00560.25; Description=Leucine Rich Repeat
  Pfam module annotation: Pfam domain module=LRR_1::LRR_1::LRR_1::LRR _1::LRR_1::LRR_1::LRR_1; Domain location=120-141::201-223::224 -246::249-271::273-295::297-319::325-346
MDDFSISLSIFLFIYCIAGTVAYPELLPHKANPQPHDFPNEKLYRSYLVIQRFKSTVTSDPKNVTATWTGNDICGETTYVGFHCGALPGRDNQLTVTKIILNGYSLHAPKLQGFVDQIPDLALFHAASNNFGGDIPRLVGLGYLYKLNARSDLPLHPQDRYGGQVGVNPQFQSQCLTATINFTFHFGIPGGKGRQIPGVTDAKALLLNHNNLSGPLPLDLGFSKLSYLAVANNKLTGPIPSSIGHLQDSLFEVLLLNNQLSGCLPHELGMLNKAAVIDASMNQLTGPIPASFSCLSSVEQLNLGGNRLYGQVPDVLCKLAGPAGRLANLTLSGNYFTSVAPACAALIKDGVLDVKNNCIPGLANQRRPAECAAFQSQPKTCPAATTQVACPAAPAAPPGGEEXIRDYSSYVTYATLHD

SEQ ID NO: 79675 - protein, 296 aa, Setaria italica
  misc_feature (289)..(289): Xaa can be any naturally occurring amino acid
  Transcript Sequence Number=SeqID_13701
  Gene Ontology: Mol. function=phosphoserine phosphatase activity; Cellular component=chloroplast; Biological process=L-serine biosynthetic process
  Homolog annotation: Hit_ID=B6SU38; Match level="QueryCoverage=100%, HitCoverage=100%, E-value=1e-130, Identity=81%"; Hit description =Phosphoserine phosphatase
  Pfam annotation: Domain name=Hydrolase; Domain location=84-270; Score= 67.8; E_value=3.9e-17; Accession=PF00702.18; Description=haloacid dehalogenase-like hydrolase
  Subcellular localization annotation: CTP_CleavageSite=54; ConfidenceScore=5.68e-01
MAGLIGARAGPGSLLPVRRSSATARPPPASQVAVRFASPLFRSAKVCKSCGLVAAALEVSKDGGTAVLANRQPSKGVIETLQNADAVCFDVDSTVIQDEGIDELADFCGAGKAVAEWTAKAMTGTVPFEEALAARLSLIKPSLSQIEECLVKRPPRISPGMADLVKKLKANNTDVFLVSGGFRQMIKPVASELGIPAENIIANQVLFGTSGEYAGFDPTEPTSRSGGKAQAVQQIKQNYGYKTVIMIGDGATDLEARQPGGADLFICYAGVQLREPVAAEADYFVLDSXELITKLP

SEQ ID NO: 79676 - protein, 128 aa, Setaria italica
  misc_feature (19)..(19): Xaa can be any naturally occurring amino acid
  Transcript Sequence Number=SeqID_13702
  Gene Ontology: Mol. function=phosphoserine phosphatase activity; Cellular component=chloroplast; Biological process=L-serine biosynthetic process
  Homolog annotation: Hit_ID=B6SU38; Match level="QueryCoverage=100%, HitCoverage=42%, E-value=2e-60, Identity=87%"; Hit description =Phosphoserine phosphatase
ANNTDVFLVSGGFRQMIKXPVASELGIPAENIIANQVLFGTSGEYAGFDPTEPTSRSGGKAQAVQQIKQNYGYKTVIMIGDGATDLEARQPGGADLFICYAGVQLREPVAAEADWVVSDFEELITKLP

SEQ ID NO: 79677 - protein, 362 aa, Setaria italica
  Transcript Sequence Number=SeqID_13703
  Gene Ontology: Mol. function=hydrolase activity, acting on ester bonds; Biological process=lipid metabolic process
  Homolog annotation: Hit_ID=B6UAV0; Match level="QueryCoverage=94%, HitCoverage=88%, E-value=0.0, Identity=91%"; Hit description=Alpha-L- fucosidase 2
  Pfam annotation: Domain name=Lipase_GDSL; Domain location=33-344; Score=282.1; E_value=1.2e-81; Accession=PF00657.14; Description=GDSL- like LipaseAcylhydrolase
  Subcellular localization annotation: CTP_CleavageSite=47; ConfidenceScore=5.37e-01
AALPLLIALALPTTAAAAAGSGFRCRPGSRPVLFNFGDSNSDTGGMAAAKGWHLTRPEGRAFFPRPTGRFCDGRLTVDFLCESLNISYLSPFLKALGSNYSNGANFASAGAATQPRDVPFALHIQVQEFLYFRDRSLELIDQGLSGPIDAQGFQNALYMIDIGQNDVNALLSNLPYDQVVAKFPPILAEIKDAVQTLYSNGSRNFWIHGTGALGCLPQKLAIPRKNDSDLDQYGCLKTYNRAAVAFNLALGSLCDQLSAQMNDATIVYTDLFPIKYDLVANHTKYGFDKPLLTCCGYGGPPYNYDFNKGCQSKDVTACDDGSKFVSWDGVHLTEAANAVVAKAILSSQYSKPSLKFDQFCRA

SEQ ID NO: 79678 - protein, 478 aa, Setaria italica
  misc_feature (9)..(9): Xaa can be any naturally occurring amino acid
  misc_feature (17)..(17): Xaa can be any naturally occurring amino acid
  misc_feature (47)..(47): Xaa can be any naturally occurring amino acid
  misc_feature (179)..(179): Xaa can be any naturally occurring amino acid
  misc_feature (248)..(248): Xaa can be any naturally occurring amino acid
  Transcript Sequence Number=SeqID_13704
  Gene Ontology: Mol. function=endonuclease activity
  Homolog annotation: Hit_ID=B9S769; Match level="QueryCoverage=99%, HitCoverage=56%, E-value=1e-148, Identity=52%"; Hit description =Pentatricopeptide repeat-containing protein, putative
  Pfam annotation: Domain name=LAGLIDADG_2; Domain location=360-478; Score=-1.5; E_value=1.7e-05; Accession=PF03161.5; Description =LAGLIDADG DNA endonuclease family
  Pfam annotation: Domain name=PPR; Domain location=120-154; Score =11.5; E_value=0.39; Accession=PF01535.12; Description=PPR repeat
  Pfam annotation: Domain name=PPR; Domain location=155-189; Score =21.7; E_value=0.003; Accession=PF01535.12; Description=PPR repeat
  Pfam annotation: Domain name=PPR; Domain location=259-293; Score =20.4; E_value=0.0075; Accession=PF01535.12; Description=PPR repeat
  Pfam annotation: Domain name=PPR; Domain location=295-329; Score =22.6; E_value=0.0017; Accession=PF01535.12; Description=PPR repeat
  Pfam module annotation: Pfam domain module=LAGLIDADG_2::PPR::PPR::PPR: :PPR; Domain location=360-478::120-154::155-189::259-293::295-329
AESTFHILXVAYLSVPXGRCLEEACTIYNQMIQMGGYKPRLSLHNSXFRALVSKTGGTAKHNLRQAEFIYHNIVTSNLAVHKDVYVGLIWIHSYQDFIDRDRIKALRDEMKQAAFEETTDVLVSLMRAFSKEGDIKETEATWHRLLQSDCELPAQAYICRMELYARTGEPMKSLEMFKXMKGHNVPPNVASYHKIIEIMAKARERETAEKLMDEFVESHMKHLMPAFLSLMYLYLDLDMHEKLEQTFXKCLGRCRPNRILYTIYLESLVRIGNVTKAEEIFGEMHKNGTIGTNAKSCNIMLRGYLSAEDYKKAEGIYDLMCKKKYDVPVDSLEKLQSGLLISKKVVKPPKPVSMKLDEEQREILIGLLLGGTQIESHARKGVHIVNFKFQEDSNAHSVLRAHIHERFIEWLPSACRSLNDDSEIPYQFSTIPHAHFGFFADQFFLKGQPVLPKLVHRWLSPRVLAYWFMVWGLQTQIR

SEQ ID NO: 79679 - protein, 164 aa, Setaria italica
  Transcript Sequence Number=SeqID_13705
  Gene Ontology: Cellular component=plasma membrane
  Homolog annotation: Hit_ID=Q9LPM5; Match level="QueryCoverage=91%, HitCoverage=35%, E-value=5e-15, Identity=39%"; Hit description =F2J10.8 protein
  Pfam annotation: Domain name=DUF1005; Domain location=1-157; Score= -21.7; E_value=8.9e-17; Accession=PF06219.4; Description=Protein of unknown function (DUF1005)
LRPRTDDLWEPWARLECWRERGGAGASDSLGYRFDLLLPGVDHAVPLADSSIPSSKGGKFAIDLTAAQPLSRGGTPGCSPRGSGDFSNWPLGNYRGFVMSAAVQGEGRCSKPTVEVGVAHIGCAEDAAAFVALAAAVDLSMDACRLFSHRLRKELSHPQADLLR

SEQ ID NO: 79680 - protein, 71 aa, Setaria italica
  Transcript Sequence Number=SeqID_13706
PSQEKGCHVSQDSPSEECKISGSVTCRGCAVCIKRCIKCGRCIDDEFHETFLLENICPICQPHGDSSPSGK

SEQ ID NO: 79681 - protein, 93 aa, Setaria italica
  Transcript Sequence Number=SeqID_13707
  Subcellular localization annotation: CTP_CleavageSite=74; ConfidenceScore=5.39e-01
RSCCCTRRLAPCVPSVLPFAVPPLNPSEFLESSRTSRRPPKSLPLAQQPAPWTWTPRSFVPVWGFRFPTVAGCVGGSGWSVLFWSDCFLAIWA

SEQ ID NO: 79682 - protein, 90 aa, Setaria italica
  misc_feature (28)..(28): Xaa can be any naturally occurring amino acid
  Transcript Sequence Number=SeqID_13708
  Homolog annotation: Hit_ID=A0ELV1; Match level="QueryCoverage=98%, HitCoverage=32%, E-value=2e-17, Identity=52%"; Hit description=Non-S- locus F-box-like protein 2411 (Fragment)
YLGLRDILSLEMVCKSLRSAIRNEPFLXWKCIHIDSQLGEKISDADLLCLTQKSLGSLQCLSLEGCTEISDQGLKAILESNLQLTKVSMV

SEQ ID NO: 79683 - protein, 455 aa, Setaria italica
  Transcript Sequence Number=SeqID_13709
  Gene Ontology: Mol. function=iron-sulfur cluster binding
  Homolog annotation: Hit_ID=Q9LU91; Match level="QueryCoverage=83%, HitCoverage=86%, E-value=1e-42, Identity=31%"; Hit description=F-box protein SKIP14
  Pfam annotation: Domain name=F-box; Domain location=149-231; Score =22.6; E_value=0.0016; Accession=PF00646.25; Description=F-box domain
MALNCSSRSPLLATDDCAGMMLGCGCRSEEASPLSSCGVNSLWWDDLELELEEEVDESDPVDLLPTDPFGMNLETSFTAAIASCIEDLTVMSGAGHFGNGGDDDLFADLSYHYFNQAFVFAPEPCIGGYMGVFEGSFGFGGLSGGGGMDQFSRLPFEPAGSMEDPSSSCEATLACCDTVDAAPVQEGNDAHEGMVFVLGYLGLRDILSLEMVCKSLRSAIRNEPFLWKCIHIDSQLGEKISDADLLCLTQKSLGSLQCLSLEGCTEISDQGLKAILESNLQLTKLGIFGAFRMTYQGLIDNLRSFNMVADIGIKKLRVANRFTLSEAQYEELLSLLRIDNGQALHKQEPRIFHPDSLLPDPQGGYVPDGFMPDLHDEYALDIEKCPLCPNYKLVFDCPSEECKISGSVTCRGCAVCIKRCIKCGRCIDDEFHETFLLENICPICQPHGDSSPSEK

SEQ ID NO: 79684 - protein, 135 aa, Setaria italica
  Transcript Sequence Number=SeqID_13710
  Gene Ontology: Mol. function=binding
  Homolog annotation: Hit_ID=B9S6P3; Match level="QueryCoverage=100%, HitCoverage=3%, E-value=1e-42, Identity=61%"; Hit description =Inositol or phosphatidylinositol kinase, putative
AFVGKFRTLKRTIPQLLEEGEEGKDQPNLRMKLEVPLQTVLNLQPPLEYTKEINDYKSLIKTLAVGMKTIIWSITHAHWPRPQQQNQQSSNLSVQPFRGLREDEVRKTSGVLKSGVHCLALFKEKDDDREILQSF

SEQ ID NO: 79685 - protein, 44 aa, Setaria italica
  misc_feature (22)..(22): Xaa can be any naturally occurring amino acid
  Transcript Sequence Number=SeqID_13711
  Pfam annotation: Domain name=YMF19; Domain location=2-44; Score=26.7; E_value=1.8e-06; Accession=PF02326.7; Description=YMF19 hypothetical plant mitochondrial protein
MPQLDKLTYFSQFFWLCLLFFXFYILFNNNNGILGISRILKLRN

SEQ ID NO: 79686 - protein, 302 aa, Setaria italica
  Transcript Sequence Number=SeqID_13712
  Gene Ontology: Mol. function=hydrolase activity
  Homolog annotation: Hit_ID=Q00T86; Match level="QueryCoverage=93%, HitCoverage=83%, E-value=4e-82, Identity=53%"; Hit description =Hydrolase, alpha/beta fold family protein (ISS)
  Pfam annotation: Domain name=Abhydrolase_1; Domain location=64-296; Score=66.6; E_value=9.4e-17; Accession=PF00561.12; Description =alphabeta hydrolase fold
ADASPPGTSLETQPQVSTGTWKWRGYNIRYQHAGTSGPALVLIHGFGANSDHWRKNIPVLAMANRVYAIDLIGYGYSDKPNPREIGENFYTFETWGEQLNTFCAEVVKSEAFFICNSIGGLVGLQAAVMEPQKCKGIVLLDISLRMLHIKKQPWFGKPFIKSFQSLLRNTIVGKLFFNAVATPESVKNILCQCYHDTSAVTDELVQFILQPGLDPGAVDVFLEFICYSGGPLPEELLPLVKCPVLVAWGEKDPWEPVELGRAYASFDTVEDFVVLPDVGHCPQDEAPELVNPLVQSFVQRHS

SEQ ID NO: 79687 - protein, 74 aa, Setaria italica
  Transcript Sequence Number=SeqID_13713
LSPGSHDFMVYYEFNAWQVPFDLCGRKKKLITSLGNICTLAIIFPGRSGWKIIKLMLHTLQVRVITFIRFAASS

SEQ ID NO: 79688 - protein, 108 aa, Setaria italica
  Transcript Sequence Number=SeqID_13714
AVAVDDDRWRGISSARVDGSTCWSGPCRWIDLDDADRGSRGPAGGTYVVHCYYCAKGRGPIHTHTHTHNAHPDELLLADQARDKPCRLWWCCWYNRTIPTVPPATSER

SEQ ID NO: 79689 - protein, 108 aa, Setaria italica
  misc_feature (16)..(16): Xaa can be any naturally occurring amino acid
  Transcript Sequence Number=SeqID_13715
ELLRRSLVALAAVVVXTGLATASLRKAAATYGFGILAIAGVLLPDWEFFDRDFSQWLTPMPASRRTAAAAAAEREHDVWKFKPYPLRMAMLTTIYGFGLYKWWMYVSS

SEQ ID NO: 79690 - protein, 863 aa, Setaria italica
  Transcript Sequence Number=SeqID_13716
  Gene Ontology: Mol. function=catalytic activity; Biological process =trehalose biosynthetic process
  Homolog annotation: Hit_ID=B6SH67; Match level="QueryCoverage=99%, HitCoverage=99%, E-value=0.0, Identity=72%"; Hit description =Trehalose 6-phosphate synthase
  Pfam annotation: Domain name=Glyco_transf_20; Domain location=58-544; Score=852.4; E_value=2.6e-253; Accession=PF00982.13; Description =Glycosyltransferase family 20
  Pfam annotation: Domain name=Hydrolase_3; Domain location=592-835; Score=-73.3; E_value=0.032; Accession=PF08282.4; Description =haloacid dehalogenase-like hydrolase
  Pfam annotation: Domain name=Trehalose_PPase; Domain location=593 -829; Score=346.1; E_value=6.8e-101; Accession=PF02358.8; Description= Trehalose-phosphatase
  Pfam module annotation: Pfam domain module=Glyco_transf_20::Hydrolase_ 3::Trehalose_PPase; Domain location=58-544::592-835::593-829
MVSKSYSNLLDMTSGDGFDFRQPFKSLPRVVTSPGIISDPDWDTRSDDDSVGSASFSERKIIVANFLPLNCTRDEAGQLSFSLDDDALLVQLKHGFSNETDVVYVGSLKIQVDPSEQDQVAQKLLREYRCIPTFLPSDLQQQFYHGFCKQQLWPLFHYMLPICLDKGELFDRSLFQAYVRANKLFADKVMEVINTDDDYVWVHDYHLMLLPTFLRKRLHRIKLGFFLHSPFPSSEIYRTLPVRDEILKSLLNADLIGFQTFDYARHFLSCCSRLLGLHYESKRGYIGIEYFGRTVSLKILSVGVHVGRLESVLNLPATVSKVQEIEQRYKGKMLMLGVDDMDIFKGISLKLLGLELLLERNPKLRQKVVLVQIINPARSTGKDVQEAITETVSVAERINRKYGSSGYNPVVLIDHHIPFYEKIAFYAASDCCIVNAVRDGMNLVPYEYTVCRQGNEEIDKLRGFDKDTSHTSTLIVSEFVGCSPSLSGAFRVNPWSVDDVADALCHATDLTESEKRLRHEKHYRYVSTHDVAYWARSFAQDLERACKDHYSRRCWAIGFGLNFRVIALSPGFRKLSSEHFVSCYNKASRRAIFLDYDGTLVPQSSINKAPSAEVISILKTLCNDPKNNVFIVSGRGRDSLDEWFSPCEKLGIAAEHGYFVRWSKEAEWESSYPRTQREWKHIAEPVMKVYTETTDGSSIEPKESALVWHYLDADHDFGSCQAKELQDHLERVLSNEPVVVKCGHYIVEVKPQGVSKGLAVDKLIRSLVNNGKAPDFLMCIGNDRSDEDMFESINGMTSNTVLSPTVPEVFACSVGQKPSKAKYYVDDTTEVIRLLKNVTRSSSQREDVSHGRVTFRDVIDFVE

SEQ ID NO: 79691 - protein, 70 aa, Setaria italica
  Transcript Sequence Number=SeqID_13717
  Subcellular localization annotation: CTP_CleavageSite=62; ConfidenceScore=5.66e-01
LSWSFCLDVMPFNLRFVVSRSVQTRATTRKTFKTPTTSRRTQSTTDKVSCHSQSYGSYACLVASAFTYIA

SEQ ID NO: 79692 - protein, 105 aa, Setaria italica
  misc_feature (98)..(98): Xaa can be any naturally occurring amino acid
  Transcript Sequence Number=SeqID_13718
GRDQAQGASESRKVGDGRGGGGTVVAADSTGGDSYWRTPNSKGGNNCPERGHLTTTVHSLYLPMPVSNIQGEKVRVVGESRWDGRSMKSTSRWTCQKXQIREREK

SEQ ID NO: 79693 - protein, 158 aa, Setaria italica
  Transcript Sequence Number=SeqID_13719
  Gene Ontology: Mol. function=(S)-norcoclaurine synthase activity; Biological process=response to biotic stimulus
  Homolog annotation: Hit_ID=B6SQM0; Match level="QueryCoverage=77%, HitCoverage=79%, E-value=8e-24, Identity=45%"; Hit description=Major pollen allergen Car b 1 isoforms 1A and 1B
  Pfam annotation: Domain name=Bet_v_I; Domain location=1-155; Score= -13.6; E_value=3.8e-05; Accession=PF00407.11; Description =Pathogenesis-related protein Bet v I family
MEGSPCHEFHTDLPATDVWEVYGSLVLGQLVPQLLPQVLSEVELVEGDGSVGTVLLVTFPSAGASGPVSYKERFTMIDDEKYIKEVAVIKGGVLDLGFQKYVVRFEIEGKEDGTTIIRSTIEYKVDAEQTSNASIVSTEALAAIAEAITKYIKEQMSL

SEQ ID NO: 79694 - protein, 96 aa, Setaria italica
  Transcript Sequence Number=SeqID_13720
SKKYISQQESVALNQTAQILRPALKKIMCIKKNHSTDPTFSRRAKRNQLRDDACRWLPLLAAVNVADLASSSLSSTVTSLVVSNIEHADAGIRHPR

SEQ ID NO: 79695 - protein, 161 aa, Setaria italica
  Transcript Sequence Number=SeqID_13721
  Gene Ontology: Mol. function=geranylgeranyl-diphosphate geranylgeranyltransferase activity; Cellular component=chloroplast; Biological process=carotenoid biosynthetic process
  Homolog annotation: Hit_ID=P49085; Match level="QueryCoverage=98%, HitCoverage=37%, E-value=5e-48, Identity=69%"; Hit description =Phytoene synthase, chloroplastic
  Subcellular localization annotation: CTP_CleavageSite=65; ConfidenceScore=5.22e-01
MAIILVRAASPGLSDAAHHGSGSGSLGQCSSLLKRRRRWMLCSLRYACLGLGPGEREIGRAPAVYSSLAVNPAGEAVVSSEQKVYDVVMKQAALLKRQLRTPGPLDVSRPRDLEMPRNGLREAYARCGEICEEYAKTFYLGTLLMTEERRRAIWAIYVVGC

SEQ ID NO: 79696 - protein, 122 aa, Setaria italica
  misc_feature (13)..(13): Xaa can be any naturally occurring amino acid
  Transcript Sequence Number=SeqID_13722
  Homolog annotation: Hit_ID=Q6ZCP9; Match level="QueryCoverage=99%, HitCoverage=18%, E-value=4e-36, Identity=68%"; Hit description =Pentatricopeptide (PPR) repeat-containing protein-like
NGIIDTTRDVKIXLRRSGVLVNRMKSNREVADMWNGMCRAARVSKVSRLDGVIRAVNAHRDRTPAVRVQKMLKRYVFGSWKILTLLASVVLLVMTGLEAFCSAYPCHNSWFGNVLQLDSPAP

SEQ ID NO: 79697 - protein, 149 aa, Setaria italica
  Transcript Sequence Number=SeqID_13723
  Gene Ontology: Mol. function=transferase activity, transferring glycosyl groups; Biological process=metabolic process
  Homolog annotation: Hit_ID=C4MF48; Match level="QueryCoverage=93%, HitCoverage=30%, E-value=5e-36, Identity=55%"; Hit description=UDP -glycosyltransferase UGT75E3
DESGIIKQDDAEYMEWLDAKPENSVVYVSSGSLASMAREQLDELLRGLEESGRPYLFVIRKDVKVALAEVEAEMMGRLKNGIAVEWCDQVRVLSHTAVGCFVTHCGWNSVLESVASGVPMVCVPRLSDQHMNAQLVVRDVVVGLRAQVD

SEQ ID NO: 79698 - protein, 41 aa, Setaria italica
  Transcript Sequence Number=SeqID_13724
  Gene Ontology: Mol. function=histone-lysine N-methyltransferase activity; Cellular component=nucleus; Biological process=chromatin modification
  Homolog annotation: Hit_ID=B9IDS5; Match level="QueryCoverage=100%, HitCoverage=3%, E-value=5e-11, Identity=75%"; Hit description=SET domain protein (Fragment)
SQENVRAGDELTYDYLFDPDEADERKVPCRCQTANCRKFMN

SEQ ID NO: 79699 - protein, 234 aa, Setaria italica
  Transcript Sequence Number=SeqID_13725
  Gene Ontology: Mol. function=sequence-specific DNA binding; Cellular component=nucleus; Biological process=regulation of transcription, DNA-dependent
  Homolog annotation: Hit_ID=Q9LEE7; Match level="QueryCoverage=99%, HitCoverage=28%, E-value=1e-104, Identity=81%"; Hit description=OCL4 protein
  Pfam annotation: Domain name=Homeobox; Domain location=38-94; Score =84.7; E_value=3.3e-22; Accession=PF00046.21; Description=Homeobox domain
DVDDDRPEQKPQHGGLDLQAADAGQPPQQQLATANGKKKRYHRHTAHQIQQMEALFKECPHPDDKQRLKLSQELGLKPRQVKFWFQNRRTQMKAQQDRADNVLLRAENESLKSDNYRLQAAIRNVVCPNCGHAAVLGEMSYEEQQLRIENARLKDELDRLACIATRYGGGGRQPSMSSALVCLPGPPPVLMPPLDLDMSVYSRHFTDQSPVMGCGDLIQSVLAPPPQQIAGGVG

SEQ ID NO: 79700 - protein, 62 aa, Setaria italica
  Transcript Sequence Number=SeqID_13726
FVSCLLKLCPLMGGTILSIDVSRVFIDIIYLFNLVRVQIFILDSEGNLLVYAFIFLPIVNLM

SEQ ID NO: 79701 - protein, 71 aa, Setaria italica
  Transcript Sequence Number=SeqID_13727
DYNTILHGSGIHTTSDKSKEIMAHKQFLETTRKSSLIDMRRCFVSPSHISASICSLLTDPNPDDPLVPEIA

SEQ ID NO: 79702 - protein, 131 aa, Setaria italica
  misc_feature (24)..(24): Xaa can be any naturally occurring amino acid
  Transcript Sequence Number=SeqID_13728
GPQLAYDPAAHHNSTSEDPGRGRXKKKEGREGVSLSLLSPSPTSRLRCLRKEFVMASKRILKELKDLQRDPPHHHAVQVLQFLQDTLRCHDKLLPQAAKTRGWGRREERERDAFSPSFFLLPRPGSLRLLE

SEQ ID NO: 79703 - protein, 143 aa, Setaria italica
  Transcript Sequence Number=SeqID_13729
PLAVPNLSSSLPAEGGEPSLFRVNFFGRIFFGLRSGQIGAGELRPLPIRIRPIGARVFSLELFVWFFSRSSLLVAAAVSGRSAVWSGLERAEAVLRVVGSWFPTGRCRSEPDLVRGCLRRWAIGAGAWGVRPYALVFWISRMV

SEQ ID NO: 79704 - protein, 103 aa, Setaria italica
  Transcript Sequence Number=SeqID_13730
MRWADKAPPHVNQRRFPCRLKKLFVGHYSFDLSLVVCISDEQLPSNTDPNTKVPSKHKCISKACPTISLWMVVGHRLQYDPTWIGDTHDQRQIEGNNGPQTIS

SEQ ID NO: 79705 - protein, 118 aa, Setaria italica
  misc_feature (67)..(67): Xaa can be any naturally occurring amino acid
  Transcript Sequence Number=SeqID_13731
  Gene Ontology: Mol. function=small conjugating protein ligase activity; Cellular component=cytosol; Biological process=ubiquitin -dependent protein catabolic process
  Homolog annotation: Hit_ID=A3AYE9; Match level="QueryCoverage=100%, HitCoverage=58%, E-value=3e-51, Identity=84%"; Hit description =Ubiquitin carrier protein
  Pfam annotation: Domain name=UQ_con; Domain location=5-118; Score =155.8; E_value=1.3e-43; Accession=PF00179.18; Description=Ubiquitin -conjugating enzyme
MASKRILQYLQDLHCIDVGDLSAGPAGEDMFHWQATIMGPPDSPYAGGVFLVNIHFPPDYPFKPPRXFKTKVFHPNINSNGSICLDILKEQWSPALTISKVLLSICSLLTDPNPDDPL

SEQ ID NO: 79706 - protein, 104 aa, Setaria italica
  Transcript Sequence Number=SeqID_13732
LDIDYNTILHGSGIHTTSDKSKEIMAHKQFLETTRKSSLIDMRRCFVSPSHISASSCGLSTRTSAGPSCTCGQSRGQEDRPGWGQLAGSRWRARPGTSNKATLK

SEQ ID NO: 79707 - protein, 287 aa, Setaria italica
  Transcript Sequence Number=SeqID_13733
  Gene Ontology: Mol. function=shikimate kinase activity; Cellular component=plastid; Biological process=aromatic amino acid family biosynthetic process
  Homolog annotation: Hit_ID=Q5NTH3; Match level="QueryCoverage=86%, HitCoverage=82%, E-value=1e-123, Identity=86%"; Hit description =Shikimate kinase 2
  Pfam annotation: Domain name=AAA; Domain location=81-244; Score= -24.5; E_value=0.0035; Accession=PF00004.21; Description=ATPase family associated with various cellular activities (AAA)
  Pfam annotation: Domain name=SKI; Domain location=88-264; Score =186.4; E_value=7.8e-53; Accession=PF01202.14; Description=Shikimate kinase
  Pfam module annotation: Pfam domain module=AAA::SKI; Domain location =81-244::88-264
GGRRCLFLGREKQARAGSLRVGGGTAGASAVAVRARGTKPVAPLCCVRASRGNESSHNSVDEALLLKRISEKVLFHLNGRCIYLVGMMGSGKSTVGKILAEVLGYSFFDSDKLVEQAVGMPSVAQIFKVHSEAFFRENESSVLRDLSSMRRLVVATGGGAVIRPINWNYMKKGLSVWLDVPLDALAKRIAQVGTASRPLLDQPSDDPYTAAFTKLSMLLEQRGDAYANADARVSLEEIAAKQGHGDVSKLTPTDIAIEALLKIGNFVTEDPTSHGQVDSQSRRIQTL

SEQ ID NO: 79708 - protein, 148 aa, Setaria italica
  Transcript Sequence Number=SeqID_13734
  Gene Ontology: Mol. function=small conjugating protein ligase activity; Cellular component=proteasome complex; Biological process =ubiquitin-dependent protein catabolic process
  Homolog annotation: Hit_ID=P35133; Match level="QueryCoverage=100%, HitCoverage=100%, E-value=6e-78, Identity=93%"; Hit description =Ubiquitin-conjugating enzyme E2 10
  Pfam annotation: Domain name=UQ_con; Domain location=5-142; Score =276.9; E_value=4.6e-80; Accession=PF00179.18; Description=Ubiquitin -conjugating enzyme
MASKRILKELKDLQRDPPTSCSAGPAGEDMFHWQATIMGPPDSPYAGGVFLVNIHFPPDYPFKPPKVSFKTKVFHPNINSNGSICLDILKEQWSPALTISKVLLSICSLLTDPNPDDPLVPEIAHMYKTDRPKYESTARSWTQKYAMG

SEQ ID NO: 79709 - protein, 126 aa, Setaria italica
  Transcript Sequence Number=SeqID_13735
PGMRSLRVHMLCEFRREMHVVEDQLGCDLIQVDNQTVKSLLPYMSKFMKLLTFALKIGAHFIVGMGEMIPDLSREVVHLLDSSAMYGAAASAASVGALGAAALYGRGRNNSNQGGASDMGEDMKAA

SEQ ID NO: 79710 - protein, 143 aa, Setaria italica
  Transcript Sequence Number=SeqID_13736
  Gene Ontology: Cellular component=integral to membrane
  Homolog annotation: Hit_ID=Q9LPF6; Match level="QueryCoverage=47%, HitCoverage=17%, E-value=3e-20, Identity=72%"; Hit description =Probable purine permease 11
VQSCGTPLAIPLLIYLRSRKPSVAAASRPSLVKLAAIYAGLGVLLAGDNLMYSYGLLYLPVSTYSIISASQVSFNAVFSYFLNKEKFRALILNSVVLLTFSAALVGVSHGSDGSGSAIPKGKFPAGFALTLSASALFSLILSL

SEQ ID NO: 79711 - protein, 310 aa, Setaria italica
  Transcript Sequence Number=SeqID_13737
  Gene Ontology: Mol. function=electron carrier activity; Cellular component=endoplasmic reticulum; Biological process=oxidation reduction
  Homolog annotation: Hit_ID=A5Y5L3; Match level="QueryCoverage=99%, HitCoverage=58%, E-value=1e-98, Identity=55%"; Hit description =Flavonoid 3'5' hydroxylase
  Pfam annotation: Domain name=p450; Domain location=1-297; Score=18.7; E_value=1.5e-12; Accession=PF00067.14; Description=Cytochrome P450
MIVSLLTGAGLFNISDFVPALARLDLQGVQAKLRRIHHQFDGLITKLLAEHAATAADRARHGRQDFVDRLRAAMDAGADDDSGETITEVNIKGLIFDMFTAGTDTSSIIVEWAMAEMLKNPSVMARAQEELDRVVGRGRRLEESDLPALPYLQAACKEAMRLHPSTPLSLPHFSFDACDVDVGGGGYRVPANTRLLINIWAIGRDPEAWEAPLEFRPERFLPGGAAEKVDPLGNYFELIPFGAGRRICAGKLAGMVFVQYFLGTLLHAFDWRLPEGEEKLDMAETFGLALPKAVPLRAVVTPRLAPEAYA

SEQ ID NO: 79712 - protein, 90 aa, Setaria italica
  Transcript Sequence Number=SeqID_13738
  Gene Ontology: Mol. function=Rab-protein geranylgeranyltransferase activity; Cellular component=Rab-protein geranylgeranyltransferase complex; Biological process=regulation of GTPase activity
  Homolog annotation: Hit_ID=P26374; Match level="QueryCoverage=60%, HitCoverage=8%, E-value=8e-10, Identity=51%"; Hit description=Rab proteins geranylgeranyltransferase component A 2
MADEPAATAAAAAGATHDYPTIDPTSFDVMLFGTGLPESVLAAACAAAGKTVLHADPNPFYGSHYTSVPLPSLASFLLPRLFRVLLDRPR

SEQ ID NO: 79713 - protein, 89 aa, Setaria italica
  Transcript Sequence Number=SeqID_13739
  Subcellular localization annotation: CTP_CleavageSite=41; ConfidenceScore=5.16e-01
MTTRLTATSLLSRTLRRGVTSRIPPRPFAPLGLEPSAGIPRSQPRPSYSTASGDPGQEPPPAMDSPIKVVSHLGGGGGGRGSGEGGAAA

SEQ ID NO: 79714 - protein, 72 aa, Setaria italica
  Transcript Sequence Number=SeqID_13740
  Homolog annotation: Hit_ID=B9SB74; Match level="QueryCoverage=59%, HitCoverage=8%, E-value=2e-09, Identity=69%"; Hit description =Transcription factor, putative
YLFAVWKDMDELKKEVREARRIKMLHQPSKAMDLENEIRILRKTFAEKSTDCVNLLKELELHKRLKENSTPS

SEQ ID NO: 79715 - protein, 105 aa, Setaria italica
  Transcript Sequence Number=SeqID_13741
  Homolog annotation: Hit_ID=B9SB74; Match level="QueryCoverage=98%, HitCoverage=20%, E-value=1e-36, Identity=65%"; Hit description =Transcription factor, putative
VLQLNGIEQPKESVHVLNVGRLRMRLTKGKSVVAKEFYSSSMQLCGVRGGGEAASQAIFWQPRNDLSLVLAFETARERNTAIMLARRFAIDCNIILAGPGDKTPW

SEQ ID NO: 79716 - protein, 493 aa, Setaria italica
  Transcript Sequence Number=SeqID_13742
  Homolog annotation: Hit_ID=B9SB74; Match level="QueryCoverage=99%, HitCoverage=99%, E-value=1e-147, Identity=53%"; Hit description =Transcription factor, putative
MTRAATLYGAKTQTETLRPGPLRPANIIRSKFPTYKNGSNGIVIKLADGPEIPPLKEIVAKETADLLDRRQRLSVRELAMKFEKGLNTATLLSNEVKWRQVALLERDILLKNLKSVLESLRGRVTGKTKDEIEESISMVEILAVQLSKREAELLQQKEEVTKLAKSLKQASEDAKRIVEEERANAHTEIESAKDAVQRVQQAVQEHEKMCQSTGKQDMDELKKEVREARRIKMLHQPSKAMDLENEIRILRKTFAEKSTDCVNLLKELELHKRLKENSTPSFDLEGLQCLGSVLCIVALSGTHMDLSNISIQWFRIHPKESNKEIISGATRPVYALEPHDVGRYLQAEIDVGGEIAVAKTAGPVDPDAGLVDYVETLVRKPETEFNVVVLQLNGIEQPKESVHVLNVGRLRMRLTKGKSVVAKEFYSSSMQLCGVRGGGEAASQAIFWQPRNDLSLVLAFETARERNTAIMLARRFAIDCNIILAGPGDKTPW

SEQ ID NO: 79717 - protein, 86 aa, Setaria italica
  Transcript Sequence Number=SeqID_13743
  Gene Ontology: Cellular component=plasma membrane
  Homolog annotation: Hit_ID=B6D1Q6; Match level="QueryCoverage=84%, HitCoverage=14%, E-value=5e-25, Identity=74%"; Hit description=Salt responsive protein 2
PVRQRVAVCIWRLATGEPLRLVSKRFGLGISTCHKLVLEVCAAIKSVLMPRFLQWPDEAAAARFKASFERTVGPSPAWSATNSNNQ

SEQ ID NO: 79718 - protein, 92 aa, Setaria italica
  Transcript Sequence Number=SeqID_13744
  Gene Ontology: Cellular component=plasma membrane
  Homolog annotation: Hit_ID=B6D1Q6; Match level="QueryCoverage=82%, HitCoverage=15%, E-value=4e-32, Identity=78%"; Hit description=Salt responsive protein 2
PDAAAADAFKARFQADSGIPGVVGAIYTTHIPIIAPKVSVAAYFNRRHTERNHKTSYSITLQGVVGPDGAFTDVCIGWPGSMPDDQVLDRSA

SEQ ID NO: 79719 - protein, 98 aa, Setaria italica
  misc_feature (52)..(52): Xaa can be any naturally occurring amino acid
  Transcript Sequence Number=SeqID_13745
  Homolog annotation: Hit_ID=B6SGX9; Match level="QueryCoverage=63%, HitCoverage=15%, E-value=1e-10, Identity=59%"; Hit description =Transposon protein CACTA, En/Spm sub-class
SGFLRQRCVNQDVRSSPAAFPAPAAAFEAPLAMADPRKRAAEYQLAPEGEAXGVKRQRSPTSSRENSGGSNDGDHELSSAAAGGRGGGRRLWVKERDH

SEQ ID NO: 79720 - protein, 69 aa, Setaria italica
  Transcript Sequence Number=SeqID_13746
  Subcellular localization annotation: CTP_CleavageSite=57; ConfidenceScore=5.28e-01
CKELLLLLLLTSSSSSTCGKQHNHHLPNNEPTPTSLHMPFFLSSPPAPFFMLQRPPRQAMLMELLTLSS

SEQ ID NO: 79721 - protein, 75 aa, Setaria italica
  Transcript Sequence Number=SeqID_13747
SADRPGCGAKILRGDGALDQYITRTNVMNLRVGCCQARNSKTKHFLSYTIVHLWYYREISLLYSVVLYYILVGAN

SEQ ID NO: 79722 - protein, 71 aa, Setaria italica
  Transcript Sequence Number=SeqID_13748
  Gene Ontology: Mol. function=nucleoside-triphosphatase activity; Biological process=protein transport
  Homolog annotation: Hit_ID=B9SPA4; Match level="QueryCoverage=80%, HitCoverage=9%, E-value=4e-15, Identity=66%"; Hit description=ATP -dependent clp protease ATP-binding subunit clpx, putative
IKPYLTRSPLSTDSNKDQLVQVLTEPKNSLSRQYRKMFNLNKVRLHFTDGALRLIAKKAIAKNTGARGLRA

SEQ ID NO: 79723 - protein, 619 aa, Setaria italica
  misc_feature (606)..(606): Xaa can be any naturally occurring amino acid
  Transcript Sequence Number=SeqID_13749
  Gene Ontology: Mol. function=nucleoside-triphosphatase activity; Biological process=protein transport
  Homolog annotation: Hit_ID=B9SPA4; Match level="QueryCoverage=68%, HitCoverage=70%, E-value=1e-164, Identity=68%"; Hit description=ATP -dependent clp protease ATP-binding subunit clpx, putative
  Pfam annotation: Domain name=AAA; Domain location=266-467; Score =31.2; E_value=4.3e-08; Accession=PF00004.21; Description=ATPase family associated with various cellular activities (AAA)
  Pfam annotation: Domain name=AAA_2; Domain location=262-468; Score =237.3; E_value=3.7e-68; Accession=PF07724.6; Description=ATPase family associated with various
  Pfam annotation: Domain name=AAA_5; Domain location=266-424; Score= -17.4; E_value=0.026; Accession=PF07728.6; Description=ATPase family associated with various
  Pfam annotation: Domain name=ClpB_D2-small; Domain location=474-566; Score=49.3; E_value=1.5e-11; Accession=PF10431.1; Description=C -terminal, D2-small domain, of ClpB pr
  Pfam module annotation: Pfam domain module=AAA::AAA_2::AAA_5::ClpB_D2- small; Domain location=266-467::262-468::266-424::474-566
  Subcellular localization annotation: CTP_CleavageSite=37; ConfidenceScore=5.13e-01
MFRTFTKLRDAAAPLASSAVRRCSGGSRIRADANCPRCDAHMSVQFSLQQLPAPPPAAAGVVDASQNHKHDGEGVCPACRAAFLFRAHRIDPLRGAFLEIPGAIGGEEEDADRGGFADRIKRMLSERPPDEFPPLPQSPPMPMPHYHPRRKNNRRRQKEEGGGGGGGGGNGGDSSSGGEGTSASPKREWWGGASLGDELPTPREMCRRLDEFVIGQAKAKKVLSVAVYNHYKRIYNANVQKESVANSGFPDAAQDDQNIVEIDKSNVLLMGPTGSGKTLLAKTLARIVNVPFVIADATSLTQAGYVGEDVESILQKLLVAAEYNVQAAQQGIVYIDEIDKITKKAESANVSRDVSGEGVQQALLKILEGTVVSIPEKGSRKNSRSESIQIDTTDILFICGGAFVDLEKTISERRQDSSIGFGAPIRTNMRSSGASSPMITSSLLESVESGDLVRYGLIPEFTGRLPILVSLAALNEDQLVQVLTEPKNSLSRQYRKMFNLNKVRLHFTDGALRLIAKKAIAKNTGARGLRAILETILLEAMYEIPDEKAGNERVDAVVVDEEAIGSADRPGCGAKILRGDGALDQYITRTNVMNLRETNDGLAGEXLEEAYMLSRIVSL

SEQ ID NO: 79724 - protein, 397 aa, Setaria italica
  Transcript Sequence Number=SeqID_13750
  Gene Ontology: Cellular component=plasma membrane
  Homolog annotation: Hit_ID=B6D1Q6; Match level="QueryCoverage=89%, HitCoverage=71%, E-value=1e-158, Identity=71%"; Hit description=Salt responsive protein 2
AAARSKRSRLAASAAAAVVSAEESASAASASGSPPRAAGQGGHHQRRLWVKDRSRDWWDKCSSPDYPEEDFRRAFRMGRETFDMICDALGSAVAKEDTMLRAAIPVRQRVAVCIWRLATGEPLRLVSKRFGLGISTCHKLVLEVCAAIKSVLMPRFLQWPDEAAAARFKASFERTSGVPGVVGAMYTTHIPIIAPKISVAAYFNRRHTERNQKTSYSITLQGVVGPDGAFTDVCIGWPGSMPDDQVLEKSMLHQRAAAGMMRDSWLVGGASYPLMDWVLVPYTHPNLTWTQHAFNEKVGELRRVAVEAFARLKARWACLQKRTEVKLQDLPVVLGACCVLHNICELRGEEVDPAIRCELVDDETTPENPVRSEAAKRARDGIAHNLLHRGFAGTAFF

SEQ ID NO: 79725 - protein, 478 aa, Setaria italica
  Transcript Sequence Number=SeqID_13751
  Gene Ontology: Mol. function=binding; Cellular component=plasma membrane
  Homolog annotation: Hit_ID=B9RYP4; Match level="QueryCoverage=99%, HitCoverage=75%, E-value=0.0, Identity=67%"; Hit description=Kinesin light chain, putative
  Pfam annotation: Domain name=TPR_1; Domain location=176-209; Score =11.8; E_value=0.23; Accession=PF00515.20; Description=Tetratricopepti de repeat
  Pfam annotation: Domain name=TPR_1; Domain location=218-251; Score =18.9; E_value=0.021; Accession=PF00515.20; Description =Tetratricopeptide repeat
  Pfam annotation: Domain name=TPR_1; Domain location=261-294; Score =28.1; E_value=3.5e-05; Accession=PF00515.20; Description =Tetratricopeptide repeat
  Pfam annotation: Domain name=TPR_1; Domain location=302-335; Score =5.4; E_value=1.3; Accession=PF00515.20; Description=Tetratricopeptide repeat
  Pfam annotation: Domain name=TPR_1; Domain location=344-377; Score =11.4; E_value=0.25; Accession=PF00515.20; Description=Tetratricopepti de repeat
  Pfam annotation: Domain name=TPR_1; Domain location=386-419; Score =19.5; E_value=0.014; Accession=PF00515.20; Description =Tetratricopeptide repeat
  Pfam annotation: Domain name=TPR_1; Domain location=52-85; Score =13.2; E_value=0.15; Accession=PF00515.20; Description=Tetratricopepti de repeat
  Pfam annotation: Domain name=TPR_1; Domain location=94-127; Score =23.8; E_value=0.00073; Accession=PF00515.20; Description =Tetratricopeptide repeat
  Pfam annotation: Domain name=TPR_2; Domain location=136-169; Score =3.5; E_value=12; Accession=PF07719.9; Description=Tetratricopeptide repeat
  Pfam annotation: Domain name=TPR_2; Domain location=176-209; Score =11.0; E_value=1.4; Accession=PF07719.9; Description=Tetratricopeptide repeat
  Pfam annotation: Domain name=TPR_2; Domain location=218-251; Score =19.8; E_value=0.011; Accession=PF07719.9; Description=Tetratricopepti de repeat
  Pfam annotation: Domain name=TPR_2; Domain location=261-294; Score =30.5; E_value=6.7e-06; Accession=PF07719.9; Description =Tetratricopeptide repeat
  Pfam annotation: Domain name=TPR_2; Domain location=302-335; Score =10.5; E_value=1.7; Accession=PF07719.9; Description=Tetratricopeptide repeat
  Pfam annotation: Domain name=TPR_2; Domain location=344-377; Score =14.1; E_value=0.59; Accession=PF07719.9; Description=Tetratricopeptid e repeat
  Pfam annotation: Domain name=TPR_2; Domain location=386-419; Score =16.9; E_value=0.084; Accession=PF07719.9; Description=Tetratricopepti de repeat
  Pfam annotation: Domain name=TPR_2; Domain location=52-85; Score =20.5; E_value=0.0072; Accession=PF07719.9; Description =Tetratricopeptide repeat
  Pfam annotation: Domain name=TPR_2; Domain location=94-127; Score =26.7; E_value=9.7e-05; Accession=PF07719.9; Description =Tetratricopeptide repeat
  Pfam annotation: Domain name=TPR_4; Domain location=136-161; Score =1.8; E_value=27; Accession=PF07721.6; Description=Tetratricopeptide repeat
  Pfam annotation: Domain name=TPR_4; Domain location=218-243; Score =2.0; E_value=25; Accession=PF07721.6; Description=Tetratricopeptide repeat
  Pfam annotation: Domain name=TPR_4; Domain location=261-286; Score =9.9; E_value=2.9; Accession=PF07721.6; Description=Tetratricopeptide repeat
  Pfam annotation: Domain name=TPR_4; Domain location=344-369; Score =0.7; E_value=36; Accession=PF07721.6; Description=Tetratricopeptide repeat
  Pfam annotation: Domain name=TPR_4; Domain location=386-411; Score =11.7; E_value=1.8; Accession=PF07721.6; Description=Tetratricopeptide repeat
  Pfam annotation: Domain name=TPR_4; Domain location=94-119; Score =6.4; E_value=7.5; Accession=PF07721.6; Description=Tetratricopeptide repeat
  Pfam module annotation: Pfam domain module=TPR_1::TPR_1::TPR_1::TPR _1::TPR_1::TPR_1::TPR_1::TPR_1::TPR_2::TPR_2::TPR_2::TPR_2::TPR _2::TPR_2::TPR_2::TPR_2::TPR_2::TPR_4::TPR_4::TPR_4::TPR_4::TPR _4::TPR_4; Domain location=...
  Pfam module annotation: Domain location=176-209::218-251::261 -294::302-335::344-377::386-419::52-85::94-127::136-169::176-209::218- 251::261-294::302-335::344-377::386-419::52-85::94-127::136-161::218 -243::261-286::344-369::386-411::94-119
GLGRHADAIPVLERAVAVVTPPPPAEGEADDQQPQQEPEADQRGEDWSLAAFSGWMQLGDTHAMLGRMDESIACYGKGLEIQMAALGERDPRVAETCRYLAEAHVQALQFDEAEKLCRKALEIHREHSAPASLEEASDRRLMALILDAKGDYDGALEHLVLASMTMVANGRDIEVATIDVAIGNTYLALARFDEAVFSYQKALTVLKSARGDDHPTVASVYVRLADLYHRTGRLRESKSYCENALRVYAKPAPGAAPDEIAGGLMEIAAIYEALGDLDEALKLLQRALKLLEDSPGQWSTVAGIEAQMGVLYYMIGRYADSRNSFESAVAKLRASGERKSAFFGVLLNQMGLACVQLFKIDEAAQLFEEARAVLEQECGASHPDTLGVYSNLAAIYDAMGRVEDAIEILEHVLKVREEKLGTANPDVEDEKKRLAELLKEAGRSRNRKQKSLENLFGSNAARAKKEAGRRWSNFGFRS

SEQ ID NO: 79726 - protein, 459 aa, Setaria italica
  misc_feature (80)..(80): Xaa can be any naturally occurring amino acid
  misc_feature (379)..(379): Xaa can be any naturally occurring amino acid
  Transcript Sequence Number=SeqID_13752
  Gene Ontology: Cellular component=plasma membrane
  Homolog annotation: Hit_ID=B6SGX9; Match level="QueryCoverage=98%, HitCoverage=96%, E-value=0.0, Identity=78%"; Hit description =Transposon protein CACTA, En/Spm sub-class
MSTSYTEAQLGSFFDLPAGEDLTSWFTHLCEDQAPAAFPAPAAAFEAPLAMADPRKRAAEYQLAPEGEASGVKRQRSPTXSSRENSGGSNDGDHELSSAAAGGRGGGRRLWVKERDHEWWDRMSSPACPEEEFRRAFRMSRATFEAVCEELGSAVAKEDTMLRAAIPVRQRVAVCIWRLATGEPLRLVSKRFGLGISTCHKLVLEVCAAIKAVLMPKAVQWPEAPAEVSAQFEAASGISNVVGAMYTTHIPIIAPKANVAAYYNRRHTERNQKTSYSITVQGVVDAAGAFTDVCIGWPGSMSDADVLDRSALYAQRGAAGRLQGQWVVGGAGYPLMDWVLVPYTHQNMTWAQHVFNERVDGVRAVARDAFRRLKARWGXCLQKRTEVKLQDLPVVLGACCVLHNICESRGEEMDPGLICDLADDETAPENAVRSDSASKARDDIAHNLLHSGLAGTKFF

SEQ ID NO: 79727 - protein, 86 aa, Setaria italica
  Transcript Sequence Number=SeqID_13753
  Subcellular localization annotation: CTP_CleavageSite=61; ConfidenceScore=5.17e-01
PDQTRTIAKGYKLPYLSREVKTRRRRRRRGHGRGRHSSTRGVAAVISMATSPRPHPIGVVRSAATRCRDTRTLQNKNTATHHDISL

SEQ ID NO: 79728 - protein, 160 aa, Setaria italica
  misc_feature (124)..(124): Xaa can be any naturally occurring amino acid
  misc_feature (149)..(149): Xaa can be any naturally occurring amino acid
  Transcript Sequence Number=SeqID_13754
  Homolog annotation: Hit_ID=B6TYM7; Match level="QueryCoverage=100%, HitCoverage=30%, E-value=3e-62, Identity=76%"; Hit description =Folate/biopterin transporter family protein
MVLSLTVLYNRYLKTIPLRHLIGGVQMLYAVAVLSDLVLVKQINLMLGIPNEIHVLCFSALAEAIAQFKVLPFSVLLSSLCPPGCEGSLFAFFTSGLVFSAIVSGVFGVGLSTLIGVSSVDYSXLPLGILLQSLAALLPLGWISFVPEXWNADEKVVMQR

SEQ ID NO: 79729 - protein, 95 aa, Setaria italica
  misc_feature (70)..(70): Xaa can be any naturally occurring amino acid
  misc_feature (89)..(89): Xaa can be any naturally occurring amino acid
  Transcript Sequence Number=SeqID_13755
  Gene Ontology: Mol. function=violaxanthin de-epoxidase activity
  Homolog annotation: Hit_ID=C1DYN6; Match level="QueryCoverage=100%, HitCoverage=17%, E-value=2e-28, Identity=58%"; Hit description =Violaxanthin de-epoxidase
CQYQLFYRGKAKGSFWYEPVFQVKTLEGKLLWRRRRYRVRRASTPGTFYFSVLDNGVISKEFWTIVDVAXEDFSWGLFHYHGAAQAAGXSYTGAV

SEQ ID NO: 79730 - protein, 74 aa, Setaria italica
  Transcript Sequence Number=SeqID_13756
ITSYVELQLDFKHEEPLLNLNDSKLQRGNELLISQTLVFAGSPSGGGKNSGHRTLSVGFPGLMSLFLALWAVLA

SEQ ID NO: 79731 - protein, 146 aa, Setaria italica
  Transcript Sequence Number=SeqID_13757
  Gene Ontology: Mol. function=lipid binding; Biological process=lipid transport
  Homolog annotation: Hit_ID=B6TLZ4; Match level="QueryCoverage=83%, HitCoverage=83%, E-value=3e-38, Identity=64%"; Hit description=Lipid binding protein
  Pfam annotation: Domain name=Tryp_alpha_amyl; Domain location=30-102; Score=11.1; E_value=0.026; Accession=PF00234.14; Description=Protease inhibitorseed storageLTP f
MATWMAVAVVAVMGVLAPPAAAQTSSTPDCAAKLAPCAPYINTTGMPPDTCCGPIKEAVQNELKCLCGLYASPEIFKAFNINVTQALGVSKRCGLSDTTEACKGLAPTQSHPGSPSGGGKNSGHRTLSVGFPGLMSLFLALWAVLA

SEQ ID NO: 79732 - protein, 257 aa, Setaria italica
  Transcript Sequence Number=SeqID_13758
  Gene Ontology: Cellular component=extracellular region; Biological process=plant-type cell wall organization and biogenesis
  Homolog annotation: Hit_ID=B4FEH6; Match level="QueryCoverage=93%, HitCoverage=93%, E-value=1e-136, Identity=96%"; Hit description =Alpha-expansin 13
  Pfam annotation: Domain name=DPBB_1; Domain location=67-153; Score =133.5; E_value=6.9e-37; Accession=PF03330.10; Description=Rare lipoprotein A (RlpA)-like double
  Pfam annotation: Domain name=Pollen_allerg_1; Domain location=164 -241; Score=142.3; E_value=1.6e-39; Accession=PF01357.13; Description= Pollen allergen
  Pfam module annotation: Pfam domain module=DPBB_1::Pollen_allerg_1; Domain location=67-153::164-241
MAPPLLLVFLLLPALAAGHQHPSSFGSSALSEWRPAKASYYAADPEDAIGGACGFGDLGKHGYGMATVGLSTALFDRGAACGGCYEVRCVENLKYCLPGTSIVVTATNFCAPNYGLPADAGGHCNPPNHHFLLPIQAFEKIALWKAGVMPIQYRRVKCLREGGVRFSVNGRHFFFTVLISNVGGAGDVRSVKIKGTESGWLSMGRNWGQVWHINCDMRGQPLSFELSSSDGKTLTSFNVVPKDWEYGKTYTGKQFLL

SEQ ID NO: 79733 - protein, 56 aa, Setaria italica
  Transcript Sequence Number=SeqID_13759
HYSSRHLLAHTKPNSCSQKFALPCQKKMDSFGGKIVELIDSLIMSLISVGMCSSTE

SEQ ID NO: 79734 - protein, 191 aa, Setaria italica
  Transcript Sequence Number=SeqID_13760
  Gene Ontology: Mol. function=serine-type endopeptidase activity; Cellular component=polytene chromosome band; Biological process =protein modification process
  Homolog annotation: Hit_ID=Q0WRN6; Match level="QueryCoverage=80%, HitCoverage=100%, E-value=6e-59, Identity=73%"; Hit description =Polyubiquitin 4 UBQ4
  Pfam annotation: Domain name=ubiquitin; Domain location=120-188; Score=117.6; E_value=4.1e-32; Accession=PF00240.15; Description =Ubiquitin family
  Pfam annotation: Domain name=ubiquitin; Domain location=44-112; Score= 138.0; E_value=2.9e-38; Accession=PF00240.15; Description=Ubiquitin family
  Pfam module annotation: Pfam domain module=ubiquitin::ubiquitin; Domain location=120-188::44-112
QHQSSSIDPAKEPLLGLGEGERSRRKTLAGDRGQQPGEMQIFVKTLTGKTITLEVESSDTIDNVKAKIQDKEGIPPDQQRLIFAGKQLEDGRTLADYNIQKESTLHLVLRLRGGTMIKVKTLTGKEIEIDIEPTDTIDRIKERVEEKEGIPPVQQRLIYAGKQLADDKTAKDYNIEGGSVLHLVLALRGGH

SEQ ID NO: 79735 - protein, 137 aa, Setaria italica
  Transcript Sequence Number=SeqID_13761
  Gene Ontology: Mol. function=3-beta-hydroxy-delta5-steroid dehydrogenase activity; Cellular component=chloroplast envelope; Biological process=steroid biosynthetic process
  Homolog annotation: Hit_ID=A0YQG1; Match level="QueryCoverage=91%, HitCoverage=42%, E-value=3e-22, Identity=44%"; Hit description=Cell division inhibitor
ILPLTVSITGATGFIGRRLVQKLLSDDHKVCVLTRSATLHIHSVAASTYPGVTIADQGEWEACVRGSSAVVNLAGMPISTRWSPEIKQEIKRSRVNVTSKVVKYINHAGNADAQPSVFVSATAIGYYGTHIIHELAI

SEQ ID NO: 79736 - protein, 47 aa, Setaria italica
  Transcript Sequence Number=SeqID_13762
  Gene Ontology: Mol. function=3-beta-hydroxy-delta5-steroid dehydrogenase activity; Biological process=steroid biosynthetic process
MLLFQPPMTVSITGATGFIGRRLVQKLLSDDHKVCVLKRSATKAKST

SEQ ID NO: 79737 - protein, 125 aa, Setaria italica
  Transcript Sequence Number=SeqID_13763
  Gene Ontology: Mol. function=3-beta-hydroxy-delta5-steroid dehydrogenase activity; Cellular component=chloroplast envelope; Biological process=steroid biosynthetic process
  Homolog annotation: Hit_ID=A3IWN1; Match level="QueryCoverage=72%, HitCoverage=29%, E-value=2e-27, Identity=61%"; Hit description=Cell division inhibitor
  Pfam annotation: Domain name=DUF1731; Domain location=87-125; Score =52.5; E_value=1.6e-12; Accession=PF08338.3; Description=Domain of unknown function (DUF1731)
CIQLWDNTCVRVVLPTTFTDLVPYIYNELIARFSWIHLDDLVNLIYESLTNPAYKGIINGTAPNPVRLSELCERLGRIVGRPSWLPVPEFALKAVLGEGASVVLEGQKVVPVKAKDLGFSYRYPL

SEQ ID NO: 79738 - protein, 371 aa, Setaria italica
  Transcript Sequence Number=SeqID_13764
  Gene Ontology: Mol. function=3-beta-hydroxy-delta5-steroid dehydrogenase activity; Cellular component=chloroplast envelope; Biological process=steroid biosynthetic process
  Homolog annotation: Hit_ID=A3IWN1; Match level="QueryCoverage=81%, HitCoverage=98%, E-value=5e-85, Identity=50%"; Hit description=Cell division inhibitor
  Pfam annotation: Domain name=DUF1731; Domain location=321-368; Score =86.3; E_value=1.1e-22; Accession=PF08338.3; Description=Domain of unknown function (DUF1731)
  Pfam annotation: Domain name=Epimerase; Domain location=68-294; Score= 17.6; E_value=2e-08; Accession=PF01370.13; Description=NAD dependent epimerasedehydratase family
  Pfam annotation: Domain name=NAD_binding_4; Domain location=70-279; Score=-69.1; E_value=0.00014; Accession=PF07993.4; Description=Male sterility protein
  Pfam annotation: Domain name=RmlD_sub_bind; Domain location=66-369; Score=-180.0; E_value=0.033; Accession=PF04321.9; Description=RmlD substrate binding domain
  Pfam module annotation: Pfam domain module=DUF1731::Epimerase::NAD _binding_4::RmlD_sub_bind; Domain location=321-368::68-294::70 -279::66-369
  Subcellular localization annotation: CTP_CleavageSite=54; ConfidenceScore=5.55e-01
SKRYLLLLLLLPPPAAMGFPTPFLKLKPKPPIGGCSRPRPSSTAAAKRRLTRLRCALNSDNNVPPMTVSITGATGFIGRRLVQKLLSDDHKVCVLTRSATKAKSVFPASTYPGVTIADQGEWEACVRGSSAVVNLAGMPISTRWSPEIKQEIKRSRVNVTSKVVKYINHAGNADAQPSVFVSATAIGYYGTSEIHSFDESSPSGNDYLAEVCREWEATARQVNQENVRLVLLRIGVVLGKDGGALAKMIPLFMMFAGGPLGTGRQWFSWIHLDDLVNLIYESLTNPAYKGIINGTAPNPVRLSELCERLGRIVGRPSWLPVPEFALKAVLGEGASVVLEGQKVVPVKAKDLGFSYRYPYVEDALKAIAQDL

SEQ ID NO: 79739 - protein, 224 aa, Setaria italica
  misc_feature (71)..(71): Xaa can be any naturally occurring amino acid
  Transcript Sequence Number=SeqID_13765
LSFSSVESLEPIIHLTEDALNQITNYKQDFLTQQSFVRGKVEAAVRNYEQSKGCYYDLGVICGVNDRVGKXQGFSDTKFQYTHANFWASQDNGTSTLFFAEFSNDEDSNYEPICYPVCGLPTQVRCCYCEYQGIRIVHPIGSWWEGVNGFEKIACGEQYFTNTEIVGRWKLIDNRVGIFVQDYVYLDPAHDAKLIQAVNKAERVRNIDMDAEMRRRKSEPAAGH

SEQ ID NO: 79740 - protein, 557 aa, Setaria italica
  Transcript Sequence Number=SeqID_13766
  Gene Ontology: Mol. function=catalytic activity; Cellular component =peroxisome; Biological process=metabolic process
  Homolog annotation: Hit_ID=B6UD99; Match level="QueryCoverage=100%, HitCoverage=100%, E-value=0.0, Identity=89%"; Hit description=AMP -binding protein
  Pfam annotation: Domain name=AMP-binding; Domain location=41-470; Score=366.2; E_value=6e-107; Accession=PF00501.20; Description=AMP -binding enzyme
MDRLGANPANSCPLTPLGFLERSATVFGDCPSVVYHDTVFTWSQTHRRCLRLASALVSLGISRGDIVSVLLPNVPAMYEMHFGVPMSGAVLNTINTRLDARTVAVLLHHSGSKLVFADPASLPLIRDAMKQLPPGHPAPRVIPVEDPHEKEFPAAPPGTLTYERLLEKGDPEFAWVRPASEWDPMILNYTSGTTSAPKGVVHCHRGIFLVTMDSLVAWAVPPQPTYLWTLPMFHANGWSFPWGVAVVGGTNVCLRRVDATEVYATIARRGVNHLCGAPVVLNMLANAPDGVRQPLQGKVRILTAGAPPPAAVLNRTESIGFEVSHGYGLTETAGLVMSCAWKGEWNKLPASERARLKARQGVRTPGMAEVDIIDGETGRSVPRDGSTMGEIVLRGGCLMLGYLDDDKATRAAIRDDGWFYTGDVGVMHPDGYMEIRDRSKDVIISGGENISSVEVESVLYNHPAVNEAAVVARPDEFWGETPCAFLSLKEGSPGAVTASDVMAWCRERMPRYMVPKTVVFRAELPKTSTGKIQKYVLRNLAKEMGPTRKGASSSSKM

SEQ ID NO: 79741 - protein, 94 aa, Setaria italica
  Transcript Sequence Number=SeqID_13767
ILAGYHPNTVLDNKHQLCELMHAITTSSTHPSYHTWCWHPTFNFLARKQLTAFQKRNKKENNLLNTNNNVTCRTKPSFKQPRASQYRHVRFIAY

SEQ ID NO: 79742 - protein, 103 aa, Setaria italica
  Transcript Sequence Number=SeqID_13768
  Gene Ontology: Mol. function=calcium ion binding
  Homolog annotation: Hit_ID=Q9LQ24; Match level="QueryCoverage=89%, HitCoverage=11%, E-value=2e-28, Identity=60%"; Hit description =F14M2.16 protein
MNLLFAFSRYAKACGLFPIVDKDKAQSALEKIYSFNVMKFKDGTRGAMNGMWPDGTLDMSAMQSREIWPGVTYALAATMIQEGMVEQGFKTAEGIYHAAWSPE

SEQ ID NO: 79743 - protein, 950 aa, Setaria italica
  misc_feature (107)..(107): Xaa can be any naturally occurring amino acid
  Transcript Sequence Number=SeqID_13769
  Gene Ontology: Mol. function=calcium ion binding; Cellular component =integral to membrane; Biological process=sphingolipid metabolic process
  Homolog annotation: Hit_ID=Q9LQ24; Match level="QueryCoverage=84%, HitCoverage=96%, E-value=0.0, Identity=49%"; Hit description =F14M2.16 protein
  Pfam annotation: Domain name=DUF608; Domain location=529-891; Score =738.9; E_value=3.9e-219; Accession=PF04685.5; Description=Protein of unknown function, DUF608
MVENGTDEQPKGVSRNCPPAHMNGDEEKVYPGQLPVLTWEHKLTHVRHDLPSFRLTWRETRQLAGIGLRLGRHILEETSKGRVSVIDPMKKRIAKSGQGVPLGGIGXSIGRSYTGDFQRWQLFPGTCEDKPVLANQFSAFISHQDGRKYSTVLHPGKPDLPKGSEISGIGSWDWNMSGQHSTYHALYPRAWTVYDGEPDPELNIVCRQISPIIPHNYQQSSYPAAVFTFTVTNSGHTAADVTLLFTWANSVGGKSELTGYHSNSSMIEKDGVHGILLHHRTADGQPPVTFAIAAQEKEDIHISECPCFLISGNSDGFTAKDMWNSVKEHGSFDHLDPIKTSMCSKPGSSIGAAIAASLKIAPKATQDVSFSLAWACPEVKFSSGKTYHRRYTKFYGTDVDAAASLAHDAILEHTTWERQIEDWQDPILQDERFPAWYPVTLFNELYYLNAGGTIWTDGLPPIQSLTAIGGKKFSLDMLNDDDVNEMIQQNNTASDILHRMASILERMHASIASNSAIGTTLLHGEENIGQFLYLEGIEYYMWNTYDVHFYASFSLVMLFPKLQISVQRDFAAAVMMHDPEKLRILHDGKWAARKVLGAVPHDLGLYDPWFKVNAYTLYNTDRWKDLNPKFVLQVYRDVVATGDKSFARAVWPSVYMAMAYMEQFDKDKDGMIENENFPDQTYDVWSMAGISAYCGGLWVAALQAASALAREVGDEASEKLFWDKYEKAKSVYSKLWNGSYFNYDDGDNKVSTSIQADQLAGQWYAKACGLFPIVDKDKAQSALEKIYSFNVMKFKDGTRGAMNGMWPDGTLDMSAMQSREIWPGVTYALAATMIQEGMVEQGFKTAEGIYHAAWSPEGLGYSFQTPEAWNNDDEYRSLCYMRPLAIWAIQWALSNPKLHNTPQTDIAQDSFPKTQISYTRIAKLLQLPEDESSKSFVRVVYEIIQNRFWS

SEQ ID NO: 79744 - protein, 68 aa, Setaria italica
  Transcript Sequence Number=SeqID_13770
ALGIRGNTAVLGSNFFRQRKRWREIEVCLRRSTLFYGVLVGFVDHSSALQGGRWREEGEERRRGRRRA

SEQ ID NO: 79745 - protein, 87 aa, Setaria italica
  Transcript Sequence Number=SeqID_13771
NQQEVIIYTYMPCYITHHSIYIIVSRIAVNHSHTDENSISHILTQDDSCIHVQVCTEPKQKHNHCSSRTDQFTNTGTSAWLLLLEYT

SEQ ID NO: 79746 - protein, 214 aa, Setaria italica
  Transcript Sequence Number=SeqID_13772
  Gene Ontology: Cellular component=chloroplast
  Homolog annotation: Hit_ID=B9RPC2; Match level="QueryCoverage=99%, HitCoverage=60%, E-value=5e-74, Identity=67%"; Hit description=Inner membrane protein yrbE, putative
  Pfam annotation: Domain name=DUF140; Domain location=2-201; Score =271.9; E_value=1.4e-78; Accession=PF02405.8; Description=Domain of unknown function DUF140
  Subcellular localization annotation: CTP_CleavageSite=52; ConfidenceScore=5.13e-01
RGVALLTAAFVGMAFTIQFVREFTRLGLHRSVGGVLALALARELSPVVTAVVAAGRVGSAFAAELGTMQVSEQTDTLRVLGAHPVDYLVVPRVLACVLALPVLTLISFALGLASSAFLADSVFGVSVSIILESARRALRPWDLISSLLKSQVFGAIIAVVSCAWGVTTHGGAKGVGESTTSAVVVSLVGIFVADFALSCLFFQGAGDSLKYAMG

SEQ ID NO: 79747 - protein, 138 aa, Setaria italica
  Transcript Sequence Number=SeqID_13773
MQTTNNCLTIAMHCFATISQKAISPSFYQLEALYEGSVATGNLNFTSTMQVDPPSAPAPPPLVTPAVPPPAPPVERSNFEQSSSHLGANPFALSFDGQRTSNAHNERNEAQDSRQEEGGLGRKCKQSHIESPLEDMWS

SEQ ID NO: 79748 - protein, 105 aa, Setaria italica
  misc_feature (41)..(41): Xaa can be any naturally occurring amino acid
  Transcript Sequence Number=SeqID_13774
  Gene Ontology: Mol. function=transposase activity; Biological process= transposition, DNA-mediated
  Homolog annotation: Hit_ID=Q2QT97; Match level="QueryCoverage=62%, HitCoverage=8%, E-value=2e-09, Identity=44%"; Hit description =Transposon protein, putative, CACTA, En/Spm sub-class
RDAKRDSGNGWNESLCMILTEPRVWEKLIANHPKVAKFRKXPFPLFYQLEALYEGSVATGNLNFTSTMQVDPPSAPAPPAVTPPAPPIAPVISPLAPTVERSNSE

SEQ ID NO: 79749 - protein, 92 aa, Setaria italica
  Transcript Sequence Number=SeqID_13775
  Subcellular localization annotation: CTP_CleavageSite=69; ConfidenceScore=5.52e-01
NMFYTKVLWRSRFPRLPTAPGITLSHSSVNSVLTASTLPRLPRVQSQLQRFHAYLASKANLASGAWIALASHSGNTQPRALLPGPKLRSCTR

SEQ ID NO: 79750 - protein, 139 aa, Setaria italica
  Transcript Sequence Number=SeqID_13776
  Gene Ontology: Mol. function=electron carrier activity; Cellular component=extracellular region; Biological process=response to oxidative stress
  Homolog annotation: Hit_ID=A2I994; Match level="QueryCoverage=82%, HitCoverage=35%, E-value=2e-38, Identity=64%"; Hit description =Putative peroxidase
  Pfam annotation: Domain name=peroxidase; Domain location=3-137; Score= 81.2; E_value=3.7e-21; Accession=PF00141.15; Description=Peroxidase
TRLRTTAAVGGAAEKDAAPNASLGGYDVIDTAKAVLEAVCPGTVSCADIVALAARDAVSLQFGRDLWDVQLGRRDGVASRASEALAGLPSPSDNFTALEANFGAKGLDVKDLVILSGAHTIGVAHCNTFAARLLPPAPA

SEQ ID NO: 79751 - protein, 73 aa, Setaria italica
  Transcript Sequence Number=SeqID_13777
QYHLLLSHLKAVEDGVGERKGKIEGCARECVAMGMYKEKKRRKKRKRRKRLKAIATADKRGHTMILYALLSFF

SEQ ID NO: 79752 - protein, 677 aa, Setaria italica
  Transcript Sequence Number=SeqID_13778
  Gene Ontology: Mol. function=glutamine-fructose-6-phosphate transaminase (isomerizing) activity; Cellular component=cytoplasm; Biological process=carbohydrate biosynthetic process
  Homolog annotation: Hit_ID=Q2RAY0; Match level="QueryCoverage=100%, HitCoverage=100%, E-value=0.0, Identity=89%"; Hit description =Glucosamine-fructose-6-phosphate aminotransferase, isomerizing family protein, expressed
  Pfam annotation: Domain name=GATase_2; Domain location=2-257; Score =96.9; E_value=6.9e-26; Accession=PF00310.13; Description=Glutamine amidotransferases class-II
  Pfam annotation: Domain name=SIS; Domain location=356-485; Score =119.2; E_value=1.3e-32; Accession=PF01380.14; Description=SIS domain
  Pfam annotation: Domain name=SIS; Domain location=527-660; Score =89.6; E_value=1.1e-23; Accession=PF01380.14; Description=SIS domain
  Pfam module annotation: Pfam domain module=GATase_2::SIS::SIS; Domain location=2-257::356-485::527-660
MCGIFAYLNYNVSRERRYILEVLFNGLRRLEYRGYDSSGIALDADRPASSSSPSPPDAPYAGAPPLVFRQEGKIENLVRSVYSEVDEKDVNLDAAFNVHAGIAHTRWATHGVPAPRNSHPQSSGASDEFLVVHNGIITNYEVLKETLTRHGFTFESDTDTEVIPKLAKFVFDKSHDEEGDVTFSQVVMEVMRQLEGAYALIFKSPHYPNELIACKRGSTLILGVNELSGQQNGKPFHDVKALTTNGKPKELFFSSDLCAIVEHTKNYLALEDNEIVHIKDGSVSILKFDPHKEKPASVQRALSVLEMEVEQIKKGSYDHFMQKEIHEQPHSLTTTMRGRLKDGEVLLGGLKEHLKTIRRCRRVVFIGCGTSYNAALGARTFVEELTGIPVTMEVASDLLDRQGPIYREDTAVFVSQSGETADTLLALDYALENGALCVGITNTVGSTLSRKTHCGVHINAGCEIGVASTKAYTSQIVAMAMMALAIGSDQISTQARRNAIISGLTSLPSCVSEVLKLDAEMKDLASSLIDSESLLVFGRGYNYATALEGALKVKEVALMHSEGMLAGEMKHGPLALVDENLPIIVIATRDACFSKQQSVIQQLLSRKGRLIVMCSKGDASAVCSIGSCRVIEVPGVADCLQPVINIIPLQLLAYHLTVLRGFDVDQPRNLAKSVTTQ

SEQ ID NO: 79753 - protein, 48 aa, Setaria italica
  misc_feature (11)..(11): Xaa can be any naturally occurring amino acid
  Transcript Sequence Number=SeqID_13779
VIYAQVMPLSXFFVSKLLKLPAHYAAGLILVSCCPGGTASNIVTYLAR

SEQ ID NO: 79754 - protein, 104 aa, Setaria italica
  misc_feature (89)..(89): Xaa can be any naturally occurring amino acid
  misc_feature (97)..(97): Xaa can be any naturally occurring amino acid
  Transcript Sequence Number=SeqID_13780
  Homolog annotation: Hit_ID=B9SZ26; Match level="QueryCoverage=96%, HitCoverage=23%, E-value=4e-09, Identity=43%"; Hit description =Sodium-bile acid cotransporter, putative
  Subcellular localization annotation: CTP_CleavageSite=5; ConfidenceScore=5.42e-01
LPYCRANVALSVLMTAASTFAAAFMTPLLTSKLAGQYVAVDPMGLFVSTSQVVLAPVLLGALLNQYCNGLVQIVFPLCIVPFVCLVSLXVAVLCGNXIAQNASA

SEQ ID NO: 79755 - protein, 321 aa, Setaria italica
  misc_feature (69)..(69): Xaa can be any naturally occurring amino acid
  Transcript Sequence Number=SeqID_13781
  Gene Ontology: Mol. function=bile acid:sodium symporter activity; Cellular component=chloroplast; Biological process=sodium ion transport
  Homolog annotation: Hit_ID=B9SZ26; Match level="QueryCoverage=99%, HitCoverage=77%, E-value=3e-95, Identity=56%"; Hit description =Sodium-bile acid cotransporter, putative
  Pfam annotation: Domain name=SBF; Domain location=45-228; Score =165.5; E_value=1.5e-46; Accession=PF01758.8; Description=Sodium Bile acid symporter family
TGARSALVLLGEALSLGFPVWVASACAIALWRPPAFLWVGPTAQMLGLSFTMLGMGMTLTLDDLTTDLXALLMPRELSAGFILQYTVMPLSGFFVSKLLKLPAHYAAGLILVSCCPGGTASNIVTYLARANVALSVLMTAASTFAAAFMTPLLTSKLAGQYVAVDPMGLFVSTSQVVLAPVLLGALLNQYCNGLVQLVSPLMPFVAVATVAVLCGNAIAQNASAILSSGVQVVLSVGCLHGSGFFFGYVLSRILGIDTASARTISIEVGMQNSVLGVVLATKHFGNPLTAVPCAVSSICHSVYGSILAGIWRSMPPTEKRE

SEQ ID NO: 79756 - protein, 326 aa, Setaria italica
  Transcript Sequence Number=SeqID_13782
  Gene Ontology: Mol. function=nucleotide binding; Cellular component =chromosome; Biological process=chromosome organization and biogenesis
  Homolog annotation: Hit_ID=B9H079; Match level="QueryCoverage=100%, HitCoverage=27%, E-value=1e-152, Identity=78%"; Hit description =Condensin complex components subunit
  Pfam annotation: Domain name=SMC_N; Domain location=2-323; Score =120.1; E_value=7.3e-33; Accession=PF02463.11; Description =RecFRecNSMC N terminal domain
MHIKEVTLEGFKSYAGRTVVSGFDPLFNAITGLNGSGKSNILDSICFVLGITDLRQVRAASLQELVYKQGQAGVTKATVSVVFDNSDRSRSPLGYEDSSEITVTRQIVVGGRNKYLINGHLAQPSRVQTLFHSVQLNVNNPHFLIMQGRITKVLNMKPPEILSMLEEAAGTRMYEMKKESALKTLEKKQNKVDEINKLLDVEILPALEKLRKERCQYMKWANGNAELDRLKRFCIAYEFVQAERVRDGALNDVKQIRARILELDENTEKLKADIQEMDKNISTLAAEKEAKLGGEMKALSDKVDKLSHALIKETSVMNNQEETLKS

SEQ ID NO: 79757 - protein, 61 aa, Setaria italica
  Transcript Sequence Number=SeqID_13783
RRRCGTSAACSLGFHRSSAQFLSYSSFLNGACTGALLLYDLHWTCHGCHTSWLILETSTIH

SEQ ID NO: 79758 - protein, 77 aa, Setaria italica
  Transcript Sequence Number=SeqID_13784
  Subcellular localization annotation: CTP_CleavageSite=39; ConfidenceScore=5.14e-01
NLKKNTMQVSTKNCYRSSSWLLNHKTNHIPNNNPTTLKRSSNKFGEKKENDREEISFMCSWLAQRNHRTNLGFNGAS

SEQ ID NO: 79759 - protein, 54 aa, Setaria italica
  Transcript Sequence Number=SeqID_13785
MVLGLGGCCGSVAIADGRRVSPVAKQAAEGEGHLEAKKQQQQVIIKEKTKKGGE

SEQ ID NO: 79760 - protein, 77 aa, Setaria italica
  Transcript Sequence Number=SeqID_13786
  Subcellular localization annotation: CTP_CleavageSite=29; ConfidenceScore=5.17e-01
LLCVSLIFFFFFFFFCLIWHSLQVTFRSRSSKGMGESHTHRYSGLTVCISRAPSIDALLERHIPVHDQPTLHRAQNG

SEQ ID NO: 79761 - protein, 49 aa, Setaria italica
  Transcript Sequence Number=SeqID_13787
MRAARQGKPAAGGVALLVALAVWLLPAVARAQLRVGFYDTTCPNAEALV

SEQ ID NO: 79762 - protein, 153 aa, Setaria italica
  Transcript Sequence Number=SeqID_13788
  Gene Ontology: Mol. function=catalytic activity; Cellular component =chloroplast
  Homolog annotation: Hit_ID=B6T3C7; Match level="QueryCoverage=90%, HitCoverage=42%, E-value=5e-37, Identity=60%"; Hit description =Protein phosphatase 2C
TFQDALVCSVNLMDGDMIVSGSDGLFDNIFDQEIISIISESPGVDEAAKALAELARKHSVDVTFDSPYSMEARSRGFDVPWWKKLLGAKLIGGKMDDITVVVAKVKKVLVPEDEGGVIEERKVNEQGIAVAEEQKGNEPGIAVAVASAEQSEE

SEQ ID NO: 79763 - protein, 77 aa, Setaria italica
  Transcript Sequence Number=SeqID_13789
  Gene Ontology: Mol. function=deaminase activity; Biological process =purine ribonucleoside monophosphate biosynthetic process
  Homolog annotation: Hit_ID=B6TRX4; Match level="QueryCoverage=94%, HitCoverage=19%, E-value=3e-29, Identity=84%"; Hit description =Deaminase
DLYNAKHPLSLCTDDCGLFSTSLSNEYYLVAATFGLTKPELFHLAQEAVHFIFADENVKKSLKEVFKHAEKRFDDVV

SEQ ID NO: 79764 - protein, 214 aa, Setaria italica
  Transcript Sequence Number=SeqID_13790
  Gene Ontology: Mol. function=protein serine/threonine kinase activity; Cellular component=integral to membrane; Biological process=protein amino acid phosphorylation
  Homolog annotation: Hit_ID=Q30KI3; Match level="QueryCoverage=100%, HitCoverage=48%, E-value=6e-69, Identity=41%"; Hit description=RLK1 (Fragment)
  Pfam annotation: Domain name=LRR_1; Domain location=103-125; Score =7.3; E_value=12; Accession=PF00560.25; Description=Leucine Rich Repeat
  Pfam annotation: Domain name=LRR_1; Domain location=127-149; Score =14.7; E_value=0.39; Accession=PF00560.25; Description=Leucine Rich Repeat
  Pfam annotation: Domain name=LRR_1; Domain location=151-173; Score =7.9; E_value=9.5; Accession=PF00560.25; Description=Leucine Rich Repeat
  Pfam annotation: Domain name=LRR_1; Domain location=175-197; Score =16.2; E_value=0.14; Accession=PF00560.25; Description=Leucine Rich Repeat
  Pfam annotation: Domain name=LRR_1; Domain location=30-52; Score=1.9; E_value=1.3e+02; Accession=PF00560.25; Description=Leucine Rich Repeat
  Pfam annotation: Domain name=LRR_1; Domain location=54-76; Score=9.8; E_value=4; Accession=PF00560.25; Description=Leucine Rich Repeat
  Pfam annotation: Domain name=LRR_1; Domain location=6-25; Score=7.7; E_value=10; Accession=PF00560.25; Description=Leucine Rich Repeat
  Pfam annotation: Domain name=LRR_1; Domain location=78-100; Score =6.9; E_value=15; Accession=PF00560.25; Description=Leucine Rich Repeat
  Pfam module annotation: Pfam domain module=LRR_1::LRR_1::LRR_1::LRR _1::LRR_1::LRR_1::LRR_1::LRR_1; Domain location=103-125::127-149::151- 173::175-197::30-52::54-76::6-25::78-100
GVAATRLKIVDVSTNKLTGVLPSELCAGEQLETFIALGNSLFGGIPDGLAGCPSLTRIRLGENYLNGTIPAKLFTLPNLTQIELHDNLLSGELSLEAGKVSSSIGELSLFNNRLSGQVPTGIGGFVGLQKLLLAGNRLSGELPPEIGKLQQLSKADLSGNLISGEVPPAIGRCRLLTFLDLSGNKLSGRIPPELASLRILNYLNVSHNALEGEI

SEQ ID NO: 79765 - protein, 143 aa, Setaria italica
  Transcript Sequence Number=SeqID_13791
  Gene Ontology: Mol. function=hydrolase activity, hydrolyzing O -glycosyl compounds; Cellular component=cell wall; Biological process= carbohydrate metabolic process
  Homolog annotation: Hit_ID=B6TQ18; Match level="QueryCoverage=100%, HitCoverage=45%, E-value=7e-50, Identity=68%"; Hit description =Xyloglucan endotransglucosylase/hydrolase protein 1
  Pfam annotation: Domain name=XET_C; Domain location=99-143; Score =40.4; E_value=7.1e-09; Accession=PF06955.4; Description=Xyloglucan endo-transglycosylase (XET)
PAADFHDYKILWNAYQLVMFLDDTPVRVLRNLTATVPGYQFPSKPAMLIRGSVWDGSDWATDDGRAKVDWSKAPFTAAFRGFDVDAACAVRGGGGVTPCNDSAALWWNGGEYEVLSGAQRAAYEGVKKNNMVYDYCTDKLRFN

SEQ ID NO: 79766 - protein, 114 aa, Setaria italica
  misc_feature (82)..(82): Xaa can be any naturally occurring amino acid
  Transcript Sequence Number=SeqID_13792
  Gene Ontology: Cellular component=chloroplast
  Homolog annotation: Hit_ID=B6SKI6; Match level="QueryCoverage=100%, HitCoverage=61%, E-value=6e-52, Identity=52%"; Hit description=ATP binding protein
  Pfam annotation: Domain name=PPR; Domain location=24-58; Score=39.3; E_value=1.5e-08; Accession=PF01535.12; Description=PPR repeat
  Pfam annotation: Domain name=PPR; Domain location=59-93; Score=32.6; E_value=1.6e-06; Accession=PF01535.12; Description=PPR repeat
  Pfam module annotation: Pfam domain module=PPR::PPR; Domain location =24-58::59-93
AKRWGEVEELMEEMVKVDCPPNIVTFNTLIGYLCRNGLFERVHEVLAQMADHGCTPDIRMYATIIDGICKEGHLEVAHEILXRMPSYGLKPNVVCYNTVLKGLCSAERWEEAEE

SEQ ID NO: 79767 - protein, 81 aa, Setaria italica
  Transcript Sequence Number=SeqID_13793
  Gene Ontology: Mol. function=kinase activity
  Subcellular localization annotation: CTP_CleavageSite=8; ConfidenceScore=5.10e-01
QVKSTRPSIQRVTNQFDPFFWWFHSVRLRFGKIHIVLPSGKLMLLLSLLFSTIYVLRRKTAGLKRTVFQHASSLRRAFFDA

SEQ ID NO: 79768 - protein, 295 aa, Setaria italica
  Transcript Sequence Number=SeqID_13794
  Gene Ontology: Mol. function=kinase activity
  Homolog annotation: Hit_ID=Q8W4B2; Match level="QueryCoverage=98%, HitCoverage=80%, E-value=2e-27, Identity=31%"; Hit description=3 -phosphoinositide-dependent protein kinase-1, putative
AGMVLVQALKELRRTSEMFVQLKKMFGSVATVPAKVFLTGATMQMAAGSGSDLRPIFEEYLAKWRYTNDEVYVLNGGQDNPLNGFVVSSVMSTKQYLEVAELYTVTFLCIVSQESETAISWAEKAELTEQGRQDLLKKLYALRSAANKKPSTVEGVKQIAERNLSTSTNGSTPSLHEDAPSTAPVYDSQKVQVKSTRPSIQRVTNQFDPFFWWFHSVRLRFGKIHIVLPSGKLMLLLSLLFSTIYVLRRKTAGLKRTVFQHASSLRRAFFDALQLAFSVQMNPLAAVQQVPQAPR

SEQ ID NO: 79769 - protein, 544 aa, Setaria italica
  Transcript Sequence Number=SeqID_13795
  Gene Ontology: Mol. function=heat shock protein binding; Cellular component=plasma membrane
  Homolog annotation: Hit_ID=B9R7Q9; Match level="QueryCoverage=27%, HitCoverage=20%, E-value=1e-40, Identity=60%"; Hit description=Heat shock protein binding protein, putative
VVSGYLPGSSLPAPTVRRQLGEEFYKDIFPGNEAASPRRGGVGDWGDVFSVPASPGSTARPRSSFSMRFNRGTDGSMPTSLSRQTSNRNDDVTSYAYSVPTSPNASMDNYLAQGAAQQDSRKKPFSFLSRFRSQSGKKKNTSNHVSSMDSECEGTPISLESIMATDKFHFSFYKWAGKGAFLVLPATAEEKAGDIIGLRNFPQVAVQGIDLIDDEDIMSTATGASKSQQDYEDSKSGKHNTNSATKEGAIPLLFDDYMQGMKQGNDHTKNDASSASPTAKSSRSPSGEKSRSSRVKEKVKGFIKIFSPENSPKRKRAPETPDQTSVGKNGSKSELQDKFSISSLEANEDVQTAQMNNQNAFIPAPYPVNDVQERMDKPVLTDNSKTETKTDTISGSNKAASNESIHDDTKDKADNTIDHVEIDIEDLDGCVVEHVSEGDDQEKELIKVSESKIREWSRGKEGNIRSLLSTLQYVLWPGSGWKPVPLVDIIEGAAVKKAYQRALLCLHPDKLQQRGAAMHQKYIAEKVFDILQESWKEFNSVTFG

SEQ ID NO: 79770 - protein, 152 aa, Setaria italica
  Transcript Sequence Number=SeqID_13796
  Gene Ontology: Mol. function=transferase activity, transferring glycosyl groups
MKAQPLLPAPLKRRRGPRVAVLALVLCSLLVPFAFLFDRAPTGGYVTTEERHRQEVVLPLVDHVVVERKGRGGAVTGGRQDAPEKKITRGSSGVIHQHEPEKRISEGRGVIDQHKQIDGHSTNGVAKPKVLPAPKVNPSKAVGESTRDTREI

SEQ ID NO: 79771 - protein, 73 aa, Setaria italica
  Transcript Sequence Number=SeqID_13797
LQYYLLRFWMPLQRLFLLQESKERLRQASWVGNASILERLALLNDPDHPQEVVRPSQDVMPMPSGIHKKRKQM

SEQ ID NO: 79772 - protein, 771 aa, Setaria italica
  Transcript Sequence Number=SeqID_13798
  Gene Ontology: Mol. function=nucleotide binding; Cellular component =myosin complex; Biological process=signal transduction
  Homolog annotation: Hit_ID=Q5ZB07; Match level="QueryCoverage=95%, HitCoverage=96%, E-value=0.0, Identity=66%"; Hit description=Myosin heavy chain-like
  Pfam annotation: Domain name=DIL; Domain location=589-696; Score =179.7; E_value=8.2e-51; Accession=PF01843.11; Description=DIL domain
  Pfam annotation: Domain name=IQ; Domain location=112-132; Score=13.2; E_value=0.96; Accession=PF00612.19; Description=IQ calmodulin-binding motif
  Pfam annotation: Domain name=IQ; Domain location=135-155; Score=12.1; E_value=1.3; Accession=PF00612.19; Description=IQ calmodulin-binding motif
  Pfam annotation: Domain name=IQ; Domain location=87-107; Score=21.5; E_value=0.0035; Accession=PF00612.19; Description=IQ calmodulin -binding motif
  Pfam module annotation: Pfam domain module=DIL::IQ::IQ::IQ; Domain location=589-696::112-132::135-155::87-107
MDGDQRRPAAAAVVTVARAARAQDSPARRLIAWLQLLLRAFVQRYSKLASWDAAGRPVLVVLAAFVLQRSLRRRYLSWKESSRLRLRAAAVTVQAAVRAMAARRELSLRKQIRAATRIQAQWRAHRAVWSYLMTRRAALICQRSWRQSMASRELRKLRLEDLEREMLAEMCRLREMVDVLQQAVNDAETRAVNEREAARKAIAELEAAPLIKETVVMVEDTEKVNSLNAEVDRLKDLLGAEMKETFAAKKVLAEAELRNEKLARLLGVEEVKNKRLQDSLKRMEEKASNLDEENKMLRQAVASIPTIKSPSTENHEAPNIQETTDNEKTPNGAVKPIIVDREGNIHEKSAEQPSSNGNEAEKQQQELLIKCLSEDLGFSIGRPIAAYLIYRCMVHWRLFEEERTPVFDRIIQKITTALEGRDNNDTLAYWLSNSCTLLVLLRRTLKINGVAALARQRRRASPLKVPQEDEDPSHHDRPLSDGRLIGGLAEVYQVEAKYPAIAFKQQLTALLEKVYGIIRHNLKKELSPLLSLCIQAPRTFVVSPRGSCSQGTDLAQQASMAHWQSIIKILTNSLNVMKSNYVPPFLICKLFTQVFSFINVQLFNSLLLRRECCSFSNGEYLKAGLDELEHWCFWLTEEYAGSAWDELKHIRQAVTLLILEEKHSRSLSEITDDFCPALSMQQLYRISTMYCDDKYGTLGIPSEVISSMRTKMVEGSSSPSAHDDINSFLLDDDFSIPFSVDDIAKLMVHVDVADMDLPPLIQENNGTKLGH

SEQ ID NO: 79773 - protein, 69 aa, Setaria italica
  misc_feature (37)..(37): Xaa can be any naturally occurring amino acid
  misc_feature (60)..(60): Xaa can be any naturally occurring amino acid
  Transcript Sequence Number=SeqID_13799
PTSSNLRKLLPKTNQNFNFSQPHKQASYYVSLILEDXKWPVAEKLEALLKLESDSLAKFXPNLLSKTFL

SEQ ID NO: 79774 - protein, 59 aa, Setaria italica
  Transcript Sequence Number=SeqID_13800
PDTDKAAACMEVEVGSFSDPEGLEGLAHFLELLVRDCTGAHLLCICMRKQHFHMGVETT

SEQ ID NO: 79775 - protein, 62 aa, Setaria italica
  misc_feature (18)..(18): Xaa can be any naturally occurring amino acid
  misc_feature (37)..(37): Xaa can be any naturally occurring amino acid
  Transcript Sequence Number=SeqID_13801
  Gene Ontology: Mol. function=metalloendopeptidase activity; Biological process=proteolysis
  Homolog annotation: Hit_ID=Q5ZCF0; Match level="QueryCoverage=77%, HitCoverage=5%, E-value=5e-16, Identity=83%"; Hit description =Putative insulin degrading enzyme
AAACMEVEVGSFSDPEGXEGLAHFLEHMLFYASEKYXGEHEYTKYITEVHFVNQLRVAKNST

SEQ ID NO: 79776 - protein, 974 aa, Setaria italica
  misc_feature (863)..(863): Xaa can be any naturally occurring amino acid
  Transcript Sequence Number=SeqID_13802
  Gene Ontology: Mol. function=metalloendopeptidase activity; Cellular component=extracellular space; Biological process=proteolysis
  Homolog annotation: Hit_ID=Q5ZCF0; Match level="QueryCoverage=99%, HitCoverage=100%, E-value=0.0, Identity=78%"; Hit description =Putative insulin degrading enzyme
  Pfam annotation: Domain name=Peptidase_M16; Domain location=36-174; Score=175.0; E_value=2.1e-49; Accession=PF00675.12; Description =Insulinase (Peptidase family M16)
  Pfam annotation: Domain name=Peptidase_M16_C; Domain location=198 -379; Score=104.7; E_value=3.2e-28; Accession=PF05193.13; Description= Peptidase M16 inactive domain
  Pfam annotation: Domain name=Peptidase_M16_C; Domain location=666 -854; Score=42.6; E_value=1.6e-09; Accession=PF05193.13; Description =Peptidase M16 inactive domain
  Pfam module annotation: Pfam domain module=Peptidase_M16::Peptidase _M16_C::Peptidase_M16_C; Domain location=36-174::198-379::666-854
MAAAVAAPAGSRDVEFIRARSDKREYRRVVLPNALEILLISDPDTDKAAACMEVEVGSFSDPEGLEGLAHFLEHMLFYASEKYPGEHEYTKYITEHGGSYNAYTSSETTNFYFDVNVDNFEEALDRFAQFFIKPLMSQDAVLREIKAVDSEHKKNLLSDGWRMYQLQKHLASKDHPYHKFSTGSWETLETKPKGRGLDIRDELLKFYENYSANLMHLVVYGKESLDCTQGLVERMFSDIKNTDQRSFKCPSHPLSEEHLQLIVKALPIEEGDYLRIIWPITPTIQFYKEGPCHYLSHLIGHEGEGSIFHIIKELGWAMNLMAGESTDSTEYSFFSISMRLTDAGHEHVEDIVGLIFKYLLLLKEDGVHEWIFNELVAINETEFHYQDKVHPISYVTGTVSSMRLFPPEEWLVGSALPSKYAPQRIRMILDQLSPERVRIFWESKKFEGSTTSSEPWYDTPYSVENVTPPVIQKWIKKAPTEKLHIPEPNIFIPKDLSLKEVHEKVTFPTVLRKTPLSRLWYKPDLLFSTPKVHIIIDFHCPLSSHSPEAIISTDLFVDLLVDYLNAYAYDAQIAGLYYSIYLTSAGFQVSLGGYNDKMRVLLNAILKQIANFEVKPNRFSALKETSAKDYQNFNFSQPHKQASYYVSLILEDKKWPVAEKLEALLKLESDSLAKFLPNLLSKTFLECYIQGNIEPSEARSIAQEIEDTIFNTPNTMFKCISPSQYLTKRVIMLENELKCYYQIEGLNQKNENSSVIQYIQVHQDDASSNIKLQLFSLIASQPAFNQLRTVEQLGYITSLSLRSDYGVWALQVVIQSTVKDPAYLDARVDEFFKMFESKIHELSDKDFKRNVKSLIDSKLEKFXKNLWEESHFYWGEIDAGTLKFDRVESEVALLRELKKEEFIAFFDQYIKLDAPERRTISVQVFSGNHSAEFKKAVAEADPPKTYRITDIFGFKRSRPLYSSLKGGPGRITMD

SEQ ID NO: 79777 - protein, 55 aa, Setaria italica
  misc_feature (47)..(47): Xaa can be any naturally occurring amino acid
  Transcript Sequence Number=SeqID_13803
  Homolog annotation: Hit_ID=B6TK04; Match level="QueryCoverage=100%, HitCoverage=18%, E-value=4e-11, Identity=67%"; Hit description =UBA/TS-N domain
  Subcellular localization annotation: CTP_CleavageSite=15; ConfidenceScore=5.02e-01
MQGGVSGFQNAPVTRAVVVASGLLSVVFSVQRRARALGISYQDIITXIFRLWKIF

SEQ ID NO: 79778 - protein, 153 aa, Setaria italica
  misc_feature (67)..(67): Xaa can be any naturally occurring amino acid
  Transcript Sequence Number=SeqID_13804
  Homolog annotation: Hit_ID=B6TK04; Match level="QueryCoverage=79%, HitCoverage=41%, E-value=1e-50, Identity=83%"; Hit description =UBA/TS-N domain
  Subcellular localization annotation: CTP_CleavageSite=13; ConfidenceScore=5.03e-01
MSVDSIIMCSCTCCFVLFQFLSWFFVSFFLADTNYISTLASGPYGLIFASFVPFFLDIPVTSRFRIXFGVNFSDKSFIYLAGLQLLLSSWKRSLIPGIFGLVAGSLYRLNVLGIRKMKIPQVISSFFARYFAPSPGSTSRPSRSLVGNTPSKQ

SEQ ID NO: 79779 - protein, 89 aa, Setaria italica
  misc_feature (49)..(49): Xaa can be any naturally occurring amino acid
  Transcript Sequence Number=SeqID_13805
TVDLEGDIKQLQIMVETVVRVVILSVHLGMQPVPSSMACQRSCSTSVQXDCASSRMVCCHIDVISALISACLASLPSKPIETSIATEDS

SEQ ID NO: 79780 - protein, 293 aa, Setaria italica
  misc_feature (37)..(37): Xaa can be any naturally occurring amino acid
  Transcript Sequence Number=SeqID_13806
  Gene Ontology: Cellular component=integral to membrane
  Homolog annotation: Hit_ID=B6TK04; Match level="QueryCoverage=96%, HitCoverage=97%, E-value=1e-124, Identity=79%"; Hit description =UBA/TS-N domain
  Pfam annotation: Domain name=Rhomboid; Domain location=45-196; Score=- 25.9; E_value=0.042; Accession=PF01694.14; Description=Rhomboid family
  Pfam annotation: Domain name=UBA; Domain location=251-287; Score =43.4; E_value=9e-10; Accession=PF00627.23; Description=UBATS-N domain
  Pfam module annotation: Pfam domain module=Rhomboid::UBA; Domain location=45-196::251-287
MHLLFRSLPENAPVTRAVVVASGLLSVVFSVQRRARXLGISYQDIITNFRLWKIFPAVFAFQSTPELMFGLYLLYYFRVFERQIGSNKYSVFCLFTITVSSLLEILSLVILKDTNYISTLASGPYGLIFASFVPFFLDIPVTSRFRIFGVNFSDKSFIYLAGLQLLLSSWKRSLIPGIFGLVAGSLYRLNVLGIRKMKIPQVISSFFARYFAPSPGSTSRPSRSLVGNTPSQTGRSVQNQSSTGFAPIVEPPESSVAMLVSMGFDGNDARQALMRARNDINVATNILLEAQSR

SEQ ID NO: 79781 - protein, 233 aa, Setaria italica
  Transcript Sequence Number=SeqID_13807
  Homolog annotation: Hit_ID=B6TKP2; Match level="QueryCoverage=100%, HitCoverage=100%, E-value=1e-106, Identity=84%"; Hit description=SAT5
  Pfam annotation: Domain name=PLAC8; Domain location=64-203; Score =157.4; E_value=4.2e-44; Accession=PF04749.9; Description=PLAC8 family
MGAAATNHEEESSPLLPAAVGAAVPADEKPPRAPAPEATKLYADGVPVVMGEPVAAHAIPRESWNSGILSCLGRNDEFCSSDLEVCLLGSVAPCVLYGSNVERLAAGQSTFANSCLPYTGLFMLGNSLFGWNCLAPWFSHPTRTAIRRRYNLEGSFEAFTRQCGCCGGLVEDEERREHLEVACDLATHYLCHPCALCQEGRELRRRAPHPGFNNGRSVFVMMPPMEQTMGRGM

SEQ ID NO: 79782 - protein, 182 aa, Setaria italica
  Transcript Sequence Number=SeqID_13808
  Gene Ontology: Mol. function=calcium ion binding
  Homolog annotation: Hit_ID=B6TEB1; Match level="QueryCoverage=70%, HitCoverage=82%, E-value=3e-51, Identity=83%"; Hit description=EF hand family protein
  Pfam annotation: Domain name=efhand; Domain location=45-73; Score =24.6; E_value=0.00042; Accession=PF00036.24; Description=EF hand
  Pfam annotation: Domain name=efhand; Domain location=96-124; Score =24.0; E_value=0.00061; Accession=PF00036.24; Description=EF hand
  Pfam module annotation: Pfam domain module=efhand::efhand; Domain location=45-73::96-124
LKAPRERERKRERGTPAPRAAMSVVILDGSTVRAFVADEAAFARSVDTRFAALDANGDGVLSRAELRRALESFRLLDGDGFGSAEPAPLPAEVAALYDAVFEQFDADHSGAVDRAEFRDEMRRIMLAVAEGLGSQPLQVAVDDEGGSFLLEAAQHEAKAIAAKVDAERKAAAADADAAAAAK

SEQ ID NO: 79783 - protein, 67 aa, Setaria italica
  misc_feature (39)..(39): Xaa can be any naturally occurring amino acid
  Transcript Sequence Number=SeqID_13809
  Subcellular localization annotation: CTP_CleavageSite=44; ConfidenceScore=5.70e-01
DPTPLVRSTPPTTTTTARAAPPPPEQRRRPCTASRPPQXSPPLSAAAPTAPPPRPAPATPPGRQCPS

SEQ ID NO: 79784 - protein, 84 aa, Setaria italica
  Transcript Sequence Number=SeqID_13810
MNGAEEEQPPQVSNMSKMQDTAPKPSLGKEPIPGSELWTDGLICAFELVKGHRKTVHHKSWPTIDQMQEKGSTMYTRKHSRRNG

SEQ ID NO: 79785 - protein, 125 aa, Setaria italica
  Transcript Sequence Number=SeqID_13811
  Homolog annotation: Hit_ID=B6SPS8; Match level="QueryCoverage=58%, HitCoverage=10%, E-value=1e-12, Identity=57%"; Hit description=Salt -inducible protein
  Subcellular localization annotation: CTP_CleavageSite=39; ConfidenceScore=5.71e-01
MAPPTAASASASASAFLFLSPPRSRSHLKPRPRPIATILCSSATSSSTRSLSEQLEPLTRTLLHDKPTPIAADRPTPEPTWVNPSRPKPTVLSLRRQRRRSPSAHPSSAPLQPLLRAIRALPEDA

SEQ ID NO: 79786 - protein, 508 aa, Setaria italica
  misc_feature (6)..(6): Xaa can be any naturally occurring amino acid
  Transcript Sequence Number=SeqID_13812
  Gene Ontology: Mol. function=protein kinase activity; Cellular component=centrosome; Biological process=protein amino acid phosphorylation
  Homolog annotation: Hit_ID=B9S4F4; Match level="QueryCoverage=100%, HitCoverage=60%, E-value=1e-158, Identity=63%"; Hit description=ATP binding protein, putative
  Pfam annotation: Domain name=HEAT; Domain location=120-156; Score =13.6; E_value=0.85; Accession=PF02985.14; Description=HEAT repeat
  Pfam annotation: Domain name=HEAT; Domain location=199-235; Score =21.5; E_value=0.0035; Accession=PF02985.14; Description=HEAT repeat
  Pfam annotation: Domain name=HEAT; Domain location=43-78; Score=10.7; E_value=2.4; Accession=PF02985.14; Description=HEAT repeat
  Pfam annotation: Domain name=HEAT; Domain location=81-117; Score =17.3; E_value=0.064; Accession=PF02985.14; Description=HEAT repeat
  Pfam module annotation: Pfam domain module=HEAT::HEAT::HEAT::HEAT; Domain location=120-156::199-235::43-78::81-117
LPREIXVLKKLLPVLASSLEFGSAAAPALTVLLKMGSWLPADQFSIKVLPTIVKLFASNDRAIRACLLQHIDQFGESLSAQTVDEQVFPHVATGFSDTTVSIRELTLKSMLVLAPKLSQRTISGSLLKYLSKLQVDEDPGIRTNTTILLGNIASHMNDGTRKRVLINAFTVRALRDTFPPARAAGIMALSVTSSYYEMTEIATRILPNVVVLTFDPDSDVRTKAFQATDQFLQIAKQHHQKLTTGDMMVAESTSVQLKPGNASLLGWAMSSITQKGKPSDHGSISTANASNSQVSATSAATPGIGTQASTVGHAPSTSSSLDHAAPASARSSVDGWGELDDGNIHEENGSDKEGWDDVDPFDDKPSPSLLSNIQAAQKRPVVQPKQAAATSAKSHQLKAPKSEDDPLWGPIAAAPPKSASKSADVKPSTSHNDEDDLWGTIAAPAPKSSGKPLKAAAANSDDIWGSIAAPPPSTKARPLASSGRGRGTKPAQPKLGAQRIGRTSSTGM

SEQ ID NO: 79787 - protein, 423 aa, Setaria italica
  misc_feature (52)..(52): Xaa can be any naturally occurring amino acid
  Transcript Sequence Number=SeqID_13813
  Gene Ontology: Mol. function=protein kinase activity; Cellular component=centrosome; Biological process=protein amino acid phosphorylation
  Homolog annotation: Hit_ID=Q5QLZ4; Match level="QueryCoverage=99%, HitCoverage=95%, E-value=0.0, Identity=94%"; Hit description =Putative kinase-like protein splice variant 1
  Pfam annotation: Domain name=Pkinase; Domain location=21-284; Score= -89.2; E_value=0.0035; Accession=PF00069.17; Description=Protein kinase domain
MFKFLKEVVAGSGSGLKDFPYTIGEPYASAWGSWTHHRGTSKDDGSPVSIFXLSGSNPQDRHLVAGRNGVKRLRTVRHPNILSFLHSTESEVPDGPAMKHTIYIVTEPVMPLSEKLKELNLGGTQRDEYFAWGLHQISKAVSFLNNDCKLVHGNVCLASVVVTQTLDWKLHAFDVLSEFDANNEVSGSPMLQFEWLVGTQYKPMELTKSDWASIRKSPPWAIDSWGLGCLIYELFSGAKLARTEDLRNIASIPKSLLPDYQRLLNSTPSRRLNPSKLIDNSEFFQNKLVETIQFMEVLNLKDSVEKDSFFRKLPNIAEQLPREIVLKKLLPVLASSLEFGSAAAPALTVLLKMGSWLPADQFSIKVLPTIVKLFASNDRAIRACLLQHIDQFGESLSAQTVDEQVFPHVATGFSDTTVSIREN

SEQ ID NO: 79788 - protein, 110 aa, Setaria italica
  Transcript Sequence Number=SeqID_13814
  Subcellular localization annotation: CTP_CleavageSite=50; ConfidenceScore=5.44e-01
MQAAARARNGSVEHPTRTSSQGSNKAGRTGRLAESPTGLSLKVDRRSPMSAEREKRRPPTTKLSELESQLSQLQDELKKAKEQLHSSEVSRKRALQEADDARAQVRPSVV

SEQ ID NO: 79789 - protein, 171 aa, Setaria italica
  misc_feature (91)..(91): Xaa can be any naturally occurring amino acid
  Transcript Sequence Number=SeqID_13815
NKDQNLGKNGLDTPDASEEHEDEHHLSTEREKITDLKRRKHGRLNNSLQKKANRLKYIGSTKAIKVGKHRDIKKLPLHSILKKYTKHTSVXKMVKEKHGNSKGPGVIELCRKSVKRVKFSEANGALGSKKQCSKRPQLESICQLLSDAMNSSSSSSIEMSSEEEHIIAESS

SEQ ID NO: 79790 - protein, 143 aa, Setaria italica
  Transcript Sequence Number=SeqID_13816
  Gene Ontology: Mol. function=P-P-bond-hydrolysis-driven protein transmembrane transporter activity; Cellular component=integral to membrane; Biological process=protein transport
  Homolog annotation: Hit_ID=Q9LDA2; Match level="QueryCoverage=94%, HitCoverage=52%, E-value=5e-36, Identity=66%"; Hit description =HCF106C protein
  Pfam annotation: Domain name=MttA_Hcf106; Domain location=81-143; Score=96.6; E_value=8.9e-26; Accession=PF02416.8; Description =mttAHcf106 family
  Subcellular localization annotation: CTP_CleavageSite=75; ConfidenceScore=5.43e-01
MTPTASLLPAPPFVSISDARRLRKKKKKKKKKKLLPCGRCRPRLRCGGTEWGSVRTQMLSSFVGSRRSSRRSVICASLFGVGAPEALVIGVVALLVFGPKGLAEVARNLGKTLRAFQPTIRELQDVSREFRSTLETKKIRKLE

SEQ ID NO: 79791 - protein, 57 aa, Setaria italica
  Transcript Sequence Number=SeqID_13817
HKDYWSHLLTCLQVARNLGKTLRAFQPTIRELQVGSWFIVAICLMILLRNVIGFSVT

SEQ ID NO: 79792 - protein, 242 aa, Setaria italica
  Transcript Sequence Number=SeqID_13818
  Gene Ontology: Mol. function=P-P-bond-hydrolysis-driven protein transmembrane transporter activity; Cellular component=integral to membrane; Biological process=protein transport
  Homolog annotation: Hit_ID=Q9LDA2; Match level="QueryCoverage=100%, HitCoverage=100%, E-value=4e-65, Identity=60%"; Hit description =HCF106C protein
  Pfam annotation: Domain name=MttA_Hcf106; Domain location=71-153; Score=135.0; E_value=2.4e-37; Accession=PF02416.8; Description =mttAHcf106 family
  Subcellular localization annotation: CTP_CleavageSite=45; ConfidenceScore=5.64e-01
MTPTASLLPAPPFVSISDARRLQLLPCGRCRPRLRCGGTEWGSVRTQMLSSFVGSRRSSRRSVICASLFGVGAPEALVIGVVALLVFGPKGLAEVARNLGKTLRAFQPTIRELQDVSREFRSTLEREIGIDEVPPSSNYRPTTTNINQQPAADPNAKPETAPYTSEELMKVTEEQIAASAAAAWNTQPASSQQQEAAPTTQSTDTATSGGNDGPAAPAPAPVAATESDASQAKQSEKADTER

SEQ ID NO: 79793 - protein, 49 aa, Setaria italica
  Transcript Sequence Number=SeqID_13819
  Gene Ontology: Mol. function=glutamate-5-semialdehyde dehydrogenase activity; Cellular component=cytoplasm; Biological process=amino acid biosynthetic process
  Homolog annotation: Hit_ID=B6SKV1; Match level="QueryCoverage=100%, HitCoverage=6%, E-value=3e-20, Identity=95%"; Hit description=Delta 1-pyrroline-5-carboxylate synthetase
VGISTGRIHARGPVGVDGLLTTRCILRGSGQVVNGDKGVVYTHRDLPLQ

SEQ ID NO: 79794 - protein, 309 aa, Setaria italica
  Transcript Sequence Number=SeqID_13820
  Gene Ontology: Mol. function=glutamate-5-semialdehyde dehydrogenase activity; Cellular component=cytoplasm; Biological process=amino acid biosynthetic process
  Homolog annotation: Hit_ID=B6SKV1; Match level="QueryCoverage=91%, HitCoverage=38%, E-value=1e-141, Identity=87%"; Hit description =Delta 1-pyrroline-5-carboxylate synthetase
  Pfam annotation: Domain name=AA_kinase; Domain location=1-203; Score =81.8; E_value=2.5e-21; Accession=PF00696.20; Description=Amino acid kinase family
VTSGAVGVGRQRLQYRKLIHSSFADLQNPQMDFDGKACAAVGQSGLMAIYDTMFSQLDVTSSQLLVTDRDFKDPSFGDQLRETVFALLDLKVIPLFNENDAISTRRQPYEDPSGIFWDNDSLAALLAAELNADLLIMLSDVEGLYSGPPSDPQSKIIHTYVNEKHGKLISFGEKSRVGRGGMQAKVFAAANAASKGVPVVIASGFATDSIIKVLKGEKIGTLFHNEANLWECSKEATAREMAVAARDCSRRLQKLSSEERKKILLDIADALEANEDAIRSSMSAIARMDLARFVIFPGFRVILAINDFS

SEQ ID NO: 79795 - protein, 182 aa, Setaria italica
  Transcript Sequence Number=SeqID_13821
  Gene Ontology: Mol. function=glutamate-5-semialdehyde dehydrogenase activity; Cellular component=cytoplasm; Biological process=amino acid biosynthetic process
  Homolog annotation: Hit_ID=B6SKV1; Match level="QueryCoverage=100%, HitCoverage=24%, E-value=2e-99, Identity=93%"; Hit description=Delta 1-pyrroline-5-carboxylate synthetase
AKVDYPAACNAMETLLIHKDLSKSEGLDDLLVELEKEGVVIYGGPIAHDKLKLPKVDSFRHEYSSMACTLEFVDDVHSAIDHINRYGSAHTDCIITTDEKAAESFLQQVDSAAVFHNASTRFCDGTRFGLGAEVGISTGRIHARGPVGVDGLLTTRCILRGSGQVVNGDKGVVYTHRDLPLQ

SEQ ID NO: 79796 - protein, 727 aa, Setaria italica
  Transcript Sequence Number=SeqID_13822
  Gene Ontology: Mol. function=glutamate-5-semialdehyde dehydrogenase activity; Cellular component=cytoplasm; Biological process=amino acid biosynthetic process
  Homolog annotation: Hit_ID=B6SKV1; Match level="QueryCoverage=98%, HitCoverage=97%, E-value=0.0, Identity=89%"; Hit description=Delta 1- pyrroline-5-carboxylate synthetase
  Pfam annotation: Domain name=AA_kinase; Domain location=26-271; Score= 198.9; E_value=1.4e-56; Accession=PF00696.20; Description=Amino acid kinase family
  Pfam annotation: Domain name=Aldedh; Domain location=278-681; Score= -248.2; E_value=4.8e-06; Accession=PF00171.14; Description=Aldehyde dehydrogenase family
  Pfam module annotation: Pfam domain module=AA_kinase::Aldedh; Domain location=26-271::278-681
MGRGGIGGAVAMETADSTRAFVKDVKRIIIKVGTAVVTGQNGRLAMGRLGSLCEQVKQLNFQGYEVILVTSGAVGVGRQRLQYRKLIHSSFADLQNPQMDFDGKACAAVGQSGLMAIYDTMFSQLDVTSSQLLVTDRDFKDPSFGDQLRETVFALLDLKVIPLFNENDAISTRRQPYEDPSGIFWDNDSLAALLAAELNADLLIMLSDVEGLYSGPPSDPQSKIIHTYVNEKHGKLISFGEKSRVGRGGMQAKVFAAANAASKGVPVVIASGFATDSIIKVLKGEKIGTLFHNEANLWECSKEATAREMAVAARDCSRRLQKLSSEERKKILLDIADALEANEDAIRSENEADVEAAQGAGYEKSLIARMTLKPGKITNLARSIRAIADMEDPISHTLKRTEVAKDLVFEKAYCPLGVLLIIFESRPDALVQIATLAIRSGNGLLLKGGKEAMRSNAILHKVITGVIPDAVGKKLIGLVTSKDEIADLLALDDVIDLVIPRGSKNLVSQIKATTKIPVLGHADGICHVYIDKSADMDMAKRIVLDAKVDYPAACNAMETLLIHKDLSKSEGLDDLLVELEKEGVVIYGGPIAHDKLKLPKVDSFRHEYSSMACTLEFVDDVHSAIDHINRYGSAHTDCIITTDEKAAESFLQQVDSAAVFHNASTRFCDGTRFGLGAEVGISTGRIHARGPVGVDGLLTTRCILRGSGQVVNGDKGVVYTHRDLPLQ

SEQ ID NO: 79797 - protein, 83 aa, Setaria italica
  Transcript Sequence Number=SeqID_13823
  Gene Ontology: Mol. function=binding
  Homolog annotation: Hit_ID=UPI0000162BA0; Match level="QueryCoverage =62%, HitCoverage=1%, E-value=6e-16, Identity=71%"; Hit description =FAT domain-containing protein / phosphatidylinositol 3- and 4-kinase family protein
QDNEDNALLAIRIVFDLLRNFRPTVEAEVQPFLDFVVDIYRKFSSTVSYFFDNPNTSVSMAASMPMQHLDPTTDAPGMMQVAG

SEQ ID NO: 79798 - protein, 71 aa, Setaria italica
  Transcript Sequence Number=SeqID_13824
RPLMRDKCGEKNASPWWSSDNVSATKQLRIQCKCNLEPKKLPSSCILLDGWLQYTCPSTQYSNFLSVYIFL

SEQ ID NO: 79799 - protein, 67 aa, Setaria italica
  Transcript Sequence Number=SeqID_13825
  Gene Ontology: Mol. function=zinc ion binding
  Homolog annotation: Hit_ID=Q7X9C0; Match level="QueryCoverage=71%, HitCoverage=4%, E-value=3e-15, Identity=75%"; Hit description=NIN -like protein 2
TTGAFQLKYKDDEDEWVILASDSDLQECVDILDSIGSRNVKLQVRDLPCLISSSGSSSCLQVTGRET

SEQ ID NO: 79800 - protein, 346 aa, Setaria italica
  Transcript Sequence Number=SeqID_13826
  Gene Ontology: Mol. function=protein serine/threonine kinase activity; Cellular component=plasma membrane; Biological process =protein amino acid phosphorylation
  Homolog annotation: Hit_ID=B9RP41; Match level="QueryCoverage=100%, HitCoverage=44%, E-value=6e-88, Identity=46%"; Hit description=S -receptor kinase, putative
  Pfam annotation: Domain name=B_lectin; Domain location=39-145; Score =81.3; E_value=3.4e-21; Accession=PF01453.16; Description=D-mannose binding lectin
  Pfam annotation: Domain name=PAN_2; Domain location=286-337; Score= -17.6; E_value=0.1; Accession=PF08276.3; Description=PAN-like domain
  Pfam module annotation: Pfam domain module=B_lectin::PAN_2; Domain location=39-145::286-337
  Subcellular localization annotation: CTP_CleavageSite=43; ConfidenceScore=5.23e-01
IDNNGIFLLSNGSVFGFGFVTNSVSDTMSYLLAVVHLATTSIVWSANANSPVSHSDNFVFDKDGNAYLQSGGSTIWTANISGKGATSMQLLDSGNLIVFGKDSSSPLWQSFSHPTDTLLSGQSFIEGMTLVSHSNTQNMTYTLQIKSGDMMLYAGLQMPQPYWSALKDNRMIVDKNDNNIYSANLSSSSWSFYDQSGLLQSQLVIVQQGAANTTLAAVLGNDGLITFYMLQSVSSRSTLPTTVPQDSCDMPAHCKPYTICNSGTGCQCPSALSSYANCNPGIKSPCNSKDKFQLAQLDSGVGYVGTSFTSPVPKTNLTGCKNACMGNCSCIAIFFDQMSGNCFHFD

SEQ ID NO: 79801 - protein, 217 aa, Setaria italica
  misc_feature (193)..(193): Xaa can be any naturally occurring amino acid
  Transcript Sequence Number=SeqID_13827
  Gene Ontology: Mol. function=phosphatidylinositol phosphate kinase activity; Biological process=phosphatidylinositol metabolic process
  Homolog annotation: Hit_ID=Q2QVA9; Match level="QueryCoverage=100%, HitCoverage=14%, E-value=5e-51, Identity=50%"; Hit description =Phosphatidylinositol-4-phosphate 5-Kinase family protein, expressed
FLEGFPRPLGCTILLKGATREELKKIKRVLHFTVFAAYHLILETSFFADQKLFTTDKITTGKQKCFKTNPQLLGPCYDSSKNTDTMKHSTPTCDDQYANQEKLIHTEKSIPLHLHDSKIMVPEDPASEKHIDSKGVQSYSPLPVMDPSTTFMQDTSSSDCAESNTCDGFDGSTFTNNSKEVQKFQEAVDGNFXGSGAALNTQDILISMSSQHIKNKA

SEQ ID NO: 79802 - protein, 216 aa, Setaria italica
  Transcript Sequence Number=SeqID_13828
  Subcellular localization annotation: CTP_CleavageSite=41; ConfidenceScore=5.09e-01
MGAAGLPAPGWVVQQFGHSADIKMFGSNMALHRTYKAFCFRCFATNGRGFGADSTNKRKIKSKKRPKDVGVEPSKVISGNPKNMDQWVPELRTGSENRSGKQVLDKKFLEKVEAVKRSALEKKKAEENKDYQAIDYDAPIESDKSTIGFGTRVGIGVAVVVFGLVFAFGDFLPYGSVSPSKESAVVKQKLSQEEEAKFKGALQGFEATLSKSPNDP

SEQ ID NO: 79803 - protein, 190 aa, Setaria italica
  Transcript Sequence Number=SeqID_13829
  Gene Ontology: Mol. function=binding
  Homolog annotation: Hit_ID=B2IUJ0; Match level="QueryCoverage=89%, HitCoverage=47%, E-value=3e-14, Identity=29%"; Hit description =Tetratricopeptide TPR_2 repeat protein
  Pfam annotation: Domain name=TPR_1; Domain location=112-145; Score =1.9; E_value=3.5; Accession=PF00515.20; Description=Tetratricopeptide repeat
  Pfam annotation: Domain name=TPR_1; Domain location=146-179; Score =0.8; E_value=4.7; Accession=PF00515.20; Description=Tetratricopeptide repeat
  Pfam annotation: Domain name=TPR_1; Domain location=19-52; Score =12.1; E_value=0.21; Accession=PF00515.20; Description=Tetratricopepti de repeat
  Pfam annotation: Domain name=TPR_2; Domain location=112-145; Score =1.1; E_value=25; Accession=PF07719.9; Description=Tetratricopeptide repeat
  Pfam annotation: Domain name=TPR_2; Domain location=146-179; Score =5.1; E_value=8; Accession=PF07719.9; Description=Tetratricopeptide repeat
  Pfam annotation: Domain name=TPR_2; Domain location=19-52; Score =17.1; E_value=0.071; Accession=PF07719.9; Description=Tetratricopepti de repeat
  Pfam module annotation: Pfam domain module=TPR_1::TPR_1::TPR_1::TPR _2::TPR_2::TPR_2; Domain location=112-145::146-179::19-52::112 -145::146-179::19-52
HEKASTFLEKLVKVIPDKAEAYRLLGEVKFELKDYEGSSSSYRSALSSSDNIDFEVLRGLTNALLAAKKPDQAVDVILSCRQKLSEKSQTRLADLEAANDNGGQKPQDIDPIQVDLLLGKAYSDWGHISDAVSVYDKLITEHPEDFRGYLAKGIILKENGKEGDAERMFIQAKFFAPEAAKALVDRYAQR

SEQ ID NO: 79804 - protein, 430 aa, Setaria italica
  Transcript Sequence Number=SeqID_13830
  Gene Ontology: Mol. function=metal ion binding; Cellular component =nucleus; Biological process=regulation of transcription, DNA -dependent
  Homolog annotation: Hit_ID=Q75LH6; Match level="QueryCoverage=94%, HitCoverage=42%, E-value=1e-141, Identity=64%"; Hit description =Squamosa promoter-binding-like protein 6
  Pfam annotation: Domain name=SBP; Domain location=150-228; Score =180.5; E_value=4.7e-51; Accession=PF03110.6; Description=SBP domain
MEAARLGAQSSHLYGGGLGELDLNRRESRVFGWDLNDWSWDSEGFVATPVPTAAAHGSGLNSSPSSSEEAEAEVARNGLGGDSDKRKRVVVIDDDDREDQDAIVNGGGSLSLRIGGNAVGAGAMEGGDVNEDERNGKKIRVQGGSSSGPSCQVEGCGADLTAAKDYHRRHKVCEMHAKASTAVVGNTVQRFCQQCSRFHLLQEFDEGKRSCRRRLAGHNRRRRKTRPDITIGGAASIEDKVSNYLLLSLIGICANLNSDSVQHSNSQELLSTLLKNLGSVAKSLEPKELCKLLEAYQSLQNGSNAGTSGTANAAEEAAGPSNSQLPFVNGSHRGQASSSAVPVQSKATIVVTPEPTSCKLKDFDLNDTCHDTEGFEDGQEGSPPPPFKAADSPNCASWMQQDSNQSPPQTSGNSDSTSTQSLSSSNGDEL

SEQ ID NO: 79805 - protein, 84 aa, Setaria italica
  Transcript Sequence Number=SeqID_13831
  Subcellular localization annotation: CTP_CleavageSite=55; ConfidenceScore=5.46e-01
QGRVCILVTVLGPSRSSISIRVLKLYTPPSPVQCSPKCVFILSMPRLPATSSSILCTAWAPRIFRKFWGQTRRNCVHAEYYYTP

SEQ ID NO: 79806 - protein, 54 aa, Setaria italica
  Transcript Sequence Number=SeqID_13832
FLNTSFSSSVQEYSASTLLDITKPLNILNDYYSAPTFFLDYVCLECIFIILCWG

SEQ ID NO: 79807 - protein, 495 aa, Setaria italica
  Transcript Sequence Number=SeqID_13833
  Gene Ontology: Mol. function=tRNA (guanine-N2-)-methyltransferase activity; Biological process=tRNA processing
  Homolog annotation: Hit_ID=Q9LFU5; Match level="QueryCoverage=97%, HitCoverage=81%, E-value=0.0, Identity=72%"; Hit description =Probable N(2),N(2)-dimethylguanosine tRNA methyltransferase 1
  Pfam annotation: Domain name=Cons_hypoth95; Domain location=17-146; Score=-65.4; E_value=0.028; Accession=PF03602.7; Description =Conserved hypothetical protein 95
  Pfam annotation: Domain name=TRM; Domain location=6-367; Score=429.2; E_value=6.7e-126; Accession=PF02005.8; Description=N2,N2 -dimethylguanosine tRNA methyltransferase
  Pfam module annotation: Pfam domain module=Cons_hypoth95::TRM; Domain location=17-146::6-367
IECDQKEATKTPSWKVTRELKPPLVLEALAASGLRSLRYAREVDGLGKVVALDNDKASVESCKRNIKFNGASATNKVEAHLADARVYMLTHPKEFDVVDLDPYGSPSIFLDSAVQAVADGGLLMCTATDMAVLCGTNGEVCYSKYGSYPTKGKYCHEMALRILLASIESHANRYKRYIVPVLSVFMDFYVRVFVRVYTSASEIKNTPLKLSYIYQCVGCDSFHLQCLGRTVSKNNSVKHAPAIGPAVSQECSDCGKKFNVGGPIWSAPIHDQDWVVSTLTGVKSMKDRYPAYYKITSVLTTVSEELHDIPLFFSLHNIAGTVKCTSPSLVMFRSAVLNAGYRISSTHVNPLGVKSDAPWDVIWDIMRCWVKNHPIKEQPRDSPGTAILSKPPTLEANFSRAVAALSKAQAKKVKRFLPNPERHWGPKVRAGRKITSKHVSLLGPEAINAALNGAVRHEDGNGAAPDKAAPESEGLKDVPSTKRQKISDDEQANEP

SEQ ID NO: 79808 - protein, 179 aa, Setaria italica
  misc_feature (27)..(27): Xaa can be any naturally occurring amino acid
  Transcript Sequence Number=SeqID_13834
  Gene Ontology: Mol. function=pseudouridine synthase activity; Biological process=tRNA pseudouridine synthesis
  Homolog annotation: Hit_ID=Q5ZBZ5; Match level="QueryCoverage=86%, HitCoverage=24%, E-value=5e-41, Identity=57%"; Hit description =Potential U2 snRNA pseudouridine synthase-like
CSSQAMFPGNEVAEIYHEMAKKFSFVXDGISLMENAHGVKEFSITSMKGGYRRVFQRPIDFQWELMTYTDDSSSLAETDLDVLSRIKPKEANELVTTDQSQDKLEKDSDTSTPTNGSDSLENKPTGSPDTAPRKMAIKLVFTLPASCYATMAIRELLKNLLNLTKLRTNKINKRKKQTN

SEQ ID NO: 79809 - protein, 552 aa, Setaria italica
  Transcript Sequence Number=SeqID_13835
  Gene Ontology: Mol. function=pseudouridine synthase activity; Cellular component=nucleus; Biological process=tRNA pseudouridine synthesis
  Homolog annotation: Hit_ID=B9RER1; Match level="QueryCoverage=99%, HitCoverage=75%, E-value=1e-175, Identity=55%"; Hit description=tRNA pseudouridine synthase d, putative
  Pfam annotation: Domain name=TruD; Domain location=37-542; Score =238.5; E_value=1.7e-68; Accession=PF01142.10; Description=tRNA pseudouridine synthase D (TruD)
FKFLVTDTVEHSDGIQRCIRVRLGSGAGGGRGGGGGGRGKGRKRKNMGGSDWRDDRPFDSRGSSNWSDSVGKFLRFHLYKENKDTQEALGIIGKMLGLQPRSFGFAGTKDKRAVTLQQVTVFKVQANRLATLNNRLFGIKVGNFCYVKEGLVLGQLMGNQFTITLRGVIAESEDVIKAAADGLGKNGFINYYGLQRFGSGSIPTHLVGAALLRGEWKAAVNLILDPREGERDDINEVRKHYKEHGDIDKALRNFPRHLVAERAILQCLKKCPGNYLQALKGIPRTLRMMYVHSYQSYLWNHAASMRVEKYGMSQVVEGDLVYNKESPPEESTSVDIAETDDGHTNSSEIDLCSEAQPEETIQSVKIVDSGDLLKGMYTFDDVVLPLPGSQAMFPGNEVAEIYHEMAKKDGISLMENAHGVKEFSITSMKGGYRRVFQRPIDFQWELMTYTDDSSSLAETDLDVLSRIKPKEANELVTTDQSQDKLEKDSDTSTPTNGSDSLENKPTGSPDTAPRKMAIKLVFTLPASCYATMAIRELLKTSTSVAYQKTLSC

SEQ ID NO: 79810 - protein, 412 aa, Setaria italica
  Transcript Sequence Number=SeqID_13836
  Gene Ontology: Mol. function=aspartic-type endopeptidase activity; Cellular component=anchored to membrane; Biological process =proteolysis
  Homolog annotation: Hit_ID=B4FFQ6; Match level="QueryCoverage=100%, HitCoverage=79%, E-value=0.0, Identity=83%"; Hit description=Pepsin A
  Pfam annotation: Domain name=Asp; Domain location=1-337; Score=-91.2; E_value=3.7e-08; Accession=PF00026.15; Description=Eukaryotic aspartyl protease
TPNTSFLVALDTGSDLFWVPCDCIQCAPLSGYRGNLDRDLGIYKPAESTTSRHLPCSHELCLLGSGCTNPKQPCPYNIEYFSENTTSSGLLIEDTLHLASRQGHVPVNASVIIGCGRKQSGDILDGIAPDGLLGLGMADISVPSFLARAGLVRNSFSMCFKEDNSGRIFFGDQGVSTQQSTPFVPLYGKLQTYAVNVDKSCIGHKCLEDTGFEALVDSGTSFTSLPPDVYKAVTVEFDKQMNASRVPFEDSTWKYCYSASPLEMPDVPTITLTFAANKSFQAVSPILPFNDKQGALAGFCLAVLPSPEPIGIIAQNFLVGYHVVFDRENMKLGWYRSECRDVDNSTTVPLGPSQHNSPEDPLPSNEQQTSPAVTPAVAGTAPPSSATTNLQKLLASSYPLLLLTVSTVFFIS

SEQ ID NO: 79811 - protein, 71 aa, Setaria italica
  Transcript Sequence Number=SeqID_13837
  Subcellular localization annotation: CTP_CleavageSite=16; ConfidenceScore=5.26e-01
SSSASSPVILRTGLTSSSSSPGVDSSRNQMAPICFENLRTGLLICKILENTLDLEDTTPEKIMHGDEIPCG

SEQ ID NO: 79812 - protein, 77 aa, Setaria italica
  misc_feature (39)..(39): Xaa can be any naturally occurring amino acid
  Transcript Sequence Number=SeqID_13838
  Subcellular localization annotation: CTP_CleavageSite=73; ConfidenceScore=5.28e-01
MHYPGAGGDNRKPPPFIGDKTRDPIPNPPPPPSPIASAXPTSATPRASPPPPRPSTPRPPPSPSGRTNGTVPRAKKE

SEQ ID NO: 79813 - protein, 60 aa, Setaria italica
  Transcript Sequence Number=SeqID_13839
QEGKDGEEDAEGSYVSEEEEGDWDADEPDEEDIIYVNSPSLPRNLVIIDPTSKHCRYLGT

SEQ ID NO: 79814 - protein, 31 aa, Setaria italica
  Transcript Sequence Number=SeqID_13840
EEVCRVHLFLPIEAGHITPLLPIRRWSDIMI

SEQ ID NO: 79815 - protein, 208 aa, Setaria italica
  misc_feature (98)..(98): Xaa can be any naturally occurring amino acid
  Transcript Sequence Number=SeqID_13841
  Gene Ontology: Cellular component=chloroplast; Biological process =rRNA processing
  Homolog annotation: Hit_ID=B6TDG2; Match level="QueryCoverage=82%, HitCoverage=82%, E-value=2e-85, Identity=95%"; Hit description =Ribosome-binding factor A
  Pfam annotation: Domain name=RBFA; Domain location=44-162; Score =84.5; E_value=3.7e-22; Accession=PF02033.10; Description=Ribosome -binding factor A
  Subcellular localization annotation: CTP_CleavageSite=37; ConfidenceScore=5.65e-01
MLPCRPLAPPPLPRALTFVRLPPSSLRPPPSSLRVVRCMAKERRVRMVAKQIQRELADMLTRDPVLQRAVLPEAALGADRYLSSLTTIADVELSNDLXQVCKVYVSVFGDERGKKVAIEGLKAKTKYVRSQIGKRMKLRLTPEIRFIEDESMERGSRILAILDKLKEEREQQEGKDGEEDAEGSYVSEEEEGDWDADEPDEEDIIYVK

SEQ ID NO: 79816 - protein, 107 aa, Setaria italica
  Transcript Sequence Number=SeqID_13842
  Gene Ontology: Mol. function=protein binding
  Homolog annotation: Hit_ID=B6SGI6; Match level="QueryCoverage=93%, HitCoverage=26%, E-value=2e-29, Identity=63%"; Hit description =Speckle-type POZ protein
EDLGSDDKEMMKHLLVAADRYAMERLKLICEGILCVSLDVETVAIILCLADQHNCRKLKDACIEYINSSDRINEVVASQGYLHLKRACPSVLVDMWEEEKVTKSQKI

SEQ ID NO: 79817 - protein, 568 aa, Setaria italica
  misc_feature (26)..(26): Xaa can be any naturally occurring amino acid
  Transcript Sequence Number=SeqID_13843
  Homolog annotation: Hit_ID=Q5DMX1; Match level="QueryCoverage=67%, HitCoverage=66%, E-value=1e-115, Identity=53%"; Hit description =Membrane protein-like
  Pfam annotation: Domain name=F5_F8_type_C; Domain location=225-348; Score=7.4; E_value=0.021; Accession=PF00754.17; Description=F58 type C domain
  Pfam annotation: Domain name=Sad1_UNC; Domain location=231-355; Score= 210.5; E_value=4.6e-60; Accession=PF07738.5; Description=Sad1  UNC -like C-terminal
  Pfam module annotation: Pfam domain module=F5_F8_type_C::Sad1_UNC; Domain location=225-348::231-355
ALLRRNKRRRRQRRSRARGRRPPLTXRKRRLYGFSASLVVASWVAVLLLHSLVGHGDGQRDGGGSAVALTVVEPTVNEGSVDPVVQGEHGENLAVPGDTCVSTDENVVLSEETLMQADQLCSNDEVQSENTEALTKDSRIELSGDEGGSLPQTDLGSGVQSGAKAESEDLPRPARLPRVVPPGLDEFKTRAIAERGPGVSSQPGNVIHRREPSGKLYNYAAASKGAKVLEFNKEAKGASNILDKDKDKYLRNPCSAEGKFVIIELSEETLVDTIAIANFEHYSSNPKEFELLSSLTYPTENWETLGRFTVANAKHAQNFTFPQPKWARYLKLNLLSHYGSEFYCTLSMLEVYGMDAVEKMLENLIPVENKKTEPEDKTKDPVEQIPLKEPSGGKESAEEPLDEDEFELEDDKQNGDALKNGANDQVSETRTLQAGRIPGDTVLKVLMEKVQSLDVSFSVLERYLEELNSRYGQIFKDFDADIDNKDVLLEKIKQELKNLESSKDSIANEIEGILSWKQVASSQLNQLVLDNALLRSEFEIFRQKQTDMENRSLAVYYFLLVFVFRLCL

SEQ ID NO: 79818 - protein, 153 aa, Setaria italica
  misc_feature (134)..(134): Xaa can be any naturally occurring amino acid
  misc_feature (147)..(147): Xaa can be any naturally occurring amino acid
  Transcript Sequence Number=SeqID_13844
  Homolog annotation: Hit_ID=B9SZJ9; Match level="QueryCoverage=60%, HitCoverage=22%, E-value=2e-12, Identity=41%"; Hit description =Protein binding protein, putative
EFLKEMKNELAIRLQQTPDEELFVKLTNTNGSTVAAPVTVQVSIAPIDRSNFLQPYRLKQLAQIITEWSSRNLGLNTLIFGRIRDLKLSPLLEAFIPSCAPSLPPMPTPFPSWPPISERPKNQCIPGLSCPALXKKQMKPLHIRRLXRVSPQL

SEQ ID NO: 79819 - protein, 102 aa, Setaria italica
  Transcript Sequence Number=SeqID_13845
PGLSWRALQSTDGIFLLRKNRQASSSAEEGGGGASPSPGWEAQSRSDFAYQDPRPPVPQPGSGGTSSRALPAPARNKKEPRRVTHIPGISKVKDKVQDAWHH

SEQ ID NO: 79820 - protein, 210 aa, Setaria italica
  misc_feature (7)..(7): Xaa can be any naturally occurring amino acid
  misc_feature (203)..(203): Xaa can be any naturally occurring amino acid
  Transcript Sequence Number=SeqID_13846
  Gene Ontology: Mol. function=hydrolase activity, acting on ester bonds; Biological process=lipid metabolic process
  Homolog annotation: Hit_ID=B6T774; Match level="QueryCoverage=73%, HitCoverage=41%, E-value=2e-67, Identity=87%"; Hit description =Anther-specific proline-rich protein APG
  Pfam annotation: Domain name=Lipase_GDSL; Domain location=54-200; Score=-5.4; E_value=0.017; Accession=PF00657.14; Description=GDSL -like LipaseAcylhydrolase
  Subcellular localization annotation: CTP_CleavageSite=52; ConfidenceScore=5.10e-01
KPQWLGXQLMGRAGTALSLLRLLVLLVVVVMSPWQVAAGNLTVAGGGGPRVPAVLVFGDSIVDTGNNNAVLTLTKSNFRPYGHDLNGGVPTGRFSNGRIPTDLLASRLGLKDLVPAYLGTDLTDYDLRTGVSFASGGTGYDPLTSTLVAVLPMQEELNMFAEYKEKLAGVVGDEAAEGIVTESLFLVCAGTDDIANNYYLRPXSRPLQYD

SEQ ID NO: 79821 - protein, 41 aa, Setaria italica
  Transcript Sequence Number=SeqID_13847
  Gene Ontology: Mol. function=protein binding; Cellular component =clathrin coat of coated pit; Biological process=intracellular protein transport
  Homolog annotation: Hit_ID=O23140; Match level="QueryCoverage=100%, HitCoverage=9%, E-value=1e-16, Identity=97%"; Hit description =AP47/50p
VPMFTASGLRVRFLKVWEKSGYNTVEWVRYITRAGSYEIRC

SEQ ID NO: 79822 - protein, 438 aa, Setaria italica
  Transcript Sequence Number=SeqID_13848
  Gene Ontology: Mol. function=protein binding; Cellular component =clathrin coat of coated pit; Biological process=intracellular protein transport
  Homolog annotation: Hit_ID=O23140; Match level="QueryCoverage=100%, HitCoverage=100%, E-value=0.0, Identity=89%"; Hit description =AP47/50p
  Pfam annotation: Domain name=Adap_comp_sub; Domain location=166-438; Score=456.0; E_value=5.5e-134; Accession=PF00928.13; Description =Adaptor complexes medium subunit family
MPVAASAIYFLNLRGDVLINRLYRDDVGGNMVDAFRMHIMQTKELGTCPVRQIGGCSFLYMRISNVYIVIVVSSNANVACAFKFVVEAVALFKSYFGGAFDEDAIRNNFVLIYELLDEIMDFGYPQNLSPEILKLYITQEGVRSPFSSKASDKPVPNATLQVTGAVGWRREGLMYKKNEVFLDIVESVNLLMSSKGSVLRCDVTGKILMKCFLSGMPDLKLGLNDKIGLEKEAQLKSRPTKSGKTIELDDVTFHQCVNLTRFNSEKTVSFVPPDGEFELMKYRITEGVNLPFRVLPTIKELGRTRMEINVKVKSVFGAKMFALGVVVKVPVPKQTAKTSFQTTSGKAKYNASIDSLVWKIRKFPGQTEATMSAEVELISTMGEKKSWNRPPIQMEFQVPMFTASGLRVRFLKVWEKSGYNTVEWVRYITRAGSYEIRC

SEQ ID NO: 79823 - protein, 68 aa, Setaria italica
  Transcript Sequence Number=SeqID_13849
  Gene Ontology: Cellular component=chloroplast
IVTAHPDVANELTCQVIDQSKIVIDGNLITGKGIGTAVDFALAIIRKFFGHGRAKSVANGIVFEYPKS

SEQ ID NO: 79824 - protein, 210 aa, Setaria italica
  misc_feature (112)..(112): Xaa can be any naturally occurring amino acid
  Transcript Sequence Number=SeqID_13850
  Gene Ontology: Mol. function=iron-sulfur cluster binding; Cellular component=cytoplasm; Biological process=rRNA processing
  Homolog annotation: Hit_ID=B9T4I0; Match level="QueryCoverage=76%, HitCoverage=40%, E-value=2e-71, Identity=78%"; Hit description =Catalytic, putative
  Pfam annotation: Domain name=Radical_SAM; Domain location=49-207; Score=31.2; E_value=4.2e-06; Accession=PF04055.13; Description =Radical SAM superfamily
FVDALEARKITVSVRQTRGLDANAACGQHLAPGPVDDDSKGSSRLTACVSSQVGCPLRCSFCATGKGGFARNLRPHEIVEQVLAIEEMFKHRVTNVVFMGMGEPMLNLKRKXYKIGQRMMTISTVGVPNTIKMLASHKLQSTLAVSLHAPNQKLRETIVPSAKSYPLGALMDDCKSYFLETGRRVSFEYTLLGTLTVPSLYPSVFWRKYC

SEQ ID NO: 79825 - protein, 213 aa, Setaria italica
  Transcript Sequence Number=SeqID_13851
  Gene Ontology: Mol. function=iron-sulfur cluster binding; Cellular component=cytoplasm; Biological process=rRNA processing
  Homolog annotation: Hit_ID=B9T4I0; Match level="QueryCoverage=92%, HitCoverage=46%, E-value=1e-90, Identity=80%"; Hit description =Catalytic, putative
LLIPCNKTTPLFCFCCLSAVPKAFREALLGAGWTVGRSPVHHAVTASDGTTKILLKLEDNRLIETVGIPVDDDSKGSSRLTACVSSQVGCPLRCSFCATGKGGFARNLRPHEIVEQVLAIEEMFKHRVTNVVFMGMGEPMLNLKSVLEAHRCFNKELKIGQRMMTISTVGVPNTIKMLASHKLQSTLAVSLHAPNQKLRETIVPSAKSYPLGA

SEQ ID NO: 79826 - protein, 355 aa, Setaria italica
  misc_feature (128)..(128): Xaa can be any naturally occurring amino acid
  Transcript Sequence Number=SeqID_13852
  Gene Ontology: Mol. function=iron-sulfur cluster binding; Cellular component=cytoplasm; Biological process=rRNA processing
  Homolog annotation: Hit_ID=B9T4I0; Match level="QueryCoverage=95%, HitCoverage=80%, E-value=1e-151, Identity=75%"; Hit description =Catalytic, putative
  Pfam annotation: Domain name=Radical_SAM; Domain location=103-269; Score=56.8; E_value=8.5e-14; Accession=PF04055.13; Description =Radical SAM superfamily
EPELRQLALDLGQQSYRGKQLHDLLYKSRASQIQDFNYVPKAFREALLGAGWTVGRSPVHHAVTASDGTTKILLKLEDNRLIETVGIPVDDDSKGSSRLTACVSSQVGCPLRCSFCATGKGGLPRNLXPHEIVEQVLAIEEMFKHRVTNVVFMGMGEPMLNLKSVLEAHRCFNKELKIGQRMMTISTVGVPNTIKMLASHKLQSTLAVSLHAPNQKLRETIVPSAKSYPLGALMDDCKSYFLETGRRVSFEYTLLAGINDEKEHAEELAELLHTCGGGYHVNLIPYNPIEGSEYKRPYRKVVQAFVDALEARKITVSVRQTRGLDANAACGQLRNEFQKNPLLESSPSEPSLVPA

SEQ ID NO: 79827 - protein, 60 aa, Setaria italica
  Transcript Sequence Number=SeqID_13853
GSCCAQGILSIHKTCVHPKYMDNRTPLTNRQIQSMVPSNRTSRIEQIKLHLQQKKLTLRI

SEQ ID NO: 79828 - protein, 107 aa, Setaria italica
  Transcript Sequence Number=SeqID_13854
  Subcellular localization annotation: CTP_CleavageSite=83; ConfidenceScore=5.79e-01
AHPGTSRAPPHPLVAPSSTYLLGRAARCPGPLATTSAATHSPSPRPCSCASSRASRSRPATRRALGGIRPLNPRARRLGSLPRAGSGNGGRGDGEEGAAVPAAQGVP

SEQ ID NO: 79829 - protein, 176 aa, Setaria italica
  Transcript Sequence Number=SeqID_13855
  Gene Ontology: Mol. function=oxidoreductase activity; Biological process=oxidation reduction
  Homolog annotation: Hit_ID=Q01JQ2; Match level="QueryCoverage=100%, HitCoverage=59%, E-value=5e-75, Identity=74%"; Hit description =H0523F07.11 protein
SFHQVFDTNVYGAMRMIQAVIPHMMETRKGTIVNVGSIAAMAPGPWAGVYSASKAALHALSDSLRVELKSFGINVMIVAPGGTKSNLGDKSAAKYDQMHEWKYYKKYEESLRARTDVSQGPGSTPASELAKKVVALALKKNPPAFFAYGQFTAVLSTLYYAPLCLRDYFYRLVMKC

SEQ ID NO: 79830 - protein, 79 aa, Setaria italica
  misc_feature (7)..(7): Xaa can be any naturally occurring amino acid
  misc_feature (41)..(41): Xaa can be any naturally occurring amino acid
  misc_feature (44)..(44): Xaa can be any naturally occurring amino acid
  Transcript Sequence Number=SeqID_13856
  Gene Ontology: Mol. function=GTPase activator activity; Cellular component=intracellular; Biological process=signal transduction
  Homolog annotation: Hit_ID=B9R9W7; Match level="QueryCoverage=100%, HitCoverage=21%, E-value=3e-20, Identity=64%"; Hit description=Rho GTPase activator, putative
SLPEGVXPIDVGALVKCYLASIPEPLTTFCTFMMSFRDARXSIXILETYLKKLPNVNYMTLEFVTALLLRVSRKSSLNR

SEQ ID NO: 79831 - protein, 72 aa, Setaria italica
  misc_feature (54)..(54): Xaa can be any naturally occurring amino acid
  misc_feature (63)..(63): Xaa can be any naturally occurring amino acid
  Transcript Sequence Number=SeqID_13857
SETKEKVAVVQVKVEEAAKKTADKSKTILNNIERWQKVCDLEFCYLVTQFHFFXVYNADSYFXLFAPGSRKH

SEQ ID NO: 79832 - protein, 371 aa, Setaria italica
  Transcript Sequence Number=SeqID_13858
  Gene Ontology: Mol. function=GTPase activator activity; Cellular component=intracellular; Biological process=signal transduction
  Homolog annotation: Hit_ID=B9R9W7; Match level="QueryCoverage=94%, HitCoverage=96%, E-value=1e-103, Identity=53%"; Hit description=Rho GTPase activator, putative
  Pfam annotation: Domain name=RhoGAP; Domain location=151-295; Score =124.8; E_value=2.8e-34; Accession=PF00620.19; Description=RhoGAP domain
  Subcellular localization annotation: CTP_CleavageSite=20; ConfidenceScore=5.10e-01
MPLAESPQWRRKATDFFSTSSFKLKQAGQSAGDNIADVAGKVGSVVKTRWAVFQEARQQQQQRPPGETVQERFITAAASTGLLFRKGISETKEKVAVGKVKVEEAAKKTADKSKTILNNIERWQKGVASTDVFGVPIEATVQREQSGKAVPLMLVRCADYLVISGLSNEYLFKSEGDRKVLQQLVSLYNEDSGASLPEGVNPIDVGALVKCYLASIPEPLTTFALYDELRDARVSIPDLRNILKKLPNVNYMTLEFVTALLLRVSRKSSLNKMDSRSLAVEFAPLIMWQQGDAGTDLRNHLKFTLKPPPKIVDTTSNTAAWDLLDEDDEDASSQIPLDDASPPDYSSIEVIQCLIEHHNAIFTDANETVWR

SEQ ID NO: 79833 - protein, 98 aa, Setaria italica
  Transcript Sequence Number=SeqID_13859
  Homolog annotation: Hit_ID=C0JAC8; Match level="QueryCoverage=72%, HitCoverage=18%, E-value=1e-11, Identity=62%"; Hit description=IQ calmodulin-binding motif family protein
  Subcellular localization annotation: CTP_CleavageSite=63; ConfidenceScore=5.04e-01
SDVAVEEKESCGSNDVSVVSFDGSSLGGRSGLSCHKPGRSRLKGARSLPRRKVASSDHRLQARSHKVSKKGHKEQAPPHKDQAEADGYDAACQPPTDY

SEQ ID NO: 79834 - protein, 100 aa, Setaria italica
  Transcript Sequence Number=SeqID_13860
  Gene Ontology: Mol. function=nucleic acid binding
  Homolog annotation: Hit_ID=Q6YYC0; Match level="QueryCoverage=91%, HitCoverage=9%, E-value=7e-20, Identity=53%"; Hit description=Zinc finger CCCH domain-containing protein 55
LDNDQTLHKNKKGKDSRSMKLFKVAIADFVKEVLKPSWRQGNMSKEAFKTIVRKTVDKVSNSVPSSHIPKTPAKIKHYVQSSQRKVTKLVMGYVDKYAKL

SEQ ID NO: 79835 - protein, 804 aa, Setaria italica
  misc_feature (753)..(753): Xaa can be any naturally occurring amino acid
  Transcript Sequence Number=SeqID_13861
  Gene Ontology: Mol. function=nucleic acid binding
  Homolog annotation: Hit_ID=Q6YYC0; Match level="QueryCoverage=11%, HitCoverage=9%, E-value=3e-19, Identity=53%"; Hit description=Zinc finger CCCH domain-containing protein 55
PPPPLLSAPPAPVVAQSWGAEAGGKEECGDGGGGGDAKTLKAATQLIVSDDSDMDMDGDEDSPSRQPLTPDNSSLVTAECTGDVNVSKSVSDVSSLGKHLPPGSGENAKTAHVTVDGGSPFKLIQGYASDDSANEVAAGPDGASTLVVLPEDNKLNHPIDRNTEIGYDKHPNAKRNVNSPPGTEEHVEAGKYHLKDERNPVKHGTDVLGHLAKEDLSDSEFNGGQMSKRHERRQKKRTWSQSPQDRSRSPLGSNKDSPSQSSSPGKQSRPPFAKRIHPSVEGNSGDRIAQQKGLVLTEKFDSSSNDLIGKVGDKGAPDGALGYNCHGDNLISEPSQPVAEIPVGQSAGSAPFASVQTTKNSVACDHLQPHPQSLYPPEHMPSSNMVRLPGQSLFATSEFPQTQFQHNVIAPANEFMQNQMRSYPPPDPSHPRPLDFHHHTRPPAVPSHQQPSAISVENAPVPPPDRWSEYSGGVGLSYSSHHPPYGQHQPPGNLDSGTNLVYPSFQRFPSNLPGSSDLGPLSDVGLPKSSIKPHYNPFASTFEQTDPSLDIGPVVSPNAVDSISTKAEHMNALSPFGQSFPESRTHAHESSAEAVPNKQKPLRQDFASGAPYDPLLDSIEPSSSSINKVDPSKEKNRSADSRDVSKLMNIEVDSENMYGLGVVAESEVEGLGEVAADTEAGVVENASPEFLGAKDWNSDIPGDIDNDQTLHKNKKGKDSRSMKLFKVAIADFVKEVLKPSWRQGNMSKEAFKXTIVRKTVDKVSNSVPSSHIPKTPAKIKHYVQSSQRKVTKLVMGYVDKYAKL

SEQ ID NO: 79836 - protein, 105 aa, Setaria italica
  Transcript Sequence Number=SeqID_13862
  Gene Ontology: Mol. function=nucleic acid binding
  Homolog annotation: Hit_ID=Q6YYC0; Match level="QueryCoverage=86%, HitCoverage=9%, E-value=1e-19, Identity=53%"; Hit description=Zinc finger CCCH domain-containing protein 55
DIPGDIDNDQTLHKNKKGKDSRSMKLFKVAIADFVKEVLKPSWRQGNMSKEAFKTIVRKTVDKVSNSVPSSHIPKTPAKIKHYVQSSQRKVTKLVMGYVDKYAKL

SEQ ID NO: 79837 - protein, 53 aa, Setaria italica
  Transcript Sequence Number=SeqID_13863
PSRKQNLNIVIHRPFHPCQEKVQTNLNPAKKHEEISPRIGTKSSNRSDRSPHR

SEQ ID NO: 79838 - protein, 113 aa, Setaria italica
  Transcript Sequence Number=SeqID_13864
FARGKKITNVLTQPTFGPDLSNQKSMTYHYAIKDSQIYPRNARHYTLHHITLTKTKSEHSYSSSVSSLPRESANQLEPRKKTRRNLATSNQGKRRSQRIPAETSKGFNPFQVS

SEQ ID NO: 79839 - protein, 151 aa, Setaria italica
  misc_feature (88)..(88): Xaa can be any naturally occurring amino acid
  misc_feature (128)..(128): Xaa can be any naturally occurring amino acid
  Transcript Sequence Number=SeqID_13865
  Gene Ontology: Mol. function=transposase activity; Biological process= transposition, DNA-mediated
  Homolog annotation: Hit_ID=Q2QT97; Match level="QueryCoverage=94%, HitCoverage=19%, E-value=7e-23, Identity=40%"; Hit description =Transposon protein, putative, CACTA, En/Spm sub-class
MSTSQGTRTAWSYTYEKGLVDVMKEHVNIPMYRAQNSWTAEGWRNITNKFNDMFPTTHFTKQQVQEKEKELKGSYKIIKEARKSGVGXNDSLGMIIAEPKGWKKLIKDNHKVPKFRKKPFLLYNNLDXLYEGSIATEDLNFTSTEPPNMTT

SEQ ID NO: 79840 - protein, 403 aa, Setaria italica
  misc_feature (29)..(29): Xaa can be any naturally occurring amino acid
  Transcript Sequence Number=SeqID_13866
  Gene Ontology: Mol. function=binding; Cellular component=anaphase -promoting complex; Biological process=regulation of mitotic metaphase/anaphase transition
  Homolog annotation: Hit_ID=B6SL38; Match level="QueryCoverage=93%, HitCoverage=62%, E-value=0.0, Identity=96%"; Hit description=Cell division cycle protein 23
  Pfam annotation: Domain name=APC8; Domain location=5-140; Score=82.0; E_value=2.1e-21; Accession=PF04049.5; Description=Anaphase promoting complex subunit 8  Cdc23
  Pfam annotation: Domain name=TPR_1; Domain location=250-283; Score =5.2; E_value=1.4; Accession=PF00515.20; Description=Tetratricopeptide repeat
  Pfam annotation: Domain name=TPR_1; Domain location=318-351; Score =29.9; E_value=1e-05; Accession=PF00515.20; Description =Tetratricopeptide repeat
  Pfam annotation: Domain name=TPR_1; Domain location=352-385; Score =33.0; E_value=1.2e-06; Accession=PF00515.20; Description =Tetratricopeptide repeat
  Pfam annotation: Domain name=TPR_2; Domain location=250-283; Score =4.9; E_value=8.2; Accession=PF07719.9; Description=Tetratricopeptide repeat
  Pfam annotation: Domain name=TPR_2; Domain location=318-351; Score =23.2; E_value=0.0011; Accession=PF07719.9; Description =Tetratricopeptide repeat
  Pfam annotation: Domain name=TPR_2; Domain location=352-385; Score =24.3; E_value=0.00049; Accession=PF07719.9; Description =Tetratricopeptide repeat
  Pfam module annotation: Pfam domain module=APC8::TPR_1::TPR_1::TPR _1::TPR_2::TPR_2::TPR_2; Domain location=5-140::250-283::318-351::352- 385::250-283::318-351::352-385
  Subcellular localization annotation: CTP_CleavageSite=45; ConfidenceScore=5.17e-01
APAPVGRDGLPRPPRPAASAGRLLHLHRXGGSSFRHRPRPGGGPSSEAGTPLGGVSYVSTPIPDDDAFDSGGDKYLLAKTYFDCREYRRAAHVLQNQVGRKAVFLRCYALYMAGEKRKEAEMIELEGSLGKSNAVNQELVALERELSTHRRTGSIDSFGLYLYGLVLRDKGCEGLARTTLVESVNSYPWNWSAWSELQALCTSSDILNNLNLKNHWMKDLFLASTYLELKIVEEALKRYERLMGIFRCSGYIQAQIATVQYSMRDLDEAEMIFEELLRTDPFRVDSMDIYSNLLYAKESLTALSFLAHRVFLTDKYRPESCCIIANYYSLKGQHEKSVLYFQRALKLNRKYLSAWTLMGHEYVELKNTPAAIDAYRRAVDINPRDFRAWYGLGQIYEMSGDAI

SEQ ID NO: 79841 - protein, 102 aa, Setaria italica
  Transcript Sequence Number=SeqID_13867
  Gene Ontology: Mol. function=protein serine/threonine kinase activity; Cellular component=integral to membrane; Biological process=protein amino acid phosphorylation
  Homolog annotation: Hit_ID=B9S154; Match level="QueryCoverage=100%, HitCoverage=10%, E-value=3e-35, Identity=63%"; Hit description =Leucine-rich repeat transmembrane protein kinase, putative
RLRHKNLARVVGYACEPGRIKALVLEYMDNGDLDGAIHGPPRRDARRWTVPERLRACVSVAHGLAYLHSGYDFPIVHCDVKPSNVLLDGDWEARVSDFGTAR

SEQ ID NO: 79842 - protein, 344 aa, Setaria italica
  Transcript Sequence Number=SeqID_13868
  Gene Ontology: Mol. function=transferase activity, transferring nitrogenous groups; Cellular component=chloroplast; Biological process=histidine biosynthetic process
  Homolog annotation: Hit_ID=B6TRS1; Match level="QueryCoverage=99%, HitCoverage=82%, E-value=0.0, Identity=90%"; Hit description =Histidinol-phosphate aminotransferase
  Pfam annotation: Domain name=Aminotran_1_2; Domain location=15-339; Score=181.5; E_value=2.3e-51; Accession=PF00155.13; Description =Aminotransferase class I and II
PALQVLSARLGRRPEDIIKLDANENPYGPPPEVATALGSLKFPYVYPDPESRHLRAALAEDCGIESEYILAGCGADELIDLIMRCVLEPGDKIIDCPPTFTMYEFDASVNGALVIKVPRLPDFSLDVDRIVEVVKQDNPKCIFLTSPNNPDGSVINNEDLLKILDLPILVVLDEAYIEFSSLQTRMSWVKKHDNLIVLRTFSKRAGLAGLRVGYGAFPLSIIEYLWRAKQPYNVSVAAEVSACAALQNPTYLENVKNLLLQERERLFNLLKGIPFLKPFPSHSNFILCEVTSGKDAKKIKEDLAKMGVMIRHYDKKELKGYIRISVGKPEHTDALMKGLNALQL

SEQ ID NO: 79843 - protein, 237 aa, Setaria italica
  misc_feature (51)..(51): Xaa can be any naturally occurring amino acid
  Transcript Sequence Number=SeqID_13869
  Gene Ontology: Mol. function=nucleotide binding; Cellular component =cytoplasm; Biological process=small GTPase mediated signal transduction
  Homolog annotation: Hit_ID=C0W9W6; Match level="QueryCoverage=98%, HitCoverage=38%, E-value=1e-62, Identity=54%"; Hit description=GTP -binding protein lepA
  Pfam annotation: Domain name=EFG_C; Domain location=40-125; Score =80.2; E_value=7.4e-21; Accession=PF00679.16; Description=Elongation factor G C-terminus
  Pfam annotation: Domain name=LepA_C; Domain location=126-234; Score =262.6; E_value=9.3e-76; Accession=PF06421.4; Description=GTP-binding protein LepA C-terminus
  Pfam module annotation: Pfam domain module=EFG_C::LepA_C; Domain location=40-125::126-234
ISTIPTVPYIFEYGDGSKVQVENPAALASNPGKRITACWEPTVIATIIIPXYVGPVIMLCSERRGEQLEYTFIDAQRAMLKYRLPLKEIIVDFYNELKGITSGYATFDYEDSEYEQSDLVKMDILLNGQPVDAMATIVHNQKAQRVGRELVEKLKKFIERQMFEITIQAAIGSKVIARETLSAMRKNVLAKCYGGDITRKKKLLEKQKEGKKRMKRVGSVDIPQEAFHELLKVSNSK

SEQ ID NO: 79844 - protein, 874 aa, Setaria italica
  Transcript Sequence Number=SeqID_13870
  Gene Ontology: Mol. function=phosphoprotein phosphatase activity; Cellular component=intracellular; Biological process=embryonic development ending in birth or egg hatching
  Homolog annotation: Hit_ID=Q2R3H8; Match level="QueryCoverage=99%, HitCoverage=72%, E-value=0.0, Identity=65%"; Hit description=NLI interacting factor-like phosphatase family protein, expressed
  Pfam annotation: Domain name=BRCT; Domain location=780-860; Score =43.3; E_value=9.4e-10; Accession=PF00533.18; Description=BRCA1 C Terminus (BRCT) domain
  Pfam annotation: Domain name=NIF; Domain location=553-779; Score =13.5; E_value=2.4e-09; Accession=PF03031.10; Description=NLI interacting factor-like phosphatase
  Pfam module annotation: Pfam domain module=BRCT::NIF; Domain location= 780-860::553-779
GRLPYESGAANSFSGSSLPRLEIPAKRISPLLDLHADYDENSLPSPTRDNAPPFPVPKPIGFGAFPMVPERPSFPERESGRNSIYPSLNDPLKAVSSYQQKYGQKSVFPSDDLPSPTPSGDDGKSADKGGDIFGEISSFPAPKKTALPSTSQMPASQPNTTSGSNISYSGGPPGYGKQAEQLAAGPNHALKATSKSRDPRLRFLNRDSAGATDANQRVNFSDLKDGNLGAGVPTINRKHKAVDEPQVDENVLKRFRLGAGDPRNMLVPTGNPNQLMTNMRAPPNSSGATTPFLHPTQSSAPQISAPPAVSLPSSLLKDIAGNPTVLMNWIKMEQQKMSASEPQQVAMSSGTISIGIAGTVLPPGSAPKTTEAAQVPSVRPQVLMQTPPLNSQNDTGILRMKPRDPRRILHNSIAQKTDAVGLEQHKSNGTKPDSQGTKDQTTSMVSQPALVSGIARPFTMSTKHVDPVSNSQLAATALMAPTQQASSSLTRVDPRLAVEQNGHNAYAANAPATPLEAVQPVNPWGDVDHLLDGYDDQQKALIQKERARRITEQHKMFSARKLCLVLDLDHTLLNSAKFIEVDSVHEEILRKKEEQDRSMPERHLYRFHHMNMWTKLRPGIWNFLDKASKLFELHLYTMGNKLYATEMAKVLDPTGTLFAGRVISRGDDGDPFDSDERLPKSKDLDGVLGMESAVVIIDDSVRVWPHNRHNLIVVERYTYFPCSRRQFGLPGPSLLEIDRDERPEDGTLASSLAVIERIHHNFFSHPKLNEADVRTILSDEQKRILAGCHIVFSRVFPVGDTKPHLHPLWQTAEQFGAVCTNLIDDKVTHVVANSLGTDKVNWALSTGRFVVHPGWVEASALLYRRANELDFLVK

SEQ ID NO: 79845 - protein, 59 aa, Setaria italica
  Transcript Sequence Number=SeqID_13871
  Subcellular localization annotation: CTP_CleavageSite=40; ConfidenceScore=5.46e-01
MAPPPLPLFSPSPKPPPPPPWLHGPSTQTQNPSTGPAAPPASDEAAPPNKPRHHSAQPA

SEQ ID NO: 79846 - protein, 73 aa, Setaria italica
  Transcript Sequence Number=SeqID_13872
  Gene Ontology: Cellular component=extracellular region
MASSSSSCHKGRRLAAGIALLLLLLAGNAAAYPGGGGDLRYQFLSQQNAARASMGLPPLVWDERVASYARWYA

SEQ ID NO: 79847 - protein, 324 aa, Setaria italica
  Transcript Sequence Number=SeqID_13873
  Gene Ontology: Mol. function=signal transducer activity; Cellular component=cytoplasm; Biological process=ubiquitin-dependent protein catabolic process
  Homolog annotation: Hit_ID=Q6Z1R8; Match level="QueryCoverage=99%, HitCoverage=72%, E-value=1e-162, Identity=86%"; Hit description =Putative F-box protein
  Pfam annotation: Domain name=Kelch_1; Domain location=151-200; Score =9.7; E_value=0.24; Accession=PF01344.17; Description=Kelch motif
  Pfam annotation: Domain name=Kelch_1; Domain location=211-258; Score =5.3; E_value=0.8; Accession=PF01344.17; Description=Kelch motif
  Pfam annotation: Domain name=Kelch_1; Domain location=37-80; Score =0.1; E_value=3.3; Accession=PF01344.17; Description=Kelch motif
  Pfam annotation: Domain name=Kelch_1; Domain location=96-146; Score =9.0; E_value=0.29; Accession=PF01344.17; Description=Kelch motif
  Pfam annotation: Domain name=Kelch_2; Domain location=151-200; Score =21.4; E_value=0.0038; Accession=PF07646.7; Description=Kelch motif
  Pfam annotation: Domain name=Kelch_2; Domain location=210-257; Score =9.6; E_value=2.3; Accession=PF07646.7; Description=Kelch motif
  Pfam annotation: Domain name=Kelch_2; Domain location=37-90; Score =4.3; E_value=11; Accession=PF07646.7; Description=Kelch motif
  Pfam annotation: Domain name=Kelch_2; Domain location=95-146; Score =5.7; E_value=7.5; Accession=PF07646.7; Description=Kelch motif
  Pfam module annotation: Pfam domain module=Kelch_1::Kelch_1::Kelch _1::Kelch_1::Kelch_2::Kelch_2::Kelch_2::Kelch_2; Domain location=151 -200::211-258::37-80::96-146::151-200::210-257::37-90::95-146
LGHHLDDTWVAYAGIGAGNRPPTVLSWQQLASGTPSGRFSHSCTLVGDTLVLFGGITDQGQRLNDTWIGQVICEEPRRMRISWRLLEVGPLAPPPRGAHAACCVDDKFIVIHGGIGLYGSRLGDTWLLDLSNGLRSGSWHQIGKTWPLPPPRSGHSLTWIGGTRMVLFGGRGSEFEVLNDVWLFDISDQYPKWKELKYDLSTALGEMPFPRVGHSAILALGGKVLVYGGEDSQRRRKDDFWILDTPALLQYESGSKKMTKRMWKKLRIDGQCPSYRSFHGACVDTSGCCVYIFGGMVDGLVHPAEALGLRFDGQLYQVELVLHL

SEQ ID NO: 79848 - protein, 221 aa, Setaria italica
  Transcript Sequence Number=SeqID_13874
  Homolog annotation: Hit_ID=Q9LN90; Match level="QueryCoverage=58%, HitCoverage=54%, E-value=5e-11, Identity=32%"; Hit description =T12C24.7
MSVPKPRPPTAAEVVGRLKDDGDFDALRRAIVRKVKDNEVLRNQIISEVKQSVVLQEDGSEKLKLKDLSDAIYKDIGRKVMGQISDEVWNVIQSNETDIRGTVEAVYNRILNPEKAPEPSSKKLKTKGKEQQVSPAKTPTPTTVAGEAEDDDLSEPPGFGFRDNQRNNIAAAAQKQQSPPNLENHNEGKPNGGEPVAVGGPAGDDDDDDDDDGPQVPPGFG

SEQ ID NO: 79849 - protein, 49 aa, Setaria italica
  Transcript Sequence Number=SeqID_13875
SVFINAFPETGLEPAAFAALVPNSAEKVLCEVIEEIMGDHEMLTGKNTE

SEQ ID NO: 79850 - protein, 65 aa, Setaria italica
  Transcript Sequence Number=SeqID_13876
ILCLYFFFMLCNLFIYVETIRIILSLVPVSLSRIDFRRRIAGEVSMYCFDQIKALFCFTKHMLDC

SEQ ID NO: 79851 - protein, 498 aa, Setaria italica
  Transcript Sequence Number=SeqID_13877
  Gene Ontology: Mol. function=cysteine-type peptidase activity; Cellular component=transcription factor TFIID complex; Biological process=ubiquitin-dependent protein catabolic process
  Homolog annotation: Hit_ID=B9GEC1; Match level="QueryCoverage=99%, HitCoverage=53%, E-value=0.0, Identity=82%"; Hit description =Ubiquitin carboxyl-terminal hydrolase
  Pfam annotation: Domain name=UCH; Domain location=3-497; Score=143.5; E_value=6.7e-40; Accession=PF00443.21; Description=Ubiquitin carboxyl- terminal hydrolase
QVLDNLGNTCFMNSAVQCLAHTPKLVDYFLGDFCKEINTHNPLGMKGELAYAFGDLLRKLWAIDRSPVAPRHFKAKLARFAPQFSGFNQHDSQELLAFLLDGLHEDLNRVKCKPYSEAKDSDGRPDEEVADEYWGNHLARNDSIIVDICQGQYKSTLVCPICKKVSVTFDPFMYLSLPLPSTTMRTMTITVFSTDGTTGPSPYTVSVPKSGDTRTLINALSNACSLRDDERLLVAEVYNNSIIRYLDEPSEVISLIRDGDRLVAYRLPKDSEDAPIVVFRNQRMESSLSSFGRKSWKSFGTPLVSSLPDTVTGSTISNLFLKVMTPFRVSNNDVSDADQTIGECNLANETADTDMSIDASEHTSLNNNNLEDETGSEDAMQFFLTNERFPDQRMKIEMDQPITVKGPQKRLHVAVCWQDNGLEQYNLASLDSLPEVYKAVLFSRRPQDTCSLYACLEAFIKEEPLGPEDMWYCPGCKEHRQASKKLDLWRLPEILIIH

SEQ ID NO: 79852 - protein, 195 aa, Setaria italica
  Transcript Sequence Number=SeqID_13878
  Gene Ontology: Cellular component=chloroplast
  Subcellular localization annotation: CTP_CleavageSite=48; ConfidenceScore=5.60e-01
MAFASSLLPAPVSRVRASTAPELAAFPTARKAVSLAAARRRGSRHGVRAEVNESGSTLAVDALSQVKHVLLPVTDRNPYLSEGTRQAAATTASLAKKYGANITVVVIDDKPKESFPEHDTQMSSIRWHLSEGGFTEFGLMERLGEGRKPTAIIGEVADELELDLVVLSMEAIHSKHVDGNLLAEFIPCPVLLLPL

SEQ ID NO: 79853 - protein, 74 aa, Setaria italica
  Transcript Sequence Number=SeqID_13879
KSEVNHIPVRALVCHLTLYFINAFPQCTSENVNLHLVRNKRMKQKAKKQLRGQTYTHFQMPSGHYKFAITLQIP

SEQ ID NO: 79854 - protein, 424 aa, Setaria italica
  Transcript Sequence Number=SeqID_13880
  Gene Ontology: Mol. function=pyridoxal phosphate binding; Cellular component=mitochondrion; Biological process=arginine metabolic process
  Homolog annotation: Hit_ID=O04866; Match level="QueryCoverage=94%, HitCoverage=88%, E-value=1e-167, Identity=70%"; Hit description =Acetylornithine aminotransferase, mitochondrial
  Pfam annotation: Domain name=Aminotran_1_2; Domain location=66-412; Score=-85.4; E_value=0.0059; Accession=PF00155.13; Description =Aminotransferase class I and II
  Pfam annotation: Domain name=Aminotran_3; Domain location=42-367; Score=431.1; E_value=1.8e-126; Accession=PF00202.13; Description =Aminotransferase class-III
  Pfam module annotation: Pfam domain module=Aminotran_1_2::Aminotran _3; Domain location=66-412::42-367
GAAAAPDRGAGAARRELTAASLAVMEDEARYLVGTYNRSRVVLEAGRGCKVYDLDGREYLDMAAGIAVTSLGHGEPEVTATIGQQSGTLIHVSNVYYTRAQVALAKRLVESSFADRAFFANSGTEANEAAIKFSRKFQRVAHPDSDDPPSEFLAFTNCFHGRTMGSVALTSKSQYREPFAPVMPGGTFVEYGNLQEAKKVIQSGRLAAVFVEPVQGEGGIHSATQEFLQGLREACDEAGALLVFDEVQCGLGRTGYLWAHEAYGVAPDIMTLAKPLANGLPIGAVLVKEKVAAAINYGDHGTTFGGGPLVCKTALTVLDKIQKPGFLAEVSKKGENFKQLLRTKLSGNPHVKEVRGVGLIVGIELDVPAGPLVDACLDAGVIVLTAGKGNVVRLVPPLIISEKELEQAADVIRDCLPALDAASS

SEQ ID NO: 79855 - protein, 154 aa, Setaria italica
  misc_feature (110)..(110): Xaa can be any naturally occurring amino acid
  misc_feature (140)..(140): Xaa can be any naturally occurring amino acid
  Transcript Sequence Number=SeqID_13881
  Gene Ontology: Mol. function=binding; Cellular component =mitochondrial inner membrane; Biological process=transport
  Homolog annotation: Hit_ID=A0ZVU2; Match level="QueryCoverage=95%, HitCoverage=50%, E-value=9e-60, Identity=68%"; Hit description=S -adenosylmethionine transporter
  Pfam annotation: Domain name=Mito_carr; Domain location=25-111; Score= 90.2; E_value=7.4e-24; Accession=PF00153.19; Description =Mitochondrial carrier protein
ASAIFVGVYEPAKRKLLEMFPENLSAIAHLTAGAIGGAASSLIRVPTEVVKQRMQMSQFKTAPDAVRLIVAKEGIKGLYAGYGSFLLRDLPFDAIQFCIYEQLRIGYRLXGAFTGALTTPLDVMKTRLMIQGQASQYRGXIDCAQTITARGRAG

SEQ ID NO: 79856 - protein, 77 aa, Setaria italica
  Transcript Sequence Number=SeqID_13882
  Homolog annotation: Hit_ID=B6T245; Match level="QueryCoverage=40%, HitCoverage=11%, E-value=2e-12, Identity=100%"; Hit description=Zn -finger, RanBP-type, containing protein
  Pfam annotation: Domain name=zf-RanBP; Domain location=23-54; Score =36.5; E_value=1.1e-07; Accession=PF00641.10; Description=Zn-finger in Ran binding protein and others
LHCLVLLESWWLQKVLLFSVSVREGDWNCPQCGNVNFSFRNVCNRGACGAPRPSPSPSPVSCHRFSPQVVSLMICSV

SEQ ID NO: 79857 - protein, 271 aa, Setaria italica
  Transcript Sequence Number=SeqID_13883
  Gene Ontology: Mol. function=zinc ion binding; Cellular component =intracellular
  Homolog annotation: Hit_ID=B6T245; Match level="QueryCoverage=100%, HitCoverage=100%, E-value=3e-99, Identity=80%"; Hit description=Zn -finger, RanBP-type, containing protein
  Pfam annotation: Domain name=zf-RanBP; Domain location=189-220; Score= 32.3; E_value=1.9e-06; Accession=PF00641.10; Description=Zn-finger in Ran binding protein and others
  Pfam annotation: Domain name=zf-RanBP; Domain location=236-267; Score= 18.8; E_value=0.0054; Accession=PF00641.10; Description=Zn-finger in Ran binding protein and others
  Pfam annotation: Domain name=zf-RanBP; Domain location=29-60; Score =36.5; E_value=1.1e-07; Accession=PF00641.10; Description=Zn-finger in Ran binding protein and others
  Pfam module annotation: Pfam domain module=zf-RanBP::zf-RanBP::zf -RanBP; Domain location=189-220::236-267::29-60
  Subcellular localization annotation: CTP_CleavageSite=11; ConfidenceScore=5.04e-01
MASAKFGAVAQVENRGALSKRSRNDVSVREGDWNCPQCGNVNFSFRNVCNRGACGAPRPSPSPSPRMMPAPPPAGYDRSPLFYGGGGGAPSPIPLGSGSYGAPYPHLGMRYGYGPPVGAPGSYGLFSSYGQPGPMGGMGYGPGPDLGRYSYGFRGSPMPVSSPWSGGALVENSDSIASRKRRGGPDGLSEGDWTCPKCDNINFSFRNTCNMKKCGAPRPTPGAPMGSSRKDNKDAPEGSWNCPECNNLNYPFRTVCNRKGCSYSKPAPTNN

SEQ ID NO: 79858 - protein, 119 aa, Setaria italica
  Transcript Sequence Number=SeqID_13884
SYSKYWLPVAGILISLLSIAYCCVLMLAVTIDEVLSLLDDSAGGTQIDCTVFCIRGPLMSRPMETDYGNWNLDLVPVILVSVLVMMSEVRDIATYINSNWTKVAVTCHLVNHASSQHSL

SEQ ID NO: 79859 - protein, 363 aa, Setaria italica
  Transcript Sequence Number=SeqID_13885
  Gene Ontology: Mol. function=metal ion binding
  Pfam annotation: Domain name=DUF594; Domain location=285-345; Score =93.0; E_value=1e-24; Accession=PF04578.5; Description=Protein of unknown function, DUF594
MSDTEYKGYGNGYLGMVLVILLSVLVMMSEVRDIATYIYSNWTKVAVSCHLVNHASSQHSLLKKKWIGLLLRRRCKLMKHWDEKIGQCTMLEIRPRTTLPVLLRRLLHLPDHKRKVKVPAAVKVCIMEVVRSTRNGDLSNGRASLRCRGQVGERLLWACHNKSASYTILTWHIATSILEVRYPHRLDQQQGSSSPIPNTDYKIVATHLSRYCAYLVTWCPELLPDDDAWSRSLYEDVKKDVEHVLAGCTAGDSLTPEANCQQLIEVLSADAKHEVLKEGARLGKQLLALVVEGEDDTAWKLLAEFWSEMIVYVAPSDNLKGHSEAIARGGELITLLWVLLFHAGIVSRPGEDDGVAPTSAGVV

SEQ ID NO: 79860 - protein, 250 aa, Setaria italica
  misc_feature (233)..(233): Xaa can be any naturally occurring amino acid
  Transcript Sequence Number=SeqID_13886
  Gene Ontology: Mol. function=electron carrier activity; Biological process=oxidation reduction
  Homolog annotation: Hit_ID=B9RNM3; Match level="QueryCoverage=96%, HitCoverage=51%, E-value=1e-64, Identity=54%"; Hit description=Amine oxidase, putative
LFQLVFKRLALGDNALPEDGIGAIASQLADRLPPGSVRLNSRAAAISRSGVTLDTGETIPGDLGVIVAVEQPEAEKLLPQLSVPEKPKKSERSTVCLYFSTDRALVEDPILLLNGSGKGIVNNMFFATNVAPSYAPAGKVLVSVSLVGSFADREDADLADEVVRELGGWFGSGEVASWKHLRTYRIGFTQPDQTPPTTPAGRDPRIGDGLYVCGDHWCSATFDGALVSGRRAXAEALAKDRGIVLLSLSL

SEQ ID NO: 79861 - protein, 66 aa, Setaria italica
  Transcript Sequence Number=SeqID_13887
KDLARELRIRLAKGWVFEEHGTFFFSFPPIVFSSRSQVFILKAEKILAWSFSSPVFFTVHSCNIVL

SEQ ID NO: 79862 - protein, 44 aa, Setaria italica
  Transcript Sequence Number=SeqID_13888
SMLSNLVGTLSPMHDRSSLTRFSFSLQAGFRLNHPYFSMFVKIY

SEQ ID NO: 79863 - protein, 152 aa, Setaria italica
  Transcript Sequence Number=SeqID_13889
  Gene Ontology: Mol. function=protein serine/threonine kinase activity; Biological process=protein amino acid phosphorylation
  Homolog annotation: Hit_ID=Q8W3E7; Match level="QueryCoverage=98%, HitCoverage=28%, E-value=4e-55, Identity=70%"; Hit description =Putative kinase
MSAAEILRAELSSRTPPFGLRLWIVIGICIWVVILFILGFLCFWSVHRRKPSKSFDKIPVSQIPDVSKEIAVDEVREHAVVQSFQVQESHALAVAVQEKHYEKDSGKMLAHLVRSKSSDADNMSQCSSAYHCERAGSSYSGDEGSSGNAETR

SEQ ID NO: 79864 - protein, 45 aa, Setaria italica
  Transcript Sequence Number=SeqID_13890
PPATHYTHGLFVRWRPQPMFPPLPRAHIIHFGPGRGVNHGLLFSI

SEQ ID NO: 79865 - protein, 307 aa, Setaria italica
  Transcript Sequence Number=SeqID_13891
  Gene Ontology: Mol. function=nucleoside-triphosphatase activity; Cellular component=cell soma; Biological process=regulation of transcription, DNA-dependent
  Homolog annotation: Hit_ID=Q6YVI6; Match level="QueryCoverage=99%, HitCoverage=38%, E-value=1e-159, Identity=88%"; Hit description =Putative DNA helicase
RRTGSFDLVIIDEAGQAIEPACWIPILQGKRCILAGDHCQLAPVILSRKALDGGLGKSLLETASSLHDGLLTTRLTVQYRMHDSIAMWASREMYHGLLESSRSVASHLLADSPVVKATWITRCPLLLLDTRMPYGALNIGCKEHLDPAGTGSFYNEGEADIVTQQVLNLVHCGVSPTAIAVQSPYIAQVQLLREKLEQYPELSAVEVSTIDSFQGREADAVIISMVRSNPLGAVGFLGDSRRINVAITRARKHITVVCDTSTICHSTFLARLLRHIRRYGQVKHVAPGTLDGVSGIGFSQPTLPSIG

SEQ ID NO: 79866 - protein, 89 aa, Setaria italica
  Transcript Sequence Number=SeqID_13892
  Gene Ontology: Mol. function=aspartyl esterase activity; Cellular component=cell wall; Biological process=cell wall modification
  Pfam annotation: Domain name=Pectinesterase; Domain location=2-89; Score=-238.0; E_value=0.0015; Accession=PF01095.11; Description =Pectinesterase
ANFTSVQQAVDAVPDHAAAAAARTLIAVDAGVYAEKVVVWGNKTGVTLQGRGNLETAVAWNATANSSGGSTSASATFAVLAAGFVAYNL

SEQ ID NO: 79867 - protein, 196 aa, Setaria italica
  misc_feature (18)..(18): Xaa can be any naturally occurring amino acid
  Transcript Sequence Number=SeqID_13893
  Gene Ontology: Mol. function=nucleic acid binding; Cellular component= nucleus; Biological process=negative regulation of transcription
  Homolog annotation: Hit_ID=Q6H7U1; Match level="QueryCoverage=100%, HitCoverage=9%, E-value=5e-91, Identity=87%"; Hit description =Putative SNF2 domain-containing protein
  Pfam annotation: Domain name=HEAT; Domain location=20-53; Score=4.5; E_value=14; Accession=PF02985.14; Description=HEAT repeat
  Pfam annotation: Domain name=HEAT; Domain location=96-132; Score =23.9; E_value=0.00066; Accession=PF02985.14; Description=HEAT repeat
  Pfam module annotation: Pfam domain module=HEAT::HEAT; Domain location=20-53::96-132
YSYMKNWEFLQDCAIRFXCVLSLDRFGDYVSDQVVAPVRETCAQALGAVLKYMHPSLVCHTLNILLQMQRRQEWEVRHGSLLGIKYLVAVRQEMLKDLLDYVIHACKAGLEDPDDDVRAVAAEALIPAADSLVRLNDQMLHSIVMLLWDILLDLDDLSPSTSSVMNLLAEIYSQPEMVPKMLGTAASGERGEFDLN

SEQ ID NO: 79868 - protein, 81 aa, Setaria italica
  misc_feature (10)..(10): Xaa can be any naturally occurring amino acid
  Transcript Sequence Number=SeqID_13894
  Gene Ontology: Mol. function=nucleotidyltransferase activity
AEHAGTGFSXRPPSLSSDDSAWAWHEADVIRVVDDVANGIPSTYTNGVSSPPSTPSCSQNESFDPAAHSITGNDINNEAHT

SEQ ID NO: 79869 - protein, 75 aa, Setaria italica
  Transcript Sequence Number=SeqID_13895
SNQLLQMKLQIKMKFWVTGTGKCDPARSLLRASRTEENNIISSEQLFIPLLISISQPGQLLIIIVIINYQPVSSF

SEQ ID NO: 79870 - protein, 111 aa, Setaria italica
  misc_feature (9)..(9): Xaa can be any naturally occurring amino acid
  misc_feature (28)..(28): Xaa can be any naturally occurring amino acid
  Transcript Sequence Number=SeqID_13896
RKVQNHQEXSKNRNTKDSSPSISQHKKXMEDNYPDDETIGSMLRNGKKKRLVVSNFSANIQDQESLRNIDLHDETIPSNIMDASLIHEPDSVVNSGNTGEAELLDDFDVRL

SEQ ID NO: 79871 - protein, 57 aa, Setaria italica
  Transcript Sequence Number=SeqID_13897
NILICSYCISVRNTAVNLAFLFVRTKDGRMRVYRGSIRCCIVLLSVCPSWRFVSQLD

SEQ ID NO: 79872 - protein, 56 aa, Setaria italica
  Transcript Sequence Number=SeqID_13898
MKESKNDVNQRNKQFSRYQPLLPVQLWKSINYQATITYNTEPDIKIHTDPTTRTRI

SEQ ID NO: 79873 - protein, 209 aa, Setaria italica
  misc_feature (48)..(48): Xaa can be any naturally occurring amino acid
  misc_feature (59)..(59): Xaa can be any naturally occurring amino acid
  misc_feature (92)..(92): Xaa can be any naturally occurring amino acid
  misc_feature (118)..(118): Xaa can be any naturally occurring amino acid
  Transcript Sequence Number=SeqID_13899
  Gene Ontology: Mol. function=transposase activity; Biological process= transposition, DNA-mediated
GLGWDEAKQTVDCSDKWWDEHLVRCKNREKGIKCHHMKFRKQGPKFLXDLHILFGKAHXVSGSSAPCPGDISSDEASDEDVDEVPKPHRRIXTVNLGKVTSSGVEEKDEKSPFFRLYXNTCLKIENAAERISTSVEASSAPPTNLVPTIAETMKVVKECGVQEGTALMYTTASLIVKPEFRELFSSLETMKERLDLIERELEKETMKRH

SEQ ID NO: 79874 - protein, 59 aa, Setaria italica
  Transcript Sequence Number=SeqID_13900
SASETSDWLYLTPFCSTLRIQFVNCVAVTWTTYERTCYHLFAIYFVLFGAVLANASLSF

SEQ ID NO: 79875 - protein, 365 aa, Setaria italica
  Transcript Sequence Number=SeqID_13901
  Gene Ontology: Mol. function=protein kinase activity; Cellular component=plasma membrane; Biological process=protein amino acid phosphorylation
  Homolog annotation: Hit_ID=Q9M7J5; Match level="QueryCoverage=100%, HitCoverage=84%, E-value=0.0, Identity=86%"; Hit description=Protein kinase
  Pfam annotation: Domain name=Pkinase; Domain location=21-302; Score =166.4; E_value=8.5e-47; Accession=PF00069.17; Description=Protein kinase domain
  Pfam annotation: Domain name=Pkinase_Tyr; Domain location=21-302; Score=97.9; E_value=3.4e-26; Accession=PF07714.9; Description =Protein tyrosine kinase
  Pfam module annotation: Pfam domain module=Pkinase::Pkinase_Tyr; Domain location=21-302::21-302
RPPNALRVFTFQELRSATRGFSRAQMLGEGGFGCVYRGNVRSAAGEPRRSIDVAIKQLSRKGLQGHKEWMTEVNVLGVVEHANLVKLIGYCAEDDERGMQLLLVYEFMPNGSLADHLSARSPRPASWAMRLRVALDTARGLKYLHEESEFKIIFRDLKPSNILLDENWNAKLSDFGLARLGPQEGSHVSTAVVGTIGYAAPEYIHTGRLSTKNDIWSFGVVLYELLTGRRPLDRNRPRGEQNLVDWVKPYSSDAKKLETVIDPRLQGNYSIKSAAQLASVANKCLVRHARYRPKMSEVLDMVQKIVESSELGTPEHPLISNSKELVSDEKKRKVLDLKRRIADIKAGEGRWFAWQRWTPKLVRTQ

SEQ ID NO: 79876 - protein, 81 aa, Setaria italica
  Transcript Sequence Number=SeqID_13902
  Pfam annotation: Domain name=A_thal_3526; Domain location=15-68; Score=122.6; E_value=1.3e-33; Accession=PF09713.2; Description=Plant protein 1589 of unknown function (A
MGDSSSSSASYIRMVHHLIEKCICFNLNKEECMDALENHANVNPVITSTVWKELEKENKEFFETYNKDRVERNIEAETMQR

SEQ ID NO: 79877 - protein, 59 aa, Setaria italica
  Transcript Sequence Number=SeqID_13903
KCLVARLHAPQTDQLFTLLRRPDKPQSLRSSEELTCPFCRTKALMWKCGLSGLQTNYLP

SEQ ID NO: 79878 - protein, 168 aa, Setaria italica
  misc_feature (88)..(88): Xaa can be any naturally occurring amino acid
  Transcript Sequence Number=SeqID_13904
  Gene Ontology: Mol. function=protein serine/threonine kinase activity; Biological process=protein amino acid phosphorylation
  Homolog annotation: Hit_ID=Q656X9; Match level="QueryCoverage=100%, HitCoverage=63%, E-value=6e-44, Identity=62%"; Hit description =Protein kinase ADK1-like
  Subcellular localization annotation: CTP_CleavageSite=18; ConfidenceScore=5.16e-01
WTILKYQQSQMAVPPRAMAAAAGQSSGMAPMANNRLSATERGEGGSGWSADPLRRQVPPAGINVVSLSKQKSPIRQEQSSSKDAVFDXFLGRSSGSLRRPAVSSSRVPTGEAETHSRTPDTSPGTFQRNAPPRRTSQTLEYSDPRLSSSGRLMPNSKNYESTLRGIQG

SEQ ID NO: 79879 - protein, 59 aa, Setaria italica
  Transcript Sequence Number=SeqID_13905
NRLMNSKGRLTDPATRHLHNIMRARLHAPQTDQLFTLLRRPDKPHFHMNTSSPQHIISC

SEQ ID NO: 79880 - protein, 65 aa, Setaria italica
  Transcript Sequence Number=SeqID_13906
  Gene Ontology: Mol. function=protein serine/threonine kinase activity; Cellular component=cytoplasm; Biological process=protein amino acid phosphorylation
  Homolog annotation: Hit_ID=Q8LR51; Match level="QueryCoverage=76%, HitCoverage=10%, E-value=4e-21, Identity=96%"; Hit description =Casein kinase I-like
TTIGYYGKRANQVYAIDFGLAKKYRDTSTHQHIPYRENKNLTGTARYASVNTHLGIGRFYFNGQC

SEQ ID NO: 79881 - protein, 44 aa, Setaria italica
  Transcript Sequence Number=SeqID_13907
  Gene Ontology: Mol. function=protein serine/threonine kinase activity; Biological process=protein amino acid phosphorylation
  Homolog annotation: Hit_ID=Q8LR51; Match level="QueryCoverage=84%, HitCoverage=7%, E-value=2e-11, Identity=83%"; Hit description=Casein kinase I-like
MLIVYLLGLEEARTSGWSSMDRRRTPPPITSVGTLSKQKAPVGN

SEQ ID NO: 79882 - protein, 205 aa, Setaria italica
  misc_feature (13)..(13): Xaa can be any naturally occurring amino acid
  misc_feature (50)..(50): Xaa can be any naturally occurring amino acid
  misc_feature (160)..(160): Xaa can be any naturally occurring amino acid
  Transcript Sequence Number=SeqID_13908
  Gene Ontology: Mol. function=protein serine/threonine kinase activity; Cellular component=cytoplasm; Biological process=protein amino acid phosphorylation
  Homolog annotation: Hit_ID=Q656X9; Match level="QueryCoverage=96%, HitCoverage=73%, E-value=7e-70, Identity=70%"; Hit description =Protein kinase ADK1-like
WEQKQKYEKISEXIATSTEALCRGYPTEFASYFHYCRSLRFEDCRPSTYXQYLKRLFRDLFIREGFQFDYVFDWTILKYQQSQMTSAPPRAIVPAVGQSSGMAPVANNNRHSGNEEGRRSGWSDMDPTRRQVPPPAINAGSLAKQKSPVRHEQSTSKDAXSTFLGRSSGSSRRPAVSSSREPSTEAEQTRSRTTDASPGHSRGQE

SEQ ID NO: 79883 - protein, 142 aa, Setaria italica
  Transcript Sequence Number=SeqID_13909
  Gene Ontology: Mol. function=protein serine/threonine kinase activity; Biological process=protein amino acid phosphorylation
  Homolog annotation: Hit_ID=Q656X9; Match level="QueryCoverage=100%, HitCoverage=53%, E-value=1e-52, Identity=77%"; Hit description =Protein kinase ADK1-like
  Subcellular localization annotation: CTP_CleavageSite=66; ConfidenceScore=5.19e-01
TEEGRRSGWSADPLRRQVPPAGINVVSLSKQKSPIRQEQSSSKDAVFPSSTFLGRSSGSLRRPAVSSSRVPTGEAETHSRTPDTSPGTFQRNAPPRRTSQTLEYSDPRLSSSGRLMPNSKNYESTLRGIQGLNFDANDRIHY

SEQ ID NO: 79884 - protein, 168 aa, Setaria italica
  Transcript Sequence Number=SeqID_13910
  Gene Ontology: Mol. function=protein serine/threonine kinase activity; Cellular component=cytoplasm; Biological process=protein amino acid phosphorylation
  Homolog annotation: Hit_ID=Q8LR51; Match level="QueryCoverage=100%, HitCoverage=35%, E-value=5e-92, Identity=93%"; Hit description =Casein kinase I-like
  Pfam annotation: Domain name=Pkinase; Domain location=9-165; Score= -22.2; E_value=3.6e-07; Accession=PF00069.17; Description=Protein kinase domain
  Pfam annotation: Domain name=Pkinase_Tyr; Domain location=9-165; Score=-172.0; E_value=0.027; Accession=PF07714.9; Description =Protein tyrosine kinase
  Pfam module annotation: Pfam domain module=Pkinase::Pkinase_Tyr; Domain location=9-165::9-165
MEPRIGNRFRVGRKLGSGSFGEIYLGTNVQTNEEVAIKLENVKTKHPQLLYESKLYRILQGGTGIPNVKWFGVEGDYNVLVMDLLGPSLEDLFSFCNRKLSLKTVLMLADQMINRVEFVHSKSFLHRDIKPDNFLMGLGKRANQVYAIDFGLAKKYRDTSTHQHIPYR

SEQ ID NO: 79885 - protein, 387 aa, Setaria italica
  misc_feature (216)..(216): Xaa can be any naturally occurring amino acid
  Transcript Sequence Number=SeqID_13911
  Gene Ontology: Mol. function=protein serine/threonine kinase activity; Cellular component=cytoplasm; Biological process=protein amino acid phosphorylation
  Homolog annotation: Hit_ID=Q8LR51; Match level="QueryCoverage=100%, HitCoverage=81%, E-value=1e-151, Identity=68%"; Hit description =Casein kinase I-like
  Pfam annotation: Domain name=Pkinase; Domain location=1-185; Score= -29.9; E_value=1e-06; Accession=PF00069.17; Description=Protein kinase domain
LEDLFSFCNSKLSLKTVLMLADQMINRVEFVHSKSFLHRDIKPDNFLMGLGKRANQVYAIDFGLAKKYRDTSTHQHIPYRENKNLTGTARYASVNTHLGIEQSRRDDMESLGYVLMYFLRGSLPWQGLKAGNKKQKYEKISERKIATSTEALCRGYPTEFASYFHYCRSLRFEDAPDYQYLKRLFRDLFIREGFQFDYVFDWTILKYQQSQMTSAXPPRAIVPAVGQSSGMAPVANNNRHSGNEEGRRSGWSDMDPTRRQVPPPAINAGSLAKQKSPVRHEQSTSKDAVFSSSTFLGRSSGSSRRPAVSSSREPSTEAEQTRSRTTDASPGAFQRSGAPRWSPQMLDSSDSRRSSSGRRHSSNPKNYESTIRGMQGLNFDGDDRVHY

SEQ ID NO: 79886 - protein, 469 aa, Setaria italica
  Transcript Sequence Number=SeqID_13912
  Gene Ontology: Mol. function=protein serine/threonine kinase activity; Cellular component=cytoplasm; Biological process=protein amino acid phosphorylation
  Homolog annotation: Hit_ID=Q8LR51; Match level="QueryCoverage=100%, HitCoverage=100%, E-value=0.0, Identity=73%"; Hit description=Casein kinase I-like
  Pfam annotation: Domain name=Pkinase; Domain location=9-273; Score =137.5; E_value=4.2e-38; Accession=PF00069.17; Description=Protein kinase domain
  Pfam annotation: Domain name=Pkinase_Tyr; Domain location=9-273; Score=-130.9; E_value=5e-05; Accession=PF07714.9; Description =Protein tyrosine kinase
  Pfam module annotation: Pfam domain module=Pkinase::Pkinase_Tyr; Domain location=9-273::9-273
MEPRVANKFRLGRKLGSGSFGEIYLGTHVQTNEEVAIKLESVKTKHPQLLYESKLYRILQGGTGIPNVKWFGVEGDYNVLVMDLLGPSLEDLFSFCNRKLSLKTVLMLADQMINRVEYVHIKSFLHRDIKPDNFLMGLGKRANQVYMIDFGLAKKYRDSATHQHIPYRENKNLTGTARYASVNTHLGIEQSRRDDLESLGYVLMYFLKGSLPWQGLKAGTKKQKYEKISERKIATSVEALCRGYPTEFVSYFHYCRSLRFEDTPDYQYLKRLFRDLFIREGFQFDYVFDWTILKYQQSQMAVPPRAMAAAAGQSSGMAPMANNRLSATEEGRRSGWSADPLRRQVPPAGINVVSLSKQKSPIRQEQSSSKDAVFPSSTFLGRSSGSLRRPAVSSSRVPTGEAETHSRTPDTSPGTFQRNAPPRRTSQTLEYSDPRLSSSGRLMPNSKNYESTLRGIQGLNFDANDRIHY

SEQ ID NO: 79887 - protein, 440 aa, Setaria italica
  Transcript Sequence Number=SeqID_13913
  Gene Ontology: Mol. function=protein serine/threonine kinase activity; Cellular component=cytoplasm; Biological process=protein amino acid phosphorylation
  Homolog annotation: Hit_ID=Q8LR51; Match level="QueryCoverage=99%, HitCoverage=92%, E-value=0.0, Identity=87%"; Hit description=Casein kinase I-like
  Pfam annotation: Domain name=Pkinase; Domain location=9-278; Score =153.8; E_value=5.1e-43; Accession=PF00069.17; Description=Protein kinase domain
  Pfam annotation: Domain name=Pkinase_Tyr; Domain location=9-273; Score=-123.1; E_value=1.5e-05; Accession=PF07714.9; Description =Protein tyrosine kinase
  Pfam module annotation: Pfam domain module=Pkinase::Pkinase_Tyr; Domain location=9-278::9-273
MEPRVGNKFRLGRKIGSGSFGEIYLGTNIQTNEEVAIKLENVKTKHPQLLYESKIYRILQGGTGIPNVRWFGVEGDYNVLVMDLLGPSLEDLFNFCSRKLSLKTVLMLADQMINRVEFVHSKSFLHRDIKPDNFLMGLGRRANQVYVIDFGLAKKYRDTSTHQHIPYRENKNLTGTARYASVNTHLGIEQSRRDDLESLGYVLMYFLRGSLPWQGLKAGTKKQKYEKISEKKVATSIEALCRGYPTEFASYFHYCRSLRFDDKPDYSYLKRLFRDLFIREGFQFDYVFDWTILKYQQSQIATAPPRAVGHGAGPSGLAPALQNDRQSGLEEARTSGWSSMDRRRTPPPITSVGTLSKQKAPVGNDVTASKDPVISGPNFLGRSSGSSRRPVVSSSRDVVATDSSEPSRTRTTDASPGAFRRASGPQRSSPVHSAETKALI

SEQ ID NO: 79888 - protein, 382 aa, Setaria italica
  Transcript Sequence Number=SeqID_13914
  Gene Ontology: Mol. function=metal ion binding; Cellular component =cytoplasm; Biological process=ubiquitin-dependent protein catabolic process
  Homolog annotation: Hit_ID=Q93Y48; Match level="QueryCoverage=100%, HitCoverage=73%, E-value=0.0, Identity=93%"; Hit description=COP1 (Fragment)
  Pfam annotation: Domain name=WD40; Domain location=117-156; Score =13.5; E_value=0.92; Accession=PF00400.24; Description=WD domain, G -beta repeat
  Pfam annotation: Domain name=WD40; Domain location=160-199; Score =34.2; E_value=5.1e-07; Accession=PF00400.24; Description=WD domain, G-beta repeat
  Pfam annotation: Domain name=WD40; Domain location=202-241; Score =14.1; E_value=0.58; Accession=PF00400.24; Description=WD domain, G -beta repeat
  Pfam annotation: Domain name=WD40; Domain location=246-283; Score =35.6; E_value=2e-07; Accession=PF00400.24; Description=WD domain, G -beta repeat
  Pfam annotation: Domain name=WD40; Domain location=287-325; Score =13.5; E_value=0.89; Accession=PF00400.24; Description=WD domain, G -beta repeat
  Pfam annotation: Domain name=WD40; Domain location=68-106; Score =12.5; E_value=1.3; Accession=PF00400.24; Description=WD domain, G -beta repeat
  Pfam module annotation: Pfam domain module=WD40::WD40::WD40::WD40::WD4 0::WD40; Domain location=117-156::160-199::202-241::246-283::287 -325::68-106
GKKEEVQAQFNELQEYYLQRRRTGAQSRRQEERDIVAMNREGYHAGLQDFQSVLTTFTRYSRLRVIAELRHGDLFHSANIVSSIEFDRDDELFATAGVSKRIKVFEFSSVVNEPSDVHCPVVEMATRSKLSCLSWNKYSKNVIASSDYEGIVTVWDVQTRQSVMEYEEHEKRAWSVDFSRTEPSMLVSGSDDCKVKVWCTKQEASVINIDMKANICSVKYNPGSNFYVAVGSADHHIHYFDLRNPSAPVHIFGGHKKAVSYVKFLSNNELASASTDSTLRLWDVKDNCPVRTFRGHKNEKNFVGLSVNNEYIACGSETNEVFVYHKAISKPAASHRFVSSDLDDADDDPGSYFISAVCWKSDSPTMLTANSQGTIKVLVLAP

SEQ ID NO: 79889 - protein, 83 aa, Setaria italica
  Transcript Sequence Number=SeqID_13915
ATEREMWFRHGSSFFAKQKNQAHSCCMLPLPKRLKPPIVSAVMMDKLCSITYHTNRNRPFLLSHCPSPHSQRNHQQTNLLSLA

SEQ ID NO: 79890 - protein, 135 aa, Setaria italica
  Transcript Sequence Number=SeqID_13916
  Gene Ontology: Mol. function=protein binding; Cellular component =membrane; Biological process=endocytosis
  Homolog annotation: Hit_ID=B4FRD1; Match level="QueryCoverage=74%, HitCoverage=34%, E-value=8e-55, Identity=98%"; Hit description =Adaptin ear-binding coat-associated protein 1
  Pfam annotation: Domain name=DUF1681; Domain location=4-135; Score =126.4; E_value=9.5e-35; Accession=PF07933.6; Description=Protein of unknown function (DUF1681)
LIALVVKSRADEWNVNKWAWEGALKVVSKGEECIIKLEDKNTGELYARAFLREGEQHPVEPVIDSSRYFVLRVEENIDGRQRHAFIGLGFRERPEAYDFQAALHDHMKYPSVHLKHDMPIIKKHTISPPVQFLND

SEQ ID NO: 79891 - protein, 221 aa, Setaria italica
  Transcript Sequence Number=SeqID_13917
  Gene Ontology: Mol. function=protein binding; Cellular component =membrane; Biological process=endocytosis
  Homolog annotation: Hit_ID=B4FRD1; Match level="QueryCoverage=85%, HitCoverage=65%, E-value=1e-104, Identity=94%"; Hit description =Adaptin ear-binding coat-associated protein 1
  Pfam annotation: Domain name=DUF1681; Domain location=18-180; Score =296.0; E_value=7.9e-86; Accession=PF07933.6; Description=Protein of unknown function (DUF1681)
MASGGYGEQAPAPAEAEPLEIVLFQVAECYVYLIPPRKTAASYRADEWNVNKWAWEGALKVVSKGEECIIKLEDKNTGELYARAFLREGEQHPVEPVIDSSRYFVLRVEENIDGRQRHAFIGLGFRERPEAYDFQAALHDHMKYLNKKKAAEEMVQHYEKQSSVDYSLKEGETLVLQLKSKETGTKTKSAFFEQGLNKLSLSEKTNSKEAPVSLKLPPTSP

SEQ ID NO: 79892 - protein, 155 aa, Setaria italica
  Transcript Sequence Number=SeqID_13918
  Gene Ontology: Cellular component=membrane; Biological process =endocytosis
  Homolog annotation: Hit_ID=B4FRD1; Match level="QueryCoverage=100%, HitCoverage=54%, E-value=2e-43, Identity=63%"; Hit description =Adaptin ear-binding coat-associated protein 1
FVRLLHYQRYLNKKKAAEEMVQHYEKQSSVDYSLKEGETLVLQLKSKETGTKTKSAFFEQGLNKLSLSEKTNSKEAPVSLKLPPPPPSPVSPTDSGVAASPFKAEFPPQEPAAEPTSTTSGIPAKTELSPEQPAAAEKVEQETVDEDFGDFQAAG

SEQ ID NO: 79893 - protein, 44 aa, Setaria italica
  Transcript Sequence Number=SeqID_13919
TNSSLRQKTAENCIQCPSVLSENSVNQFCFERIVNQFCYILSSW

SEQ ID NO: 79894 - protein, 79 aa, Setaria italica
  misc_feature (61)..(61): Xaa can be any naturally occurring amino acid
  Transcript Sequence Number=SeqID_13920
  Gene Ontology: Mol. function=nucleoside-triphosphatase activity; Biological process=defense response
  Homolog annotation: Hit_ID=Q84KC8; Match level="QueryCoverage=94%, HitCoverage=4%, E-value=2e-22, Identity=62%"; Hit description=NBS -LRR disease resistance protein homologue
KKLKFSPLAARTVGRLLKKDFTREHWMRVLERKEWGYQKGDEDIMPALRISYHYLPFHRKXCFQLCALFLEDYEFDGLD

SEQ ID NO: 79895 - protein, 291 aa, Setaria italica
  Transcript Sequence Number=SeqID_13921
  Gene Ontology: Mol. function=nucleic acid binding
  Homolog annotation: Hit_ID=B9SVZ5; Match level="QueryCoverage=99%, HitCoverage=36%, E-value=7e-21, Identity=30%"; Hit description =Splicing factor, arginine/serine-rich, putative
  Pfam annotation: Domain name=RRM_1; Domain location=3-64; Score=41.3; E_value=3.9e-09; Accession=PF00076.14; Description=RNA recognition motif. (a.k.a. RRM, RBD, o
MSLHIGRLSQDVRHSYLEQLFQRFGRCTVNLKDGYGFAVYDSDGDATRALRALHGKYVCGERITVNWSKQQPRCSQGFRRSSRFVESFRGRNVRDARDSIRFRDSVARKSHPANHDQGHDPDAVPEKDSHKFTEVVDDAGENICDDLADAKRDEGGTIDEDPGEVKTDKGGTIDVDPEEVKAYKGGTIDEDPGEVKAGEGGTINANAIEHDRWAETGKGTPGGDSDDFDRYEPYHGYDRQEETENVTKASSYDSREPRRSSEKWWEHSDKHVDVSHDKSRSPPTCYKCGVA

SEQ ID NO: 79896 - protein, 134 aa, Setaria italica
  Transcript Sequence Number=SeqID_13922
  Gene Ontology: Mol. function=ATP-dependent helicase activity; Cellular component=vacuole; Biological process=nuclear-transcribed mRNA catabolic process, nonsense-mediated decay
  Homolog annotation: Hit_ID=Q5JKF2; Match level="QueryCoverage=35%, HitCoverage=6%, E-value=2e-18, Identity=87%"; Hit description=DEAD -box ATP-dependent RNA helicase 40
  Pfam annotation: Domain name=WW; Domain location=19-49; Score=37.7; E_ value=4.8e-08; Accession=PF00397.18; Description=WW domain
MSGSSGRAAPRYAPDDPSLPKPWRGLVDGTTGYLYYWNPETNVTQYEKPIPPEDQLPPPPPPLPPPPPRSRDRRDRSRSRSRTPPRRDHRDRDRDRDRDRRHDEHASSKSASSHHHPAPAAVADDPSTEAYRRR

SEQ ID NO: 79897 - protein, 194 aa, Setaria italica
  Transcript Sequence Number=SeqID_13923
  Gene Ontology: Mol. function=protein binding
  Homolog annotation: Hit_ID=B6TM03; Match level="QueryCoverage=95%, HitCoverage=54%, E-value=4e-90, Identity=84%"; Hit description =Maternal Effect Lethal family member
MSGGGGGAADSRVETISRLAQWRIESLGPCSYRRSEPFRLGIWNWYLSVEKSRSVCIRLFPEPGRVAKDQPPLARFILRVSCPGPPRRSCASPVQEQLLRTSDDFVWQVDVMSHGRFTIDVEFLDLRVATNNATESSSSIWPNEGMVQRIASKSTLGCLSRLLTESIHTDVTINTTDGVLKAHKAILAACSPVF

SEQ ID NO: 79898 - protein, 253 aa, Setaria italica
  Transcript Sequence Number=SeqID_13924
  Gene Ontology: Mol. function=protein binding; Cellular component =nucleus; Biological process=ubiquitin-dependent protein catabolic process
  Homolog annotation: Hit_ID=B6TM03; Match level="QueryCoverage=96%, HitCoverage=72%, E-value=1e-121, Identity=84%"; Hit description =Maternal Effect Lethal family member
  Pfam annotation: Domain name=BTB; Domain location=78-186; Score=81.8; E_value=2.4e-21; Accession=PF00651.23; Description=BTBPOZ domain
WPLLLTLFLCVAVQEQLLRTSDDFVWQVDVMSHGRFTIDVEFLDLRVATNNATESSSSIWPNEGMVQRIASKSTLGCLSRLLTESIHTDVTINTTDGVLKAHKAILAACSPVFESMFVHDLKEKESSTIDISDMCLESCSALLGFIYGAIEPEQFWKHRLPLLAAANKYGIGDIKGCCEESLLEDINSSNVLERLHVAWLYQLERLKKGCLSYLFVFGKIYDVRDEIHSFFHHADRELMLEMFQEVLSVWKPI

SEQ ID NO: 79899 - protein, 80 aa, Setaria italica
  Transcript Sequence Number=SeqID_13925
MSCRLNNFFVLRLCPISPGKQTGTGFIGMDRDKGASFKLSEDPDAAERHASCKGNPATNEWIPSADTVYPASDKPSRSDS

SEQ ID NO: 79900 - protein, 104 aa, Setaria italica
  Transcript Sequence Number=SeqID_13926
VGEEFVETEYYKDLGGVGKQHHTTGTGFIGMDRDKGASFKLSEDPDAAERHASCKGNPATNEWIPSADTVRSGRRARMIPAYPMLLWRVDTCHQRAIWCLFTNA

SEQ ID NO: 79901 - protein, 161 aa, Setaria italica
  Transcript Sequence Number=SeqID_13927
MSRPNRSDAHLSPEDEAAREAEVRGYFDDAAPKRHTKPSRSEHSPVYADAIVPDSSHPELDKFQDLEAHTERLVYEGGKVGEEFVETEYYKDLGGVGKQHHTTGTGFIGMDRDKGASFKLSEDPDAAERHASCKGNPATNEWIPSADTVYPASDKPSRSDS

SEQ ID NO: 79902 - protein, 85 aa, Setaria italica
  Transcript Sequence Number=SeqID_13928
MSVPGVASRAADRFYCPPARRHLLDKQQKQHPPLTAAAVEEPAKPTPELRRDPPPSPAPETATAANNLESFIASTAVRVPARRHS

SEQ ID NO: 79903 - protein, 72 aa, Setaria italica
  Transcript Sequence Number=SeqID_13929
FFLVTKNQRMLRCFIHGNGSIYMVSAPQSQQKQQNDMSSSYSMDTNHPSQHLSLPLSPHHQLTSPSLSLSLY

SEQ ID NO: 79904 - protein, 311 aa, Setaria italica
  misc_feature (14)..(14): Xaa can be any naturally occurring amino acid
  misc_feature (16)..(16): Xaa can be any naturally occurring amino acid
  misc_feature (217)..(217): Xaa can be any naturally occurring amino acid
  Transcript Sequence Number=SeqID_13930
  Gene Ontology: Cellular component=cytoplasm; Biological process =steroid metabolic process
  Homolog annotation: Hit_ID=Q10E86; Match level="QueryCoverage=100%, HitCoverage=53%, E-value=0.0, Identity=96%"; Hit description =Oxysterol-binding protein, expressed
  Pfam annotation: Domain name=Oxysterol_BP; Domain location=1-290; Score=2.7; E_value=3.3e-09; Accession=PF01237.10; Description =Oxysterol-binding protein
GYASTDGRSCKPFXPXLGETYEADYPDKGLRFFSEKVSHHPLVVACHCEGTGWRFWADSNLKSKFWGRSIQLDPVGALTLEFDDGEVFQWSKVTTSIYNLILGKLYCDHYGTMRIQGNREYSCKLKFKEQSIIDRNPHQVQGVVQDRSGRTVATLFGKWDESMHYVMGDCFGKGKGSEQFSEAHLLWKRSKPPKFPTRYNLTRFAITLNELTPGLKXEKLPPTDSRLRPDQRCLENGEYERANAEKLRLEQRQRQARKMQESGWKPRWFAKDKATDTYRYLGGYWESREKSSWEGCPDIFGQVPNDPMITD

SEQ ID NO: 79905 - protein, 395 aa, Setaria italica
  Transcript Sequence Number=SeqID_13931
  Gene Ontology: Mol. function=pseudouridine synthase activity; Biological process=pseudouridine synthesis
  Homolog annotation: Hit_ID=B6T6Q0; Match level="QueryCoverage=90%, HitCoverage=94%, E-value=0.0, Identity=90%"; Hit description=RNA binding protein
  Pfam annotation: Domain name=PseudoU_synth_2; Domain location=121 -302; Score=110.9; E_value=4.4e-30; Accession=PF00849.14; Description= RNA pseudouridylate synthase
MAAAAGETPADDGAPPPGALYSFGTPWPELNEGLSYSDEFRCADADAATTLIEFYSSNYKSSAPLLGWIKRIRNGQITVDGQVITDPDMTLRDGSKLVYHRLPWPEPFAPYLLEVLYEDDDMVALNKPSGLQVLPKGLFQQRTVLAQVQMKDWKMTSCCSKRKDAQSHPVPVHRLGRGTSGLLLCAKTKVAKVRLASYFAEGAINAGNKRDKSEFQEERKISKFYRALVSGILDNDEVVVTQPIGLVHYPGVAEGLYAACSSGKPAMSKVCVLERLAHQNHTLVQVEIHSGRPHQIRIHLAYIGHPLVDDPLYGIGGHPKFVEPESAGTDSSFAYDGGYERPLQPVPGDCGYHLHAHWLVLCHPTTNEMVKITAPLPHILQTQEERTCRLERVGD

SEQ ID NO: 79906 - protein, 129 aa, Setaria italica
  Transcript Sequence Number=SeqID_13932
  Gene Ontology: Mol. function=aspartic-type endopeptidase activity; Biological process=DNA integration
SDRSLWLNANFNLIDYKFEPVLVLFLRPCINVMFFILLIGNIFEAETIVEGETIQSSRWPCTRSFAKPEFFSRDKNSHEKGNSPTSAADSSAKNSSPSLAGDVSPKNNASALATENNLTPGKRQQSKKT

SEQ ID NO: 79907 - protein, 108 aa, Setaria italica
  Transcript Sequence Number=SeqID_13933
  Homolog annotation: Hit_ID=Q2R127; Match level="QueryCoverage=88%, HitCoverage=31%, E-value=1e-31, Identity=71%"; Hit description=Plant viral-response family protein, expressed
  Pfam annotation: Domain name=DUF716; Domain location=1-72; Score=3.9; E_value=0.00029; Accession=PF04819.4; Description=Family of unknown function (DUF716)
AAGVLIALQGLWFYQTALTLYGPMLPAGCGPDGGGVDCRSRAAEERAEQLANLQLFGLVFLAFVYVLGCYAVAAARYGHPDLAAMHEEHVAALECRGAVGARAEECAI

SEQ ID NO: 79908 - protein, 163 aa, Setaria italica
  misc_feature (141)..(141): Xaa can be any naturally occurring amino acid
  Transcript Sequence Number=SeqID_13934
  Homolog annotation: Hit_ID=Q6ESP7; Match level="QueryCoverage=98%, HitCoverage=23%, E-value=6e-60, Identity=71%"; Hit description =Pentatricopeptide (PPR) repeat-containing protein-like
GYPEEAILLYRGLKLRQIGLDEKTVTSGLKSCTELRNLLLGKGMHADSLKLGLSRDNFVGSSLVRLYSKLARMDDSEKAFEEILDKDTVSYTSMITGYSENMDSTSWNAFEIASDMLWRNLEVSRVTLVSLLQVAGNLGAXLEKAKSVHCYSIRRGNWVSQMK

SEQ ID NO: 79909 - protein, 441 aa, Setaria italica
  Transcript Sequence Number=SeqID_13935
  Gene Ontology: Mol. function=heat shock protein binding; Cellular component=endoplasmic reticulum membrane; Biological process=protein folding
  Homolog annotation: Hit_ID=B9SVD0; Match level="QueryCoverage=97%, HitCoverage=79%, E-value=1e-138, Identity=58%"; Hit description=Heat shock protein binding protein, putative
  Pfam annotation: Domain name=DnaJ; Domain location=184-248; Score =89.7; E_value=1e-23; Accession=PF00226.23; Description=DnaJ domain
LLLLGAAGAVVHYMGYTPGLFIVGLFGILIMWMYGYFWITGMLLVAGGCMCSLKHARYVIPILTTYAIYCVAIRVGWLGVFLTLNLSFLANDLLNKLLQGYEESTEEKFEDMKDSDPVMDEFYRSCEFPPAPDSEPETVSSAKPYCSSPTQDVLHVQKEEPPSKVVKSDSSSLDEIKRIMDGSNHYEVLGIPRNRSIDQKSLKKEYHRMVLLVHPDKNMGNPLACESFKKLQSAYEVLSDFTKRNSYDEQLRKEESQKMTPRSRVVSQQGGVEFLSEESRRIQCTKCGNFHIWICTKRSKTKARFCQGCDQYHQAKDGDGWVETRFSTSYKMEIPRAFVCAESKIFDVSEWATCQGMECKPNTHGPTFMVNMVGADRMPQRSYSSRYPFSLDAEMIPEDEFELWLQQALASGVFADSPKRRKSWSPFKLPQKGIKSWRRSS

SEQ ID NO: 79910 - protein, 84 aa, Setaria italica
  Transcript Sequence Number=SeqID_13936
ILTGKRPPFGTRHLQETEMKCVFSVFWFASSHLCAPHNRGKGGAVINQPKDYSINKNLQRVLGQDVAQSMALQPPLCMVGTVFR

SEQ ID NO: 79911 - protein, 94 aa, Setaria italica
  Transcript Sequence Number=SeqID_13937
  Gene Ontology: Mol. function=transcription factor activity; Cellular component=nucleus; Biological process=regulation of transcription, DNA-dependent
  Homolog annotation: Hit_ID=B9T565; Match level="QueryCoverage=61%, HitCoverage=6%, E-value=3e-15, Identity=65%"; Hit description =Nuclear transcription factor, X-box binding, putative
EVLFSTKFVYSLNLRLNYICLIILIILTLWYLILSIKVNVRCACNTLKQEWICQDVLKEYRNSGRDPKEVPKSQFGAGLLACGEDCKKKVKVQD

SEQ ID NO: 79912 - protein, 402 aa, Setaria italica
  Transcript Sequence Number=SeqID_13938
  Gene Ontology: Mol. function=transcription factor activity; Cellular component=nucleus; Biological process=regulation of transcription, DNA-dependent
  Homolog annotation: Hit_ID=B9T565; Match level="QueryCoverage=99%, HitCoverage=44%, E-value=1e-118, Identity=57%"; Hit description =Nuclear transcription factor, X-box binding, putative
  Pfam annotation: Domain name=zf-NF-X1; Domain location=113-126; Score= 5.6; E_value=1.9; Accession=PF01422.9; Description=NF-X1 type zinc finger
  Pfam annotation: Domain name=zf-NF-X1; Domain location=165-183; Score= 20.2; E_value=0.0089; Accession=PF01422.9; Description=NF-X1 type zinc finger
  Pfam annotation: Domain name=zf-NF-X1; Domain location=228-249; Score= 17.6; E_value=0.053; Accession=PF01422.9; Description=NF-X1 type zinc finger
  Pfam annotation: Domain name=zf-NF-X1; Domain location=8-23; Score =3.0; E_value=3.9; Accession=PF01422.9; Description=NF-X1 type zinc finger
  Pfam module annotation: Pfam domain module=zf-NF-X1::zf-NF-X1::zf-NF -X1::zf-NF-X1; Domain location=113-126::165-183::228-249::8-23
LCRHKLECRPHKCHYGACPPCKLTCGEELSCGHICKERCHGPISPPNPEFTLKPTKKKMEKHIECTPGTLCPPCKEVVVVPCFGQHLGQERAMPCSKWRPFPCQNLCGNPLLCGNHYCTKSCHVLEVPLNQPEGDPLPSVSKESTLAEPCEQCNLPCQRVREPSCSHRCPLRCHPSDCPPCKVLVKKPCHCGAMVHAFECVYFNNLKAKEQVKVRSCGGPCHRKLPNCSHLCSEVCHPGTCPSVDQCMKKVNVRCACNTLKQEWICQDVLKEYRNSGRDPKEVPKSQFGAGLLACGEDCKKKVKVQDSELHLRKTQENKIPAMEVANVPKRRKRRDRGQEVEVSKFQEVKTYVLRVLLIIFLSMIIAAGLYLLWKGIFRLSDWMNEMEEQRTSRRHPRGAML

SEQ ID NO: 79913 - protein, 124 aa, Setaria italica
  misc_feature (99)..(99): Xaa can be any naturally occurring amino acid
  Transcript Sequence Number=SeqID_13939
  Gene Ontology: Cellular component=integral to membrane
  Homolog annotation: Hit_ID=B9R9E8; Match level="QueryCoverage=85%, HitCoverage=32%, E-value=2e-20, Identity=51%"; Hit description=KOM, putative
  Pfam annotation: Domain name=Rhomboid; Domain location=1-124; Score =94.1; E_value=4.9e-25; Accession=PF01694.14; Description=Rhomboid family
LLINMLCLVFIGIRLEQEFGFARIGLVYLISGFGGSLMSALFIRSSVVSVGASGALFGLIGSMLSELITNWSLYANKAAALASLVLVIAVNLALGILPXVDNFAHIGGLVSGFLLGFVFLVRPS

SEQ ID NO: 79914 - protein, 81 aa, Setaria italica
  Transcript Sequence Number=SeqID_13940
  Gene Ontology: Mol. function=protein transporter activity; Cellular component=nuclear pore; Biological process=protein import into nucleus, docking
  Homolog annotation: Hit_ID=Q53QC6; Match level="QueryCoverage=100%, HitCoverage=7%, E-value=3e-36, Identity=91%"; Hit description =Importin-beta N-terminal domain containing protein, expressed
LWPELTPQLKLVIQSSNLISPGQHPEWNTINALKVLQSVVRPFQYFLNPKVAKEPVPQQLEQIAAEILVPLQVTFHHFADK

SEQ ID NO: 79915 - protein, 103 aa, Setaria italica
  Transcript Sequence Number=SeqID_13941
  Gene Ontology: Mol. function=hydrolase activity, acting on ester bonds; Biological process=lipid metabolic process
  Homolog annotation: Hit_ID=Q05D21; Match level="QueryCoverage=96%, HitCoverage=39%, E-value=2e-09, Identity=36%"; Hit description=IAH1 protein (Fragment)
ERTNAAAGVYARACVEVARQCGIRAIDIWSRMQKFTGWEKCFLRDGLHLTPRGNRVLFEEVVFALKDANLSLEALPADLPLFGDMDPDDPAKSFEDDDEWAEY

SEQ ID NO: 79916 - protein, 111 aa, Setaria italica
  Transcript Sequence Number=SeqID_13942
  Gene Ontology: Mol. function=RNA-3'-phosphate cyclase activity; Cellular component=phagocytic vesicle; Biological process=ribosome biogenesis
  Homolog annotation: Hit_ID=Q9C578; Match level="QueryCoverage=92%, HitCoverage=27%, E-value=8e-34, Identity=66%"; Hit description =Probable RNA 3'-terminal phosphate cyclase-like protein
NENRNEESEKPELMSPEDLGVQAASMLLEEVAQGGVVDSTHQGLLFILCALCPPDVSKVRVGQLTPYGIETLRNIRDFLGVKFVISPDPNSETVILKCVGAGVTNLSRKIQ

SEQ ID NO: 79917 - protein, 208 aa, Setaria italica
  Transcript Sequence Number=SeqID_13943
  Gene Ontology: Mol. function=protein heterodimerization activity; Cellular component=ubiquitin ligase complex; Biological process =negative regulation of protein export from nucleus
  Homolog annotation: Hit_ID=B6UDX0; Match level="QueryCoverage=100%, HitCoverage=100%, E-value=1e-108, Identity=92%"; Hit description =Tankyrase 1
  Pfam annotation: Domain name=Ank; Domain location=102-134; Score =10.5; E_value=1.1; Accession=PF00023.22; Description=Ankyrin repeat
  Pfam annotation: Domain name=Ank; Domain location=143-175; Score =41.5; E_value=3.4e-09; Accession=PF00023.22; Description=Ankyrin repeat
  Pfam annotation: Domain name=Ank; Domain location=69-101; Score=45.5; E_value=2.1e-10; Accession=PF00023.22; Description=Ankyrin repeat
  Pfam module annotation: Pfam domain module=Ank::Ank::Ank; Domain location=102-134::143-175::69-101
MAVPGGRNGLRDDDDDIAEHAEAFGGVSDDEEVPPHLRALANAAQTGDVAALLAALDNHDGSIDVPVEDGDTLLHLACLYGHLPCVQLLLERGASLECKDEEGAIPLHDACAGGFTEMVQYILNFAANKDGCVVRMLNTVDSEGDTPLHHAARGEHLDVVKLLLEAGASPKKENTYGQTPADMADQDTEVRGLLTAKQIEASTHMSDD

SEQ ID NO: 79918 - protein, 113 aa, Setaria italica
  misc_feature (93)..(93): Xaa can be any naturally occurring amino acid
  Transcript Sequence Number=SeqID_13944
  Gene Ontology: Mol. function=hydrolase activity, hydrolyzing O -glycosyl compounds; Cellular component=chloroplast; Biological process=carbohydrate metabolic process
  Homolog annotation: Hit_ID=Q9FN05; Match level="QueryCoverage=70%, HitCoverage=8%, E-value=2e-09, Identity=45%"; Hit description =Glucosidase II alpha subunit
MDPPPRRLAAPLLLLLLVAAASPAARAWKKDEFRNCNQTPFCKRARTRAPHSLDAPLSLAAGSLAISPDGSISAELSHPSRPRPLVLRLSALXPPHALRLQIDEDYSTATAPA

SEQ ID NO: 79919 - protein, 121 aa, Setaria italica
  Transcript Sequence Number=SeqID_13945
  Subcellular localization annotation: CTP_CleavageSite=35; ConfidenceScore=5.59e-01
MASVGFGSTVAAVAPASSSAAAGRRRPRRSVLAVPAATRGSPAPAKEEKSLVDFIFSSIFKKDQLVETDPLLNKVDGAPAAASRAKPRGGTTSGGKKPASSSDDGGSGGGFNLGGLFAKKD

SEQ ID NO: 79920 - protein, 481 aa, Setaria italica
  misc_feature (189)..(189): Xaa can be any naturally occurring amino acid
  Transcript Sequence Number=SeqID_13946
  Gene Ontology: Mol. function=centromeric DNA binding; Cellular component=chromosome, centromeric region; Biological process=mitosis
  Homolog annotation: Hit_ID=O48626; Match level="QueryCoverage=94%, HitCoverage=60%, E-value=1e-129, Identity=51%"; Hit description =Centromere/kinetochore protein zw10 homolog
  Pfam annotation: Domain name=Zw10; Domain location=1-314; Score= -96.1; E_value=0.00042; Accession=PF06248.5; Description =Centromerekinetochore Zw10
EGGPKHSVSVLSIVPSQELKDNKDGSNLYSRIIDAIKFICKFICMENSKWVQSFAKLTWPRISDLVITHFLSKAVPNEASKLIEFQDVVRSTAEFENKLRSMMFLLPDRKDGKLTQFVDDVEVHFAVRKRSEILVKARNILVQYDYDNPLESGDRGDSVVDLLFLPEKCFTSKSALLLMELVHGALKSXDASLSSARVAKEFCFAARDVLLLYKAIVPVQLEKQLHSISQVAAIVHNDFYHLSQEILGLAFQYRADFPIDLQKQVVFVDLAPIFSHMADVVLRRQIQLAIDTISEAIDGADGFQNTHQPQHYESAKFSIEQAVFILEKIRIMWESILPKSTYRKSMCHVLGSVFSRITRDMLLIDDMAAEETLQLQGLIHLALENLSSLFLSLVENGDGSTKFLDHDTWIQLDGIVPSLKKFRKLAELLDMSLKSITAAWESGDLVSCGFTSSEVQNFIKAIFADSPLRKECLGWIVRTPA

SEQ ID NO: 79921 - protein, 137 aa, Setaria italica
  Transcript Sequence Number=SeqID_13947
  Gene Ontology: Mol. function=protein tyrosine kinase activity; Biological process=protein amino acid phosphorylation
  Homolog annotation: Hit_ID=Q10MS0; Match level="QueryCoverage=100%, HitCoverage=17%, E-value=1e-14, Identity=36%"; Hit description =Leucine Rich Repeat family protein, expressed
  Subcellular localization annotation: CTP_CleavageSite=52; ConfidenceScore=5.66e-01
PVPVVLSNKFNSTSFVGNLQLCGFNGSAICTSASSPVVSPSPPLPLSQRRTRKLNKKELIFAVGGILLLFLLLFCCVLLFWRKDKKESSSPKKSAKDTTTTKTVGKPGSGAGSGTDGGGDSGGKLVHFDGPLSFTAD

SEQ ID NO: 79922 - protein, 81 aa, Setaria italica
  Transcript Sequence Number=SeqID_13948
SISTVTHELGAVIHALNYHLLTEEEDLPKMYSCPTWPNTSCLRRQPVTVAAVAAALAAGEAEGAACLNYMAAASGQCWGRD

SEQ ID NO: 79923 - protein, 341 aa, Setaria italica
  Transcript Sequence Number=SeqID_13949
  Gene Ontology: Mol. function=ligase activity
  Homolog annotation: Hit_ID=Q0WZC2; Match level="QueryCoverage=100%, HitCoverage=30%, E-value=1e-162, Identity=79%"; Hit description=RNA ligase isoform 1
PNEEVWRQIEDMCGSTKAAAVPVVPDSEGTDSNPFSLDALAVFMFRVLQRVNHQRVNHPGNLDKASPNAGYVLLMFYHLYDGKSRREFENELYERFGSLVKMPLLKPDRAPLPGAVKAVLDEGISLFRLHQSRHGRVDPSKGSYAKEWTQWEQRLRVTLFGNADYINAIQVPFEFAVKEVLEQLKAVAKGDIKTPDTGKRKFGNIIFAAVRLTPADIVGLLRKVSEKDTAVNTFLNEIKLEDSLTKAHVTLAHKRGHGVAAVASYGVYQHQEVPVSFNALYYTDKMAALEAQLGAVNGEQIESRNEWPHATLWTAAGVAPKEANTLPQLAAEGKATRVPIE

SEQ ID NO: 79924 - protein, 75 aa, Setaria italica
  Transcript Sequence Number=SeqID_13950
YSNCLAICFLCFFCPPAFLCSVICLIHHTIAHLHCSTFEILVDYWKACFMISRCQIQTKVNIGSINTRACVAIML

SEQ ID NO: 79925 - protein, 115 aa, Setaria italica
  Transcript Sequence Number=SeqID_13951
  Gene Ontology: Mol. function=binding
  Homolog annotation: Hit_ID=B4FK90; Match level="QueryCoverage=72%, HitCoverage=23%, E-value=7e-39, Identity=92%"; Hit description=Brain protein 16
  Pfam annotation: Domain name=DUF383; Domain location=1-103; Score= -37.9; E_value=0.0015; Accession=PF04063.6; Description=Domain of unknown function (DUF383)
IVLVFYESSIYYYQIAAFPLFFLSIYLFIFLQVAGTIRNCCFEADTQLQNLLSLAEYLWPALLLPVAGKKIYTEEDRSKMPLELSSALSHEREAVEDSEIRQHTLEAIYMIVLQD

SEQ ID NO: 79926 - protein, 262 aa, Setaria italica
  Transcript Sequence Number=SeqID_13952
  Gene Ontology: Mol. function=binding; Cellular component=cellular _component; Biological process=biological_process
  Homolog annotation: Hit_ID=B4FK90; Match level="QueryCoverage=91%, HitCoverage=69%, E-value=1e-125, Identity=92%"; Hit description =Brain protein 16
  Pfam annotation: Domain name=DUF383; Domain location=13-196; Score =214.0; E_value=4e-61; Accession=PF04063.6; Description=Domain of unknown function (DUF383)
  Pfam annotation: Domain name=DUF384; Domain location=200-257; Score =60.5; E_value=6.4e-15; Accession=PF04064.5; Description=Domain of unknown function (DUF384)
  Pfam module annotation: Pfam domain module=DUF383::DUF384; Domain location=13-196::200-257
TTDDLGDRTNAAMDVIARRAGEQPALARSLVMLLVNLTHVASGVAALLQVGDEKVQGLYVAKLVRSFCRSSSDSEEQDTFEYVASMLVNISKVEAGRRILMEPKRGLLKQIIRQFDSTNQLRKKGVAGTIRNCCFEADTQLQNLLSLAEYLWPALLLPVAGKKIYTEEDRSKMPLELSSALSHEREAVEDSEIRQHTLEAIYMIVLQDDGRRSFWSVNGPRILQVGYEDEEDPKVMEAYELIGSLLVGKGEGEQEQGGEKSQ

SEQ ID NO: 79927 - protein, 78 aa, Setaria italica
  misc_feature (64)..(64): Xaa can be any naturally occurring amino acid
  Transcript Sequence Number=SeqID_13953
RFDGTSEYKLDKNGKIYEHKVDNIARNSPTKFKILPVVELIRSLGCPSTPKPTYFETSCLSLIXLPLFWLSLTWMRCN

SEQ ID NO: 79928 - protein, 97 aa, Setaria italica
  Transcript Sequence Number=SeqID_13954
WSRRGLGTTGWTKAVEQRRGAAARSPNRRRPCVLDIYVHHVRGIHNICIYANQDMYARFALTSSPDDDASLSTRVTTRGSASPRFDERLPPFCIRLG

SEQ ID NO: 79929 - protein, 79 aa, Setaria italica
  misc_feature (60)..(79): Xaa can be any naturally occurring amino acid
  Transcript Sequence Number=SeqID_13955
LCRKEEGICSYPDNYAGKKDKLRVNVWRKCKDTITTRDLLISDESKYVINMFYKKKKKKXXXXXXXXXXXXXXXXXXXX

SEQ ID NO: 79930 - protein, 54 aa, Setaria italica
  Transcript Sequence Number=SeqID_13956
  Gene Ontology: Mol. function=transporter activity; Cellular component= membrane; Biological process=oligopeptide transport
  Homolog annotation: Hit_ID=Q94LJ2; Match level="QueryCoverage=96%, HitCoverage=8%, E-value=2e-17, Identity=73%"; Hit description=POT family protein
MDAQDEERPLIHHLHPQGESSEFTSDGTVDISNQPALKRSTGNWRACFFILGKA

SEQ ID NO: 79931 - protein, 230 aa, Setaria italica
  Transcript Sequence Number=SeqID_13957
  Gene Ontology: Mol. function=transporter activity; Cellular component= membrane; Biological process=oligopeptide transport
  Homolog annotation: Hit_ID=B6U0T7; Match level="QueryCoverage=100%, HitCoverage=39%, E-value=2e-78, Identity=61%"; Hit description =Peptide transporter PTR2
MEATADEERPLIPHLQSQDVDSLYTGDGTVDINNQPALKRTTGNWRACFLILGTEFVECFVFFGVAKNLVTYLRGELHESNADAAKNVSTWIGTCFVTPVIGAFLADTYWGRYWTIVISLSIYIVGMLTMTASAWLPLLMDPLHDSGIRHVVVYLGLYLVALAGGGIKACASALGADQFDGANPVERVAKASFFNWYYLSINIGSLLSGTVLVWVQDNVGWGIGFWIPTV

SEQ ID NO: 79932 - protein, 185 aa, Setaria italica
  Transcript Sequence Number=SeqID_13958
  Gene Ontology: Mol. function=transporter activity; Cellular component= membrane; Biological process=oligopeptide transport
  Homolog annotation: Hit_ID=Q0VH24; Match level="QueryCoverage=98%, HitCoverage=36%, E-value=3e-73, Identity=75%"; Hit description=Low affinity nitrate transporter
GKYGLAIPTVFMVCGFSVFVGGRKLYRYQKVGGSPLTRLFQVVVAAVRNYHLVLPEDCSALHEVATSTEGNRKIQHTSQFRFFDKAAIVAPFSGDKGPMSPWKLCTVSQVEELKMLLRMFPVWASMVLFFAVTSQMSSTFIEQGAAMDNRVGPFTVPPASLATFDIISVMVCIPIYDGVLVPLAR

SEQ ID NO: 79933 - protein, 578 aa, Setaria italica
  Transcript Sequence Number=SeqID_13959
  Gene Ontology: Mol. function=transporter activity; Cellular component= membrane; Biological process=oligopeptide transport
  Homolog annotation: Hit_ID=B6U0T7; Match level="QueryCoverage=96%, HitCoverage=97%, E-value=0.0, Identity=73%"; Hit description=Peptide transporter PTR2
  Pfam annotation: Domain name=MFS_1; Domain location=59-517; Score= -10.7; E_value=0.063; Accession=PF07690.8; Description=Major Facilitator Superfamily
  Pfam annotation: Domain name=PTR2; Domain location=121-509; Score =383.9; E_value=2.7e-112; Accession=PF00854.13; Description=POT family
  Pfam module annotation: Pfam domain module=MFS_1::PTR2; Domain location=59-517::121-509
DESVASPHLVGAGDESVASPHLVHPQGESSEFTSDGTVDISNQPALKRSTGNWRACFFILGSEFTESVACFAIAKNLVTYLTGALRESNVDAATTVSTWIGSSFFTPLIGAFFADTFWGRYWTVLIFLSIYVTGMFILTVSAFLPLLMGSSYDLSFHRVTAYLGLYLVALGNGGIKPCVSALGADQFDATDPVERVTKGSFFNWYYWSVNIGSLLSATVLVWVQDNIGWGVGLAIPTVFMVCGFSVFVGGRKLYRYKQLQGSPLKRVSQVVVAAVRNYNLGLPEDCSTLHEVPSPTKPNCRIQHTSQFRFFDKAAILVTSSHEKGQPVSENPWRLCTVSQVEELKMLLRMFPVWASMVLFSTVIAQMSSTFIEQGAAMDNRVGPFTVPPASLATFDIISVMVCIPIYDGVLVPLARRATGKERGLSQLQRLGVGLALSVAGMLYAALVEARRLVLARTGTPMSIMWQAPAFAVLGAGEVFTAIGILEFFYDESPDGMKSLGTALAQLAVAAGNYLNSAVLAAVSAITARGGKPGWIPDDLNEGHLDYFFWLMAALGVVNLLHFLHCSMRYRGNTNTVS

SEQ ID NO: 79934 - protein, 104 aa, Setaria italica
  Transcript Sequence Number=SeqID_13960
IDHCVLPMDSRMMVFTTFGSRCPEPRSESELNLGVRASTRVVAPPIHVRVPLPCLVVRLGTVALRLSSSSRRAIAYVASASSRSRSTSKRLCLLRGEVGCLDCA

SEQ ID NO: 79935 - protein, 50 aa, Setaria italica
  misc_feature (32)..(50): Xaa can be any naturally occurring amino acid
  Transcript Sequence Number=SeqID_13961
EVQYILRRNDIFFSEPECSYNLSKTLACFFLXXXXXXXXXXXXXXXXXXX

SEQ ID NO: 79936 - protein, 64 aa, Setaria italica
  Transcript Sequence Number=SeqID_13962
  Gene Ontology: Mol. function=nucleotide binding; Cellular component =intracellular; Biological process=small GTPase mediated signal transduction
  Homolog annotation: Hit_ID=Q6Z7L8; Match level="QueryCoverage=100%, HitCoverage=32%, E-value=2e-30, Identity=100%"; Hit description=Rac -like GTP-binding protein 7
  Pfam annotation: Domain name=Ras; Domain location=8-64; Score=-59.1; E_value=7.2e-05; Accession=PF00071.14; Description=Ras family
MSTARFIKCVTVGDGAVGKTCMLISYTSNTFPTDYVPTVFDNFSANVVVDGNTVNLGLWDTAGQ

SEQ ID NO: 79937 - protein, 213 aa, Setaria italica
  misc_feature (119)..(119): Xaa can be any naturally occurring amino acid
  Transcript Sequence Number=SeqID_13963
  Gene Ontology: Mol. function=nucleotide binding; Cellular component =intracellular; Biological process=small GTPase mediated signal transduction
  Homolog annotation: Hit_ID=Q67VP4; Match level="QueryCoverage=99%, HitCoverage=98%, E-value=9e-99, Identity=82%"; Hit description=Rac -like GTP-binding protein 4
  Pfam annotation: Domain name=Miro; Domain location=8-121; Score=41.0; E_value=4.8e-09; Accession=PF08477.5; Description=Miro-like protein
  Pfam annotation: Domain name=Ras; Domain location=8-179; Score=238.3; E_value=1.9e-68; Accession=PF00071.14; Description=Ras family
  Pfam module annotation: Pfam domain module=Miro::Ras; Domain location= 8-121::8-179
MSVTKFIKCVTVGDGAVGKTCMLICYTSNKFPTDYIPTVFDNFSANVSVDGNTVNLGLWDTAGQEDYNRLRPLSYRGADVFVLAFSLVSRASYENVMKKWLPELQHYAPGVPIVLAYIXIDCREDKHYLLDHPGAVPVTTAQGEELRKHIGATCYIECSSKTQQNVKAVFDAAIKVVIRPPTKQRERKKKKARRGCSIFCSRIMHTRRLGCFK

SEQ ID NO: 79938 - protein, 128 aa, Setaria italica
  misc_feature (9)..(9): Xaa can be any naturally occurring amino acid
  Transcript Sequence Number=SeqID_13964
  Gene Ontology: Mol. function=nucleotide binding; Cellular component =intracellular; Biological process=small GTPase mediated signal transduction
  Homolog annotation: Hit_ID=Q6Z7L8; Match level="QueryCoverage=100%, HitCoverage=64%, E-value=5e-63, Identity=90%"; Hit description=Rac -like GTP-binding protein 7
  Pfam annotation: Domain name=Ras; Domain location=1-110; Score=38.2; E_value=3.1e-12; Accession=PF00071.14; Description=Ras family
LRPLSYRGXDVFLLAFSLISKASYENIHKKWIPELRHYAPNVPIVLVGTKLDLREDKQFFLDHPGLAPITTAQGEELKRMIGAAAYIECSSKTQQNVKAVFDSAIKVVLCPPKPKKKSARKQRSCWIL

SEQ ID NO: 79939 - protein, 214 aa, Setaria italica
  Transcript Sequence Number=SeqID_13965
  Gene Ontology: Mol. function=nucleotide binding; Cellular component =intracellular; Biological process=small GTPase mediated signal transduction
  Homolog annotation: Hit_ID=Q9LEC5; Match level="QueryCoverage=98%, HitCoverage=99%, E-value=1e-104, Identity=86%"; Hit description =Putative Rop family GTPase, ROP6
  Pfam annotation: Domain name=GTP_EFTU; Domain location=6-181; Score= -93.3; E_value=0.052; Accession=PF00009.19; Description=Elongation factor Tu GTP binding domain
  Pfam annotation: Domain name=Miro; Domain location=10-123; Score =59.6; E_value=1.2e-14; Accession=PF08477.5; Description=Miro-like protein
  Pfam annotation: Domain name=Ras; Domain location=10-181; Score =267.9; E_value=2.3e-77; Accession=PF00071.14; Description=Ras family
  Pfam module annotation: Pfam domain module=GTP_EFTU::Miro::Ras; Domain location=6-181::10-123::10-181
MASSASRFIKCVTVGDGAVGKTCMLICYTSNKFPTDYIPTVFDNFSANVVVDSTTVNLGLWDTAGQEDYSRLRPLSYRGADVFVLAFSLISRASYENVLKKWMPELRRFAPNVPVVLVGTKLDLRDHRAYLADHPGASTITTAQGEELRKQIGAAAYIECSSKTQQNVKAVFDTAIKVVLQPPRRREAMPARRKSRRGSGCSIMNLMCGSTCAA

SEQ ID NO: 79940 - protein, 62 aa, Setaria italica
  Transcript Sequence Number=SeqID_13966
NERSIHPKLVPFYSKFTCHKFTPHTHMHRGFISFERLSSTRASTHQVHYRASGAASLLFPYL

SEQ ID NO: 79941 - protein, 194 aa, Setaria italica
  Transcript Sequence Number=SeqID_13967
  Gene Ontology: Mol. function=nucleotide binding; Cellular component =intracellular; Biological process=small GTPase mediated signal transduction
  Homolog annotation: Hit_ID=Q6Z808; Match level="QueryCoverage=96%, HitCoverage=87%, E-value=1e-103, Identity=95%"; Hit description=Rac -like GTP-binding protein 3
  Pfam annotation: Domain name=GTP_EFTU; Domain location=6-181; Score= -91.5; E_value=0.037; Accession=PF00009.19; Description=Elongation factor Tu GTP binding domain
  Pfam annotation: Domain name=Miro; Domain location=10-123; Score =57.3; E_value=5.6e-14; Accession=PF08477.5; Description=Miro-like protein
  Pfam annotation: Domain name=Ras; Domain location=10-181; Score =263.0; E_value=7.1e-76; Accession=PF00071.14; Description=Ras family
  Pfam module annotation: Pfam domain module=GTP_EFTU::Miro::Ras; Domain location=6-181::10-123::10-181
MASSASRFIKCVTVGDGAVGKTCMLICYTSNKFPTDYIPTVFDNFSANVVVDGTTVNLGLWDTAGQEDYNRLRPLSYRGADVFVLAFSLVSRASYENIMKKWIPELQHYAPGVPIVLAGTKLDFREDKHYLLDHPGAVPVTTAQGEELRKHIGAMYYIECSSKTQQNVKAVFDAAIKVVIQPPTKLREKNKRNV

SEQ ID NO: 79942 - protein, 134 aa, Setaria italica
  Transcript Sequence Number=SeqID_13968
  Gene Ontology: Mol. function=nucleotide binding; Cellular component =intracellular; Biological process=small GTPase mediated signal transduction
  Homolog annotation: Hit_ID=Q6Z808; Match level="QueryCoverage=88%, HitCoverage=55%, E-value=6e-51, Identity=79%"; Hit description=Rac -like GTP-binding protein 3
  Pfam annotation: Domain name=Ras; Domain location=6-101; Score=-26.9; E_value=2.7e-07; Accession=PF00071.14; Description=Ras family
MYRCAKHTRPDKSCNCNIMKKWIPELQHYAPGVPIVLAGTKLDLREDKHYLMDHPGLVPVTTAQGEELRRQIGAMYYIECSSKTQQNVKAVFDAAIKVVIQPPTKLREKKKKKSRKGCSMLDIFCGRKMLCFKS

SEQ ID NO: 79943 - protein, 36 aa, Setaria italica
  Transcript Sequence Number=SeqID_13969
  Gene Ontology: Mol. function=inorganic anion exchanger activity; Cellular component=integral to membrane; Biological process=anion transport
  Homolog annotation: Hit_ID=B6SV45; Match level="QueryCoverage=100%, HitCoverage=5%, E-value=2e-12, Identity=83%"; Hit description=Boron transporter-like protein 2
MDLLRNPFKGVIADIKGRAAWYRHDWVAGLRSGFRI

SEQ ID NO: 79944 - protein, 52 aa, Setaria italica
  misc_feature (31)..(31): Xaa can be any naturally occurring amino acid
  Transcript Sequence Number=SeqID_13970
ARSFDMDMRYGPCLGLTRAQRLRRAAALGLXPPPALLALCTDDQPCLWEGRV

SEQ ID NO: 79945 - protein, 138 aa, Setaria italica
  Transcript Sequence Number=SeqID_13971
  Homolog annotation: Hit_ID=B9S3K3; Match level="QueryCoverage=92%, HitCoverage=47%, E-value=1e-37, Identity=46%"; Hit description =Pentatricopeptide repeat-containing protein, putative
  Pfam annotation: Domain name=PPR; Domain location=64-98; Score=47.5; E_value=5.3e-11; Accession=PF01535.12; Description=PPR repeat
  Pfam annotation: Domain name=PPR; Domain location=99-133; Score=22.0; E_value=0.0024; Accession=PF01535.12; Description=PPR repeat
  Pfam module annotation: Pfam domain module=PPR::PPR; Domain location =64-98::99-133
GALRQVILLEGGVCAGKQIHCFAVRRCLDSNVFVGTALVDMYSKCGEISTAEDVFASMTEKSTVSYTIMISGLGQHGIGERAVSLFYSMREKGLKPDAVTFLAAISACNYSGLVDEGLVLYRTMEAFGVAPTPQHHCC

SEQ ID NO: 79946 - protein, 62 aa, Setaria italica
  Transcript Sequence Number=SeqID_13972
KIKKEKNVYRFVLAGDNITRQHRHITHQHERSKKFVFLHLNLKKYRCVFSKKRLNCQQYVQA

SEQ ID NO: 79947 - protein, 121 aa, Setaria italica
  misc_feature (1)..(1): Xaa can be any naturally occurring amino acid
  Transcript Sequence Number=SeqID_13973
XSRNATRFRCTALSFLRRRRGRREAWDSGDPRCRHGPFHEFVVLRSPSPLLIGYPPASNVGEGRLHGCFGSGDELMHLHSQASPRMELADQGRKHTDKVGVLGKPGSSSMGRSGGAPWEER

SEQ ID NO: 79948 - protein, 35 aa, Setaria italica
  Transcript Sequence Number=SeqID_13974
GTKYYSSRHSAKWYSSFLHGGELRPVALPNGAYSQ

SEQ ID NO: 79949 - protein, 79 aa, Setaria italica
  Transcript Sequence Number=SeqID_13975
  Gene Ontology: Mol. function=hydrolase activity, hydrolyzing O -glycosyl compounds; Biological process=carbohydrate metabolic process
MSIAVAVAFPFGLFACEEGNSTTEPYVVAHHLLLAHASAVSLYGEKYQAEQGGRIGLTLLGWWYEPATETPTFFLITGG

SEQ ID NO: 79950 - protein, 56 aa, Setaria italica
  Transcript Sequence Number=SeqID_13976
LPYFGLTVVPVSVVYGVEFNSPARTRYQRHSAKWYSSFLHGGELRPVALPNGAYSQ

SEQ ID NO: 79951 - protein, 42 aa, Setaria italica
  Transcript Sequence Number=SeqID_13977
LFFLFFSTFFRDALWPDFGEADYLEALVSFQSRERRFGVRRL

SEQ ID NO: 79952 - protein, 210 aa, Setaria italica
  misc_feature (8)..(8): Xaa can be any naturally occurring amino acid
  misc_feature (186)..(186): Xaa can be any naturally occurring amino acid
  Transcript Sequence Number=SeqID_13978
  Gene Ontology: Mol. function=helicase activity; Cellular component =chloroplast
  Homolog annotation: Hit_ID=B9SRY3; Match level="QueryCoverage=100%, HitCoverage=55%, E-value=4e-34, Identity=39%"; Hit description =Pentatricopeptide repeat-containing protein, putative
  Pfam annotation: Domain name=PPR; Domain location=101-135; Score =13.4; E_value=0.23; Accession=PF01535.12; Description=PPR repeat
  Pfam annotation: Domain name=PPR; Domain location=136-170; Score =15.4; E_value=0.13; Accession=PF01535.12; Description=PPR repeat
  Pfam annotation: Domain name=PPR; Domain location=171-205; Score =35.3; E_value=2.5e-07; Accession=PF01535.12; Description=PPR repeat
  Pfam annotation: Domain name=PPR; Domain location=29-63; Score=22.8; E_value=0.0014; Accession=PF01535.12; Description=PPR repeat
  Pfam annotation: Domain name=PPR; Domain location=64-98; Score=9.5; E_ value=0.68; Accession=PF01535.12; Description=PPR repeat
  Pfam module annotation: Pfam domain module=PPR::PPR::PPR::PPR::PPR; Domain location=101-135::136-170::171-205::29-63::64-98
GFIREGRXYKEGIKVAREMLELGSGLSVVSMEILISGLCRGGEALKAAEVFVEFWGDGVVPERFDCFELVEALCRVGKIDKAVEVVDMVLERNMKCCLSVPAGVTVLECLMKAGKLDKVCQLMWRMIDQGIVPDTITCNCVFEALCEAGRAADANQLRVLAKEQGFVADGETYRMLVQGFGRQGRXKKGEAVLDEMLDSGFVPNIASYNR

SEQ ID NO: 79953 - protein, 96 aa, Setaria italica
  Transcript Sequence Number=SeqID_13979
PQKAATARATTLRALVVTTPVSFLLIQEVAGDFVRCFCDCYNACKNSRPKGKVTCHWECFNGEWHWSWSWRGRHCCRRWQGGRAFFYYLKITVLAG

SEQ ID NO: 79954 - protein, 163 aa, Setaria italica
  Transcript Sequence Number=SeqID_13980
  Subcellular localization annotation: CTP_CleavageSite=67; ConfidenceScore=5.18e-01
SLHSPYSLLQISRSDSLSSAIHHAQTATAGPSSSSAIHHAQTASAGSDGHTHVVTIGGVPPAVTGVLAAEPATGFVEALPVAGHLVLGTARVVLAGVVAVAEAAHELAGHSLDEEEGDQRRHHQGPQRRRVAGRHRAQRRLTDRVVVWLGWVIVVGVLVLVRS

SEQ ID NO: 79955 - protein, 302 aa, Setaria italica
  misc_feature (246)..(246): Xaa can be any naturally occurring amino acid
  Transcript Sequence Number=SeqID_13981
  Gene Ontology: Mol. function=transposase activity; Biological process= transposition, DNA-mediated
  Homolog annotation: Hit_ID=Q2QT97; Match level="QueryCoverage=100%, HitCoverage=40%, E-value=5e-41, Identity=36%"; Hit description =Transposon protein, putative, CACTA, En/Spm sub-class
LHEHKTPYHRGQNGWPSESWNKIVNEFHVREDYVYFTKAQIQEKEKELKREYKLLKDAKQQSGAHFDAKAGRIKACPAVWENILDSYPKAKKFRSKGFPLFEALGELYDGQTTEGTYNYTSNQLTDPTQVENGDKVENMEVLNSDLQETMAGREDDDVMVLEDDQMRQRRDATVTKNTENDERVVHSSQRRAATVTRNTEEREPKRQKKISNLEGLMERYIGMRTKQGEDEAVQLAREKEESEGEXFSIKKCISVLNTLEVTKEEKAKSFKLFKDPDNRQIFLSACDDDPEVALLWLRSEIA

SEQ ID NO: 79956 - protein, 52 aa, Setaria italica
  Transcript Sequence Number=SeqID_13982
KKKYLQIVLDTPYQLSRYHLLIHERYQNYPIYIKLLTKNRMDSAKASILRIN

SEQ ID NO: 79957 - protein, 131 aa, Setaria italica
  Transcript Sequence Number=SeqID_13983
  Gene Ontology: Mol. function=mannosyl-oligosaccharide 1,2-alpha -mannosidase activity; Cellular component=membrane; Biological process=protein transport
  Homolog annotation: Hit_ID=O48662; Match level="QueryCoverage=45%, HitCoverage=9%, E-value=4e-22, Identity=83%"; Hit description=PV72
  Subcellular localization annotation: CTP_CleavageSite=52; ConfidenceScore=5.35e-01
ARAGLAAPAPPPPPSPPGTHSPHTKNSRRNYSSDWLLQIRNYRLNTLNGCPLARINWHQLPVLFPLQLLLGCCHGRFVVEKNSLKVTAPDDLKGTYECAIGNFGVPQYGGTMVGFVAYPKANKKACKSFDD

SEQ ID NO: 79958 - protein, 120 aa, Setaria italica
  misc_feature (42)..(42): Xaa can be any naturally occurring amino acid
  misc_feature (75)..(75): Xaa can be any naturally occurring amino acid
  Transcript Sequence Number=SeqID_13984
  Gene Ontology: Mol. function=mannosyl-oligosaccharide 1,2-alpha -mannosidase activity; Cellular component=membrane; Biological process=protein transport
  Homolog annotation: Hit_ID=B9SRT1; Match level="QueryCoverage=85%, HitCoverage=16%, E-value=2e-45, Identity=82%"; Hit description =Vacuolar sorting receptor 1, putative
MHWDLHCLLRMKASRGDVTILPTLVINNRQYRGKLDKGAILXALCAGFRETTEPAVCLSEDTQINECLENNGGCXQDKAANVTACKDTFHGRVCECPVMKGAKFVGDGYSHCEDWREDGG

SEQ ID NO: 79959 - protein, 59 aa, Setaria italica
  Transcript Sequence Number=SeqID_13985
  Subcellular localization annotation: CTP_CleavageSite=24; ConfidenceScore=5.06e-01
IKQTPGTVSVCWQSYPSTIDKPVTTNMTGVQSCLWSQFSVCWPVHIPPPFDKPVTTNMT

SEQ ID NO: 79960 - protein, 119 aa, Setaria italica
  Transcript Sequence Number=SeqID_13986
RTNKQLASALSISYFNAPVTRSDADTYATYVIPERFIFQLATGSQLSQQPIPLEHMFYKEQYFCLLNTRLEYHAHRCPVPALKNTNKFHSVDSHHESSKNTRHSFLFVGSHIPPPLTNQ

SEQ ID NO: 79961 - protein, 689 aa, Setaria italica
  Transcript Sequence Number=SeqID_13987
  Gene Ontology: Mol. function=mannosyl-oligosaccharide 1,2-alpha -mannosidase activity; Cellular component=membrane; Biological process=protein transport
  Homolog annotation: Hit_ID=Q2PYW3; Match level="QueryCoverage=87%, HitCoverage=97%, E-value=0.0, Identity=77%"; Hit description =Vacuolar sorting receptor protein PV72-like protein
  Pfam annotation: Domain name=EGF_CA; Domain location=579-620; Score =12.1; E_value=0.012; Accession=PF07645.7; Description=Calcium binding EGF domain
  Pfam annotation: Domain name=PA; Domain location=122-233; Score=95.8; E_value=1.5e-25; Accession=PF02225.14; Description=PA domain
  Pfam module annotation: Pfam domain module=EGF_CA::PA; Domain location=579-620::122-233
  Subcellular localization annotation: CTP_CleavageSite=64; ConfidenceScore=5.27e-01
CRTRTNALSCGRQNPIFPLSATVFGAFFRPHSRKIDLTLIQSNLRHQSNPQQVFANCKVRQWIGSMGFRSAGAMLRLLVWAALLLGCCHGRFVVEKNSLKVTAPDDLKGTYECAIGNFGVPQYGGTMVGFVAYPKANKKACKSFDDFDISYKAKPGAFPTFLLVDRGDCYFTKKAWNAQNAGAAAILVADDKDEPLITMDTPEESGRADYLENITIPSALITKSFGDRLKKAIDNGDMVNVNLDWREALPHPDERVEYEFWTNSNDECGPKCDSQTDFVKSFKGAAQVLEKKGYTEFTPHYITWYCPEAFILSKQCKSQCINHGRYCAPDPEQDFSKGYDGKDVVIQNLRQVCVFKVAKEHKKPWLWWDYVTDFAIRCPMKEKKYTKECADGVIKSLGLDHKAIDKCIGDPDADEENPVLKAEQDAQIGKGSRGDVTILPTLVINNRQYRGKLDKGAVLKALCAGFRETTEPAVCLSEEIQTNECLENNGGCWQDKAANITACKDTFRGRVCECPVVKGVKFVGDGYTHCEASGSGRCEINNGGCWKETRNGRTYSACTDDGCKCPDGFKGDGKHKCEDIDECKERTACQCKECKCKNTWGSYECGCSGGLLYMKEHDTCISKNGATETGWGFLWVIFLGLVAAGIAGYAVYKYRIRRYMDSEIRAIMAQYMPLDNQGDVQSHSHHIEM

SEQ ID NO: 79962 - protein, 173 aa, Setaria italica
  Transcript Sequence Number=SeqID_13988
  Gene Ontology: Cellular component=chloroplast
  Homolog annotation: Hit_ID=B9RQK0; Match level="QueryCoverage=50%, HitCoverage=60%, E-value=5e-14, Identity=44%"; Hit description =Thylakoid membrane phosphoprotein 14 kDa, chloroplast, putative
RDGGKSVLRFIHTDTISFCDDSQGWAAMMACALAVVQPAAVLAPCGRRSLSGHLPRLPSPRLSGRIRSRSVVANVAQDSSESSGSVVRYVKSSLSTAEDIFALAGIGFATVAALWASVHLIEIIDKLPVLPLFFELIGILVAWLFIYNNLLFKAKRQEFLENIISTASRISGQ

SEQ ID NO: 79963 - protein, 84 aa, Setaria italica
  Transcript Sequence Number=SeqID_13989
  Subcellular localization annotation: CTP_CleavageSite=41; ConfidenceScore=5.55e-01
MPPPPNPGFLLLRSQTLTPRFRRSPSCDPLLCRPRRCLSARASAAQLSAAGVATAQQPELGVEDAVVGFVTGKRRATEVAQRRY

SEQ ID NO: 79964 - protein, 554 aa, Setaria italica
  Transcript Sequence Number=SeqID_13990
  Gene Ontology: Mol. function=binding; Cellular component=cytoplasm; Biological process=protein transport
  Homolog annotation: Hit_ID=Q8WUH2; Match level="QueryCoverage=80%, HitCoverage=49%, E-value=5e-29, Identity=25%"; Hit description =Transforming growth factor-beta receptor-associated protein 1
  Pfam annotation: Domain name=Vps39_1; Domain location=109-230; Score=- 21.0; E_value=0.0078; Accession=PF10366.1; Description=Vacuolar sorting protein 39 domain 1
  Pfam annotation: Domain name=Vps39_2; Domain location=419-527; Score =168.7; E_value=1.7e-47; Accession=PF10367.1; Description=Vacuolar sorting protein 39 domain 2
  Pfam module annotation: Pfam domain module=Vps39_1::Vps39_2; Domain location=109-230::419-527
LLSETMQPSEIFPFIMPDPNRWSDLVPRKRYWGLHPPPKPLEEVIDDGLVTVQQALFLKKAGVDTVVDEDFLSNPPSRADLLEQAIRNIIRYLCASRMKNLSSPEMEGVDTFLMYLYRALDLVDDMEKLASSQNSCVVDELESLLDDSGHLRTLAFLYGSKGICPKALAIWRILARNYSSGLWKDMSENGSCGSSVEKRSGEEIAAIEAAKILKTSSDEDLVLEHLGWVADIDQELAIAVLTSEMRENQLSPEKVVAAIDTEKVVIHQRYLQWLIEDQGCDDPHYHTSYALSLAKSAIEAVHMESKYRGKDDREIDSDAQFIYLLREKLQLFLQASDLYDPEDVLDVIAESELWLEKAILYRKMGQENIVLQILALKLEDSEAAEQYCAEIGRDDAYIQLLGLYLDPQNGKEPMFTAAVRLLHNHGKSLDPMQVLERLSPDMPLQLASDTILRMLRARVHHHRQGQIVHNLSRATNLDARLTRLEERSRHVQLTDESICDSCRARLGTKLFVMYPDDSVVCYRCYRNQQGDSSSGHGRSLRKDVIFKQSWLVSR

SEQ ID NO: 79965 - protein, 75 aa, Setaria italica
  Transcript Sequence Number=SeqID_13991
AQQVQQLLRQLLYLRCELLHHLPAATRKAFLLITGTFQQIKARPSHCHLLKSDSTCDGLTHHSDAHCQAMKWSAG

SEQ ID NO: 79966 - protein, 73 aa, Setaria italica
  Transcript Sequence Number=SeqID_13992
KLLIAKHDVAVTVTDQLLVTHTLLVQIGTLHTLQYIRTYRSETQLKQYNTLHHTTPHHTGFALAHFLLKRAVQ

SEQ ID NO: 79967 - protein, 352 aa, Setaria italica
  Transcript Sequence Number=SeqID_13993
  Gene Ontology: Mol. function=oxidoreductase activity; Biological process=oxidation reduction
  Homolog annotation: Hit_ID=B5TXD1; Match level="QueryCoverage=92%, HitCoverage=100%, E-value=1e-156, Identity=82%"; Hit description=1 -aminocyclopropane-1-carboxylate oxidase
  Pfam annotation: Domain name=2OG-FeII_Oxy; Domain location=164-264; Score=161.1; E_value=3.3e-45; Accession=PF03171.12; Description=2OG -Fe(II) oxygenase superfamily
MAPTSSFPIIDMGLLAGEERPAAMDLLRDACENWGFFQILNHGISTKLMEEVERLTKDHYKRVREQRFLEFASKALKDGDGRGAQGVKAAENLDWESTFFVRHLPESNLADIPDLDDGYRRAMRRFAGELEALAERLLDLLCENLGLEKGYLARAFRGPSRGAPTFGTKVSSYPPCPRPDLVKGLRAHTDAGGIILLFQDDRVGGLQLLKDGEWVDVPPTRHSIVVNLGDQLEVVTNGRYKSVMHRVVAQTDGNRMSIASFYNPGSDAVIFPAPALVKADEASAAYPKFVFEDYMKLYVRHKFEAKEPRFKAFKSMETETSNRIAIAVKERAEHALASMPELYVSVAHWSAG

SEQ ID NO: 79968 - protein, 325 aa, Setaria italica
  misc_feature (69)..(69): Xaa can be any naturally occurring amino acid
  misc_feature (167)..(167): Xaa can be any naturally occurring amino acid
  Transcript Sequence Number=SeqID_13994
  Gene Ontology: Mol. function=oxidoreductase activity; Biological process=oxidation reduction
  Homolog annotation: Hit_ID=Q6JN53; Match level="QueryCoverage=97%, HitCoverage=98%, E-value=1e-137, Identity=76%"; Hit description=1 -aminocyclopropane-1-carboxylate oxidase 1
  Pfam annotation: Domain name=2OG-FeII_Oxy; Domain location=167-267; Score=160.3; E_value=5.8e-45; Accession=PF03171.12; Description=2OG -Fe(II) oxygenase superfamily
CALFRRSTSFPVINMEKLQTKEKPATMAVLNDACENWGFFELLNHGISHELMDEVERLNKAHYTSCRSXKFQEFAARTLEAGEKGADVKDVDWESTFFVRHLPASNLADLPDLDDHYSLPCRCRQVMKQFASEIQKLSEKLLDLLCENLGLEKGYLKQAFAGSNGPXTFGTKVSAYPPCPRPDLVDGLRAHTDAGGIILLFQDDQVSGLQLLKDGEWVDVPPMRYAIVVNIGDQLEVITNGRYKSVTHRVLTRPDGNRMSIASFYNPGADAVIFPAPALVAAEEVVVVGRYPRFVFEDYMNLYVRQKFEAKEPRFEAMKSAIATA

SEQ ID NO: 79969 - protein, 316 aa, Setaria italica
  misc_feature (66)..(66): Xaa can be any naturally occurring amino acid
  Transcript Sequence Number=SeqID_13995
  Gene Ontology: Mol. function=oxidoreductase activity; Biological process=oxidation reduction
  Homolog annotation: Hit_ID=Q6JN53; Match level="QueryCoverage=100%, HitCoverage=100%, E-value=1e-146, Identity=80%"; Hit description=1 -aminocyclopropane-1-carboxylate oxidase 1
  Pfam annotation: Domain name=2OG-FeII_Oxy; Domain location=160-260; Score=161.1; E_value=3.3e-45; Accession=PF03171.12; Description=2OG -Fe(II) oxygenase superfamily
MAATGTTLSFPVINMEKLQTKEKPATMAVLNDACENWGFFELLNHGISHELMDEVERLNKAHYTRXREPKFQEFAARTLEAGEKGADVKDVDWESTFFVRHLPASNLADLPDLDDHYRQVMKQFASEIQKLSEKLLDLLCENLGLEKGYLKQAFAGSNGPTFGTKVSAYPPCPRPDLVDGLRAHTDAGGIILLFQDDQVSGLQLLKDGEWVDVPPMRYAIVVNIGDQLEVITNGRYKSVTHRVLTRPDGNRMSIASFYNPGADAVIFPAPALVAAEEERAAYPRFVFEDYMNLYVRQKFEAKEPRFEAMKSAIATA

SEQ ID NO: 79970 - protein, 118 aa, Setaria italica
  Transcript Sequence Number=SeqID_13996
  Gene Ontology: Mol. function=6-phosphofructokinase activity; Cellular component=6-phosphofructokinase complex; Biological process=glycolysis
  Homolog annotation: Hit_ID=B6SXT5; Match level="QueryCoverage=83%, HitCoverage=18%, E-value=2e-34, Identity=73%"; Hit description=6 -phosphofructokinase 2
METATVVVAPAPVAITPPPQHKLLELKSSFAPAAKSSPPARKAKPAAKKKLAGGCGGYVLEDVPHLTDYLPELKSYPNPLQDHPAYSVVKQYFVNPDDTVAKKIVVHKSSARGTHFRR

SEQ ID NO: 79971 - protein, 139 aa, Setaria italica
  Transcript Sequence Number=SeqID_13997
CLDLWQNIILRQQGECRWPLPPSPEHYSALTSLTGPARQAVTQAMDYMETSVWNNITLHLLESQQQLGCYFFQEFVAQHALELSRNFIRDIFTIQPPYAHQPFFLEAFCFPPLSAHPSPHIVQNPLFTLSWSATSSPSH

SEQ ID NO: 79972 - protein, 92 aa, Setaria italica
  Transcript Sequence Number=SeqID_13998
  Gene Ontology: Mol. function=transcription factor activity; Cellular component=nucleus; Biological process=regulation of transcription, DNA-dependent
  Homolog annotation: Hit_ID=C3V017; Match level="QueryCoverage=95%, HitCoverage=8%, E-value=3e-19, Identity=61%"; Hit description =Putative resistance protein (Fragment)
EKLKTMPADLRHLTSLQTLTCFVAGAGSGCSKVGELGWLDDLGGQLELRQLENVKEADAKEAKLGNKKRLARLTLRWTDVDKEAWNSDREVL

SEQ ID NO: 79973 - protein, 426 aa, Setaria italica
  Transcript Sequence Number=SeqID_13999
  Gene Ontology: Mol. function=nucleic acid binding
FRPSPSIRSSPGPLPATTTHQGMTHHHEQQHAYQSGAPPGMMGQGGGSSFPQSSSPMPPVQGQMNLPLSGGPQGMVGGQVHNQVAMQQQYLKLAMQQQQKAAHGMLLQQQAKMNMPGSSSRDQDMVNNPAKMQELMAIQAQMFKRQAEHLQHAEKQKEHEQPSSNEQRSGDMRPPMPPPGVPGQQLPSVGMMRPMQPMQGQVGMGSAGGGPLTPLQFQAVQAWAKENNFDLSNPANMSAVSQLLPIWQSSRMAAMQKQNEASMAAQQQATPSQVNSDTPGRGNVPNQGAPLKPGQPLPPSSVSGGEEAKVMNSSNLQLQQQLSAHSRDGSNERAVRAPMTVGNGAQMMHIPQSSGHVNKVPEQSNPKTVLANSEAMQMQHARQMQQLNQAGAPTASSGEAGGSQPPTPSARLQPGHTGFNKKSTSF

SEQ ID NO: 79974 - protein, 61 aa, Setaria italica
  Transcript Sequence Number=SeqID_14000
  Subcellular localization annotation: CTP_CleavageSite=57; ConfidenceScore=5.64e-01
SLSRTSMMPDKDSSQARTVNQQFVNTASGTQSTANQQFANTVSGTQIASQEALCNVSASKP

SEQ ID NO: 79975 - protein, 191 aa, Setaria italica
  Transcript Sequence Number=SeqID_14001
  Gene Ontology: Mol. function=DNA binding; Cellular component=nucleus
  Homolog annotation: Hit_ID=B9S7K7; Match level="QueryCoverage=92%, HitCoverage=14%, E-value=3e-60, Identity=60%"; Hit description =Transcription factor, putative
  Pfam annotation: Domain name=FYRC; Domain location=107-191; Score =73.1; E_value=1e-18; Accession=PF05965.6; Description=FY rich C -terminus
  Pfam annotation: Domain name=FYRN; Domain location=52-104; Score =71.4; E_value=3.4e-18; Accession=PF05964.6; Description=FY-rich N -terminus
  Pfam module annotation: Pfam domain module=FYRC::FYRN; Domain location=107-191::52-104
NTKEQILDPLSGVEVRARGHSAMIMQPSLENHSRNGVAQKGPRIANVVHRFKCSVEPIEIGTVLSGRLWSSSQAIFPKGFKSRVKYFSIVDPVEMTYYISEILDAGQQGPLFMVTVENCPGEIFINVSPSKCWNMVRERLNMEIRRQLSMGRANLPTLQPPGSIDGFEMFGLLTPAIVQAIEVRDRDHICT

SEQ ID NO: 79976 - protein, 97 aa, Setaria italica
  Transcript Sequence Number=SeqID_14002
  Gene Ontology: Mol. function=DNA binding; Cellular component=nucleus
FGLLTPAIVQAIEVRDRDHICTEYWRSRPHVVIEDQDSQHMPPQDPLHIALRGLFQRANCDELRALRSLLMSNRTLDDNSRQQACQILDEEIAKQWR

SEQ ID NO: 79977 - protein, 355 aa, Setaria italica
  misc_feature (36)..(36): Xaa can be any naturally occurring amino acid
  Transcript Sequence Number=SeqID_14003
  Gene Ontology: Mol. function=DNA binding; Cellular component=nucleus
QDSKTVRRLTDGPRRSYMSQASTVSLVPSWEQKNQXNKILDVASPGMNLVKICQETNSACPSVEQIKPGNVSPLKEPCVKNELSCPANSDASQQQYNGGTGGHKGSAPSLTAPSWQSFPSNAVTRPLVTSSEPMRSVHGLAVLKESRETYSQTGDGTASLGEHHNRSLSMIDNGANMKPSLGSSSNSHRLMASDFNAALCHSYKDRVLITSETNTSMMPDKDSSQARTVNQQFVNTASGTQSTANQQFANTVSGTQIASQEALCNVSASKPLIDPSVMKNSYGAFGSGSGSAHRGHPAFGNQQLNERWHQRQSDPLSGVEVRARGHSAMIMQPSLENHSRNGVAQKGPRIANVVH

SEQ ID NO: 79978 - protein, 122 aa, Setaria italica
  Transcript Sequence Number=SeqID_14004
PGHQHHEPPARHEHQRHRDDPDRQVEDQHLDRRPPALRCLDAPTAGNFFPSSSSSGQLRPDLHGHEGMASWTSVACLTGWLCLCSRGVLLAGVYNLVSSPSETLAPLSGRLDAYRDSYHGAD

SEQ ID NO: 79979 - protein, 145 aa, Setaria italica
  Transcript Sequence Number=SeqID_14005
  Gene Ontology: Mol. function=L-ascorbate peroxidase activity; Biological process=hydrogen peroxide catabolic process
  Homolog annotation: Hit_ID=B9RP42; Match level="QueryCoverage=60%, HitCoverage=28%, E-value=2e-12, Identity=50%"; Hit description=L -ascorbate peroxidase 1, cytosolic, putative
  Subcellular localization annotation: CTP_CleavageSite=37; ConfidenceScore=5.19e-01
MELTSIPYLASSSSSFFYSSYSRCTCRGKRDGKLVITASAAGGRCAADLACSQLFEQENEDALSGSRSSWHYRRREFASAILLPFLLPHIDISSAAETYNGSVIRSGVRNVLTKAKAAGVLRLVFHDAGTFDVSEKSGGMNGSII

SEQ ID NO: 79980 - protein, 161 aa, Setaria italica
  Transcript Sequence Number=SeqID_14006
  Homolog annotation: Hit_ID=Q9ZWA0; Match level="QueryCoverage=91%, HitCoverage=14%, E-value=4e-24, Identity=47%"; Hit description =F11M21.29 protein
QEPNEMRRAYEDVHSMKEVTPYVSTAELVKKFESGTRKLSISSSRSVSHEDASSQGRPKLVLTRPKEPELQTSHRVRAVRVKSFAELEEEMLAKIPKFRARPFNKKIAEAPSFPPLPRKTPHVPEFNEFHLKTMERATRYADTCSEISSADTIQSQSKPLK

SEQ ID NO: 79981 - protein, 146 aa, Setaria italica
  Transcript Sequence Number=SeqID_14007
  Gene Ontology: Mol. function=RNA binding; Cellular component =ribonucleoprotein complex; Biological process=mRNA processing
  Homolog annotation: Hit_ID=Q9LGE6; Match level="QueryCoverage=60%, HitCoverage=59%, E-value=1e-47, Identity=100%"; Hit description =Probable U6 snRNA-associated Sm-like protein LSm4
  Pfam annotation: Domain name=LSM; Domain location=5-71; Score=76.5; E_ value=9.7e-20; Accession=PF01423.14; Description=LSM domain
MLPLSLLKTAQGHPMLVELKNGETYNGHLVNCDTWMNIHLREVICTSKDGDKFWRMPECYIRGNTIKYLRVPDEVIDKVQEETSKSRSDRKPPGVGRGRGRGDVGAKPGGRGIGRGQDDGGRGSGGRGRGGIGGKGGNKGGGRGRG

SEQ ID NO: 79982 - protein, 69 aa, Setaria italica
  Transcript Sequence Number=SeqID_14008
  Subcellular localization annotation: CTP_CleavageSite=43; ConfidenceScore=5.09e-01
ILPTRVPSPKSFCTLWSTAIIGCSTMAQHLNELMPQPAGRGSSASTAGRGRSVEVARPEVAPRRHQAAP

SEQ ID NO: 79983 - protein, 56 aa, Setaria italica
  Transcript Sequence Number=SeqID_14009
RTICYFTLHMYLISCPFQFSSWYNYFQPLQYHIMLCKIPLWCTFLSHQSFNCMCSG

SEQ ID NO: 79984 - protein, 40 aa, Setaria italica
  Transcript Sequence Number=SeqID_14010
CCTSGKPACCKGINTISRRLQYAGLFKKQKCWKFFQPLHY

SEQ ID NO: 79985 - protein, 159 aa, Setaria italica
  Transcript Sequence Number=SeqID_14011
  Pfam annotation: Domain name=XS; Domain location=58-153; Score=-14.1; E_value=0.00012; Accession=PF03468.6; Description=XS domain
DLHALLNHAYHAKNAEHRADHLGFHKALCVLMGWNYSVAPVHKTAYQALSTADAEANQGDLILWPPTVIIENAYKSTNDGQKDVMSNKDMESKLREMGFAGVDVQPLPGNNGQRSMHAKFPASLDGLNKASQLVELFECQGHGRAAWARVRSIAVDGAN

SEQ ID NO: 79986 - protein, 119 aa, Setaria italica
  Transcript Sequence Number=SeqID_14012
SALSVKEMGFAGVDVQPLPGKNGQRSMHAKFPASLDGLNKASQLVELFECQGHGRAAWARVRSIAVDGANHPLVVKVDGKGERTWVLYGYLATAWDLDMLDPESKQNVTVKSRKELDLD

SEQ ID NO: 79987 - protein, 122 aa, Setaria italica
  Transcript Sequence Number=SeqID_14013
MGDSHAVDIPSLAQQLREELAAADAPPPRLPGGCPIVIAVVGELTRNVDPAEYVPHHVCIGPNHRFRSPPLDRDDEKLRNLRDVMSVASAGVTLEDYLGEVARIEWQARSCYDRTFEQMSSA

SEQ ID NO: 79988 - protein, 303 aa, Setaria italica
  misc_feature (275)..(275): Xaa can be any naturally occurring amino acid
  Transcript Sequence Number=SeqID_14014
  Gene Ontology: Mol. function=ATP-dependent helicase activity; Cellular component=nucleus; Biological process=DNA recombination
  Homolog annotation: Hit_ID=B9RLI9; Match level="QueryCoverage=91%, HitCoverage=23%, E-value=1e-110, Identity=70%"; Hit description=Dead box ATP-dependent RNA helicase, putative
  Pfam annotation: Domain name=Helicase_C; Domain location=61-137; Score=46.0; E_value=1.5e-10; Accession=PF00271.23; Description =Helicase conserved C-terminal domain
LYITEGSSKASSIPRRSSSIVEVSYLFAEMIQHGLRCIAFCKTKKLCELVLAYTREVLQESAKELVDSICVYRGGYIAEDRRKIESDLFGGKLRGVAATNALELGIDVGHIDATLHLGFPGSIASLWQQAGRSGRRAKQSLAIYVAFEGPLDQYFMKFPHKLFGKPIEHCHVDSHNLKVLGQHLACAAYEHPLCLQYDERYFGSSLDSAMTTLKDKGYIINKTSGPFSSSMWNYIGPEKSPSQAVSIRAIEHDKYKVINKLNNRLLEEIEESKAXFFQVYEGAVYMHQGVSYLVEELDLSSRT

SEQ ID NO: 79989 - protein, 150 aa, Setaria italica
  misc_feature (13)..(13): Xaa can be any naturally occurring amino acid
  Transcript Sequence Number=SeqID_14015
  Gene Ontology: Mol. function=protein serine/threonine kinase activity; Biological process=protein amino acid phosphorylation
  Homolog annotation: Hit_ID=Q7XIH7; Match level="QueryCoverage=100%, HitCoverage=18%, E-value=2e-47, Identity=59%"; Hit description =Putative lectin-like protein kinase
  Pfam annotation: Domain name=Pkinase; Domain location=1-147; Score= -93.5; E_value=0.0063; Accession=PF00069.17; Description=Protein kinase domain
  Pfam annotation: Domain name=Pkinase_Tyr; Domain location=1-141; Score=-175.0; E_value=0.043; Accession=PF07714.9; Description =Protein tyrosine kinase
  Pfam module annotation: Pfam domain module=Pkinase::Pkinase_Tyr; Domain location=1-147::1-141
WPIRNEIVLGLGXSALLYLHQDWEQCVLHRDIKPSNVMLDASFHAKLGDFGLARLVDHGRRSHTTVIAGTLGYIDPDCMITGRASTETDVYSFGVVLLEIACGRRPLVAVSRSHREEDVMSRPLVARHGEDGREEDVIHIVQWVWEFYGQ

SEQ ID NO: 79990 - protein, 108 aa, Setaria italica
  Transcript Sequence Number=SeqID_14016
  Subcellular localization annotation: CTP_CleavageSite=57; ConfidenceScore=5.51e-01
HPLPPSSTDAARAPSTPKQLLQPPHAWPRVAPPQAKSWPGLSLPLSPFLFFLPASSSCEHRPKRARPRQLRRSNPSTSDRPLQIAAIHAFLISQAPPSTTRRRRAWPL

SEQ ID NO: 79991 - protein, 89 aa, Setaria italica
  Transcript Sequence Number=SeqID_14017
MQTPRRKTPVDEKVSRKDDSVIQKAARKSTASAPSDDADKAVKKHTPTVKRTSGVLVNSNATNLVKIPPNSKKLTDTSTSWTSLPPSLA

SEQ ID NO: 79992 - protein, 621 aa, Setaria italica
  misc_feature (609)..(609): Xaa can be any naturally occurring amino acid
  Transcript Sequence Number=SeqID_14018
  Homolog annotation: Hit_ID=A2Q3C0; Match level="QueryCoverage=19%, HitCoverage=20%, E-value=5e-22, Identity=46%"; Hit description =Legume lectin, beta domain
  Pfam annotation: Domain name=DUF936; Domain location=4-621; Score =810.4; E_value=1.1e-240; Accession=PF06075.4; Description=Plant protein of unknown function (DUF936)
MASLVPGVLVKLLQHMNTDVKVAGEHRSSLLQVVSIVPALAGSDLFTNQGFYLKVSDSSHATYVSLPEEQHDLILSDKIQLGQFIHVDRLEAATPVPILRGVRPVPGRHACVGTPEDLVVTSSSNFHGSKKAQPTNGLKDASSLSLEKETSKLEKINASRKPTGAENKKPMLTKSNSSLSKQALNGIGGKKESVKSKVKPAITRSTPSSPTSVYSLPASFDRFSNDLKQRNKVKGAEKASSSRLSLLEKAASVLKVTTAGRKSSASNPISSSVLSIGSGPKALRRSWEGNVDIKGKGNSESKTTKPDRKSDNKIPVTPRRKTPVDEKVSRKDDSVIQKAARKSTASAPSDDADKAVKKHTPTVKRTSGVLGNSNATNLVKIPPNSKKLTDTSTSWTSLPPSLAKLGKELLKYRESAQMAAVEAMQEASAAESLLRCLSSYAEVSSTAEEQNPQPAVEQFLTLHAALSRATVITDTLTKPTASVASPDRSAASDVGTVASTTDEEAAAVAAERRRRATSWVSAALATDLSAFGLYNLKPVPATVSSPLAVVVVDESSKPAAAAATVTKSSPSPKSRMSPAKGKARTGPGATAAAAALTTTPAPPEWERGXGADERGELARRL

SEQ ID NO: 79993 - protein, 169 aa, Setaria italica
  misc_feature (130)..(130): Xaa can be any naturally occurring amino acid
  Transcript Sequence Number=SeqID_14019
  Homolog annotation: Hit_ID=Q10MH2; Match level="QueryCoverage=92%, HitCoverage=15%, E-value=4e-27, Identity=47%"; Hit description=Fip1 motif family protein, expressed
SNQSTSDDSSKLNHKCVTTERLKGSSFVVDRVVEKEVHDGDSSEFSGSKLDRRDSSCARAQSFSPDYSDTLSGESKEDFYFKRANRHSDSRDFFEDTKLQDEHVKSDFYRHSSKSDRENSESRSRSYTPXPADDRNHKATKLFRGLKLLLMDEASPVIFCECNSDHDLV

SEQ ID NO: 79994 - protein, 319 aa, Setaria italica
  misc_feature (65)..(65): Xaa can be any naturally occurring amino acid
  misc_feature (174)..(174): Xaa can be any naturally occurring amino acid
  Transcript Sequence Number=SeqID_14020
  Homolog annotation: Hit_ID=Q2R928; Match level="QueryCoverage=99%, HitCoverage=72%, E-value=4e-60, Identity=40%"; Hit description=F-box domain containing protein, expressed
LQFQAILATYDVDVNTGFQIALLCQARVISLHTSLGIYVENWDLPLELPNVPIISQHLKILDLQXVTLKRSTLDFSGCPTLVNLKMKECDINGNVPSPFLKHLSITSCYFVTRSFRARIYMPGLISLVLSECTHRTPLLENMPLLVLVIVRVKDCENKCSKSTYGDCGDHTCLXCYDFDHGANDRRGECLLLKGLSQVTELELSVDSTVFIVNRDLKLCPTFCKLKTLFLSAWCPGVAADRNVLTCFLQHSPIMEKLVLQLPKVPKDRVGTESSYKRSEHSFICSHLKIVDLKCEEVDGRVQETLEILSTYGIPLEHVK

SEQ ID NO: 79995 - protein, 133 aa, Setaria italica
  Transcript Sequence Number=SeqID_14021
  Gene Ontology: Mol. function=transporter activity; Cellular component= membrane; Biological process=oligopeptide transport
  Homolog annotation: Hit_ID=B6TVK5; Match level="QueryCoverage=99%, HitCoverage=23%, E-value=1e-45, Identity=61%"; Hit description =Peptide transporter PTR2
  Subcellular localization annotation: CTP_CleavageSite=58; ConfidenceScore=5.09e-01
AIPPASLASFDAVSVLIWVPVYDRVLVPVARRLTANARGISELQRLGAGLLLSVLVMVTAAVVETRRLASAHGEGRSSMSILWQVPQYFLVGASVVFACVGQTEFFYNEAPPSMRSLCSALALLTVALGSYVS

SEQ ID NO: 79996 - protein, 100 aa, Setaria italica
  Transcript Sequence Number=SeqID_14022
LRHTDGDTAAATPRYSSCLVVVRLLLRVAVAAAVGHRGAEPAVQWTGPSLAAAPLVEWTLRSAAPRSTPPKEGKKLQSSPTLPIASSLSSPNPPIPREKA

SEQ ID NO: 79997 - protein, 106 aa, Setaria italica
  misc_feature (47)..(47): Xaa can be any naturally occurring amino acid
  misc_feature (74)..(74): Xaa can be any naturally occurring amino acid
  Transcript Sequence Number=SeqID_14023
  Gene Ontology: Mol. function=hydrolase activity, acting on glycosyl bonds; Cellular component=beta-galactosidase complex; Biological process=carbohydrate metabolic process
  Homolog annotation: Hit_ID=Q0DGD7; Match level="QueryCoverage=100%, HitCoverage=24%, E-value=8e-37, Identity=52%"; Hit description=Beta -galactosidase 8
  Pfam annotation: Domain name=Glyco_hydro_35; Domain location=1-106; Score=-188.6; E_value=0.0056; Accession=PF01301.11; Description =Glycosyl hydrolases family 35
YVPWNLHEPEPQSWEFKGFADIESYLRLAQELDMLVMLRVGPYICGXERWWGVLLPKVAPLLYNNGGPVIMVQXYTTDGGDIGNLKNGSIPQDDVSLLLSFGTGSN

SEQ ID NO: 79998 - protein, 128 aa, Setaria italica
  misc_feature (18)..(18): Xaa can be any naturally occurring amino acid
  Transcript Sequence Number=SeqID_14024
  Gene Ontology: Mol. function=hydrolase activity, acting on glycosyl bonds; Cellular component=beta-galactosidase complex; Biological process=carbohydrate metabolic process
  Homolog annotation: Hit_ID=Q0DGD7; Match level="QueryCoverage=90%, HitCoverage=17%, E-value=8e-56, Identity=86%"; Hit description=Beta -galactosidase 8
  Pfam annotation: Domain name=Glyco_hydro_35; Domain location=1-127; Score=-92.2; E_value=2.9e-09; Accession=PF01301.11; Description =Glycosyl hydrolases family 35
ESYLRLAQELDMLVMLRXGPYICGEWDLGGFPPWLLAIEPALKLRSSDSTYLSLVERWWGVLLPKVAPLLYNNGGPVIMVQIENEFGSFGDDKNYLHYLVQLARRYLGNNIVLYAVLSAHTLSYTNHC

SEQ ID NO: 79999 - protein, 266 aa, Setaria italica
  misc_feature (76)..(76): Xaa can be any naturally occurring amino acid
  Transcript Sequence Number=SeqID_14025
  Gene Ontology: Mol. function=hydrolase activity, acting on glycosyl bonds; Cellular component=beta-galactosidase complex; Biological process=carbohydrate metabolic process
  Homolog annotation: Hit_ID=Q0DGD7; Match level="QueryCoverage=86%, HitCoverage=34%, E-value=1e-109, Identity=83%"; Hit description=Beta- galactosidase 8
  Pfam annotation: Domain name=Glyco_hydro_35; Domain location=2-159; Score=-39.6; E_value=1.1e-12; Accession=PF01301.11; Description =Glycosyl hydrolases family 35
MSTLKSSFSYTTDGGAIGNLKNGSIPQDDVFAAVDFGTGSNPWPIFRLQKKYNLPGKSAPLSSEFYTGWLTHWGEXIATTDAASTAKALKTILCHNGSAVLYMAHGGTNFGFYNGANTGQDESDYKADLTSYDYDAPIKEHGDVHNSKYEALRRVIHKCTRTPLHPLPSDIEKANYGLVKLQKVASLFDIIDNISDPLKGAVSEHPLYMEQIGQMFGFLLYMSEYQGKLPSSILSIPKVVAFNFCFLCMKESSSLLRCKFWVTAGT

SEQ ID NO: 80000 - protein, 123 aa, Setaria italica
  Transcript Sequence Number=SeqID_14026
IVQKPYSSRRSRRESHTQSRTKAMTIQIQVVVQSDSGLQSELCISGSILQKGQHRRQRWVHTQPPTRDPRRRSPDPPRSQSPPGAPAHGTGPRASAHGRTPPRAPPRVLRVLAFLDSSTRAPT

SEQ ID NO: 80001 - protein, 101 aa, Setaria italica
  misc_feature (39)..(39): Xaa can be any naturally occurring amino acid
  Transcript Sequence Number=SeqID_14027
  Gene Ontology: Mol. function=protein serine/threonine kinase activity; Biological process=protein amino acid phosphorylation
DVLRLPWVLFYNECPLKAEFSTLWSTNKAAAAPMVDWEXWSCCESSSSESSSDNSEEQDECGIVDALTTAITQVRISEPKRSRQCSPATAVFPPSRDALRT

SEQ ID NO: 80002 - protein, 103 aa, Setaria italica
  Transcript Sequence Number=SeqID_14028
RQLVAAIHARFPSVSLEFIEKALEEGGNDFDLATKYLLNFHAQSAECDAANGYQSPNGMTTEDQVPAEGILVDNVVAAPVDSVPWAENLPSSSTQWSEVLVKE

SEQ ID NO: 80003 - protein, 137 aa, Setaria italica
  Transcript Sequence Number=SeqID_14029
  Homolog annotation: Hit_ID=B6T3P8; Match level="QueryCoverage=86%, HitCoverage=48%, E-value=2e-14, Identity=36%"; Hit description=CUE domain containing protein
DPALVAAIHARFPSVSLEFIEKALEEGGNDFDLATKYLLNFHAQSAECDAANGYQSPNGMTTEDQVPAEDSVPWAENLPSSSTQWSEVLVKEMMSASNTDDAKARASGVLEVFERAMTSRIGAEALQNFPEGKFWFY

SEQ ID NO: 80004 - protein, 179 aa, Setaria italica
  Transcript Sequence Number=SeqID_14030
  Gene Ontology: Mol. function=electron carrier activity
  Homolog annotation: Hit_ID=B6TCB4; Match level="QueryCoverage=93%, HitCoverage=58%, E-value=7e-37, Identity=49%"; Hit description=CUE domain containing protein
FSYLISGNRTTSKDQVPAEGILVDNVVAAPVDSVPWAENLPSSSTQWSEVLVKEMMSASNTDDAKARASGVLEVFERAMTSRIGAEALQNFQKENLVYKEQFEAVIRENAILKKAVAIQHERQKEQDERSQELQQLKQLVVQYQEQVRSLEVNNYALSMHLRQAQQGSSIPGHFQRDIF

SEQ ID NO: 80005 - protein, 100 aa, Setaria italica
  Transcript Sequence Number=SeqID_14031
  Gene Ontology: Mol. function=serine-type endopeptidase activity; Cellular component=extracellular region; Biological process=negative regulation of catalytic activity
  Homolog annotation: Hit_ID=B6U0R8; Match level="QueryCoverage=100%, HitCoverage=13%, E-value=3e-40, Identity=83%"; Hit description =Subtilisin-like protease
VDTSKESRSPRDNDGHGTHTSSTAAGGAVQGADLLGYAAGTAKGMAPRARVATYKVCWTGGCFSSDILKAMEAAVTDGVDVLSLSLGGGTADYYRDSIAV

SEQ ID NO: 80006 - protein, 266 aa, Setaria italica
  Transcript Sequence Number=SeqID_14032
  Gene Ontology: Mol. function=serine-type endopeptidase activity; Cellular component=extracellular region; Biological process=negative regulation of catalytic activity
  Homolog annotation: Hit_ID=B6U0R8; Match level="QueryCoverage=98%, HitCoverage=34%, E-value=1e-121, Identity=79%"; Hit description =Subtilisin-like protease
  Pfam annotation: Domain name=Inhibitor_I9; Domain location=31-107; Score=81.7; E_value=2.6e-21; Accession=PF05922.8; Description =Peptidase inhibitor I9
MWRHGERCVILAVAAAALLVAAAAAGRDGRQTYIVHMSHSAMPNDFVEHGEWYAASLQAVSEAATVLYTYDTLVHGYSARLTRAEAEALESQPGVLIVNPEVRYELHTTRTPEFLGLDGTDALFPQSSTGSDVIIGVLDTGVWPERPSYDDTGFGPVPAGWKGECEKGNDFNASSCNKKLIGARFFLTGYEAAKGPVDTSKESRSPRDNDGHGTHTSSTAAGGAVQGADLLGYAAGTAKGMAPRARVATYKVCWTGGCFTETRNRR

SEQ ID NO: 80007 - protein, 522 aa, Setaria italica
  Transcript Sequence Number=SeqID_14033
  Gene Ontology: Mol. function=serine-type endopeptidase activity; Cellular component=extracellular region; Biological process=negative regulation of catalytic activity
  Homolog annotation: Hit_ID=B6U0R8; Match level="QueryCoverage=99%, HitCoverage=67%, E-value=0.0, Identity=85%"; Hit description =Subtilisin-like protease
  Pfam annotation: Domain name=PA; Domain location=124-223; Score =115.1; E_value=2.3e-31; Accession=PF02225.14; Description=PA domain
  Pfam annotation: Domain name=Peptidase_S8; Domain location=1-346; Score=-69.9; E_value=0.0057; Accession=PF00082.14; Description =Subtilase family
  Pfam module annotation: Pfam domain module=PA::Peptidase_S8; Domain location=124-223::1-346
TSTTPRARVATYKVCWTGGCFSSDILKAMEAAVTDGVDVLSLSLGGGTADYYRDSIAVGAFSAMEKGIFVSCSAGNAGPGAATLSNGAPWITTVGAGTIDRDFPAHVTLGNGKNYTGVSLYSGKPLSTTPVPLIYAGNASNSSMGQLCMSGSLIPEKVAGKIVLCDRGTNARVQKGFIVKDVGGAGMILANTAANGEELVADAHILPGSGVGEKAGNAIRDYAMSDPKATATIVFAGTKVGIQPSPVVAAFSSRGPNTVTPSVLKPDIIAPGVNILAAWSGSVGPSGIPGDSRRVGFNIISGTSMSCPHVSGLAALLRAAHPEWSPAAIRSALMTTAYNEYPNGDGILDVATGRPATPLDVGAGHVDPAKAVDPGLVYDLTTADYVDFLCAINYGPMQIATLTKRSSDGCVANRTYAESALNYPSFAVAFPAAGGTVKHTRTVTNVGQPGTYKVTASAAAGSTAVKVSVEPSTLSFSKAGEKLSYTVSFTAPAMASGTNGFGRLVWSSDHHVVASPIAATWN

SEQ ID NO: 80008 - protein, 116 aa, Setaria italica
  Transcript Sequence Number=SeqID_14034
  Gene Ontology: Mol. function=protein transporter activity; Cellular component=nuclear pore; Biological process=protein import into nucleus, docking
  Homolog annotation: Hit_ID=Q66JJ5; Match level="QueryCoverage=93%, HitCoverage=16%, E-value=6e-17, Identity=40%"; Hit description =Importin 4
  Pfam annotation: Domain name=IBN_N; Domain location=23-89; Score =64.1; E_value=5.1e-16; Accession=PF03810.11; Description=Importin -beta N-terminal domain
MAQSLELLLIQFLMPDNDARRQAEEQIRRLARDPQVVPALVHHLRTAKTPNVRQLAAVLLRKKITSHWPKLHPDSKANLKQALIDSITLDHSHPVRRASANVVSIIAKYAIPAGEW

SEQ ID NO: 80009 - protein, 102 aa, Setaria italica
  Transcript Sequence Number=SeqID_14035
  Gene Ontology: Mol. function=protein serine/threonine kinase activity; Biological process=protein amino acid phosphorylation
TTKLIRRDHTIKYHLPGEQLNMLISITSDDDLRNMIDECIVLEANRERLTMYLFSAKDDEHNVHLLVTCSSYAEKEAQFIALINGLTRPIVASRMQSIGSTS

SEQ ID NO: 80010 - protein, 104 aa, Setaria italica
  misc_feature (52)..(52): Xaa can be any naturally occurring amino acid
  misc_feature (73)..(73): Xaa can be any naturally occurring amino acid
  misc_feature (102)..(102): Xaa can be any naturally occurring amino acid
  Transcript Sequence Number=SeqID_14036
  Gene Ontology: Mol. function=substrate-specific transmembrane transporter activity; Cellular component=integral to membrane; Biological process=transmembrane transport
  Homolog annotation: Hit_ID=B6TZX8; Match level="QueryCoverage=98%, HitCoverage=21%, E-value=2e-19, Identity=52%"; Hit description =Carbohydrate transporter/ sugar porter
  Subcellular localization annotation: CTP_CleavageSite=74; ConfidenceScore=5.65e-01
WRPLLLASTAGVAASMASLGTALCVGSTSPVSMAATIASVLAFIAAFSIGFXPLAGTYSAEIMPLRLRAQGAXLGMAVNRLTCALVSMTFISLADAITMPGXFS

SEQ ID NO: 80011 - protein, 169 aa, Setaria italica
  misc_feature (107)..(107): Xaa can be any naturally occurring amino acid
  Transcript Sequence Number=SeqID_14037
  Gene Ontology: Mol. function=steroid hormone receptor activity; Cellular component=nucleus; Biological process=regulation of transcription, DNA-dependent
  Homolog annotation: Hit_ID=Q2HU72; Match level="QueryCoverage=98%, HitCoverage=27%, E-value=1e-36, Identity=51%"; Hit description =Steroid nuclear receptor, ligand-binding
FRLGLAILLWPFAVVGAVLASILSSIPLGAYGAVVAYQESSFIMGLAYVASSVSIFDEYTNDVLDMAPGSCFPRFKYRKSKDESSHGHSVPISRPSSFNKEKQEGKXPPSRVTSFKNSIDEFNPFKLLDHLFVECRNQGEELVNKGVITMKDIEETKSGKVGSGVLNVG

SEQ ID NO: 80012 - protein, 246 aa, Setaria italica
  Transcript Sequence Number=SeqID_14038
  Gene Ontology: Mol. function=steroid hormone receptor activity; Cellular component=nucleus; Biological process=regulation of transcription, DNA-dependent
  Homolog annotation: Hit_ID=Q2HU72; Match level="QueryCoverage=76%, HitCoverage=32%, E-value=9e-45, Identity=51%"; Hit description =Steroid nuclear receptor, ligand-binding
FFFNFPFFFKFLFFGYLTFILLECRNQGEELVNKGVITMKDIEETKSGKVGSGVLNVGLPAYVILNALLRSAKANSVGLVLSNGSEITSDNRPRHTLFDWFFEPLMVIKEQIKAENFTEEEEEYLKMRVLLAGDPSRLKGALPNMPSLNERKNAEIDAFARRLQGITKSISRYPTAKRRFDVLVKALLSELERTMGGSQSTNGSHSQAQRLRNSVARMLSQKSMGKTANIRDEDPEAQITTSSRTP

SEQ ID NO: 80013 - protein, 154 aa, Setaria italica
  Transcript Sequence Number=SeqID_14039
  Gene Ontology: Mol. function=metal ion binding; Cellular component =nucleus; Biological process=cell differentiation
  Homolog annotation: Hit_ID=Q7X9M9; Match level="QueryCoverage=100%, HitCoverage=58%, E-value=2e-52, Identity=69%"; Hit description =Yabby14 protein
  Pfam annotation: Domain name=YABBY; Domain location=3-112; Score =73.7; E_value=6.9e-19; Accession=PF04690.5; Description=YABBY protein
  Subcellular localization annotation: CTP_CleavageSite=52; ConfidenceScore=5.50e-01
QAPSLTSAEPASACVSTITSINNSCGGRNNASAMSMAPPPLKPAPQEPQLPKSAASGNRTAEKRQRVPSAYNRFIKDEIQRIKASNPDITHREAFSAAAKNWAHFPHIHFGLMPDQGLKKASMQNHEGGECMLFKDGLYAAAAAAASSMGIAPF

SEQ ID NO: 80014 - protein, 109 aa, Setaria italica
  Transcript Sequence Number=SeqID_14040
  Subcellular localization annotation: CTP_CleavageSite=13; ConfidenceScore=5.09e-01
DYSLKKQLPSTTRRTNVKRRRRRRITVRRKPLTKDRAPDMLIQKKKTKPLTPFLSPETICKHLELLLAADCGASRHDLPRSWNVCMVVCVQYASSVTSSLQISASFCTF

SEQ ID NO: 80015 - protein, 91 aa, Setaria italica
  misc_feature (1)..(6): Xaa can be any naturally occurring amino acid
  Transcript Sequence Number=SeqID_14041
XXXXXXFFKEQRGIPKYLIMIVTSRNMHDAAYHSLVPTTRTSCLCLTHQFSTRQVKNVLSNNYMLNKGRQNLNDDHGTKPNGMAARERLHA

SEQ ID NO: 80016 - protein, 122 aa, Setaria italica
  Transcript Sequence Number=SeqID_14042
  Gene Ontology: Mol. function=ATP-dependent helicase activity; Cellular component=cytoplasm; Biological process=mRNA processing
  Homolog annotation: Hit_ID=Q6H7S2; Match level="QueryCoverage=86%, HitCoverage=20%, E-value=1e-55, Identity=98%"; Hit description=DEAD -box ATP-dependent RNA helicase 8
  Pfam annotation: Domain name=DEAD; Domain location=1-122; Score=59.5; E_value=1.3e-14; Accession=PF00270.21; Description=DEADDEAH box helicase
KNGTGKTAAFCIPALEKIDQDKNAIQVVILVPTRELALQTSQVCKELGKHLKIQVMVTTGGTSLKDDIVRLYQPVHLLVGTPGRILDLTKKGICILKDCSMLIMDEVIYLNLCLNAIVLLLT

SEQ ID NO: 80017 - protein, 85 aa, Setaria italica
  Transcript Sequence Number=SeqID_14043
CENVPFAVVILVETVLDLWSLYSLLGGCESGTRLKYCCCVCILKGRTCYCVFFVKNMLLCLPSGDSWHPINSWLDSALASCFAGV

SEQ ID NO: 80018 - protein, 450 aa, Setaria italica
  Transcript Sequence Number=SeqID_14044
  Gene Ontology: Mol. function=ATP-dependent helicase activity; Cellular component=cytoplasm; Biological process=mRNA processing
  Homolog annotation: Hit_ID=Q6H7S2; Match level="QueryCoverage=90%, HitCoverage=80%, E-value=0.0, Identity=98%"; Hit description=DEAD -box ATP-dependent RNA helicase 8
  Pfam annotation: Domain name=DEAD; Domain location=100-266; Score =239.4; E_value=8.6e-69; Accession=PF00270.21; Description=DEADDEAH box helicase
  Pfam annotation: Domain name=Helicase_C; Domain location=332-408; Score=118.0; E_value=3e-32; Accession=PF00271.23; Description =Helicase conserved C-terminal domain
  Pfam annotation: Domain name=ResIII; Domain location=96-261; Score= -28.9; E_value=0.014; Accession=PF04851.7; Description=Type III restriction enzyme, res subunit
  Pfam module annotation: Pfam domain module=DEAD::Helicase_C::ResIII; Domain location=100-266::332-408::96-261
RQPQPQPSQHLSQQQQQQQWLRRRQIAGEAAGAGAQKATPAVDGIDSSSQDWKAQLKLPPQDTRYRTEDVTATKGNEFEDYFLKRELLMGIYEKGFERPSPIQEESIPIALTGSDILARAKNGTGKTAAFCIPALEKIDQDKNAIQVVILVPTRELALQTSQVCKELGKHLKIQVMVTTGGTSLKDDIIRLYQPVHLLVGTPGRILDLTKKGICVLKDCSMLIMDEADKLLSPEFQPSIEQLIRYLPSNRQILMFSATFPVTVKEFKDKYLPKPYVINLMDELTLKGITQFYAFVEERQKVHCLNTLFSKLQINQSIIFCNSVNRVELLAKKITELGYSCFYIHAKMLQDHRNRVFHDFRNGACRNLVCTDLFTRGIDIQAVNVVINFDFPKNAETYLHRVGRSGRFGHLGLAVNLITYEDRFNLYRIEQELGTEIKPIPPQIDRAIYCQ

SEQ ID NO: 80019 - protein, 458 aa, Setaria italica
  Transcript Sequence Number=SeqID_14045
  Gene Ontology: Mol. function=ATP-dependent helicase activity; Cellular component=cytoplasm; Biological process=mRNA processing
  Homolog annotation: Hit_ID=Q6H7S2; Match level="QueryCoverage=95%, HitCoverage=86%, E-value=0.0, Identity=96%"; Hit description=DEAD -box ATP-dependent RNA helicase 8
  Pfam annotation: Domain name=DEAD; Domain location=108-274; Score =234.5; E_value=2.6e-67; Accession=PF00270.21; Description=DEADDEAH box helicase
  Pfam annotation: Domain name=Helicase_C; Domain location=340-416; Score=117.0; E_value=6.3e-32; Accession=PF00271.23; Description =Helicase conserved C-terminal domain
  Pfam annotation: Domain name=ResIII; Domain location=104-269; Score= -29.9; E_value=0.017; Accession=PF04851.7; Description=Type III restriction enzyme, res subunit
  Pfam module annotation: Pfam domain module=DEAD::Helicase_C::ResIII; Domain location=108-274::340-416::104-269
NKITTKTRQHHNHHQQQQQQQWLRRNQIAREAAGAAGTSEPKALAPSTAADGVDSSSQDWKAQLKLPPQDTRYRTEDVTATKGNEFEDYFLKRELLMGIYEKGFERPSPIQEESIPIALTGSDILARAKNGTGKTAAFCIPALEKIDQDKNAIQVVILVPTRELALQTSQVCKELGKHLKIQVMVTTGGTSLKDDIVRLYQPVHLLVGTPGRILDLTKKGICILKDCSMLIMDEADKLLSPEFQPSVEQLIRYLPASRQILMFSATFPVTVKEFKDKYLPKPYVINLMDELTLKGITQFYAFVEERQKVHCLNTLFSKLQINQSIIFCNSVNRVELLAKKITELGYSCFYIHAKMLQDHRNRVFHDFRNGACRNLVCTDLFTRGIDIQAVNVVVNFDFPKNSETYLHRVGRSGRFGHLGLAVNLITYEDRFNLYRIEQELGTEIKPIPPQIDQAIYCQ

SEQ ID NO: 80020 - protein, 51 aa, Setaria italica
  Transcript Sequence Number=SeqID_14046
KCEMTRPSSSIFGRCNTLNEMFRVFASFVFSYPFFSCWGICLYHECCNGLI

SEQ ID NO: 80021 - protein, 79 aa, Setaria italica
  Transcript Sequence Number=SeqID_14047
  Gene Ontology: Mol. function=protein serine/threonine kinase activity; Cellular component=cytoplasm; Biological process=protein amino acid phosphorylation
  Homolog annotation: Hit_ID=Q336X9; Match level="QueryCoverage=64%, HitCoverage=13%, E-value=7e-23, Identity=98%"; Hit description =Mitogen-activated protein kinase 6
CPGQFAPNQRSARTQGWKERGEERRWVGIRSNQPLTDDHCQYFLYQLLRGLKYVHSANILHRDLKPSNLFLNANCDLKI

SEQ ID NO: 80022 - protein, 49 aa, Setaria italica
  Transcript Sequence Number=SeqID_14048
LQRMQKLMSVCIDYFSHCLLGTRTWVVAAIPILLKACENKRCLYFFSDA

SEQ ID NO: 80023 - protein, 372 aa, Setaria italica
  Transcript Sequence Number=SeqID_14049
  Gene Ontology: Mol. function=protein serine/threonine kinase activity; Cellular component=cytoplasm; Biological process=protein amino acid phosphorylation
  Homolog annotation: Hit_ID=Q336X9; Match level="QueryCoverage=97%, HitCoverage=96%, E-value=0.0, Identity=95%"; Hit description=Mitogen- activated protein kinase 6
  Pfam annotation: Domain name=Pkinase; Domain location=39-325; Score =318.9; E_value=1e-92; Accession=PF00069.17; Description=Protein kinase domain
  Pfam annotation: Domain name=Pkinase_Tyr; Domain location=42-302; Score=15.7; E_value=9.1e-15; Accession=PF07714.9; Description =Protein tyrosine kinase
  Pfam module annotation: Pfam domain module=Pkinase::Pkinase_Tyr; Domain location=39-325::42-302
MDSSGGGGGAQIKGMATHGGRYVLYNVYGNLFEVSSKYAPPIRPIGRGAYGIVCAAVNSESGEEVAIKKVGNAFDNHIDAKRTLREIKLLRHMDHENILALKDVIRPPSRENFNDVYIVTELMDTDLHQIIRSNQPLTDDHCQYFLYQLLRGLKYVHSANILHRDLKPSNLFLNANCDLKIADFGLARTTSETDLMTEYVVTRWYRAPELLLNCSQYTAAIDVWSVGCILGEIVTRQPLFPGRDYIQQLKLITELIGSPDDASLGFLRSDNAKRYMKQLPQFPRQDFRLRFRNMSAGAVDLLERMLVFDPSRRITVDEALHHPYLASLHDINEEPTCPAPFSFDFEQPSFTEAHIKELIWRESLAFNPDPPY

SEQ ID NO: 80024 - protein, 134 aa, Setaria italica
  Transcript Sequence Number=SeqID_14050
  Gene Ontology: Mol. function=hydrolase activity, acting on glycosyl bonds; Cellular component=vacuole; Biological process=plant-type hypersensitive response
  Homolog annotation: Hit_ID=P19171; Match level="QueryCoverage=100%, HitCoverage=40%, E-value=7e-55, Identity=74%"; Hit description=Basic endochitinase B
  Pfam annotation: Domain name=Glyco_hydro_19; Domain location=1-134; Score=195.2; E_value=1.8e-55; Accession=PF00182.11; Description =Chitinase class I
PYSWGYCFKQEQNPGSDYCQPSSQWPCAAGKQYYGRGPMQLSWNYNYGPAGQAIGADLLGNPDQVAADATIAFKAAIWFWMTAQSPKPSCHAVSTGQWSPTSADQTAGRLPGYGAITNIINGGLECGRGVDSRV

SEQ ID NO: 80025 - protein, 119 aa, Setaria italica
  Transcript Sequence Number=SeqID_14051
  Gene Ontology: Mol. function=transferase activity, transferring groups other than amino-acyl groups; Cellular component=membrane; Biological process=fatty acid biosynthetic process
  Homolog annotation: Hit_ID=B9STP7; Match level="QueryCoverage=100%, HitCoverage=23%, E-value=1e-56, Identity=86%"; Hit description =Acyltransferase, putative
  Pfam annotation: Domain name=FAE1_CUT1_RppA; Domain location=1-70; Score=-141.9; E_value=1.6e-06; Accession=PF08392.4; Description =FAE1Type III polyketide synthase-like
RTHKGADDRCFGCVTQREDAGAGKVGVSLSKDLMAVAGDALKTNITTLGPLVLPMSEQLLFFATLVARRVLKRKVKPYIPDFKLAFEHFCIHAGGRAVLDELEKNLKLSDWHMEPSRMT

SEQ ID NO: 80026 - protein, 256 aa, Setaria italica
  misc_feature (13)..(13): Xaa can be any naturally occurring amino acid
  Transcript Sequence Number=SeqID_14052
  Gene Ontology: Mol. function=binding
  Homolog annotation: Hit_ID=B9S6P3; Match level="QueryCoverage=87%, HitCoverage=5%, E-value=2e-52, Identity=53%"; Hit description =Inositol or phosphatidylinositol kinase, putative
NTSRYKVVVAASXGKALNTILSKEQSDFPASTTPQDIKLLHQRVQDLIQKSLAAVTTSQIALELSNANSIINFSLFVLNALAEVQKNFVDPFIGFLFRVLQRLARDMGSSAGSHIRQGQRPELDSSVNSRPTVDSTVISNMKTVLKLISERVMTSSDHRKSMGQILQALLSERGTDPSILLCILDMIKAWIEDDCRLASSTGSVNSLNPKEILAYLQKLSLVDRKSFPPAAQEEWECKNNLDKTYFNYDFRRKNYE

SEQ ID NO: 80027 - protein, 167 aa, Setaria italica
  Transcript Sequence Number=SeqID_14053
  Gene Ontology: Mol. function=phosphotransferase activity, alcohol group as acceptor; Cellular component=NuA4 histone acetyltransferase complex; Biological process=inositol lipid-mediated signaling
  Homolog annotation: Hit_ID=B9S6P3; Match level="QueryCoverage=100%, HitCoverage=4%, E-value=5e-73, Identity=79%"; Hit description =Inositol or phosphatidylinositol kinase, putative
NIANGNKPVSASSGANSNPNNSFADLKDILETWRLRTPNEWDNMTVWYDLLQWRNEMYNSVIDAFKDFGQTNPQLHHLGYRDKAWNVNKLAHIARKQGLPEVCVTILDKMYGHATMEVQEAFVKICEQAKAYLEMKGELVSGLNLINNTNLEFFPVKNKAEIFRLRG

SEQ ID NO: 80028 - protein, 772 aa, Setaria italica
  Transcript Sequence Number=SeqID_14054
  Gene Ontology: Mol. function=binding; Cellular component=NuA4 histone acetyltransferase complex; Biological process=regulation of transcription, DNA-dependent
  Homolog annotation: Hit_ID=B9S6P3; Match level="QueryCoverage=99%, HitCoverage=20%, E-value=0.0, Identity=72%"; Hit description =Inositol or phosphatidylinositol kinase, putative
NPKTLEVWPNANVKFNYLEKLLGNLSPSPQSKDPATALAQGLDVMNKVLEKQPRLFIRNNINHISQILEPCFSNKMLDAGKSLCSLLKMVFSAFPLEAATTPQDIKLLHQRVQDLIQKSLAAVTTSQIALELSNANSIINFSLFVLNALAEVQKNFVDPFIGFLFRVLQRLARDMGSSAGSHIRQGQRPELDSSVNSRPTVDSTVISNMKTVLKLISERVMTSSDHRKSMGQILQALLSERGTDPSILLCILDMIKAWIEDDCRLASSTGSVNSLNPKEILAYLQKLSLVDRKSFPPAAQEEWDAKYLQLLYSLCGDSTKYPLAFRQEFFHKVERQYMLGLRAKDPEMRKRFFKLYHDSVGKTLFSRLQFIIQSQDWEAVSDVFWLKQGLDLILAILVENEPITLAANSARVPALMIAGPVPDRITMPQQIPDAQESMDGTSLSFDSLAARHAQFLNEASKLVVADIMAPLKELAFADPNVAYHLWVLVFPIVWVTLHKEEQVALAKPIIALLSKDYHKRQQGCRPNVAQALLEGLHLSHPQPRMPSELIKYIGKTCNAWYIAIALLESHMVLMNEAKCSESLAELYRLLNEEDMRCGLWKRRSITAETRAGLSLVQHGYWQQAQNLFYQAMIKATQGTYNNTVPKAEMCLWEEQWLSCAAQLGQWEVLADYGKGVENHEILLDCLWKVPDWAYMKENVISKAQVEETPKLRLIQAFFTLHDKSTNGVSEAENLVSKGVELALEQWWQLPEMSVQSRMPLLQQFQQLVEVKE

SEQ ID NO: 80029 - protein, 1042 aa, Setaria italica
  misc_feature (155)..(155): Xaa can be any naturally occurring amino acid
  Transcript Sequence Number=SeqID_14055
  Gene Ontology: Mol. function=phosphotransferase activity, alcohol group as acceptor; Cellular component=NuA4 histone acetyltransferase complex; Biological process=inositol lipid-mediated signaling
  Homolog annotation: Hit_ID=B9S6P3; Match level="QueryCoverage=99%, HitCoverage=27%, E-value=0.0, Identity=76%"; Hit description =Inositol or phosphatidylinositol kinase, putative
  Pfam annotation: Domain name=FAT; Domain location=2-300; Score=37.1; E_value=7e-08; Accession=PF02259.15; Description=FAT domain
  Pfam annotation: Domain name=FATC; Domain location=1010-1042; Score =37.4; E_value=5.6e-08; Accession=PF02260.12; Description=FATC domain
  Pfam annotation: Domain name=PI3_PI4_kinase; Domain location=698-959; Score=62.6; E_value=1.5e-15; Accession=PF00454.19; Description =Phosphatidylinositol 3- and 4-kinase
  Pfam module annotation: Pfam domain module=FAT::FATC::PI3_PI4_kinase; Domain location=2-300::1010-1042::698-959
SSFLRDFVELALEQWWQLPEMSVQSRMPLLQQFQQLVEVKESSKILLDIANGNKPVSASSGANSNPNNSFADLKDILETWRLRTPNEWDNMTVWYDLLQWRNEMYNSVIDAFKDFGQTNPQLHHLGYRDKAWNVNKLAHIARKQGLPEDNFLTFXRLVCVTILDKMYGHATMEVQEAFVKICEQAKAYLEMKGELVSGLNLINNTNLEFFPVKNKAEIFRLRGDFLLKMNDCEAANQSYSNAITLFKHLPKGWISWGNYCDMIFKETNEEVWLEYAVSCFFQGIKYGVSNSRSHLARILYLLSFDTQNEPVGRALDKYLEQLPHWVWLSWIPQLLLSLQRGEAQHCKLVLLKIAQVYPQALYYWLRTYLMERRDVATKTEMGRNMLAQQRMQQAMLANNAANNLPDGSARGSNHAGGNVTSDNQVHQASQSVGATASHDGGNVQGQEPDRSTAEAGTNSSHDQGQQSSTGAEGSQVALRRNSGLGWVTSAASAFDAAKDIMEALRSKHTNLANELELLLSEIGSRFVTLPEERLLAVVNALLHRCYKYPTATTGEVPQSLRKELSGVCRACFSQDAVNKHVDFVKEYKQDFERDLDPESATTFPATLAELTERLKHWKNILQSNVEDRFPAVLKLEEESKTLRDFHVVDIELPGQYFTDQEIAPDHTVKLDRVGPDIPIVRRHGSSFRRLTLIGSDGSQRHFIVQTSLTPNARSDERMLQLFRVLNKMFDKHKESRRRHLAIHTPIIIPVWSQVRMVEDDLMYSTFLEVYEINCARHNREADSPITIFKEQLNQAISGQVSPEAVVELRLQAYNEITKNIVNDNIFSQYMHKILPTGHYLWTFKKQFAIQVALSCFMSYMLQIGGRAPNKILFAKNTGKIFQTDFHPAYDPNGMIEFNELVPFRLTRNLQAFFSNFGVEGLIVSAMCSAAQSVVSPKQNQHIWHHLAMFFRDELLSWSWRRPLGIPSVPVASNPLDFQQKVTNNVDYVIGRIKSISPHYLAEEEENATEPPQSVQRGVTDLVEAALSSRNLCMMDPTWHPWF

SEQ ID NO: 80030 - protein, 69 aa, Setaria italica
  Transcript Sequence Number=SeqID_14056
  Gene Ontology: Cellular component=integral to membrane; Biological process=vesicle-mediated transport
  Homolog annotation: Hit_ID=Q9FMR5; Match level="QueryCoverage=100%, HitCoverage=31%, E-value=5e-23, Identity=77%"; Hit description =Vesicle-associated membrane protein 714
MAIVYALVARGTVVLAEFAAVSGNAGAVARRILEKLPPDAEARLCFAQDRYIFHVLRGDAGITFLCMAN

SEQ ID NO: 80031 - protein, 172 aa, Setaria italica
  misc_feature (14)..(14): Xaa can be any naturally occurring amino acid
  misc_feature (157)..(157): Xaa can be any naturally occurring amino acid
  Transcript Sequence Number=SeqID_14057
  Gene Ontology: Cellular component=mitochondrion
  Homolog annotation: Hit_ID=Q76C99; Match level="QueryCoverage=99%, HitCoverage=81%, E-value=2e-51, Identity=32%"; Hit description =Protein Rf1, mitochondrial
  Pfam annotation: Domain name=PPR; Domain location=125-159; Score =30.2; E_value=8.4e-06; Accession=PF01535.12; Description=PPR repeat
  Pfam annotation: Domain name=PPR; Domain location=20-54; Score=50.2; E_value=8.1e-12; Accession=PF01535.12; Description=PPR repeat
  Pfam annotation: Domain name=PPR; Domain location=55-89; Score=42.6; E_value=1.6e-09; Accession=PF01535.12; Description=PPR repeat
  Pfam annotation: Domain name=PPR; Domain location=90-124; Score=46.9; E_value=7.9e-11; Accession=PF01535.12; Description=PPR repeat
  Pfam module annotation: Pfam domain module=PPR::PPR::PPR::PPR; Domain location=125-159::20-54::55-89::90-124
TAYSLFFEMLDRGXILPDAVTYNTVIDGLCKAGAVGRAEGVLQEMIHKGVKPDNRTYNCLINGYCTTGQWKEMLRILNEMSTQGLRADVVTYNLLLDYLCKNRNITEARKIFDSMIGKGIKPNVTTYSTLLNGYASKGDLADMHDFLDLMVADGIHXDHPVFNIVFRAYSKG

SEQ ID NO: 80032 - protein, 51 aa, Setaria italica
  Transcript Sequence Number=SeqID_14058
  Homolog annotation: Hit_ID=B9SLZ3; Match level="QueryCoverage=96%, HitCoverage=11%, E-value=3e-09, Identity=65%"; Hit description =Mitochondrial carrier protein, putative
MSLWMISNRCCIPCFPLKTQGMRPGVVPYQSILSALQRIAKEEGIRGLYSG

SEQ ID NO: 80033 - protein, 316 aa, Setaria italica
  Transcript Sequence Number=SeqID_14059
  Gene Ontology: Mol. function=binding; Cellular component =mitochondrial inner membrane; Biological process=transport
  Homolog annotation: Hit_ID=B9SLZ3; Match level="QueryCoverage=100%, HitCoverage=84%, E-value=1e-103, Identity=59%"; Hit description =Mitochondrial carrier protein, putative
  Pfam annotation: Domain name=Mito_carr; Domain location=120-212; Score=118.0; E_value=3.1e-32; Accession=PF00153.19; Description =Mitochondrial carrier protein
  Pfam annotation: Domain name=Mito_carr; Domain location=15-113; Score= 99.7; E_value=9.7e-27; Accession=PF00153.19; Description =Mitochondrial carrier protein
  Pfam annotation: Domain name=Mito_carr; Domain location=220-314; Score=103.2; E_value=8.6e-28; Accession=PF00153.19; Description =Mitochondrial carrier protein
  Pfam module annotation: Pfam domain module=Mito_carr::Mito_carr::Mito_ carr; Domain location=120-212::15-113::220-314
MSEGGRGGAREKLREAACNAVAGGSAGVISATVLCPLDVIKTRLQVYGLPSNFSSGAAPPGRVIISGFQQILKNEGLPGLYRGLSPTIVALFPTWAVTFSVYNHVKGLLHSEDGNNSELSVQANVLAASCAGIATATATNPLWVVKTRLQTQGMRPGVVPYQSILSALQRIAKEEGIRGLYSGLLPSLVGVAHVAIQLPVYEKVKLYFAKRDNTTVDKLSPTQVAMCSSGSKVAASIITYPHEVVRSKLQEQGRNDHGAMRYSGVTDCIKQVYKKEGFPGFYRGCATNLLRTTPNAVITFTSYEMINRLMHQLLVP

SEQ ID NO: 80034 - protein, 79 aa, Setaria italica
  Transcript Sequence Number=SeqID_14060
RSSAKVSSDHAAVAAPPPPAAELAAAAEEAPRMRLEQMVVDDDAAAAELGALKHRLSNARSRRPTLETIHEENYLSSRA

SEQ ID NO: 80035 - protein, 132 aa, Setaria italica
  Transcript Sequence Number=SeqID_14061
GLRLRAAGRFNDDRGTERLPAVRAGAFPCVRACAFLHFVTAPSMFPGGAMPVARQLEFSVRAWDLAGGSGGLIGLDDLRMEHLPSLEEIKVDLWYSGGGDQVEIVAAVLRRAADGHPNHPTLRITATPCYRY

SEQ ID NO: 80036 - protein, 113 aa, Setaria italica
  Transcript Sequence Number=SeqID_14062
  Gene Ontology: Cellular component=endoplasmic reticulum membrane
  Homolog annotation: Hit_ID=B6UA46; Match level="QueryCoverage=99%, HitCoverage=88%, E-value=6e-47, Identity=81%"; Hit description=BS14b
  Pfam annotation: Domain name=SNARE; Domain location=28-90; Score =63.0; E_value=1.1e-15; Accession=PF05739.11; Description=SNARE domain
HRTALFDGIEEGGIRAPAYSSREIHEHENDQAMDSLHDRVSILKRLTGDIHEEVENHNRMLDRMGSDMDASRGFLSGTVDKFKMVFETKSSRRMATMVASFIAVFLLVYYLTK

SEQ ID NO: 80037 - protein, 127 aa, Setaria italica
  Transcript Sequence Number=SeqID_14063
  Gene Ontology: Mol. function=DNA binding; Cellular component=nucleus
RLRRQGWVDELRRLRVAELRRDVERCDLSIGTLQSKVKRLREERERSVSGEAKPDEASGNDRLSGEEPGRSCRESNSTDLKPPKHPGHQGGGAKEEEVAKQEASGESAAASKESSDVRSSASLCRRR

SEQ ID NO: 80038 - protein, 261 aa, Setaria italica
  Transcript Sequence Number=SeqID_14064
  Gene Ontology: Mol. function=nucleic acid binding; Biological process= DNA integration
  Homolog annotation: Hit_ID=Q6ATH4; Match level="QueryCoverage=100%, HitCoverage=17%, E-value=1e-116, Identity=77%"; Hit description =Putative polyprotein
  Pfam annotation: Domain name=RVT_2; Domain location=1-136; Score =102.8; E_value=1.1e-27; Accession=PF07727.6; Description=Reverse transcriptase (RNA-dependent DNA pol
PDYVCRLQKSLYGLKQAPRAWYQRFATFIGQLGFVTSASDTSLFILREGTSLSYLLLYVDDIVLTASSSALLQRIMARLSSEFAMTDLGALHHFLGITVTRSSDGLFLSQRQYAVELLQRAGMAECHPTTTPVDTHAKLSAADGDLLSEKDASEYRSLAGALQYLTLTRPDLAYAVQQVCLFMHAPREPHRALIKRILRFVQGTLSSGLHIGTGSVDKLTAYSDADWAGCPDSRRSTSGFCVYLGDNLVSWSSKRQTTVSR

SEQ ID NO: 80039 - protein, 109 aa, Setaria italica
  Transcript Sequence Number=SeqID_14065
  Homolog annotation: Hit_ID=B9RAK3; Match level="QueryCoverage=90%, HitCoverage=13%, E-value=2e-17, Identity=45%"; Hit description =Bromodomain-containing protein, putative
MMGKTHRFSKGHLLGFVPDYRHGVETVGESKGLGSPSRIDSGSSRAPPKRKCVSVNSEEGEGASGFNVRREVFSLARMTALDKKDLEMKLRDELAQVRALQNDCSKACG

SEQ ID NO: 80040 - protein, 207 aa, Setaria italica
  Transcript Sequence Number=SeqID_14066
  Gene Ontology: Mol. function=transferase activity, transferring glycosyl groups; Biological process=metabolic process
  Homolog annotation: Hit_ID=B6SSN2; Match level="QueryCoverage=100%, HitCoverage=43%, E-value=1e-76, Identity=70%"; Hit description =Hydroquinone glucosyltransferase
AKVLRQPTPRRPPVYPIGPLIRTAECSGANDAAAPHSSRAACLEWLDEQPARSVIFVSFGSGGTLPAEQMRELALGLELSGQRFLWVLRSPSDEDSLSDYYYDAASKKDPFVYLPGGFVERTKKTGFLVPSWAPQIQVLAHKATGAFLTHCGWNSILESLVHGVPMVAWPLFAEQRLNAVMLSEGAGAAIRLPEVKDKETIAAAVRK

SEQ ID NO: 80041 - protein, 81 aa, Setaria italica
  Transcript Sequence Number=SeqID_14067
VLFSKASSSRFIYKVLKSNMEHDEYMETNQLIKLIVCIMENIITQKISSKVKWKYATPLNQICMQTNNLLIYRKYWHCLFK

SEQ ID NO: 80042 - protein, 345 aa, Setaria italica
  Transcript Sequence Number=SeqID_14068
  Gene Ontology: Mol. function=triacylglycerol lipase activity; Biological process=lipid metabolic process
  Homolog annotation: Hit_ID=B4FBB2; Match level="QueryCoverage=94%, HitCoverage=94%, E-value=0.0, Identity=92%"; Hit description=Lipase
  Pfam annotation: Domain name=Lipase_3; Domain location=100-240; Score= 131.9; E_value=2.1e-36; Accession=PF01764.17; Description=Lipase (class 3)
MERRGLLRAALLLCLLAVCSGRELTSKHNPSTTIYNSTLAKILVEYAAAIYTADLTQLFTWTCARCGDLIKGFEMIEIVVDVENCLEAYVGYASDINATIVVFRGTQENSIQNWVEDLLWKQLDLDYPGMPEAMVHRGFYSAYHNTTLRDGVVSGIQKTRKFYGDIPIMITGHSMGGAMASFCALDLVVNYRLDGVRLMTFGQPRIGNAAFASYFKTYLPHAIRVTHAHDIVPHLPPYFSFFPQKTYHHFPREVWIHNIGLGTLMYSVEKICDDSGEDPTCSRSVTGTSVRDHIYYLGVSMHAEDWSSCRIVMDYSKLQYQMDLNGNVVLSKQPGLSSDRGFSAQ

SEQ ID NO: 80043 - protein, 351 aa, Setaria italica
  Transcript Sequence Number=SeqID_14069
  Gene Ontology: Mol. function=RNA binding; Cellular component =ribonucleoprotein complex; Biological process=response to stress
  Homolog annotation: Hit_ID=Q9LPW9; Match level="QueryCoverage=99%, HitCoverage=46%, E-value=1e-108, Identity=55%"; Hit description =F13K23.5 protein
  Pfam annotation: Domain name=S1; Domain location=163-235; Score=63.3; E_value=9.3e-16; Accession=PF00575.15; Description=S1 RNA binding domain
  Pfam annotation: Domain name=S1; Domain location=5-146; Score=2.2; E _value=0.22; Accession=PF00575.15; Description=S1 RNA binding domain
  Pfam module annotation: Pfam domain module=S1::S1; Domain location =163-235::5-146
RLEHYASTGEKVEVELINCSPKGFVVSLDSLIGFLPYRNLATKWKFLAFETWLRRKGGDPSLYKHSLGLEDGLEVPDRNIEPESSSISEVAGEDQGSLPSKPKLEDLLRAYNQEKSKFFPSFIGQRLRVSVVLADRNSKRIFFSMKPKESEELIQKKKSLMAKLNVGDIVQCTIKRFVYFGIFVEVEGVPALIQQWEVSWDDTLDPAVSYKIGQVVDAKVIQLDYNNNRIFLSLKDVKPNPSVGALEAVIGEDLSLGEALEPVQADFEWPEVDALMEEMRKIEDVRDVYKGRFFQSPGLAPTFQVYMAPVIGPKYKLLARYGNNVQEVMVETTLDKERLKEAILTCTNRVS

SEQ ID NO: 80044 - protein, 205 aa, Setaria italica
  Transcript Sequence Number=SeqID_14070
  Gene Ontology: Mol. function=hydrolase activity, hydrolyzing O -glycosyl compounds; Cellular component=anchored to membrane; Biological process=carbohydrate metabolic process
  Homolog annotation: Hit_ID=A4PID2; Match level="QueryCoverage=98%, HitCoverage=45%, E-value=2e-82, Identity=72%"; Hit description=Beta -1,3-glucanase
  Pfam annotation: Domain name=Glyco_hydro_17; Domain location=4-205; Score=67.1; E_value=6.4e-17; Accession=PF00332.10; Description =Glycosyl hydrolases family 17
VYVTGINYGRIADNLPAPEDVVRLLKLARIRNVKIYDADHKVLDAFRGSGLNLVVAIPNEFLKDMAANPSKAMDWLNENVQPYHPSTRIVGITVGNEVLGGGDTGLAEALVGAVANVHDALKMLRLDRDIELTTPHSEAVFSNSYPPSACVFREDLMVYLRPLLDFFSRTGAPFYVNAYPFLAYMSDPSHIDINYALFKPNSGIV

SEQ ID NO: 80045 - protein, 85 aa, Setaria italica
  Transcript Sequence Number=SeqID_14071
IPRKHLNSAQTPRAPPILLRRQLGLNLRDGEDERAKGGRVREKEWSRSGWMPAPRRSSTRTSREEDEAGRFRREGSGFAVPRRRR

SEQ ID NO: 80046 - protein, 131 aa, Setaria italica
  Transcript Sequence Number=SeqID_14072
MTAAELSDEVTQSVFEHTEGAMGSVSDSQANGNHQPAPAPAEAEQAVEEGDAGETMEGVASIALLPSGAISGHFIRLPDSICFGLQGTPISCERECSRGEDYRLIKLTIIDFKSKREKVLVVECRGHDAAR

SEQ ID NO: 80047 - protein, 73 aa, Setaria italica
  Transcript Sequence Number=SeqID_14073
YLTRSSIMYYGVDIIGLNLLPSTSDSGIGSHNTSDNQTVMTHELVSMLLTAFCTEASESIAVLVNQLIPTFTL

SEQ ID NO: 80048 - protein, 553 aa, Setaria italica
  misc_feature (129)..(129): Xaa can be any naturally occurring amino acid
  misc_feature (204)..(204): Xaa can be any naturally occurring amino acid
  Transcript Sequence Number=SeqID_14074
  Gene Ontology: Mol. function=electron carrier activity
  Homolog annotation: Hit_ID=B6T7Z1; Match level="QueryCoverage=96%, HitCoverage=96%, E-value=0.0, Identity=87%"; Hit description=NADH dehydrogenase
  Pfam annotation: Domain name=Pyr_redox; Domain location=256-375; Score=7.8; E_value=0.0011; Accession=PF00070.19; Description =Pyridine nucleotide-disulphide oxidore
  Pfam annotation: Domain name=Pyr_redox_2; Domain location=89-425; Score=33.4; E_value=2.3e-09; Accession=PF07992.6; Description =Pyridine nucleotide-disulphide oxidore
  Pfam module annotation: Pfam domain module=Pyr_redox::Pyr_redox_2; Domain location=256-375::89-425
  Subcellular localization annotation: CTP_CleavageSite=52; ConfidenceScore=5.62e-01
LRVPSGPHFPTSARPRSPLGNRNLWKNAILKNSWTLGAGVPNMFALPSRLFRCMASSSSGDGGFARPTSTDEAVAPLPLYSWPDKQRPRVCILGGGFGGLYTALRLESLVWPSGKKPQVVLVDQSDRFXYFKPMLYELLSGEVDVWEIAPYFTELLKNTSIQFVRDSVKLLRPSDHFRREPGESCTGGVVHLESGTVIEYDWLXVLALGAEAKIDVVPGSAEYALPFTTLEDALRVESKLKMLERKRFGKSAPTIEVAIVGLGYSGVELAATISERLKNTGTVKAINVQTTICPTAPQGNRDAALKVLESRNIQLFLGYFVSCIEEAATSDDSSSTVTGSGVDGDHKKLILDLQPAERGVKSQTLEADLVLWTVGSTSQIPRLQPPDAPYVIPLNGRGQVETEETLQVKGHPRTFAIGDSAALRDPSGKLLPATAQVAFQQADFAGWNLWAAINDRPLLPFRFQNLGEMMTLGRNDAAITASFIDGLTLEGPLGHAARKLVYCLRMPTDEHRVKVGISWFTKTAIDSLASVQNAVANSFPFPPPTPMGDSTTT

SEQ ID NO: 80049 - protein, 54 aa, Setaria italica
  Transcript Sequence Number=SeqID_14075
IESISELESSGHTFKITDSLVTTDVHHFSLFGCVAIPFIISFIRSTDEHTDSFS

SEQ ID NO: 80050 - protein, 105 aa, Setaria italica
  misc_feature (59)..(59): Xaa can be any naturally occurring amino acid
  Transcript Sequence Number=SeqID_14076
IHSLPSKGLPWNLKELQMLGCSPMLEARCQKEDGEIWVKKKIQEQQKRTINEYQQKKTXKFWQGWQEYEEQLVQCAGEQQKNKGEWLMNEEEDWLKQHSAVEPVS

SEQ ID NO: 80051 - protein, 85 aa, Setaria italica
  Transcript Sequence Number=SeqID_14077
  Gene Ontology: Mol. function=nucleotidyltransferase activity; Biological process=biosynthetic process
  Homolog annotation: Hit_ID=B9R8Y9; Match level="QueryCoverage=63%, HitCoverage=13%, E-value=2e-13, Identity=72%"; Hit description =Mannose-1-phosphate guanyltransferase, putative
GDVENVQTVTNNNLNLTEAYVVRTNKQKLRDWKSSIGKWSRVQGEGDHNAKLGITILGEAVDVEDEVVVVNSIVLPNKTLNVSVQ

SEQ ID NO: 80052 - protein, 46 aa, Setaria italica
  Transcript Sequence Number=SeqID_14078
MSVSKRRSSYINAGEAVDVEDEVVVVNSIVLPNKTLNVSVQEEIIL

SEQ ID NO: 80053 - protein, 321 aa, Setaria italica
  Transcript Sequence Number=SeqID_14079
  Gene Ontology: Mol. function=nucleotidyltransferase activity; Biological process=biosynthetic process
  Homolog annotation: Hit_ID=Q10Q60; Match level="QueryCoverage=85%, HitCoverage=74%, E-value=1e-156, Identity=94%"; Hit description=ADP -glucose pyrophosphorylase family protein, putative, expressed
  Pfam annotation: Domain name=Hexapep; Domain location=200-217; Score =7.3; E_value=22; Accession=PF00132.16; Description=Bacterial transferase hexapeptide (th
  Pfam annotation: Domain name=Hexapep; Domain location=218-235; Score =15.4; E_value=0.24; Accession=PF00132.16; Description=Bacterial transferase hexapeptide (th
  Pfam annotation: Domain name=Hexapep; Domain location=241-258; Score =13.0; E_value=1.3; Accession=PF00132.16; Description=Bacterial transferase hexapeptide (th
  Pfam module annotation: Pfam domain module=Hexapep::Hexapep::Hexapep; Domain location=200-217::218-235::241-258
GSAGGLYSFRDYIMEDSPSHIVLLNCDVCSSFPLPDMLEAHKKYGGMGTLLVNKVSAESANQFGELVADPETNELLHYTEKPETFVSDLINCGVYIFTPNIFSAIEDVLKQKKDRANLRRVSSFEALQSATKALPADFVRLDQDILSPLAGKKELYTYQTLDFWEQIKTPGMSLRCSGLYLSQFRRTSPHLLASGDGIRTATIVGDVYIHPSAKVHPTSKIGPNVSISANARVGAGARLINCIILDDVEIMENAVVIHSIVGWKSSIGKWSRVQGEGDHNAKLGITILGEAVDVEDEVVVVNSIVLPNKTLNVSVQEEIIL

SEQ ID NO: 80054 - protein, 219 aa, Setaria italica
  Transcript Sequence Number=SeqID_14080
  Gene Ontology: Cellular component=cytoplasm
  Homolog annotation: Hit_ID=A9T5P8; Match level="QueryCoverage=67%, HitCoverage=18%, E-value=2e-13, Identity=34%"; Hit description =Suppressor of silencing
  Pfam annotation: Domain name=XS; Domain location=64-173; Score=57.1; E_value=6.8e-14; Accession=PF03468.6; Description=XS domain
CGRDFADVHGLVMHAYNPPNTDSLVDHLGLHKALCVLMGWDYTKVPENSKGYQSLPADLVRASREDLIVWPPTVIMHNTATGRKKDGRLEGLGNKDMDKKMTELGFSGGKSKSLYGKEGHLGLTLIKFANNPAGLKEAERLAEFLERQDHGRIGWSRARATHSIDSDQNPLLVETDIRTGERKRIFYGYLAIASDLDELDSDSRKRAFLKSRREFDPSD

SEQ ID NO: 80055 - protein, 170 aa, Setaria italica
  misc_feature (157)..(157): Xaa can be any naturally occurring amino acid
  misc_feature (159)..(159): Xaa can be any naturally occurring amino acid
  Transcript Sequence Number=SeqID_14081
  Gene Ontology: Cellular component=plasma membrane
  Homolog annotation: Hit_ID=Q9LPM5; Match level="QueryCoverage=100%, HitCoverage=38%, E-value=2e-17, Identity=34%"; Hit description =F2J10.8 protein
  Pfam annotation: Domain name=DUF1005; Domain location=1-170; Score= -64.6; E_value=1.8e-14; Accession=PF06219.4; Description=Protein of unknown function (DUF1005)
MDPCPFVRVLVGNLALRMPVAPPAAGAGAGVHPSTSPCHCKIRLGKMPAQLVPAPLAPFDGGEQAPASGALAAAFHLSKADLEWFNGKPSLFSSRGEACLKVAVYAGRKGSTCGVSSGRLLGKATIPLDLKGAEAKPAVLHSGWISIGKRGGKGSPXAXELSLTVRAEPD

SEQ ID NO: 80056 - protein, 180 aa, Setaria italica
  Transcript Sequence Number=SeqID_14082
  Gene Ontology: Cellular component=plasma membrane
  Homolog annotation: Hit_ID=Q9LPM5; Match level="QueryCoverage=93%, HitCoverage=37%, E-value=3e-52, Identity=59%"; Hit description =F2J10.8 protein
  Pfam annotation: Domain name=DUF1005; Domain location=3-180; Score =110.1; E_value=7.5e-30; Accession=PF06219.4; Description=Protein of unknown function (DUF1005)
KRRLPVEPLQVDLKGAEAKPAVLHSGWISIGKRGGKGSPAAAELSLTVRAEPDPRFVFEFDGEPECSPQVLQVRGSMKQPMFTCKFGCRSNSDLRRPGMQPEREGASGKERKGWSVTVHDLSGSPVAMASMVTPFVPSPGTDRVSRSNPGAWLILRPAGDGAWEPWARLECWRERGGAGA

SEQ ID NO: 80057 - protein, 150 aa, Setaria italica
  misc_feature (34)..(34): Xaa can be any naturally occurring amino acid
  Transcript Sequence Number=SeqID_14083
  Gene Ontology: Mol. function=nucleic acid binding
  Homolog annotation: Hit_ID=Q9M9L2; Match level="QueryCoverage=97%, HitCoverage=26%, E-value=9e-26, Identity=38%"; Hit description =F10A16.15 protein
  Pfam annotation: Domain name=MuDR; Domain location=71-146; Score =109.2; E_value=1.4e-29; Accession=PF03108.7; Description=MuDR family transposase
KTLISISNDKDLRRMVDFHAESETTYIYVMKKAXNRLKSSISDSGTPADSAIIATTPDGSKRQKICASWENAITGVGQVFEGPKEFRDALHKYAIAHRFHYRFVKNDSSRVTAECTDEGCTWRIHASKSHAKEFAIKKVFGTHTCESETI

SEQ ID NO: 80058 - protein, 244 aa, Setaria italica
  misc_feature (43)..(43): Xaa can be any naturally occurring amino acid
  misc_feature (106)..(106): Xaa can be any naturally occurring amino acid
  Transcript Sequence Number=SeqID_14084
  Gene Ontology: Mol. function=nucleic acid binding
  Homolog annotation: Hit_ID=Q9FI74; Match level="QueryCoverage=100%, HitCoverage=41%, E-value=2e-41, Identity=35%"; Hit description =Mutator-like transposase-like protein
  Pfam annotation: Domain name=MuDR; Domain location=143-186; Score= -0.8; E_value=0.0027; Accession=PF03108.7; Description=MuDR family transposase
  Pfam annotation: Domain name=PB1; Domain location=19-104; Score=22.8; E_value=0.0014; Accession=PF00564.16; Description=PB1 domain
  Pfam module annotation: Pfam domain module=MuDR::PB1; Domain location= 143-186::19-104
MGRGQIVAVLQVGGEFSTDDDGHMSYYGGEAHAMHVKSDWTFXKMFKHEISSTLNNLKLDSYVFKYFLPRNDKTLISISNDKDLRRMVDFHAESETTYIYVMKKAXNRLKSSISDSGTPADSAIIATTPDGSKRQKICASWENAITGVGQVFEECTDEGCTWRIHASKSHAKEFAIKKVFGTHTCESETIKSHRLASQKWVASVIKEKIRDSPNYRPRDIANDLQREYGLCLNYSQAWRGKAIA

SEQ ID NO: 80059 - protein, 603 aa, Setaria italica
  Transcript Sequence Number=SeqID_14085
  Gene Ontology: Mol. function=nucleic acid binding
  Homolog annotation: Hit_ID=Q9M9L2; Match level="QueryCoverage=95%, HitCoverage=74%, E-value=1e-137, Identity=43%"; Hit description =F10A16.15 protein
  Pfam annotation: Domain name=MULE; Domain location=220-316; Score =46.8; E_value=8.7e-11; Accession=PF10551.1; Description=MULE transposase domain
  Pfam annotation: Domain name=MuDR; Domain location=26-101; Score =109.2; E_value=1.4e-29; Accession=PF03108.7; Description=MuDR family transposase
  Pfam annotation: Domain name=SWIM; Domain location=476-508; Score =42.0; E_value=2.4e-09; Accession=PF04434.9; Description=SWIM zinc finger
  Pfam annotation: Domain name=zf-CCHC; Domain location=582-599; Score =10.5; E_value=0.012; Accession=PF00098.15; Description=Zinc knuckle
  Pfam module annotation: Pfam domain module=MULE::MuDR::SWIM::zf-CCHC; Domain location=220-316::26-101::476-508::582-599
LTIRLTYYQDGSKDGQKEFSRQSWENAITGVGQVFEGPKEFRDALHKYAIAHRFHYRFVKNDSSRVTAECTDEGCTWRIHASKSHAKEFAIKKVFGTHTCESETIKSHRLASQKWVASVIKEKIRDSPNYRPRDIANDLQREYGLCLNYSQAWRGKAIARKELYSSHEEACNQLPWFCQRIVETNPGSVATLEALEDSKFRFFVAFHASLHGFEHGCRPLLFLDVISVRSNKHWKLLAATSVDSEGDIFPVALSVVDDESQENWHWFLEQLKASLPALGAITFISNGKNGLWDKVSLLFPDSCHGYDVNCFVEEYKKQLDDSWSEEVKDTMVEHLKKAIYSCKVDEFNQYVELIKAESDKLAEWLLETKPERWSDAFFKGSRLGQYTCNVSETIAEWIPSRYELSVVQLVDTIRCNLMEMMYARRESSNACTELLTPSANQKLQEQMNKALTLNVVCSTGSDGNSHVFEVCDDSVHVVNINTRECTCRKWNVSGIPCSHAIAVFDRTEQCPLDYCDKYFTTEYYRWTYAMSINPIPDVLVPTVAGDPSHGTILHLSPILTRRQVGRPKEKPADPRIAIKRAVRCSRCKGYGHNKATCKVPITA

SEQ ID NO: 80060 - protein, 52 aa, Setaria italica
  Transcript Sequence Number=SeqID_14086
GSPKLYLCLQCIEIYCHFYTLIYYRLLESYFLGVVMLLVSILLLTPLAIVAM

SEQ ID NO: 80061 - protein, 180 aa, Setaria italica
  Transcript Sequence Number=SeqID_14087
  Gene Ontology: Mol. function=microtubule motor activity; Cellular component=microtubule associated complex; Biological process =microtubule-based movement
  Homolog annotation: Hit_ID=Q93XF7; Match level="QueryCoverage=100%, HitCoverage=16%, E-value=2e-92, Identity=91%"; Hit description =Kinesin heavy chain (Fragment)
  Pfam annotation: Domain name=Kinesin; Domain location=1-180; Score =5.1; E_value=7.3e-16; Accession=PF00225.15; Description=Kinesin motor domain
CRPFSDDELRSNAPQVVTCNDYQREVAVTQTIAGKQFDRVFTFDKVFGPTAKQQDLYDQAIIPIVHEVLEGFNCTIFAYGQTGTGKTYTMEGECRRAKSGPKGQLPADAGVIPRAVKQIFDTLERQNTEYSVKVTFLELYNEEITDLLAPEEILSKVALEDRQKKTLPLMEDGKGGVLVR

SEQ ID NO: 80062 - protein, 186 aa, Setaria italica
  Transcript Sequence Number=SeqID_14088
  Gene Ontology: Mol. function=flavin-containing monooxygenase activity; Biological process=cellular aromatic compound metabolic process
  Homolog annotation: Hit_ID=B6SKY5; Match level="QueryCoverage=98%, HitCoverage=46%, E-value=1e-87, Identity=85%"; Hit description =Disulfide oxidoreductase/ monooxygenase/ oxidoreductase
SGMEIAYDLAAAGAVTSISVRSELHLVTREIWNVAMSLYGYHVPAWIIDKLVLLMCAVVFGGDTARHGLRRPAVGPFTMKLTTPAYPVIDVGTYSKIRTGEIRVLPAGVKSVRGNVVEFADGRRHPFDAIVLATGYRSTVRRWLRSDDGLIGDDGMAARPYPEHWKGENGLYCAGLVRRGIYGSYS

SEQ ID NO: 80063 - protein, 127 aa, Setaria italica
  misc_feature (45)..(45): Xaa can be any naturally occurring amino acid
  Transcript Sequence Number=SeqID_14089
  Gene Ontology: Cellular component=plasma membrane
  Homolog annotation: Hit_ID=B4FVT6; Match level="QueryCoverage=98%, HitCoverage=73%, E-value=8e-54, Identity=75%"; Hit description=Fiber protein Fb34
  Pfam annotation: Domain name=DUF1218; Domain location=16-99; Score =106.8; E_value=7.2e-29; Accession=PF06749.4; Description=Protein of unknown function (DUF1218)
TFCVYDSDIATGYGVGAFLFLLSGHSLLMGVTRCMCFGAPLAPGXTFSIAEACLIAGATKNAYHTKYRDMVYAGNWTCQSLRKGVFIAGAVFVVFTMILNVYFYMYYAKATSQAAKKISKTTPSVRT

SEQ ID NO: 80064 - protein, 190 aa, Setaria italica
  Transcript Sequence Number=SeqID_14090
  Gene Ontology: Cellular component=plasma membrane
  Homolog annotation: Hit_ID=B4FVT6; Match level="QueryCoverage=100%, HitCoverage=100%, E-value=2e-92, Identity=86%"; Hit description =Fiber protein Fb34
  Pfam annotation: Domain name=DUF1218; Domain location=61-158; Score =159.2; E_value=1.3e-44; Accession=PF06749.4; Description=Protein of unknown function (DUF1218)
MGDTARSSILVHILVIALCLTAFGFAIAAERRRSTGSIVTDSSNTTFCVYDSDIATGYGVGAFLFLLSGHSLLMGVTRCMCFGAPLAPGGTRAWSIIYFASSWITFSIAEACLIAGATKNAYHTKYRDMVYAGNWTCQSLRKGVFIAGAVFVVFTMILNVYFYMYYAKATSQAAKKISKTTPSVSMTGYA

SEQ ID NO: 80065 - protein, 105 aa, Setaria italica
  Transcript Sequence Number=SeqID_14091
RWPRGEKLVVVVLLLRRVEGPRACPQKVELPLRRGVGAVLGDGAGREKRGLSGDPAGVAEVGLGGGLEQHGEAADTSAAPGKGQAEGDCSFHSSSGSRRDRELAP

SEQ ID NO: 80066 - protein, 106 aa, Setaria italica
  Transcript Sequence Number=SeqID_14092
  Homolog annotation: Hit_ID=A5Z1R3; Match level="QueryCoverage=49%, HitCoverage=59%, E-value=1e-11, Identity=58%"; Hit description =Ethphon-induced protein
  Pfam annotation: Domain name=DUF581; Domain location=18-76; Score =83.2; E_value=9.1e-22; Accession=PF04570.6; Description=Protein of unknown function (DUF581)
RPPLKPAASPRRPGRMFCDPCDDADELHGHHHYLDICFRCRKLLSGNRDIFMYRGDMPFCSEECRQEQIDIDEAREQRSKQTGRAEQQLQRQQQKQSPQRIPIWAW

SEQ ID NO: 80067 - protein, 189 aa, Setaria italica
  misc_feature (49)..(49): Xaa can be any naturally occurring amino acid
  Transcript Sequence Number=SeqID_14093
  Gene Ontology: Mol. function=metal ion binding
  Homolog annotation: Hit_ID=B9R8C9; Match level="QueryCoverage=99%, HitCoverage=26%, E-value=6e-62, Identity=61%"; Hit description=Zinc finger protein, putative
  Pfam annotation: Domain name=FYVE; Domain location=11-103; Score =80.7; E_value=5.2e-21; Accession=PF01363.13; Description=FYVE zinc finger
NLMKPMNEEKDHWVPDEAVSKCTACAADFSAFNRRVRTVKYSSANDVTXISFNVANLLYFQHHCRNCGDIFCDKCTQGRTPLTTDADAQPVRVCDRCMAEVTQRLANAREAANRPIVHSHEDLAKKLQEAMDINKRSSSGTRSSDASGKRMREVACPICTVHLQVQVPTSGSETIECGVCQHPFLVSAR

SEQ ID NO: 80068 - protein, 96 aa, Setaria italica
  Transcript Sequence Number=SeqID_14094
  Gene Ontology: Mol. function=metal ion binding
  Homolog annotation: Hit_ID=A6N121; Match level="QueryCoverage=95%, HitCoverage=98%, E-value=2e-34, Identity=77%"; Hit description=Zinc ion binding protein (Fragment)
RCMAEVTQRLANAREAANRPIVHSHEDLAKKLQEAMDINKRSSSGTRSSDASGKRMREVACPICTVHLQVQVPTSGSETIECGVCQHPFLVSAVSS

SEQ ID NO: 80069 - protein, 96 aa, Setaria italica
  Transcript Sequence Number=SeqID_14095
  Gene Ontology: Mol. function=nucleotidyltransferase activity; Cellular component=cytoplasm; Biological process=tRNA processing
  Homolog annotation: Hit_ID=Q75KT6; Match level="QueryCoverage=90%, HitCoverage=68%, E-value=2e-20, Identity=63%"; Hit description =Putative tRNAHis guanylyltransferase
WKGEREAHEILKGTLSKDKNELLFQQFQMNYNNEPALFRKGSCIYRRKVEELAEAEGGGDVTTREQWDVKVDHVDLGPGFWRKHPWIMTNCNCSSD

SEQ ID NO: 80070 - protein, 222 aa, Setaria italica
  Transcript Sequence Number=SeqID_14096
  Gene Ontology: Mol. function=nucleotidyltransferase activity; Cellular component=cytoplasm; Biological process=tRNA modification
  Homolog annotation: Hit_ID=Q75KT6; Match level="QueryCoverage=92%, HitCoverage=82%, E-value=3e-79, Identity=68%"; Hit description =Putative tRNAHis guanylyltransferase
  Pfam annotation: Domain name=Thg1; Domain location=1-216; Score =166.0; E_value=1.1e-46; Accession=PF04446.4; Description=tRNAHis guanylyltransferase
TIHSFDKPNDETALRLMDASASLMMEQYPDIVFGYGFSNEYSFVFHDKAELYQRQESLILSSCSSYFTSLYMKKWKEFFPDKELMQTPRFEAEALCYPKLKIVCEYLSWRQAECHAGNQYNTCFWMLVKSGKGEREAHEILKGTLSKDKNELLFQQFQMNYNNEPALFRKGSCIYRRKVEELAEAEGGGDVTTREQWDVKVDHVDLGPGFWRKHPWIMTNCN

SEQ ID NO: 80071 - protein, 59 aa, Setaria italica
  Transcript Sequence Number=SeqID_14097
  Gene Ontology: Mol. function=catalytic activity
  Homolog annotation: Hit_ID=Q2QY22; Match level="QueryCoverage=96%, HitCoverage=23%, E-value=6e-11, Identity=64%"; Hit description =Phosphoglycerate mutase family protein
GGLFQGWTFDDAKRSEAYKVFARGGRDQEILGGGESLDQLSERFVSRLNEIAKKHKGKH

SEQ ID NO: 80072 - protein, 126 aa, Setaria italica
  misc_feature (38)..(38): Xaa can be any naturally occurring amino acid
  misc_feature (77)..(77): Xaa can be any naturally occurring amino acid
  misc_feature (108)..(108): Xaa can be any naturally occurring amino acid
  Transcript Sequence Number=SeqID_14098
  Gene Ontology: Mol. function=catalytic activity; Biological process =metabolic process
  Homolog annotation: Hit_ID=Q2QY22; Match level="QueryCoverage=100%, HitCoverage=50%, E-value=7e-31, Identity=61%"; Hit description =Phosphoglycerate mutase family protein
  Pfam annotation: Domain name=PGAM; Domain location=1-107; Score=-4.4; E_value=0.0055; Accession=PF00300.14; Description=Phosphoglycerate mutase family
SSDLKRASQTAQTIAAHCCVSDSDLVIDRALTERHMGXSKGWTIDDAKRSEAYKAFARGGRDQEIPVTNFHSPLISXRCVSRLNAIAEKHKGERVVVVSHEAVIEEIXGHADPTISVGRKIPNTSI

SEQ ID NO: 80073 - protein, 138 aa, Setaria italica
  misc_feature (69)..(69): Xaa can be any naturally occurring amino acid
  misc_feature (108)..(108): Xaa can be any naturally occurring amino acid
  Transcript Sequence Number=SeqID_14099
  Gene Ontology: Mol. function=catalytic activity; Biological process =metabolic process
  Homolog annotation: Hit_ID=Q2QY22; Match level="QueryCoverage=68%, HitCoverage=35%, E-value=1e-30, Identity=72%"; Hit description =Phosphoglycerate mutase family protein
  Pfam annotation: Domain name=PGAM; Domain location=8-86; Score=-14.8; E_value=0.058; Accession=PF00300.14; Description=Phosphoglycerate mutase family
LISILLSKLYLVLVEVKARLRHAFPLLVAIYYSLVISFGQGGGESLDQLSERCVSRLNEIAKKHKGKHXSGERVVVVSHEAVIEEICRHADPTISVGRKIPNTSISVXHISGSDGRWILEKFGDAGHLIGDGFPQSTL

SEQ ID NO: 80074 - protein, 452 aa, Setaria italica
  misc_feature (375)..(375): Xaa can be any naturally occurring amino acid
  misc_feature (383)..(383): Xaa can be any naturally occurring amino acid
  misc_feature (439)..(439): Xaa can be any naturally occurring amino acid
  Transcript Sequence Number=SeqID_14100
  Gene Ontology: Mol. function=nucleotide binding; Biological process =defense response
  Homolog annotation: Hit_ID=Q8LLA9; Match level="QueryCoverage=96%, HitCoverage=44%, E-value=2e-91, Identity=45%"; Hit description=RGH1A
  Pfam annotation: Domain name=NACHT; Domain location=187-345; Score= -20.4; E_value=0.003; Accession=PF05729.4; Description=NACHT domain
  Pfam annotation: Domain name=NB-ARC; Domain location=171-452; Score =166.7; E_value=7e-47; Accession=PF00931.14; Description=NB-ARC domain
  Pfam module annotation: Pfam domain module=NACHT::NB-ARC; Domain location=187-345::171-452
RKLGELLVGELTLEQRVRKDVVSLKTEMEWMDEALRKVAKVDQPDEQDTHWAREVRELSYDMEDAVDAFMLRVTGDTEPARGDLKCRVQEFLKKTGRLFGKGKELHQIAGAVEDAKRLSNQLRECSQKYKIWPEVKDGGGTGSGTGGDSIDPRLTAMFREVTELVGVNGSRDELIERISDRSKKHAQTVSIVGFGGLGKTTLAKAVYDTVKDQFVVLRFVSVSRSPDFTRIFKKILFQLDKEQYAHFDEAVWDAMQLINELKGFLQNKRFLIVIDDIWDAEAWDFIKNAFPKNYLGSALITTTRKHDVAKACCPSTDDHNKIYKMMTLSESDSQRLFYMRIFGHRNGCSPELEQVSTDILKKCGGVPLAIISIAXLLASHQQXKAKDQWYTVLNSIGHGLGDNVKNMREILSYSYYDLPFHLKACLLYLSIFSEDHDIXRDRLIWRWIAGKV

SEQ ID NO: 80075 - protein, 81 aa, Setaria italica
  misc_feature (1)..(19): Xaa can be any naturally occurring amino acid
  Transcript Sequence Number=SeqID_14101
  Subcellular localization annotation: CTP_CleavageSite=39; ConfidenceScore=5.37e-01
XXXXXXXXXXXXXXXXXXXFFFFFLKFAQKVAFLSLIMRSLAVRHNLTTSLYTPLMVQHYSMNKRMVKKESKTRGATCPYQ

SEQ ID NO: 80076 - protein, 104 aa, Setaria italica
  Transcript Sequence Number=SeqID_14102
  Subcellular localization annotation: CTP_CleavageSite=28; ConfidenceScore=5.75e-01
NQTPGRPRSANTTRSGFRNPTAAPPQSRAATPASEIPRVVSCRSGAVHAKKRRRLLARLRSASRKRKRGEEGDVGGGATRRGVAGGRRRGRGRGSELLPSYIAA

SEQ ID NO: 80077 - protein, 102 aa, Setaria italica
  Transcript Sequence Number=SeqID_14103
  Gene Ontology: Mol. function=DNA binding; Cellular component=nucleus; Biological process=regulation of transcription
  Homolog annotation: Hit_ID=Q43524; Match level="QueryCoverage=100%, HitCoverage=30%, E-value=7e-57, Identity=96%"; Hit description =Transcription factor
  Pfam annotation: Domain name=Myb_DNA-binding; Domain location=14-61; Score=48.2; E_value=3.1e-11; Accession=PF00249.23; Description=Myb -like DNA-binding domain
  Pfam annotation: Domain name=Myb_DNA-binding; Domain location=67-102; Score=20.1; E_value=0.0091; Accession=PF00249.23; Description=Myb -like DNA-binding domain
  Pfam module annotation: Pfam domain module=Myb_DNA-binding::Myb_DNA -binding; Domain location=14-61::67-102
MGHHSCCNQQKVKRGLWSPEEDEKLIRYITTHGYGCWSEVPEKAGLQRCGKSCRLRWINYLRPDIRRGRFTAEEEKLIISLHAIVGNRWAHIASHLPGRTDN

SEQ ID NO: 80078 - protein, 96 aa, Setaria italica
  Transcript Sequence Number=SeqID_14104
  Subcellular localization annotation: CTP_CleavageSite=31; ConfidenceScore=5.18e-01
DATQRFPHFLAFSLLFPRAPAPKFARLIAPSSFSGEEFVLCSFDLPPISADFHLQIVQSFFFGRFIVVIASRTPNSSTSSHRDQNLGTEFCAPHGF

SEQ ID NO: 80079 - protein, 160 aa, Setaria italica
  misc_feature (103)..(103): Xaa can be any naturally occurring amino acid
  Transcript Sequence Number=SeqID_14105
  Gene Ontology: Mol. function=protein serine/threonine kinase activity; Cellular component=barrier septum; Biological process =protein amino acid phosphorylation
  Homolog annotation: Hit_ID=Q2L3D1; Match level="QueryCoverage=97%, HitCoverage=45%, E-value=2e-36, Identity=56%"; Hit description =Cyclin dependent protein kinase
  Pfam annotation: Domain name=Pkinase; Domain location=2-160; Score= -34.2; E_value=1.9e-06; Accession=PF00069.17; Description=Protein kinase domain
DYLDHRSRRGFPPLPEPTVRAVMWQLLTAAKAMHSAGVIHRDIKPENILVSGDRRSVKFCDFGLAMSMSDAPPYEQAGTLSYKAPEMMLEMPVYDARVDAWSXWGCLMAEIINNGGLPLQGDGEDGQLRAIFDVLGVPDDETWPEFSSTPFAAKVVPELV

SEQ ID NO: 80080 - protein, 59 aa, Setaria italica
  Transcript Sequence Number=SeqID_14106
VSLLIALLFYPHADILLLYSLRCQIIIVAVALIINGTCHCIFNLESDKVLTSELLLSVH

SEQ ID NO: 80081 - protein, 279 aa, Setaria italica
  misc_feature (221)..(221): Xaa can be any naturally occurring amino acid
  Transcript Sequence Number=SeqID_14107
  Gene Ontology: Mol. function=microtubule motor activity; Cellular component=microtubule associated complex; Biological process =microtubule-based movement
  Homolog annotation: Hit_ID=Q25A41; Match level="QueryCoverage=92%, HitCoverage=33%, E-value=3e-61, Identity=49%"; Hit description =H0303G06.20 protein
  Pfam annotation: Domain name=Filament; Domain location=21-279; Score=- 190.6; E_value=0.057; Accession=PF00038.13; Description=Intermediate filament protein
QLQLAWVWRRGPKGKNKMDYKGKSEQMMEYIKKLRACIKWLLEREDEHLTEIRNITGQLEAQGKQNSETVAELKNTLNEARAVNEELQKQHASLQEILKKVEAEKIDALRALQDEKEARASVESSRNQLLEDLKGIKLEEKRLNDQIKMLQDTNKRLQEYNTSLQQYNSNLQADATKNAETITKLQKEKNTMVETMNGLKDHANSVKMQLDLAKSLQTEAXKQKNDLLKEVEGLRMELQHVREDRDNKSSEVDSLMALVGTHKEMTLKTAMELDGAMTR

SEQ ID NO: 80082 - protein, 86 aa, Setaria italica
  Transcript Sequence Number=SeqID_14108
LEFVCLFPWVKPSTHLVLCCLRRPGCSTVLVPARVVQALNLNLDDLGAQPRYPGGFVLDHGASISRSNAMLASQKRRAAAEVASTL

SEQ ID NO: 80083 - protein, 359 aa, Setaria italica
  misc_feature (252)..(252): Xaa can be any naturally occurring amino acid
  Transcript Sequence Number=SeqID_14109
MSTECSDLGEEFWLPEEFLDDDFFSEEEKAAVAARSESDEEDSLAGLSRRLAGLLGDVGERKPPAKAEVTVGSPQSTLCGLPKSGQESPNGGASKGTSPPSSPLEQRPADPWELLYEAAGQVARMRAVANSIPVPTNGYGFNGHGGFAPPARKPSPPPPVAPPATKAPAGGYYHPLAHLVSQRQMQAAQFHLLKQQQLLRLQRERQLTAAWSARHGAGPKSVGCGGDAPLCLNPAAWPPLQKPQQHHQAPAXPAGGMRAVFLTPPGAKRERNGTGVFLPRPAGAPAEPKRKTGCSTVLVPARVVQALNLNLDDLGAQPRYPGGFVLDHDALISRSNAMLASQKRRAAAEVASPALCHSS

SEQ ID NO: 80084 - protein, 720 aa, Setaria italica
  misc_feature (135)..(135): Xaa can be any naturally occurring amino acid
  Transcript Sequence Number=SeqID_14110
  Gene Ontology: Mol. function=nucleoside-triphosphatase activity; Cellular component=cytosolic ribosome; Biological process=response to cadmium ion
  Homolog annotation: Hit_ID=B9GL16; Match level="QueryCoverage=98%, HitCoverage=98%, E-value=0.0, Identity=74%"; Hit description=ABC transporter family protein
  Pfam annotation: Domain name=ABC_tran; Domain location=206-420; Score= 123.1; E_value=9.1e-34; Accession=PF00005.19; Description=ABC transporter
  Pfam annotation: Domain name=ABC_tran; Domain location=538-703; Score= 145.1; E_value=2.1e-40; Accession=PF00005.19; Description=ABC transporter
  Pfam annotation: Domain name=UPF0079; Domain location=202-284; Score=- 51.1; E_value=0.057; Accession=PF02367.9; Description=Uncharacterised P-loop hydrolase UPF0079
  Pfam module annotation: Pfam domain module=ABC_tran::ABC _tran::UPF0079; Domain location=206-420::538-703::202-284
MAAAAAASMGVVREVLGPDVVEEVDQPIIDYIANVLADEDFDFGAPDGHGIFEALGELLIDSGCVSGQDHCLQVCSKLCEKFGKHGLVKPKQAMRSLVTPLRMNAGMDEDVAPKKQPEVFEGPLLSSRDKAKIEXRKKRKDERQREAQYQMHVAEMEELRAGMPPVYVDHSNDGGPAVRDIHMENFSVTVGGRDLIQEATITLAFGRHYGLVGRNGTGKTSFLRAMAMHAIDGIPKNCQILHVEQEVVGDDTTALQCVLNADVERVQLLQEEARLVQQQKDLEIEVEFGEGSGKSKVDLDKDSISKRLEEIYKRLEFIDADAAEARAASILAGLSFTPEMQRKRTKEFSGGWRMRIALARALFIEPDLLLLDEPTNHLDLHAVLWLETYLLKWPKTFIVVSHAREFLNTVVTDILHLHGRKLHAYKGDYDTFERTREEHLKNQQKAFETNEKARSHMQAFIDKFRYNAKRASLVQSRIKALERMEHVDAVVSDPDYKFEFPTPDDRPGPPIISFSDASFGYPGGPILFKNLNFGIDLDSRIAMVGANGIGKSTILKLISGDLQPTSGTVFRSPKVRMAVFNQHHVDGLDLTVNPLLYMMRCYPGVPEQKLRSHLGSFGVSGNLALQPMYTLSGGQKSRVAFAKITFKKPHIILLDEPSNHLDLDAVEALIQGLLVFQGGVLMVSHDEHLITGSVDELWVVSDGRVTPFSGTFKDYKKMIK

SEQ ID NO: 80085 - protein, 44 aa, Setaria italica
  Transcript Sequence Number=SeqID_14111
  Gene Ontology: Mol. function=binding; Cellular component =intracellular; Biological process=RNA processing
  Homolog annotation: Hit_ID=B9SKM7; Match level="QueryCoverage=97%, HitCoverage=5%, E-value=8e-12, Identity=69%"; Hit description=Pre -mRNA-processing protein prp39, putative
SVIKLYERCVIACASYSEFWIRYVQCMEDKGSLELANNALARAT

SEQ ID NO: 80086 - protein, 140 aa, Setaria italica
  Transcript Sequence Number=SeqID_14112
  Gene Ontology: Mol. function=binding; Cellular component =intracellular; Biological process=RNA processing
  Homolog annotation: Hit_ID=B9SKM7; Match level="QueryCoverage=95%, HitCoverage=16%, E-value=8e-46, Identity=61%"; Hit description=Pre -mRNA-processing protein prp39, putative
LRREASVYGVASENSAQVLDGETHPDDPDKSSKPEAENLAKYVSMREEMYKKAKEYESKIIGFELAIRRPYFHVNPLDNPELENWHNYLDFIEKEEDINKVIKLYERCVIACASYSEFWIRYVQCMEDKGSLELANNALA

SEQ ID NO: 80087 - protein, 100 aa, Setaria italica
  Transcript Sequence Number=SeqID_14113
  Gene Ontology: Mol. function=binding; Cellular component =intracellular; Biological process=RNA processing
  Homolog annotation: Hit_ID=B9SKM7; Match level="QueryCoverage=86%, HitCoverage=10%, E-value=1e-28, Identity=62%"; Hit description=Pre -mRNA-processing protein prp39, putative
WHFLPFQVIKLYERCVIACASYSEFWIRYVQCMEDKGSLELANNALARATHVFVKKQPEMHLFSARFKELNGDVSGARAEYEHLYSVLCPGFTHGKIDSR

SEQ ID NO: 80088 - protein, 56 aa, Setaria italica
  Transcript Sequence Number=SeqID_14114
TTNSFFWVMAIHKHCEHRYIDYSVTVGRTSYANEKFLATDARKHNILTIQISDLDS

SEQ ID NO: 80089 - protein, 111 aa, Setaria italica
  misc_feature (77)..(77): Xaa can be any naturally occurring amino acid
  Transcript Sequence Number=SeqID_14115
  Gene Ontology: Mol. function=binding; Cellular component =intracellular; Biological process=RNA processing
  Homolog annotation: Hit_ID=B9SKM7; Match level="QueryCoverage=84%, HitCoverage=11%, E-value=3e-24, Identity=56%"; Hit description=Pre -mRNA-processing protein prp39, putative
GVASENSAQVLDGETHPDDPDKSSKPEAENLAKYVSMREEMYKKAKEYESKIIGFELAIRRPYFHVKPLDNPELENXGHNYLDFIEKEEDINKSIICCNGNFGEASFIMGY

SEQ ID NO: 80090 - protein, 51 aa, Setaria italica
  Transcript Sequence Number=SeqID_14116
  Gene Ontology: Cellular component=intracellular; Biological process =RNA processing
LSSCIFLPITKAKRELRKKYADHEGRLDGANKVIEVYERAVLAVTYSVDIW

SEQ ID NO: 80091 - protein, 315 aa, Setaria italica
  Transcript Sequence Number=SeqID_14117
  Gene Ontology: Mol. function=binding; Cellular component =intracellular; Biological process=RNA processing
  Homolog annotation: Hit_ID=B9SKM7; Match level="QueryCoverage=93%, HitCoverage=36%, E-value=1e-101, Identity=60%"; Hit description=Pre -mRNA-processing protein prp39, putative
AVTNEMGEPVPEPSITKEAAVSAEEARLWSVVTANSLDFNAWTTLIDETEKNAESNILKIRKVYDAFLAEFPLCFGYWKKYADHEGRLDGANKVIEVYERAVLAVTYSVDIWYNYCQFAISTYDDPEIIRRLFERGLAYVGTDYRSNILWDEYVKYEESLQAWSHLAVIYTRILEHPIQQLDRYFNCLKELASTRDLSEILTAEEASVYGVASENSAQVLDGETHPDDPDKSSKPEAENLAKYVSMREEMYKKAKEYESKIIGFELAIRRPYFHVKPLDNPELENWHNYLDFIEKEEDINKVWFCTYSNLLSFFI

SEQ ID NO: 80092 - protein, 432 aa, Setaria italica
  misc_feature (23)..(23): Xaa can be any naturally occurring amino acid
  misc_feature (381)..(381): Xaa can be any naturally occurring amino acid
  Transcript Sequence Number=SeqID_14118
  Gene Ontology: Mol. function=binding; Cellular component =intracellular; Biological process=RNA processing
  Homolog annotation: Hit_ID=B9SKM7; Match level="QueryCoverage=74%, HitCoverage=40%, E-value=1e-101, Identity=53%"; Hit description=Pre -mRNA-processing protein prp39, putative
LTIHCCLLIKRSLAIRRPNVKPXDNPELENWHNYLDFIEKEEDINKVIKLYERCVIACASYSEFWIRYVQCMEDKGSLELANNALARATHVFVKKQPEMHLFSARFKELNGDVSGARAEYEHLYSVLCPGFLEAIVKHSNMEHRLGDDASACSVYDKAISTEKEKEQSQLLPTLLIQYSRFLFLAIQDLERARDTLTELHEQLNITKPVLEAVIHLESIFPCVKRIEFLDSLVERFITHESSQGEGSSLGDKEEISSIFLEFLDLFGDAKSIKKALTRHTALFSCKRSILPSKKRKADDAIMSDRDKLAKIGGTQPVMGTDPNAPNPPVWPATSEASGQQWGAGYAPQAAYPAYGTYDYSHQMPQPAAQAAYGAYPQAYPXAQGYTQQSYAQPAAMAAAPVPAAAPAPAPTAAYPQQPAAAAPQPYYGTTYY

SEQ ID NO: 80093 - protein, 78 aa, Setaria italica
  Transcript Sequence Number=SeqID_14119
  Subcellular localization annotation: CTP_CleavageSite=50; ConfidenceScore=5.37e-01
MPSLQLGLYTGGSRRRFHARSGGLSAAAAAKQLLSRLRSTWRRRVVRPRRAAVRFGYDLQSYCHNFDDGLASSDHRRL

SEQ ID NO: 80094 - protein, 90 aa, Setaria italica
  Transcript Sequence Number=SeqID_14120
  Gene Ontology: Mol. function=protein serine/threonine kinase activity; Biological process=protein amino acid phosphorylation
  Homolog annotation: Hit_ID=B9SRB8; Match level="QueryCoverage=98%, HitCoverage=13%, E-value=4e-13, Identity=45%"; Hit description =Serine-threonine protein kinase, plant-type, putative
RLHRDGRALEAVDARLEGAFDREQAERLILLGLACSHPTPGERPRTPAIQQVLLGSVPPPAVPPFKPSFVWPATDGGLDTVSSTAGTTAI

SEQ ID NO: 80095 - protein, 294 aa, Setaria italica
  misc_feature (188)..(188): Xaa can be any naturally occurring amino acid
  Transcript Sequence Number=SeqID_14121
  Gene Ontology: Mol. function=RNA-directed DNA polymerase activity; Cellular component=mitochondrion
  Homolog annotation: Hit_ID=B6UCR5; Match level="QueryCoverage=100%, HitCoverage=53%, E-value=1e-159, Identity=91%"; Hit description=ATP binding protein
  Pfam annotation: Domain name=PPR; Domain location=106-140; Score =36.8; E_value=8.6e-08; Accession=PF01535.12; Description=PPR repeat
  Pfam annotation: Domain name=PPR; Domain location=141-175; Score =29.6; E_value=1.2e-05; Accession=PF01535.12; Description=PPR repeat
  Pfam annotation: Domain name=PPR; Domain location=180-214; Score =19.9; E_value=0.011; Accession=PF01535.12; Description=PPR repeat
  Pfam annotation: Domain name=PPR; Domain location=215-249; Score =33.1; E_value=1.2e-06; Accession=PF01535.12; Description=PPR repeat
  Pfam annotation: Domain name=PPR; Domain location=250-284; Score =36.6; E_value=1e-07; Accession=PF01535.12; Description=PPR repeat
  Pfam annotation: Domain name=PPR; Domain location=72-105; Score=15.1; E_value=0.15; Accession=PF01535.12; Description=PPR repeat
  Pfam module annotation: Pfam domain module=PPR::PPR::PPR::PPR::PPR::PP R; Domain location=106-140::141-175::180-214::215-249::250-284::72-105
DIIDILSGTRYKSRQFGVLCDVLDHMKRHGTRSVPVEELLAILRAYTEKHLTHMRKLAKKRRVRMRTPPETDALNVLLDAFCKCGMVKEAEAVFGRVKRKLQGNAETYSILFFGWCRARDPKKAMKVLEEMIQMKHTPDSFTYIAAIDSFCSAGLVSEARELFEFMRNEGSTISSPTAKTYSIMIVAXLAKADQMEECFELISDMRSSGCMPDVSTYKDLIEGMCLVGKLDAAYRVLEEMGKAGFPPDIVTYNCFLKVLCSLRKADDALELCEKMIEAHCEPSVHTYNMLMVMF

SEQ ID NO: 80096 - protein, 106 aa, Setaria italica
  Transcript Sequence Number=SeqID_14122
KMQRLSISSARGWSVGLLHRFEASRPTDYFISCLLDIHQALTVADCTGCQEHFAKSFGTYLMVMKIESHGSDRRLRGVTTCTVAGSQLAGLLYLKTTCSVILELGR

SEQ ID NO: 80097 - protein, 120 aa, Setaria italica
  Transcript Sequence Number=SeqID_14123
QRLSISSARGWSVGLLHRFEASRPTDYFISCLLDIHQALTVADCTGCQEHFAKSFGTYLMVMKIESHGSDRRLRGVTTCTVAGRQQLFKHQYVMYNKSQPVSDNRSISIPDASPYFSNLP

SEQ ID NO: 80098 - protein, 220 aa, Setaria italica
  Transcript Sequence Number=SeqID_14124
  Homolog annotation: Hit_ID=B9SMU3; Match level="QueryCoverage=91%, HitCoverage=25%, E-value=2e-43, Identity=44%"; Hit description =Pentatricopeptide repeat-containing protein, putative
  Pfam annotation: Domain name=PPR; Domain location=29-63; Score=19.6; E_value=0.013; Accession=PF01535.12; Description=PPR repeat
ECCKWLPCFKSASALLSLMLQDGFHPTCTTYTSLLKVVLAKDDFEGALDLLDICKTERIEPDIQIFNTVLSRAYARGQIHVIEYIVERIHRAKIQPNPSTLVYTFCAYEEHELYNTAIEALQVLSTRMISEDANILSEKITVFEDLILSEEPDAELRIIRAFEAAEEFLATALLNLRWCAIMGATISWSPEESLWARRLASSYNANKRPHIIPLDVPQSS

SEQ ID NO: 80099 - protein, 162 aa, Setaria italica
  misc_feature (122)..(122): Xaa can be any naturally occurring amino acid
  Transcript Sequence Number=SeqID_14125
  Gene Ontology: Mol. function=pseudouridine synthase activity; Cellular component=nucleus; Biological process=tRNA pseudouridine synthesis
  Homolog annotation: Hit_ID=Q5ZBZ5; Match level="QueryCoverage=98%, HitCoverage=26%, E-value=2e-56, Identity=67%"; Hit description =Potential U2 snRNA pseudouridine synthase-like
DLSPIILSADADKAHRLEVHEFIKRNFKFLITDTVEHGDGIQKCIRVRLGSGPRGGRGRNMRGMDGSGWRDDRPFDSRGSTSWPYHLGKFLRFHLYKENRDTQEALGVIGKMLGVQPRSIWXFAGTKDKRAVTTQQVTLFKVHASRLVALNSKLAGIRVGVL

SEQ ID NO: 80100 - protein, 115 aa, Setaria italica
  misc_feature (43)..(43): Xaa can be any naturally occurring amino acid
  Transcript Sequence Number=SeqID_14126
  Gene Ontology: Mol. function=receptor activity; Cellular component =chloroplast
  Homolog annotation: Hit_ID=A9XNW4; Match level="QueryCoverage=60%, HitCoverage=65%, E-value=5e-27, Identity=84%"; Hit description =Putative receptor-interacting protein (Fragment)
PRLVVRRRCQEEDKQQQQEQEVAEGSGADEQQKRTFLSLEEAXGLVEMSGLSTHERFLCRLTISSLNLLRVISEQEGVPIEELNAGRVCDWFIKDKLKREQGLGTAVLQWDDPGL

SEQ ID NO: 80101 - protein, 94 aa, Setaria italica
  Transcript Sequence Number=SeqID_14127
  Homolog annotation: Hit_ID=Q2RAQ8; Match level="QueryCoverage=95%, HitCoverage=10%, E-value=5e-16, Identity=54%"; Hit description=GRAS family transcription factor containing protein, expressed
  Subcellular localization annotation: CTP_CleavageSite=78; ConfidenceScore=5.19e-01
SSLVLTPVQIMARSSPSSFGELLERELNTRLQLSPDASSVVSSLSPQSPVVQAAQQRPAKLGRFLQAVRALCPKIMVVAEPEANHNAASFLERF

SEQ ID NO: 80102 - protein, 204 aa, Setaria italica
  misc_feature (185)..(185): Xaa can be any naturally occurring amino acid
  Transcript Sequence Number=SeqID_14128
TCSPSFHRCPPPPDLLHSRTMTKQAQLLHKIRRYDGIAQAVDPVDLEARFTTTSESGESVDASTHPATTSSCTDTTSSATTTKTASRHGEEHQSVEQPSQEPEEPDEYRLLARLLLEDTVAVVDEVSQVLLLEFFTEGLDRLRCSSAAGSVVGAIISPRVDDERDKVAAEALVRAAAEWLRGAGXQWGIRDVMLSGKAALEDME

SEQ ID NO: 80103 - protein, 87 aa, Setaria italica
  Transcript Sequence Number=SeqID_14129
  Subcellular localization annotation: CTP_CleavageSite=28; ConfidenceScore=5.21e-01
AATPPSSYDQSRNANAFASTYSLLSLVNAASMGGGSAAAAIDELSSLVGHGPPAYFNHQAGGSFLPLPTPSSSQPMALGTLPMSLAA

SEQ ID NO: 80104 - protein, 94 aa, Setaria italica
  Transcript Sequence Number=SeqID_14130
  Gene Ontology: Mol. function=calcium ion binding; Cellular component =integral to membrane; Biological process=protein transport
  Homolog annotation: Hit_ID=B6UEQ5; Match level="QueryCoverage=100%, HitCoverage=14%, E-value=2e-42, Identity=91%"; Hit description =Vacuolar sorting receptor 7
  Pfam annotation: Domain name=PA; Domain location=1-82; Score=37.1; E _value=6.9e-08; Accession=PF02225.14; Description=PA domain
FKSKSRRPVILLLDRGDCFFALKAWNAQRAGAAAVLIADSVDEQLLTMDSPEASPGTEYIDKINIPSALVNRAFGESLKKMAQKVAAGDAAGEE

SEQ ID NO: 80105 - protein, 227 aa, Setaria italica
  Transcript Sequence Number=SeqID_14131
  Gene Ontology: Mol. function=protein binding
  Homolog annotation: Hit_ID=B6SS62; Match level="QueryCoverage=100%, HitCoverage=51%, E-value=1e-126, Identity=93%"; Hit description =Kelch motif family protein
  Pfam annotation: Domain name=Kelch_1; Domain location=35-82; Score =21.0; E_value=0.0048; Accession=PF01344.17; Description=Kelch motif
  Pfam annotation: Domain name=Kelch_1; Domain location=84-131; Score =56.8; E_value=8.2e-14; Accession=PF01344.17; Description=Kelch motif
  Pfam annotation: Domain name=Kelch_2; Domain location=84-131; Score =24.7; E_value=0.00039; Accession=PF07646.7; Description=Kelch motif
  Pfam module annotation: Pfam domain module=Kelch_1::Kelch_1::Kelch_2; Domain location=35-82::84-131::84-131
YVFKRDRDQKLSWYAFDPVNQLWKSLPPVPPEYSEVVGFGCAVLNGCYLYLFGGKDPVHGSMRRVVFYNARINKWLRAPDMLQKRHCFGSCVINNCLYVAGGECEGIQRTLRSAEVYDPNRNRWSCIAEMSTGMVPSIGVVHDGKWFLKGLNSHRQVVSEVYLPASKMWSATGNEMVAGWRNPSISFNGRLYSSDCRDGCKLRVYNREAGSWTRFIDTRHHLGSSRA

SEQ ID NO: 80106 - protein, 363 aa, Setaria italica
  Transcript Sequence Number=SeqID_14132
  Gene Ontology: Mol. function=DNA binding
  Homolog annotation: Hit_ID=B9T2G9; Match level="QueryCoverage=87%, HitCoverage=76%, E-value=4e-57, Identity=41%"; Hit description =Transcription factor, putative
FAAPAANQMQEPGNAVKASLSDEEAAADGHHGRGKAAAAPASQWHRVKWTSDMVKLLVSAVSYIDDDIDADHGTSSGRKKHAMLKRKGKWRLVSSAMTERGFPVSPQQCEDKFNDLNKRYRRLTEILGQGMASEIVKKPALLEQVSLSAKLKEEAKKHLNSKHLHYEEMCSYHNHNRHCLLDDPALQRSLRVALRSPDEQGKKCSFGYDDEDDQMFLFDDDDDDDGFNDDLEASAEDHLHHRVHGNKKLKHDHEGGHCGSHLSEVAAIDMNKMFAEGAGGSAAEKNLSGMNATQIERERLKIKEGMLKLEQSRLKWLRSSKEKDRELEKMKLENERMQLENERLELELELKEIEMGIKPARIW

SEQ ID NO: 80107 - protein, 371 aa, Setaria italica
  misc_feature (155)..(155): Xaa can be any naturally occurring amino acid
  Transcript Sequence Number=SeqID_14133
  Gene Ontology: Mol. function=methyltransferase activity; Biological process=metabolic process
  Homolog annotation: Hit_ID=B9RJD9; Match level="QueryCoverage=82%, HitCoverage=79%, E-value=1e-122, Identity=68%"; Hit description=S -adenosylmethionine-dependent methyltransferase, putative
  Pfam annotation: Domain name=Methyltransf_11; Domain location=109 -200; Score=79.8; E_value=9.6e-21; Accession=PF08241.4; Description =Methyltransferase domain
  Pfam annotation: Domain name=Methyltransf_12; Domain location=109 -198; Score=44.4; E_value=4.4e-10; Accession=PF08242.4; Description =Methyltransferase domain
  Pfam module annotation: Pfam domain module=Methyltransf _11::Methyltransf_12; Domain location=109-200::109-198
ETLRGAIHASNLYSVSIQHKEFFCWKPTYQHISTNNSMRPNDVIEAQDMVPAKGNRSCSSSVQSTPEIEKKYVHRVYDAIAPHFSATRFAKWPKVAEFLNSLRPGSVVLDAGCGNGKYLGFNPDCFFIGCDISPPLIEICAGRGHEVLVADAVNXPYRDNFWGDAAISIAVLHHLSTDERRRKAIEELIRVVRRGGLVLITVWAREQEDKSLLNKWTPLCEKYNEEWVDQSSPPVRSQSATLLESIAETDEDAGVMKQADDRLKKCHDSMEDKTIAACSNTDTDEKETNQQEYFVPWHLPFHRAEIGGASAAALENGFAKKDEKKGTVVYNRYYHVFVEGELQRLASGIKNTAIVDQFYDKSNWCIVLEKL

SEQ ID NO: 80108 - protein, 355 aa, Setaria italica
  Transcript Sequence Number=SeqID_14134
  Gene Ontology: Mol. function=hydrolase activity, acting on ester bonds; Biological process=lipid metabolic process
  Homolog annotation: Hit_ID=Q672R1; Match level="QueryCoverage=89%, HitCoverage=82%, E-value=2e-89, Identity=54%"; Hit description =Lipase 1
  Pfam annotation: Domain name=Lipase_GDSL; Domain location=40-355; Score=102.0; E_value=2e-27; Accession=PF00657.14; Description=GDSL -like LipaseAcylhydrolase
  Subcellular localization annotation: CTP_CleavageSite=28; ConfidenceScore=5.05e-01
MGTLSPPPRAVSLLVLVAVLFTSTGAVTAATATRRRYDAIFSLGDSYADTGNGPVVFGWHSIANPVMRPPYGSTFFGRPTGRNCDGRLAIDFLAESLGLPLVPPFLARNGSATSFRRGANFAVGGAPALDTTFFHRWDPPGGSVFPLNTSLGVQLQWFESLKPSLCATPKGCKELFGRSLFFVGPFGANDYLLSLAAKSVDEVRSFVPDVVGTISMAVERLIIHHGATTLVVPGVIPVGCAPPVLVTFADPDPVAYDARTGCLKAINGIAARHNALLQEALRELRDKHRPAGVTIIYADFFGPVIDMVTSPAKFGFEGDVLTLCCGGPGRFNYNKQVFCGDRGAVKCRDPSARLF

SEQ ID NO: 80109 - protein, 201 aa, Setaria italica
  misc_feature (36)..(36): Xaa can be any naturally occurring amino acid
  Transcript Sequence Number=SeqID_14135
  Gene Ontology: Mol. function=ATPase activity, coupled to transmembrane movement of substances; Cellular component=integral to membrane; Biological process=transport
  Homolog annotation: Hit_ID=Q7FMW2; Match level="QueryCoverage=99%, HitCoverage=67%, E-value=8e-63, Identity=43%"; Hit description=MDR -like ABC transporter
KYIQLLTTFVGGFIIGFVRGWMLALVVLACIPPSIXSFATVSRLRAQISGKRQESYGDAGNVVEQTIGAIRTVVSFNGEKKAVAMYNNHIKKAYKATLTEGIVTGLGIGCIFFVVFCSYSLAFWYGAKLIIGKGYTGGQVINVVFAILTGSMAIGNASPSISAIAEGKSAAQRLLEIINRKPNIDTTDTSGIVLEDIKGDS

SEQ ID NO: 80110 - protein, 104 aa, Setaria italica
  Transcript Sequence Number=SeqID_14136
  Gene Ontology: Cellular component=plasma membrane
  Homolog annotation: Hit_ID=Q8H1V3; Match level="QueryCoverage=100%, HitCoverage=36%, E-value=1e-50, Identity=89%"; Hit description =Hypersensitive-induced reaction protein 1
MGQALGLIQVDQSTVAIKESFGKFDEILGPGCHFLPWCIGKQIAGYLSLRVQQLDVRCETKTKDNVFVNVVASVQYRALADKASDAFYRLTNTREQIQSYVFDV

SEQ ID NO: 80111 - protein, 284 aa, Setaria italica
  Transcript Sequence Number=SeqID_14137
  Gene Ontology: Cellular component=plasma membrane
  Homolog annotation: Hit_ID=Q8H1V3; Match level="QueryCoverage=100%, HitCoverage=100%, E-value=1e-151, Identity=90%"; Hit description =Hypersensitive-induced reaction protein 1
  Pfam annotation: Domain name=Band_7; Domain location=8-182; Score =168.6; E_value=1.8e-47; Accession=PF01145.17; Description=SPFH domain  Band 7 family
MGQALGLIQVDQSTVAIKESFGKFDEILGPGCHFLPWCIGKQIAGYLSLRVQQLDVRCETKTKDNVFVNVVASVQYRALADKASDAFYRLTNTREQIQSYVFDVIRASVPKMNLDDTFEQKNEIAKAVEDELEKAMSMYGYEIVQTLIVDIEPDEHVKRAMNEINAAARLRVAANEKAEAEKILQIKRAEGDAESKYLAGLGIARQRQAIVDGLRDSVLAFSENVPGTSAKDVMDMVLVTQYFDTMKEIGASSKSSSVFIPHGPGAVKDIAAQIRDGSLQAKLV

SEQ ID NO: 80112 - protein, 348 aa, Setaria italica
  misc_feature (335)..(336): Xaa can be any naturally occurring amino acid
  Transcript Sequence Number=SeqID_14138
  Gene Ontology: Mol. function=translation initiation factor activity; Cellular component=transcription factor complex; Biological process =regulation of transcription, DNA-dependent
  Homolog annotation: Hit_ID=Q93WQ2; Match level="QueryCoverage=100%, HitCoverage=74%, E-value=1e-177, Identity=88%"; Hit description =TFIIB-related protein (Fragment)
  Pfam annotation: Domain name=TFIIB; Domain location=65-135; Score =53.9; E_value=6e-13; Accession=PF00382.11; Description=Transcription factor TFIIB repeat
NRSVEALATAALVQAIREAQQPRTLQEISTASNLPQKEIGKYIKILGESLKLSQPLNSNSIAVHMPRFCSLLQLNKSAQELAAHIGEVVVNKCFCTRRNPISISAAAIYLACQLEDKRKTQAEICKVTGLTEVTLRKVYKELLENWDDLLPPDYTPATPPEKAFPMTTIYSGRSSSGKDLYQDKIFDSIKQKGPEPAEPDHMVIVKEEEDKKISALGRPPAKLEPHELSKAFWPSNAPFSTSPKSDREKTETSVRGFNLNEVSCAMDSDRADTTVKPNFGDRSLNESNMLPSPNRQPLPWQLKQGAPATGPYSRLRDQHLGLDLVAALKGIGKRXXWGGSDGRDKEGK

SEQ ID NO: 80113 - protein, 157 aa, Setaria italica
  Transcript Sequence Number=SeqID_14139
  Homolog annotation: Hit_ID=B6TJK8; Match level="QueryCoverage=68%, HitCoverage=33%, E-value=3e-37, Identity=75%"; Hit description=PAC
  Subcellular localization annotation: CTP_CleavageSite=52; ConfidenceScore=5.55e-01
MAAMAPALPTSLRPRPASPLLLSAGPHVPGRRSPIPLRLSPLRPARSLFPISAVEKTKGAAAAEEAELEGMPPEFYDEEWQARQRERTKEWHAYRQKEEAEEERITSEYQEIGMRLKAYPQEEVRKARILVSSFIRAGEDVEEEIEKAAERGDLTET

SEQ ID NO: 80114 - protein, 79 aa, Setaria italica
  Transcript Sequence Number=SeqID_14140
  Gene Ontology: Cellular component=chloroplast; Biological process =cell redox homeostasis
  Homolog annotation: Hit_ID=B6TCX1; Match level="QueryCoverage=100%, HitCoverage=40%, E-value=1e-32, Identity=88%"; Hit description =Thioredoxin-like 8
  Pfam annotation: Domain name=Thioredoxin; Domain location=1-71; Score= -32.2; E_value=0.087; Accession=PF00085.12; Description=Thioredoxin
KCIYLKPKLEKLAAEYYPRVRFYCVDVNAVPQKLVNRAGVTKMPSIQLWSDSQKQAEVIGGHKSWLVIDDVRRMIELEE

SEQ ID NO: 80115 - protein, 173 aa, Setaria italica
  Transcript Sequence Number=SeqID_14141
  Gene Ontology: Mol. function=protein dimerization activity; Cellular component=endoplasmic reticulum lumen; Biological process=proteolysis
  Homolog annotation: Hit_ID=B6SVQ9; Match level="QueryCoverage=86%, HitCoverage=30%, E-value=3e-71, Identity=86%"; Hit description=IAA -amino acid hydrolase ILR1-like 6
  Pfam annotation: Domain name=Peptidase_M20; Domain location=4-150; Score=1.0; E_value=0.00051; Accession=PF01546.20; Description =Peptidase family M20M25M40
SVAVVNGTGDGGVVLGGTFRAFSNASFYHLRRRIEEVIAAQPRVHGCLASVDFFEDESFYPPTVNDARMYGHVRRVAAELLGPGSYRDVPAMMGAEDFSFYSQAVPAGFYYIGVRNETLGSVHTGHSPYFMIDEDVLPTGAAVHAAIAERFLAEHGSLMGSPSADDLAREQEL

SEQ ID NO: 80116 - protein, 451 aa, Setaria italica
  misc_feature (396)..(396): Xaa can be any naturally occurring amino acid
  misc_feature (416)..(416): Xaa can be any naturally occurring amino acid
  Transcript Sequence Number=SeqID_14142
  Gene Ontology: Mol. function=DNA-directed DNA polymerase activity; Cellular component=DNA polymerase III complex; Biological process =DNA replication
  Homolog annotation: Hit_ID=Q53M12; Match level="QueryCoverage=95%, HitCoverage=37%, E-value=1e-133, Identity=58%"; Hit description =ATPase, AAA family protein
ITDAELERLQQALRILSDAEKQIRLSSERSTWFTAALLQLGSGHNSEITQSRSSSKQSAKATSETMMEAVRESSASRTTSYPLFAFRDSKKALDLKTTSGHSSPQGPSLSSRMKPNDNFIYGECRSVDRALLDSAQTSIPSEQRNTNSGISDNLTRIWMKCIENCHSKTLRQLLYDHGKLASVKECEGTIITFVAFEDNDIKFRAQRFVSSIRNSMETVLKCNVEVRICLIQEFLAGGLQHQVYPDETGESDVLSCSTNSERLKGVLNLSGAGGGLQSSNVPMIISEGNSGIHRTRGQEVAVEQLKTAALDEQRLESAWLQTAEKHTPGTLNQARPERNQVLPQTVGQHHGRSSMTTIVPSRHADKDLTNELKALKISDSHGSQKYQNVQTENGYXISPSLLHRNNHLANCDNESXVSESGAPGCHGLFPCWKTEKTKRRKGKGQTRLSSS

SEQ ID NO: 80117 - protein, 150 aa, Setaria italica
  Transcript Sequence Number=SeqID_14143
APRAAAARHHRGIPEIFVLQGGGVLPPIRIPDPESGQPRQWRHRRQWSPGEAVAKLLRADGENSALLRELNDAAVEGKSTPSAAAGLERVTTLSVLATLEGSTISTAAEEAFPDQEFTRLMKGGGMADVVGGRSGRSLCRYGSSLNCLEE

SEQ ID NO: 80118 - protein, 72 aa, Setaria italica
  Transcript Sequence Number=SeqID_14144
NSEQTENSCPFFLYYILIAATNWRWKPEISVRRTTTFCSVPTWCAAAAALQLLAGCLLARHAHRSGWPVPST

SEQ ID NO: 80119 - protein, 69 aa, Setaria italica
  Transcript Sequence Number=SeqID_14145
YGLHFIWWRASPSHRSIYCCILQEARPGYSSSPRLAQNYERVMTSELARLQGTTSELHDDFRKPPRLAR

SEQ ID NO: 80120 - protein, 502 aa, Setaria italica
  Transcript Sequence Number=SeqID_14146
  Pfam annotation: Domain name=DUF1618; Domain location=313-440; Score =72.3; E_value=1.8e-18; Accession=PF07762.6; Description=Protein of unknown function (DUF1618)
  Subcellular localization annotation: CTP_CleavageSite=28; ConfidenceScore=5.09e-01
MAAPLYRSHHPRSNFRSYFISLQSPRTPSMTNGAVDPPDPFMVLVDAFIPIIDEVSALIVENGGPSHPPFWGHIPFPPSVSPKERAAAQQRAVAEGLLRYRRELEWPAEDILRERRASNPSAVRKLVAFGGWEAALYLAILDGIEPHLEIPHPPGVASLVLSVSAGARDTFNQFPSGASIAGADHNIIAMYAGPYRPTFPPPGFYLVYDSLANSLAAVLPLPPSSASQFTHRGVGAGTAVLRHDPPSEYVLAELLYHRTSSTQATLFTWCSSGAVAGQWINKEVVLPFPLPSDPAYIFCADVVFALGDNSICWVDLLKGILICDKVMDDPKFRFISLPKGYSRSWHPEQGRGRPRDFSSMCSVRGDTVRFVHMNPASDIDDLITLTTWTLCISNSVWKKGGSFRIIDVWADPTYEELKLPKKVPRCPILSLLDEEDGVVYLTVAENNCQYVFSVDVERRMVVSGNRLPPEGRQFSRIMAVEVTMHLNKRRSRTGGEHLVPLK

SEQ ID NO: 80121 - protein, 92 aa, Setaria italica
  misc_feature (21)..(21): Xaa can be any naturally occurring amino acid
  misc_feature (64)..(64): Xaa can be any naturally occurring amino acid
  Transcript Sequence Number=SeqID_14147
VEDKYIMVVEAVKMKLSAVPXPNTGTKLYDGNHWIGKTADGRLCFFAMREQLTLVKWVLEAPGXKWAEQQHVNLRASMHPALVGDLAQMKLS

SEQ ID NO: 80122 - protein, 131 aa, Setaria italica
  Transcript Sequence Number=SeqID_14148
RNRRRPRRRRDRSSAGAAAADEAAAEEEKAEAPVSDAVSTQAGSATQASCHVETVAAHLGDSVLQTTTESIMNSNKTRKRDFQAGNKVLKVSAADGAACSCLARHEHSVGQIEASRSKLYKRSDSKIPIDN

SEQ ID NO: 80123 - protein, 84 aa, Setaria italica
  Transcript Sequence Number=SeqID_14149
  Gene Ontology: Mol. function=glycolipid transporter activity; Cellular component=cytoplasm; Biological process=glycolipid transport
  Homolog annotation: Hit_ID=B9SS59; Match level="QueryCoverage=94%, HitCoverage=40%, E-value=4e-32, Identity=80%"; Hit description =Glycolipid transfer protein, putative
  Pfam annotation: Domain name=GLTP; Domain location=1-82; Score=13.6; E_value=4.3e-06; Accession=PF08718.3; Description=Glycolipid transfer protein (GLTP)
KQILPVLDKFGAAMAIVKSDIGGNITRLENKYSSDPSKYEHLYTMVQEEVQNKTAKGSSSCTNGLLWLTRAMDFFRVLVYESVH

SEQ ID NO: 80124 - protein, 47 aa, Setaria italica
  Transcript Sequence Number=SeqID_14150
LLQSCFELLPEPWCTRFLKLHKWASMAHEGHEISSEFWCMNQCMLDS

SEQ ID NO: 80125 - protein, 27 aa, Setaria italica
  Transcript Sequence Number=SeqID_14151
NSFRCDQMDVRGALGDLFSKQLTPLMP

SEQ ID NO: 80126 - protein, 202 aa, Setaria italica
  Transcript Sequence Number=SeqID_14152
  Gene Ontology: Mol. function=glycolipid transporter activity; Cellular component=cytoplasm; Biological process=glycolipid transport
  Homolog annotation: Hit_ID=B9SS59; Match level="QueryCoverage=98%, HitCoverage=97%, E-value=4e-97, Identity=82%"; Hit description =Glycolipid transfer protein, putative
  Pfam annotation: Domain name=GLTP; Domain location=21-167; Score =230.7; E_value=3.7e-66; Accession=PF08718.3; Description=Glycolipid transfer protein (GLTP)
MAETVFTPSLEGMKHVKAENGVILTKPFLEVCKQILPVLDKFGAAMAIVKSDIGGNITRLENKYSSDPSKYEHLYTMVQEEVQNKTAKGSSSCTNGLLWLTRAMDFLVELFRNLLEHPDWTMSQACTDSYTKTLKKFHGWLASSSFTVAMKLAPNRDKFMEVISGTGDINADIEKFCTTFSPFLKENHDFLASVGLDDMKAS

SEQ ID NO: 80127 - protein, 803 aa, Setaria italica
  misc_feature (17)..(17): Xaa can be any naturally occurring amino acid
  misc_feature (65)..(65): Xaa can be any naturally occurring amino acid
  Transcript Sequence Number=SeqID_14153
  Gene Ontology: Mol. function=ARF guanyl-nucleotide exchange factor activity; Cellular component=intracellular; Biological process =regulation of ARF protein signal transduction
  Homolog annotation: Hit_ID=Q7XIK7; Match level="QueryCoverage=99%, HitCoverage=62%, E-value=0.0, Identity=88%"; Hit description =Putative guanine nucleotide-exchange protein GEP2
  Pfam annotation: Domain name=DUF1981; Domain location=663-748; Score =156.7; E_value=7.2e-44; Accession=PF09324.2; Description=Domain of unknown function (DUF1981)
  Pfam annotation: Domain name=Sec7; Domain location=167-352; Score =259.9; E_value=6e-75; Accession=PF01369.12; Description=Sec7 domain
  Pfam module annotation: Pfam domain module=DUF1981::Sec7; Domain location=663-748::167-352
ACGIFSVLLLRFRESLXGEIGVFFPLIILRSLDSSDSPLSQKASVLRMLEKVCRDPQMLADVFLXLSVSLEGPNLFELMVSALSRIAQGSQIADTNSIVSSQTVSVKGSSLQCLVSILKSLADWEQLRRDSSKQGSTVESHEEDASRSLTTDETKGQEDGRNQFERAKAHKSTMEAAVSEFNRKPAKGIEYLLSNKLVENKASSVAQFLKNTSSLDKVMIGEYLGQHEEFPLAVMHAYVDSMQFSGLTFDAAIREFLKGFRLPGEAQKIDRIMEKFAERYCADNPGLFKNADTAYVLAYAVIMLNTDAHNPMVWPKMSKSDFVRMNTVSDAEECAPKELLEEIYDSIVKEEIKMKDDLHDASKTIKRPETEERGRLVNILNLALPRLKSASDTKAESEKIIKQTQALFKNQGQKKGVFHVAQQVELVRPMLEAVGWPLLATFSVTMEEGDSKPRVVSCMDGFRAGIHLTRVLGMDTMRYAFLTSLVRFTFLHAPKEMRSKNVEALRTLLGLADTDMDALQDTWNAVLECVSRLEYITSNPSISASVMVGSNQISRDSVVQSLKELAGKPAEQIFVNSVKLPSDSIVEFFTALCGVSAEELKQTPARVFSLQKLVEISYYNMARIRLVWARIWSVLAQHFIAAGSHQEEKVAMYAIDSLRQLGMKYLERAELNNFTFQSDILKPFVILMRNSHNSKIRGLIVDCIVQLIKSKVGSIKSGWRCVFMIFTAAADDEDESIVESAFENVEQVILEHFDQVVGDCFMDCVNCLIGFANNKCTPRISLKAIALLRICEDRLLFIDILLV

SEQ ID NO: 80128 - protein, 145 aa, Setaria italica
  misc_feature (56)..(56): Xaa can be any naturally occurring amino acid
  Transcript Sequence Number=SeqID_14154
  Gene Ontology: Mol. function=small conjugating protein ligase activity; Biological process=regulation of protein metabolic process
  Homolog annotation: Hit_ID=Q5RLI8; Match level="QueryCoverage=100%, HitCoverage=23%, E-value=6e-54, Identity=73%"; Hit description =Ubiquitin-conjugating enzyme E2
  Pfam annotation: Domain name=UQ_con; Domain location=74-145; Score= -31.7; E_value=0.0077; Accession=PF00179.18; Description=Ubiquitin -conjugating enzyme
TKIVDDKIEEKYKAFKQFDTVDDHSDHYFSKPELRKVQVVKKVSFFTCPLYHLLPXFSSVLKFFQQPSKDWAKRIQHEWKVLEKDLPDTIFVRAYEDRMDLLRAVIMGPAGTPYHDGLFFFDIYFPPQYPNVPPMVNYRAGGLRL

SEQ ID NO: 80129 - protein, 327 aa, Setaria italica
  Transcript Sequence Number=SeqID_14155
  Gene Ontology: Mol. function=small conjugating protein ligase activity; Biological process=regulation of protein metabolic process
  Homolog annotation: Hit_ID=Q5RLI8; Match level="QueryCoverage=98%, HitCoverage=63%, E-value=1e-127, Identity=73%"; Hit description =Ubiquitin-conjugating enzyme E2
  Pfam annotation: Domain name=UQ_con; Domain location=244-325; Score= -10.8; E_value=0.00023; Accession=PF00179.18; Description=Ubiquitin -conjugating enzyme
MATHASKSYLCAGSSSFDDPDVVEVSPATAAAGGWASGHHKRKRSQVVPHEVIEIDDDDPDGVMIIGDNKASVDKNKQTVVYPMDWAKHGKSSLVHEIPGPSTYAPKYANPWVDNLKMFQDDAAYNYSDEGFDEDYAYDEDEYEDDGYDASLVESEYNYSLSSKFDSLDIPLGVEASLPWTQTIAIEIANKTKPTKIVDDKIEEKYKAFKQFDTVDDHSDHYFSKPELRKVQVVKKPSKDWAKRIQHEWKVLEKDLPDTIFVRAYEDRMDLLRAVIMGPAGTPYHDGLFFFDIYFPPQYPNVPPMVNYRAGGLRLNPNLYVRDFFSP

SEQ ID NO: 80130 - protein, 260 aa, Setaria italica
  Transcript Sequence Number=SeqID_14156
  Gene Ontology: Mol. function=small conjugating protein ligase activity; Biological process=regulation of protein metabolic process
  Homolog annotation: Hit_ID=Q5RLI8; Match level="QueryCoverage=100%, HitCoverage=51%, E-value=1e-112, Identity=76%"; Hit description =Ubiquitin-conjugating enzyme E2
  Pfam annotation: Domain name=UQ_con; Domain location=6-148; Score =97.9; E_value=3.5e-26; Accession=PF00179.18; Description=Ubiquitin -conjugating enzyme
KHEWKVLEKDLPDTIFVRAYEDRMDLLRAVIMGPAGTPYHDGLFFFDIYFPPQYPNVPPMVNYRAGGLRLNPNLYACGKVCLSLLNTWTGSGCERWNPSNSTMLQVLVSIQALVLNAKPYFNEPGYAMQANTPHGEKKSLTYNEDTFLLSCRTMLYSLRNPPKNFEDFVAGHFREYGRSILVACRAYLDGAQVGCLAGDGVQDVDEGDKSCSVRFKQSLKRLFQELLMEFIVKGADCDKFLAEKGRSGASAAAADTTLRL

SEQ ID NO: 80131 - protein, 109 aa, Setaria italica
  Transcript Sequence Number=SeqID_14157
  Gene Ontology: Mol. function=zinc ion binding; Cellular component =nucleus
  Homolog annotation: Hit_ID=A4UQN2; Match level="QueryCoverage=63%, HitCoverage=35%, E-value=2e-22, Identity=71%"; Hit description=MBD1
  Pfam annotation: Domain name=MBD; Domain location=5-69; Score=14.6; E_ value=0.0013; Accession=PF01429.11; Description=Methyl-CpG binding domain
TKRPPTKKTERLVIMRRDFSKMDTYYVMPNGKRARCAGDVDKFLEANPEYKNRISASDFNFAPPKVVEETVSHNSAWKAAKAKKPGQGRCFECAEVIEALNRACAMFRC

SEQ ID NO: 80132 - protein, 122 aa, Setaria italica
  Transcript Sequence Number=SeqID_14158
  Homolog annotation: Hit_ID=B6TGV7; Match level="QueryCoverage=78%, HitCoverage=75%, E-value=2e-32, Identity=76%"; Hit description=TOM2B
MAAAGGGGGGGGGAKAAVAEQIAQAVRSTSNLLQLMEQSSPAQVHLAKLPKNLLAKASFAQNTEQVLHQLPQVISSLDAYMDRSLQSASQIKTVTQLLSNMENTQLRSILPSSQMRKDTKNT

SEQ ID NO: 80133 - protein, 60 aa, Setaria italica
  Transcript Sequence Number=SeqID_14159
  Gene Ontology: Mol. function=RNA binding; Cellular component =ribonucleoprotein complex; Biological process=mRNA processing
  Homolog annotation: Hit_ID=B6U5N9; Match level="QueryCoverage=100%, HitCoverage=56%, E-value=5e-26, Identity=96%"; Hit description=Small nuclear ribonucleoprotein F
  Pfam annotation: Domain name=LSM; Domain location=1-49; Score=26.1; E_ value=0.00014; Accession=PF01423.14; Description=LSM domain
GWEYKGYLVSVDSYMNLQLANTEEYIDGQFSGNLGEILIRCNNVMYLRGVPEDAEIEDAE

SEQ ID NO: 80134 - protein, 86 aa, Setaria italica
  Transcript Sequence Number=SeqID_14160
  Gene Ontology: Mol. function=RNA binding; Cellular component =ribonucleoprotein complex; Biological process=mRNA processing
  Homolog annotation: Hit_ID=B6U5N9; Match level="QueryCoverage=100%, HitCoverage=80%, E-value=3e-42, Identity=96%"; Hit description=Small nuclear ribonucleoprotein F
  Pfam annotation: Domain name=LSM; Domain location=10-75; Score=95.6; E_value=1.7e-25; Accession=PF01423.14; Description=LSM domain
MATVPVNPKPFLNNLTGKPVIVKLKWGMEYKGYLVSVDSYMNLQLANTEEYIDGQFSGNLGEILIRCNNVMYLRGVPEDAEIEDAE

SEQ ID NO: 80135 - protein, 383 aa, Setaria italica
  Transcript Sequence Number=SeqID_14161
  Gene Ontology: Mol. function=nucleic acid binding; Cellular component= ribonucleoprotein complex
  Homolog annotation: Hit_ID=B9S9X4; Match level="QueryCoverage=45%, HitCoverage=49%, E-value=6e-71, Identity=74%"; Hit description =Heterogeneous nuclear ribonucleoprotein A1, putative
  Pfam annotation: Domain name=NID; Domain location=71-145; Score=-1.6; E_value=0.066; Accession=PF00076.14; Description=NmiIFP 35 domain (NID)
  Pfam annotation: Domain name=RRM_1; Domain location=119-189; Score =74.3; E_value=4.6e-19; Accession=PF00076.14; Description=RNA recognition motif. (a.k.a. RRM, RBD, o
  Pfam annotation: Domain name=RRM_1; Domain location=29-97; Score =77.8; E_value=3.9e-20; Accession=PF00076.14; Description=RNA recognition motif. (a.k.a. RRM, RBD, o
  Pfam module annotation: Pfam domain module=NID::RRM_1::RRM_1; Domain location=71-145::119-189::29-97
MGKAETRTRGRGGGGGGGGGDGGGNPGKIFVGGLPRDTTDATFVRHFGQYGEIVDSVIMKDRHTSQPRGFGFITYSDPAVVDKVIEETHVINGKPVEIKRTIPKGAMQSSSKDFKTRKIFVGGLPSALTEDDFKNFFARYGTVVDHQIMFDRETKRSRGFGFIVFASEDVVDDLLANGNMIDLAGSKVEIKKAEPKKSSNPPPSGRGRSSRSSYDSGSRDHPSVDNYGGLTNAYGSYSGGGFGPYRSDAGFSASRLGSYGGMGEFGVGYGRYYAGLGAYGAASSFGYPSRFGLYGGGFGGAYAGGDLSGYRRTVADESFGAPGSSGFGGDADQSFGAPGSSGFGGATYGGAYDPALGGYGSASTPDGNKGSFAGGYGRYHPYG

SEQ ID NO: 80136 - protein, 191 aa, Setaria italica
  Transcript Sequence Number=SeqID_14162
  Pfam annotation: Domain name=DUF617; Domain location=70-189; Score =202.6; E_value=1.1e-57; Accession=PF04759.5; Description=Protein of unknown function, DUF617
  Subcellular localization annotation: CTP_CleavageSite=26; ConfidenceScore=5.10e-01
MPSFMDGPSFRALLRPSTNGRRTKISDSGGGGGGGGGIFKMFKLMPMLSSGCKMVALLGKHNRALLADHATTVTLFGHRRGRVSLAIHEDTRAPPLFLIELPMLTSALHREISSGVVKLALESDTRSARRRLVEEYVWAVYCNGRKAGYAIRRKEASDDERHVLRLLRGVSMGAGVLPAAPEKEGGVPTEP

SEQ ID NO: 80137 - protein, 80 aa, Setaria italica
  Transcript Sequence Number=SeqID_14163
  Homolog annotation: Hit_ID=B9T4T0; Match level="QueryCoverage=98%, HitCoverage=32%, E-value=9e-19, Identity=49%"; Hit description =Transmembrane protein, putative
  Subcellular localization annotation: CTP_CleavageSite=71; ConfidenceScore=5.05e-01
PDSINFLPTLVSGMYVSWLYLRYFQRNPLTGLKGDPSDDFSFPSLFPAAMRMLCARSRTSEVALPVSDPTKASRRRERGE

SEQ ID NO: 80138 - protein, 91 aa, Setaria italica
  misc_feature (16)..(16): Xaa can be any naturally occurring amino acid
  misc_feature (27)..(27): Xaa can be any naturally occurring amino acid
  misc_feature (57)..(57): Xaa can be any naturally occurring amino acid
  Transcript Sequence Number=SeqID_14164
  Homolog annotation: Hit_ID=B9T4T0; Match level="QueryCoverage=93%, HitCoverage=26%, E-value=1e-13, Identity=41%"; Hit description =Transmembrane protein, putative
VGILAFCIAIGLYYVXGKESFLVTPLXGFHGCLAGFLVALKQLLPNLELPMCFFWKXKAKWMPFFVVCFSSIMAFIVPDSINFLPTLVSGM

SEQ ID NO: 80139 - protein, 154 aa, Setaria italica
  Transcript Sequence Number=SeqID_14165
  Homolog annotation: Hit_ID=B9T4T0; Match level="QueryCoverage=97%, HitCoverage=47%, E-value=1e-40, Identity=49%"; Hit description =Transmembrane protein, putative
  Pfam annotation: Domain name=DUF1751; Domain location=1-46; Score= -22.2; E_value=0.025; Accession=PF08551.2; Description=Eukaryotic integral membrane protein (
RQSIRGILAFCIAIGLYYVTGKESFLVTPLSGFHGCLAGFLVALKQLLPNLELPMCFFWKIKAKWMPFFVVCFSSIMAFIVPDSINFLPTLVSGMYVSWLYLRYFQRNPLTGLKGDPSDDFSFPSLFPAAMRPVTDPVANLFDRMLCARSRTSE

SEQ ID NO: 80140 - protein, 318 aa, Setaria italica
  Transcript Sequence Number=SeqID_14166
  Gene Ontology: Mol. function=protein binding; Biological process=iron- sulfur cluster assembly
  Homolog annotation: Hit_ID=B9T4T0; Match level="QueryCoverage=78%, HitCoverage=83%, E-value=2e-64, Identity=47%"; Hit description =Transmembrane protein, putative
  Pfam annotation: Domain name=DUF1751; Domain location=66-164; Score =169.0; E_value=1.4e-47; Accession=PF08551.2; Description=Eukaryotic integral membrane protein (
MMESQPLQEPTATAPAAGEEQAGAPPAVVPGKEFTRTCKGLVVVLIGGYVLLQLLPSSLNYLAIIPSKTIPYVWTVFTAGYIEQVLPGAIGSSLGLLFCGKDIEPVWGRKEFLKFIILVNSICGILAFCIAIGLYYVTGKESFLVTPLSGFHGCLAGFLVALKQLLPNLELPMCFFWKIKAKWMPFFVVCFSSIMAFIVPDSINFLPTLVSGMYVSWLYLRYFQRNPLTGLKGDPSDDFSFPSLFPAAMRPVTDPVANLFDRMLCARSRTSEVALPVSDPTKASRRRERGERVLEERLAADHAVDTEAPAHGHGTAED

SEQ ID NO: 80141 - protein, 159 aa, Setaria italica
  misc_feature (122)..(122): Xaa can be any naturally occurring amino acid
  Transcript Sequence Number=SeqID_14167
  Gene Ontology: Mol. function=transferase activity; Cellular component= membrane; Biological process=RNA-dependent DNA replication
  Homolog annotation: Hit_ID=B6SNQ6; Match level="QueryCoverage=99%, HitCoverage=39%, E-value=5e-87, Identity=96%"; Hit description =Exostosin-like
  Pfam annotation: Domain name=Exostosin; Domain location=1-159; Score=- 30.9; E_value=0.00012; Accession=PF03016.7; Description=Exostosin family
EGLINKYPYWNRTLGADHFFVTCHDVGVRAFEGLPFMVKNSIRVVCSPSYNVDFIPHKDIALPQVLQPFALPEGGNDIENRTILGFWAGHRNSKIRVILARFWENDTELAISNNRISRAIGXLVYQKQFYRTKFCICPGGSQVNSARISDSIHYGCVPG

SEQ ID NO: 80142 - protein, 253 aa, Setaria italica
  misc_feature (26)..(26): Xaa can be any naturally occurring amino acid
  misc_feature (217)..(217): Xaa can be any naturally occurring amino acid
  Transcript Sequence Number=SeqID_14168
  Subcellular localization annotation: CTP_CleavageSite=18; ConfidenceScore=5.07e-01
GAALAGAAAASRAVLTPHAAAIKSRXSVSAPVEKLLEEGSGFEASEELPSTGSLETEVEEKGNSELVPGPTEQTASGSGTEEFEEEKHAEVEIEESSGSTKLVEASTLDSVVADDFSGHEQTAENGSMVETDQVENHTAVVYEENAYDQTGDDNYVQSAQSIDPIGSVSEESFDDDWEADRSDSIIEDQVESESSIDKVIEERMGQLEISRKAERMXEKKQKVSMKPLELAEELEKRQASFGQHWKEGAAAQP

SEQ ID NO: 80143 - protein, 128 aa, Setaria italica
  Transcript Sequence Number=SeqID_14169
  Gene Ontology: Mol. function=hydrolase activity; Cellular component =mitochondrion
  Homolog annotation: Hit_ID=Q2R391; Match level="QueryCoverage=100%, HitCoverage=51%, E-value=1e-36, Identity=59%"; Hit description=Nudix hydrolase 13, mitochondrial, putative, expressed
REAMEEAGVKGVINRAALGHWVFKSKSSQNSTSPRGACKGYIFAMEVTEELESWPEQDTHSRRWVSPGEAYQLCRYDWMREALTALLERLSVIEPVAAAAASATPELNDQAGMYMMLQATSDGAVALC

SEQ ID NO: 80144 - protein, 187 aa, Setaria italica
  Transcript Sequence Number=SeqID_14170
  Gene Ontology: Mol. function=protein serine/threonine kinase activity; Cellular component=plasma membrane; Biological process =protein amino acid phosphorylation
  Homolog annotation: Hit_ID=B9S1W6; Match level="QueryCoverage=100%, HitCoverage=18%, E-value=1e-83, Identity=79%"; Hit description =Receptor protein kinase, putative
  Pfam annotation: Domain name=Pkinase; Domain location=1-187; Score =16.5; E_value=1.8e-09; Accession=PF00069.17; Description=Protein kinase domain
  Pfam annotation: Domain name=Pkinase_Tyr; Domain location=1-187; Score=4.9; E_value=4.7e-14; Accession=PF07714.9; Description=Protein tyrosine kinase
  Pfam module annotation: Pfam domain module=Pkinase::Pkinase_Tyr; Domain location=1-187::1-187
VYRGMLPTGQFIAIKRAQQGSMQGGHEFKTEIELLSRVHHKNLVGLVGFCFEQGEQMLVYEFMSGGTLRDSLSGKSGLHLDWKKRLRVALGAARGLAYLHELADPPIIHRDVKSSNILMDEHLTAKVADFGLSKLVSDSERGHVSTQVKGTLGYLDPEYYMSQQLTEKSDVYSFGVVMLELIVARKP

SEQ ID NO: 80145 - protein, 649 aa, Setaria italica
  misc_feature (43)..(43): Xaa can be any naturally occurring amino acid
  misc_feature (215)..(215): Xaa can be any naturally occurring amino acid
  Transcript Sequence Number=SeqID_14171
  Gene Ontology: Mol. function=protein serine/threonine kinase activity; Cellular component=plasma membrane; Biological process =protein amino acid phosphorylation
  Homolog annotation: Hit_ID=B9S1W6; Match level="QueryCoverage=100%, HitCoverage=75%, E-value=1e-139, Identity=54%"; Hit description =Receptor protein kinase, putative
  Pfam annotation: Domain name=LRR_1; Domain location=12-34; Score =14.2; E_value=0.55; Accession=PF00560.25; Description=Leucine Rich Repeat
  Pfam annotation: Domain name=LRR_1; Domain location=36-58; Score =10.2; E_value=3.5; Accession=PF00560.25; Description=Leucine Rich Repeat
  Pfam annotation: Domain name=LRR_1; Domain location=60-83; Score=2.9; E_value=84; Accession=PF00560.25; Description=Leucine Rich Repeat
  Pfam annotation: Domain name=Pkinase; Domain location=398-584; Score=- 69.6; E_value=0.00024; Accession=PF00069.17; Description=Protein kinase domain
  Pfam annotation: Domain name=Pkinase_Tyr; Domain location=398-584; Score=-89.0; E_value=8.3e-08; Accession=PF07714.9; Description =Protein tyrosine kinase
  Pfam module annotation: Pfam domain module=LRR_1::LRR_1::LRR _1::Pkinase::Pkinase_Tyr; Domain location=12-34::36-58::60-83::398 -584::398-584
GSIPDSLGYVSTLEVVRLDRNSLSGPVPSNLKNLTKVNELNLXTNNQLTGTLPDLSGMDLLNYVDLSNNTFDPSPCPAWFWRLPQLSALIIQSGRLYGPVSPRLFSDQQLNQVILDDNALNGTLDLGRSISGELSLVSFKNNEFSSVTVTSSYNGTLALAGNPVCEHLPNYCNGTQKGLSVPYSTSLVKCFSGTCPAGQSLSPQSCSCAYPYQGXMYFRAPFFHDVTNGTAFQALESMLWTKLALTPGSVSLQDPFFNSDSYMEVQVKLFPSGSGAYFNRSEVMRIGFDLSNQTFKPPKEFGPYYFIASPYPFPEGGSSSKSKGVIIGIAVGCGVLFVALAAAAVYAFVQRRRVQKAKEELGGPFASWARSEERGGAPRLKGARWFSYEELKRSTNNFAEANELGYGGYGKVYRGMLPTGQFIAIKRAQQGSMQGGHEFKTEIELLSRVHHKNLADFGLSKLVSDSERGHVSTQVKGTLGYLDPEYYMSQQLTEKSDVYSFGVVMLELIVAKQPIEKGKYIVREAKRMFDASDAEFCGLKDMIDARIMNTNHLAAFSKFLQLALRCVDEVATARPSMSEVVKEIEVMLQSEGLSSSSTSASTSATEFDVTKGAPRHPYNDPLPKKDKDVSTDSFDYSGGYSFQSRVEPK

SEQ ID NO: 80146 - protein, 106 aa, Setaria italica
  Transcript Sequence Number=SeqID_14172
  Gene Ontology: Mol. function=isopentenyl-diphosphate delta-isomerase activity; Cellular component=peroxisome; Biological process =chlorophyll biosynthetic process
  Homolog annotation: Hit_ID=O48964; Match level="QueryCoverage=84%, HitCoverage=38%, E-value=4e-44, Identity=92%"; Hit description =Isopentenyl-diphosphate Delta-isomerase I
YSSQNLFCDHAAWLSRRCILVDEQDNVVGHESKYNCHLMEKIESENLLHRAFSVFLFNSKYELLLQQRSATKVTFPLVWTNTCCSHPLYRESELIQENYLGTRNAA

SEQ ID NO: 80147 - protein, 113 aa, Setaria italica
  Transcript Sequence Number=SeqID_14173
  Gene Ontology: Mol. function=isopentenyl-diphosphate delta-isomerase activity; Biological process=chlorophyll biosynthetic process
  Homolog annotation: Hit_ID=Q39472; Match level="QueryCoverage=67%, HitCoverage=26%, E-value=2e-36, Identity=96%"; Hit description =Isopentenyl-diphosphate Delta-isomerase I
MAGAAGDDAGMDAVQRRLMFEDECILVDEQDNVVGHESKYNCHLMEKIESENLLHRAFSVFLFNSKYELLLQQRSATKVTFHLVWTNTCLRLSMIYFSILSRYSIFIYTWQRF

SEQ ID NO: 80148 - protein, 192 aa, Setaria italica
  Transcript Sequence Number=SeqID_14174
  Gene Ontology: Mol. function=isopentenyl-diphosphate delta-isomerase activity; Cellular component=peroxisome; Biological process =chlorophyll biosynthetic process
  Homolog annotation: Hit_ID=A9LRT7; Match level="QueryCoverage=96%, HitCoverage=82%, E-value=4e-83, Identity=74%"; Hit description =Isopentenyl diphosphate isomerase
  Pfam annotation: Domain name=NUDIX; Domain location=2-154; Score =47.3; E_value=5.9e-11; Accession=PF00293.20; Description=NUDIX domain
MFGIINCHYPINLQNVDYKYLSTLLLQQRSATKVTFPLVWTNTCCSHPLYRESELIQENYLGTRNAAQRKLLDELGIPAQDAPVDQFTPVGRMLYKAPSDGKWGEHELDSILIMVRDVKLQPNPDEVADVKYVNREQLKELIQKADAGEDGMKLSPWFRLIVDNFLMRWWDHVEKGTLSEVVDMETIHKLKD

SEQ ID NO: 80149 - protein, 124 aa, Setaria italica
  Transcript Sequence Number=SeqID_14175
  Gene Ontology: Mol. function=nucleic acid binding
  Homolog annotation: Hit_ID=B9GWX1; Match level="QueryCoverage=100%, HitCoverage=9%, E-value=4e-49, Identity=72%"; Hit description =Chromatin remodeling complex subunit
SHVESLLNPKQWKFRATTIKNVRLSCCVAGHIKVAEAGQDIQETMDDLVKLGLDPSSDEYQFIRIALLNGASCFRCKVWCRLPIITPCQHILCLDCVALDSEKCTLPGCGNHYEMQTPAVRLEN

SEQ ID NO: 80150 - protein, 272 aa, Setaria italica
  Transcript Sequence Number=SeqID_14176
  Gene Ontology: Mol. function=nucleic acid binding; Cellular component= nucleus; Biological process=G1/S transition of mitotic cell cycle
  Homolog annotation: Hit_ID=B9GWX1; Match level="QueryCoverage=99%, HitCoverage=20%, E-value=1e-101, Identity=68%"; Hit description =Chromatin remodeling complex subunit
  Pfam annotation: Domain name=Helicase_C; Domain location=128-205; Score=42.6; E_value=1.6e-09; Accession=PF00271.23; Description =Helicase conserved C-terminal domain
ILLCLDCVALDSEKCTLPGCGNHYEMQTPAVRLENPKPKWPVPKDLIELQPSYKQDDWDPDWQSTSSSKVSYLVDKLISLRETYMNHGNNITNSAGHANALSCQPQAMLDKVIIFSQFLEHIHVIEQQLTIAGITYAGMYSPMPLGSKRSALTKFQEDPTCMALVMDGTAALGLDLSFVTHVFLMEPIWDRSMEEQVISRAHRMGATRPILVETLAMRGTIEEQMLKLLQDSSACRKMVNKGISSTENEGGRPHRSLHDFAESSYLAQLSFV

SEQ ID NO: 80151 - protein, 888 aa, Setaria italica
  misc_feature (162)..(162): Xaa can be any naturally occurring amino acid
  Transcript Sequence Number=SeqID_14177
  Homolog annotation: Hit_ID=Q10F47; Match level="QueryCoverage=99%, HitCoverage=35%, E-value=0.0, Identity=71%"; Hit description=SABRE, putative, expressed
VTDLIIKVPKGAVDIKELTLDTLKVAGPNHILGVKLHLLPLNVHFGDLSLTTDPMGSCNLHDAFQSDQASVSNSEKCLAPFVCEDLLVTCDFGHEKEKGIKIINLELKCGHVIANIDERLFRKKHTIPEYNTVSSNTGDAIMDTSSIKHTSKSKSVLPALKXQMLTFPDKVTFSVPKLDVKFRHLHEGLSVDNNITGIQFTCAKSLPQDDLEEATPHFDVQIDLSEIHLVREGTSSLLEILKVVANTSLDVPVDPFLPVRAEIDAKLGGTQCNVMLIRLMPWMRLLSLRTKGMKPSKGDCNQEISQKGEFKPILWTCTVAAPETAVMLYNIDGLALYHACSQSSHLFANNIASKGIQVHAELGELLVHMEEEYREFLKDNRFGVDTYSGSLMHIARVSLDWGYRESDVQDMIETSRHALVLSIDISDIEVKFGYKHLESLLLNLISFRTLFKSLRPSAGSVKEKKLERRGEKKTKGVKILKLSLQKFSISYCGDANIVNMPIDDPKRVNYGSQGGQVIVSVSADGTPRRASITSVLPGSNRLLQFSASLVISHLSMCIDKERKTTEVELERVKTIYEELPEDHSSGVKVTLLDMQNAKIVRRSSGSTELAVCSLFGATEINLRWEPDAHLALFETFLRFKHFLNLNKLHKSEKLINTEVANIKANEKDNMTAGSIKPQKSNRKGSIFAIDVDVLRVSAELADGVEANMHVQSIFTENAKIGVLSEGLSLTFNGARVLKSTRIQISCIPFSNGSLLDAKVDPSSKRDWVVQGHDVHICMPYRLPLRAIEDAVEDMIRALKLVSSAKRSILCPDGKEKSKKVNSGTSKVGSVKFVLRELTADIEEEPIQGWLDQHYRAMRDRVCELGVRLKFLEEAVSGNVDPNNRSSEK

SEQ ID NO: 80152 - protein, 89 aa, Setaria italica
  Transcript Sequence Number=SeqID_14178
HECWHETKNIQNKPFPDLIDPSLEQESLHRMQLLLISISQFPPPTSVQFILIVALYHQSSFLVAAPGAHQFLGHVYTSRYSPWCCWHCV

SEQ ID NO: 80153 - protein, 88 aa, Setaria italica
  Transcript Sequence Number=SeqID_14179
  Gene Ontology: Mol. function=nucleotide binding; Biological process =defense response
  Homolog annotation: Hit_ID=Q2QZS8; Match level="QueryCoverage=96%, HitCoverage=8%, E-value=2e-20, Identity=56%"; Hit description=NB-ARC domain containing protein
VEDLMFLSEFLLIVNCESLERILNLPKVRHLRVSCCPSLRHVEELDSLEQLWLDVDMQDLASQGVAGLKHQCQQHHGEYLDVYTWPRN

SEQ ID NO: 80154 - protein, 104 aa, Setaria italica
  Transcript Sequence Number=SeqID_14180
CRCRLHTQEQLLHHDPSVYQMFYFCFPFFSQVLFSFFLLLSFLGDLLAVVYNQLQLPAWHKPVCHTQFLVQGTRFRPLNTQLAPVTTCNEKRRLEFKKHSSCYG

SEQ ID NO: 80155 - protein, 66 aa, Setaria italica
  Transcript Sequence Number=SeqID_14181
GKFKCIRQILAKNIGEYTDIQLFKLVSLATELNIPTKFFVRNMHSQQDFNCFCFNKLKTISEYLPF

SEQ ID NO: 80156 - protein, 76 aa, Setaria italica
  Transcript Sequence Number=SeqID_14182
  Subcellular localization annotation: CTP_CleavageSite=44; ConfidenceScore=5.48e-01
CGPTVNIFVNTCVCLFSCLQLSQSSFVSMIFSKKKKVLSQCRVVAVLQQAQVRGSGLNTSETAIKFSAISCCDPFF

SEQ ID NO: 80157 - protein, 596 aa, Setaria italica
  Transcript Sequence Number=SeqID_14183
  Gene Ontology: Mol. function=zinc ion binding
  Homolog annotation: Hit_ID=B6SW18; Match level="QueryCoverage=99%, HitCoverage=98%, E-value=0.0, Identity=71%"; Hit description =Potyvirus VPg interacting protein
  Pfam annotation: Domain name=DUF1423; Domain location=102-583; Score =1033.6; E_value=0; Accession=PF07227.3; Description=Protein of unknown function (DUF1423)
  Pfam annotation: Domain name=PHD; Domain location=257-319; Score =10.2; E_value=0.002; Accession=PF00628.21; Description=PHD-finger
  Pfam module annotation: Pfam domain module=DUF1423::PHD; Domain location=102-583::257-319
  Subcellular localization annotation: CTP_CleavageSite=39; ConfidenceScore=5.47e-01
MGTSSGANFHQQPPPAQGMLPPRHGPRPSGLQTSLSLASSEQVGSPDMQEPGSNSDPGHDSATESASSRDTWPAEPNQSNGGTAATGIVSKAVEKEKEVANGVAKLQVIRGPSSRVGGMLLQEVARERVDLVAEKMKVMPEEHLEEIKNELRSILEGTGGSQHIEEFLYLQKLVQDRTDLTPSMLSVAHHVQLEILVAIKTGIQAFLHPSVTIPQGRLVEVFLYKRCRNIACQSALPAEDCRCNVCASRNGFCNLCMCVICNKFDFEVNTCRWIGCDFCSHWTHTDCAIHNGQIGMGQSVKSSIGHAEMLFRCRACQRTSELLGWVKDVFQQCAPGWDRDALLRELEFVCKIFRLSEDPKGRVLFRKCLDLIERLRNAPADSINPRVILQALQELEMDSPKISENEDSGRLITPQEACNRIAEVVQEAVRKMELVAEEKMRLYKKARLAVEACDRELEEKVREAQELKAERLRKKQQVEELESIVRLKQAEAEMFQLKASEARQEAERLQSIALAKSKTAEQDYASMYLKRRLEEAEAEKQFLFEKIKLQENQKPPPPHQASSSGAGGDPAQAMMLSKIQDLLKNVRSLPAKSEGH

SEQ ID NO: 80158 - protein, 95 aa, Setaria italica
  Transcript Sequence Number=SeqID_14184
  Subcellular localization annotation: CTP_CleavageSite=70; ConfidenceScore=5.81e-01
PGAAPATSPSPRARSRPSFTPRVPPTPTHSALLFLLSFLAPRGSPRWPTAPHAIRSRSPRSRLSSPPQVRVSLCAKPPLAHGEVEDGKERAVPAT

SEQ ID NO: 80159 - protein, 116 aa, Setaria italica
  misc_feature (107)..(107): Xaa can be any naturally occurring amino acid
  Transcript Sequence Number=SeqID_14185
RPEAESQATSSAAEVEGRGGPTPSSSMPPPPPPKPAPPVPEPEARAEGSAGPSPSASDSSAEEVPNPSGASSGDTEMEEAAAPPAERQKQQRPRAPYVIPEWSAAPXHPFFLEVLK

SEQ ID NO: 80160 - protein, 88 aa, Setaria italica
  Transcript Sequence Number=SeqID_14186
  Subcellular localization annotation: CTP_CleavageSite=9; ConfidenceScore=5.01e-01
RFSSGFFATAARARGRCFTAMARLTPPTAPSPETEEHLFAACPRLDLFWARLLPGRPSPLMARDAMEAVCDLLVDLPPIAAHTAALAI

SEQ ID NO: 80161 - protein, 145 aa, Setaria italica
  Transcript Sequence Number=SeqID_14187
  Gene Ontology: Mol. function=phosphoenolpyruvate carboxylase activity; Cellular component=cytoplasm; Biological process=carbon utilization by fixation of carbon dioxide
  Homolog annotation: Hit_ID=A7DX17; Match level="QueryCoverage=100%, HitCoverage=23%, E-value=6e-79, Identity=97%"; Hit description =Phosphoenolpyruvate carboxylase (Fragment)
LGDVRDKLYNTCERARQILSHGVSNIPEDKTFVNVKQFLEPLELCYRSLCDCGDKLIADGNLLDFMRQVSTFGLSLVKLDIRQESERHTDAMDAITTHLGIGSYREWPEEQRQEWLVSELRGKRPLFGPDLPQSDEVADVLGTFR

SEQ ID NO: 80162 - protein, 227 aa, Setaria italica
  Transcript Sequence Number=SeqID_14188
  Gene Ontology: Mol. function=phosphoenolpyruvate carboxylase activity; Cellular component=cytoplasm; Biological process=carbon utilization by fixation of carbon dioxide
  Homolog annotation: Hit_ID=B0LXE5; Match level="QueryCoverage=87%, HitCoverage=20%, E-value=2e-93, Identity=81%"; Hit description =Phosphoenolpyruvate carboxylase
DEALQREILAALRTDEILRAQPKPQDEMRAGMSYFDDTIWNGVPKFLRRVDTALKNIGIDERLPYDAPLIQFSSWMGGDRDGNPRVTPEVTRDVCLLARMMAANMYFSKMADLMFELSMWRCNDELRARADELHRQSSREYAKYYIEFWNQISPREPYRIVLGDVRDKLYNTCERARQILSHGVSNIPEDKTFVNVKQFLEPSCSLVVLPVLLCLFVTLFGFVYFKF

SEQ ID NO: 80163 - protein, 62 aa, Setaria italica
  Transcript Sequence Number=SeqID_14189
MDGLTGSEIAGFVVGGLLLGATIAAPKVDGFIASSQRRSLGMCKRCGDLRIVACSQCKGMGS

SEQ ID NO: 80164 - protein, 66 aa, Setaria italica
  Transcript Sequence Number=SeqID_14190
  Subcellular localization annotation: CTP_CleavageSite=45; ConfidenceScore=5.10e-01
ARVPHPITYFHSRLPPIYHARSPLLFRTCNVLESCCSPLLAPSLTATSRTKQAWVGRRQWRPPWWR

SEQ ID NO: 80165 - protein, 111 aa, Setaria italica
  misc_feature (26)..(26): Xaa can be any naturally occurring amino acid
  Transcript Sequence Number=SeqID_14191
  Gene Ontology: Mol. function=aspartic-type endopeptidase activity; Biological process=DNA integration
  Homolog annotation: Hit_ID=Q2QW16; Match level="QueryCoverage=90%, HitCoverage=5%, E-value=1e-39, Identity=79%"; Hit description =Retrotransposon protein, putative, unclassified
YAFVLIVSQALWLTRLLGDLLSKDAXMELRVDSKSTLALAKNPVFHERSKHIRVKYHFIRGCLEEGSVRANYINTKDQLADLLTKSLGRIKFQELCSRIRMVQLPLKTRKT

SEQ ID NO: 80166 - protein, 50 aa, Setaria italica
  Transcript Sequence Number=SeqID_14192
MAAMVGARRALLAARYSPRGAIAASAAPVPPYRRVDSLPRLPAERGCVPS

SEQ ID NO: 80167 - protein, 378 aa, Setaria italica
  Transcript Sequence Number=SeqID_14193
  Gene Ontology: Mol. function=receptor activity; Cellular component =plasma membrane; Biological process=protein amino acid phosphorylation
  Homolog annotation: Hit_ID=B9RBB1; Match level="QueryCoverage=99%, HitCoverage=59%, E-value=1e-144, Identity=65%"; Hit description =Serine-threonine protein kinase, plant-type, putative
  Pfam annotation: Domain name=LRRNT_2; Domain location=238-278; Score =12.6; E_value=0.048; Accession=PF08263.4; Description=Leucine rich repeat N-terminal domain
  Pfam annotation: Domain name=LRR_1; Domain location=311-333; Score =11.7; E_value=1.8; Accession=PF00560.25; Description=Leucine Rich Repeat
  Pfam annotation: Domain name=LRR_1; Domain location=335-357; Score =16.9; E_value=0.084; Accession=PF00560.25; Description=Leucine Rich Repeat
  Pfam annotation: Domain name=LRR_1; Domain location=359-378; Score =12.1; E_value=1.5; Accession=PF00560.25; Description=Leucine Rich Repeat
  Pfam module annotation: Pfam domain module=LRRNT_2::LRR_1::LRR_1::LRR_ 1; Domain location=238-278::311-333::335-357::359-378
DDEKTFAEALVFVQDSSLSVCFHSTGHGDPSILSIEVLQIDDNGYNFGPSWGKGTVLRTAKRLRCGSGKSAFDEDLHGIHWGGDRFWLGLQTLSSSSDDQSISTENVIAETLIAPNFYPRSLYQSAIVGTDRQPSLSFEMDVTPNKNYSVWLHFAEIDNGVTAEEQRVFDILINGDTAFKDVDIVRMTGERFTALVLNKTVAVSGTTLKIILQPVKGTRAIINAIEVFEIIAAEKKTLPQEVSTLRTLKGSLGLPLRFGWNGDPCVPQQHPWSGVDCQFDNTKGNWVIDGLGLDNQGLRGVIPGDISKLQHLQSINLSGNSIKGNIPTSVGTISALQVLDLSYNELNGSIPESLGQLTSLQILNLNGNRLSGRVPASF

SEQ ID NO: 80168 - protein, 89 aa, Setaria italica
  Transcript Sequence Number=SeqID_14194
  Gene Ontology: Mol. function=DNA binding; Cellular component=nucleus; Biological process=regulation of transcription
  Homolog annotation: Hit_ID=Q69MK1; Match level="QueryCoverage=85%, HitCoverage=23%, E-value=1e-22, Identity=67%"; Hit description=R2R3 -MYB transcription factor-like protein
  Pfam annotation: Domain name=Myb_DNA-binding; Domain location=8-53; Score=39.5; E_value=1.4e-08; Accession=PF00249.23; Description=Myb -like DNA-binding domain
YLRPNIRHGGFTEDEDRLICSLYISIGSRWATIAAQLPGRTDNDVKNHWNTKLKRRLLGGGRRPRAETRLQLLMSPTWQQSSFAASSSA

SEQ ID NO: 80169 - protein, 241 aa, Setaria italica
  Transcript Sequence Number=SeqID_14195
  Gene Ontology: Mol. function=protein serine/threonine kinase activity; Cellular component=integral to membrane; Biological process=protein amino acid phosphorylation
  Homolog annotation: Hit_ID=B9SI35; Match level="QueryCoverage=86%, HitCoverage=47%, E-value=3e-59, Identity=58%"; Hit description =Serine/threonine-protein kinase PBS1, putative
  Pfam annotation: Domain name=Pkinase; Domain location=1-201; Score= -78.1; E_value=0.00077; Accession=PF00069.17; Description=Protein kinase domain
  Pfam annotation: Domain name=Pkinase_Tyr; Domain location=2-201; Score=-130.2; E_value=4.6e-05; Accession=PF07714.9; Description =Protein tyrosine kinase
  Pfam module annotation: Pfam domain module=Pkinase::Pkinase_Tyr; Domain location=1-201::2-201
PKPGSAAQQSPVASSWKLRIKILLDASRGIEYLHSYAVPPIIHRDIKSSNILLDGNWTARVSDFGLSLMGPPESEETQSQSQRHLTVKAAGTLGYMDPEYYGLHHLTVKSDVYGFGVVMLEALTGRRAIFKEAEGGSPVSVVDHAVPSIVAGELTKVLDPRAPEPAEHEAEAVELVAYTAVHCVRLEGKDRPAMADIVANLETAFALCEGSAGDRGGGGFGNSSSSASMSVTSMDRSGALV

SEQ ID NO: 80170 - protein, 97 aa, Setaria italica
  misc_feature (10)..(10): Xaa can be any naturally occurring amino acid
  misc_feature (31)..(31): Xaa can be any naturally occurring amino acid
  Transcript Sequence Number=SeqID_14196
HALGQKVQNXIETGALIEGRGKQLLNGPNIXHSRNNFYPVGADNREESDVGKVSQTASSQRCRIANSRAAATESSKKEQTGAARRMFAHALGLLSAV

SEQ ID NO: 80171 - protein, 146 aa, Setaria italica
  misc_feature (44)..(44): Xaa can be any naturally occurring amino acid
  misc_feature (54)..(54): Xaa can be any naturally occurring amino acid
  misc_feature (66)..(66): Xaa can be any naturally occurring amino acid
  Transcript Sequence Number=SeqID_14197
  Subcellular localization annotation: CTP_CleavageSite=34; ConfidenceScore=5.34e-01
MKFTISSKRTNYYGSHFFNSSIPIPRPQSSFPPSGAEQTKKTLXNQPNKLKKPXATSLILHGFQWXVQLHFCFSDSVCRFHISLSFCNNSRRLAVPANVALTFESSSCSCLVFSNSLSYFILHSADSSIASRFACSNCLLRVDAAK

SEQ ID NO: 80172 - protein, 90 aa, Setaria italica
  Transcript Sequence Number=SeqID_14198
RLDGRTEAPCKRAGGVARFTLGIVDGRRDAVAKRCRDEDEDVLAVRLGVGGEQHLRATQGQLRLGRGEVASSSSYSPSLLRVVWRRWRGS

SEQ ID NO: 80173 - protein, 106 aa, Setaria italica
  Transcript Sequence Number=SeqID_14199
  Gene Ontology: Mol. function=zinc ion binding; Cellular component =nucleus
  Homolog annotation: Hit_ID=B6TKB7; Match level="QueryCoverage=89%, HitCoverage=19%, E-value=4e-42, Identity=87%"; Hit description =Histone-lysine N-methyltransferase ASHR1
QNWQTALTYCRLTIPVYERVYPPSHPMIGLQFYTCGKLEWLLECTEDALKSLTRAADILGITHGTKSQFMKELFGKLEEARAEVSFKLSSIFHHSCPAVPHENCLL

SEQ ID NO: 80174 - protein, 130 aa, Setaria italica
  Transcript Sequence Number=SeqID_14200
  Gene Ontology: Mol. function=zinc ion binding; Cellular component =nucleus
  Homolog annotation: Hit_ID=B6TKB7; Match level="QueryCoverage=100%, HitCoverage=26%, E-value=1e-53, Identity=77%"; Hit description =Histone-lysine N-methyltransferase ASHR1
QPIGKDEEVSISYIETAAVTKKRQNDLKQYFFTCTCPRCLKDSEEDAVLESYRCKNQACDGFLLPESGGRSYTCQKCSISRDEEEIKKMTREILLLSDKASSFVSLGNTTEAGSIYEKIEQLEQNLYHAF

SEQ ID NO: 80175 - protein, 408 aa, Setaria italica
  misc_feature (107)..(107): Xaa can be any naturally occurring amino acid
  misc_feature (270)..(270): Xaa can be any naturally occurring amino acid
  Transcript Sequence Number=SeqID_14201
  Gene Ontology: Mol. function=zinc ion binding; Cellular component =nucleus; Biological process=chromatin modification
  Homolog annotation: Hit_ID=B6TKB7; Match level="QueryCoverage=98%, HitCoverage=91%, E-value=0.0, Identity=76%"; Hit description=Histone- lysine N-methyltransferase ASHR1
  Pfam annotation: Domain name=zf-MYND; Domain location=22-59; Score =40.6; E_value=6.3e-09; Accession=PF01753.10; Description=MYND finger
VQLISQEPYTSTPNKILVRSSCDHCFASSNLRKCSACRVTWYCSSDCQKEEWKLHQLECRVMAALTEDRKKMLTPTIRLMVRLVLKRKLQNEKAIPSSNIDNYDLVXILESHISKVDENQLVLYAQMANLVSLILPSLELDLKEIAHTFSKFACNAHTICDPELRPLGTGLYPVISIINHSCVPNAVLIFDGRTAYVRALQPIGKDEEVSISYIETAAVTKKRQNDLKQYFFTCTCPRCLKDSEEDAVLESYRCKNQACDGFLLPESGKXTEAGSIYEKIEQLEQNLYHAFSITLLHTRETLLKVHMELQNWQTALTYCRLTIPVYERVYPPSHPMIGLQFYTCGKLEWLLECTEDALKSLTRAADILGITHGTKSQFMKELFGKLEEARAEVSFKLSSSRGHDEQFS

SEQ ID NO: 80176 - protein, 137 aa, Setaria italica
  misc_feature (43)..(43): Xaa can be any naturally occurring amino acid
  misc_feature (105)..(105): Xaa can be any naturally occurring amino acid
  Transcript Sequence Number=SeqID_14202
  Gene Ontology: Mol. function=phosphatidate phosphatase activity; Cellular component=apoplast
  Homolog annotation: Hit_ID=Q2R178; Match level="QueryCoverage=100%, HitCoverage=10%, E-value=7e-50, Identity=77%"; Hit description=Lipin, N-terminal conserved region family protein, expressed
  Pfam annotation: Domain name=Lipin_N; Domain location=1-107; Score =178.0; E_value=2.6e-50; Accession=PF04571.6; Description=lipin, N -terminal conserved region
MYAVGKVGSLISRSVYTVSGPFHPFGGAVDIVVVQQQDGSFKXSSPWYVRFGKFQGVLKSREKVVNISVNGVEAGFHMYLDSNGEAYFLRNADPNGEEGEFVYHXASSGDEREAPIQEAQLRKSKSTSCDSSTMEAD

SEQ ID NO: 80177 - protein, 90 aa, Setaria italica
  Transcript Sequence Number=SeqID_14203
RTQVSISSPLLPSPPAIFRARTLPDLAPFRQPDYFSRIIRGIMACVILWIHGVQMLSSAALKAFCACRDLGAETRAISGRNNLFVLVAIG

SEQ ID NO: 80178 - protein, 41 aa, Setaria italica
  Transcript Sequence Number=SeqID_14204
GKLTFFSNAINLVTVIRYYVVVSLFTIQELYFFQCVGKIYA

SEQ ID NO: 80179 - protein, 546 aa, Setaria italica
  Transcript Sequence Number=SeqID_14205
  Gene Ontology: Mol. function=molecular_function; Cellular component =cellular_component; Biological process=multicellular organismal development
  Homolog annotation: Hit_ID=UPI0000ECD42C; Match level="QueryCoverage =84%, HitCoverage=89%, E-value=2e-11, Identity=23%"; Hit description =Protein downstream neighbor of Son (B17).
VTEVFPVRKARNHGKENCKDALQSNEKICKSIDASTASNFASSSLPCGNGDSATSDSSVPSTTEGAKPGFKKVEKCSENALRSVSELHVGDEKQTGSNKFDMEKVLKGFGTRDAFVASGLSSSTVQVGDAVLKSSDLCPSKITIPGKRAPLDFTLKTSLQFVSSSSVKWCHKLNTSFGRSSITGAIGQTCPRGCQNLECPKPESKKEFLFSKALQSWVYPQSLLPSSIISAMLSSTARGESDFLLKRHQDWEDSFQNLYYMFRKNMLNIFYVYTTQFVALFIGGSHLEKKQSCNAYLSQSTRGLRALLRKHGVCFSMPLCNTEVEQATEDDLIELSEIQRRNLGQALHLDALSDVDNTTQSLLMFSGNESVHGLYDILLNYKSLLNSLSAADVPVLYSPQPFQNGCLHIPEVKCREMRRADMGLLSSGGFDTEPGSAFASTAGNICYSMEIKDLVLPPWVVSGVCAAMSSDARSFDLTIATEPSSMGLNAALKSMTTAPQPETVPSTDGGAPAGGIPDAILVPSLHSGSLRRLSYTDGEYVAYTTV

SEQ ID NO: 80180 - protein, 277 aa, Setaria italica
  misc_feature (73)..(73): Xaa can be any naturally occurring amino acid
  Transcript Sequence Number=SeqID_14206
  Gene Ontology: Mol. function=transferase activity, transferring glycosyl groups; Biological process=metabolic process
  Homolog annotation: Hit_ID=B6TR02; Match level="QueryCoverage=97%, HitCoverage=57%, E-value=2e-85, Identity=64%"; Hit description =Indole-3-acetate beta-glucosyltransferase
  Subcellular localization annotation: CTP_CleavageSite=50; ConfidenceScore=5.19e-01
MGNSDNERSIHVLLVPFPVQGHINPLLQFGKRLASHSGVRCTLAATRFVVNSARPATPSSVHVAVFSDGCDGXGPGEVGGHRGPYFERLNAAGPGSVDQLLRSESELGRPVHGVVYDAFLPWAQGVARRHGAACAAFLTQTCAVDVLYTHLRAGRIPPPPVREELPPELDGLPSQLELTDLPTFMVDKNRPPGLLELLMNQFVGLDTVDHVLVNSFYDLEPQEADYLTSAWGAKTVGPTMPSVYLDNRLPNDASCGIHLHTPKTFETKAWLDAQPPY

SEQ ID NO: 80181 - protein, 358 aa, Setaria italica
  misc_feature (120)..(120): Xaa can be any naturally occurring amino acid
  Transcript Sequence Number=SeqID_14207
  Gene Ontology: Mol. function=catalytic activity; Biological process =metabolic process
  Homolog annotation: Hit_ID=B6TIK5; Match level="QueryCoverage=91%, HitCoverage=91%, E-value=0.0, Identity=95%"; Hit description =Catalytic/ hydrolase
  Pfam annotation: Domain name=Hydrolase; Domain location=115-300; Score=36.9; E_value=7.9e-08; Accession=PF00702.18; Description =haloacid dehalogenase-like hydrolase
  Subcellular localization annotation: CTP_CleavageSite=65; ConfidenceScore=5.78e-01
MESCSFRPATAPSPFPSAPSSSSSSPRAPCPNLRFPRPRNGRQVGVRRRASGFDAFPPLPGKVFVDEAIGAEYGEGFETFRMDGPLKIDVDYLNEKLQECFLQRIRHAMKPDEAFGLIFXSWDNVIADTDSLKLDAWRQLALEEGKDIPSAAHVRKSILHGAADHVLRKVLYWAREEDKMEKLKARLIELYYENLFKLDTPVEGLREWLDAVQTAGIPCAVASSLDRRCMIEALDRMALSKYFKAIVTDEDDMESIANRFLSASMKLDRKPSKCVVFEDDPRGVTAAHNCTMMAVALIGAHPAYELVQADLAIAKYSELSVINLRRLFANKGISFMDLQKQIIEKAPPKRRLTVDTIF

SEQ ID NO: 80182 - protein, 120 aa, Setaria italica
  Transcript Sequence Number=SeqID_14208
CPIHTGSQVNQTTLQSSEPLQSSEPLHPVPSYLLCIATTHSAMQRDRAMDLLDLLQQNTRVLCLHSVTDAQPTGRSMGGLPGPGGRDLDDEPWEDVVGVVDVRVLLQDVGVAALVADAVQ

SEQ ID NO: 80183 - protein, 75 aa, Setaria italica
  Transcript Sequence Number=SeqID_14209
  Gene Ontology: Mol. function=dihydrodipicolinate reductase activity; Cellular component=cytoplasm; Biological process=cell wall catabolic process
  Homolog annotation: Hit_ID=Q01JW9; Match level="QueryCoverage=74%, HitCoverage=47%, E-value=4e-23, Identity=89%"; Hit description =OSIGBa0147H17.4 protein
  Pfam annotation: Domain name=LysM; Domain location=28-70; Score=20.0; E_value=0.0046; Accession=PF01476.12; Description=LysM domain
GQGGGGLGMALRWCGARRLSARPCEEMYVVGDGETLHSISDKCGDPFIVERNPHIHDPDDVFPGLVIALSPTKNA

SEQ ID NO: 80184 - protein, 193 aa, Setaria italica
  Transcript Sequence Number=SeqID_14210
MVLWELTAITAYFLGLRRTYRLALRIQRRLIPPNHPRIRDFVYRRTRDVFNVAVSVHKNIQQRDIEVGRNLGNAILRWLDRMKPSAEIRPRLPGPPNGSSEQYKHFSSTSRSAGAQKTTSKTSPHDSNGKMLFSRLNIRPKSFPVLPTMTQPNRISASSQCRRFSYSPFPSVTAKRKVLMEGVFRKDIAQLMV

SEQ ID NO: 80185 - protein, 751 aa, Setaria italica
  misc_feature (17)..(17): Xaa can be any naturally occurring amino acid
  Transcript Sequence Number=SeqID_14211
  Gene Ontology: Mol. function=metal ion binding; Cellular component =plasma membrane; Biological process=innate immune response
  Homolog annotation: Hit_ID=B9RGB2; Match level="QueryCoverage=99%, HitCoverage=75%, E-value=0.0, Identity=55%"; Hit description=Ran GTPase binding protein, putative
  Pfam annotation: Domain name=DZC; Domain location=697-732; Score =83.7; E_value=6.7e-22; Accession=PF08381.3; Description=Disease resistancezinc fingerchromosome co
  Pfam annotation: Domain name=FYVE; Domain location=314-382; Score =83.2; E_value=9.3e-22; Accession=PF01363.13; Description=FYVE zinc finger
  Pfam annotation: Domain name=RCC1; Domain location=158-207; Score =37.7; E_value=4.5e-08; Accession=PF00415.10; Description=Regulator of chromosome condensation (RCC1)
  Pfam annotation: Domain name=RCC1; Domain location=210-259; Score =25.8; E_value=0.00017; Accession=PF00415.10; Description=Regulator of chromosome condensation (RCC1)
  Pfam annotation: Domain name=RCC1; Domain location=264-311; Score =26.9; E_value=8.2e-05; Accession=PF00415.10; Description=Regulator of chromosome condensation (RCC1)
  Pfam annotation: Domain name=RCC1; Domain location=39-91; Score=26.2; E_value=0.00013; Accession=PF00415.10; Description=Regulator of chromosome condensation (RCC1)
  Pfam annotation: Domain name=RCC1; Domain location=94-143; Score =27.4; E_value=5.9e-05; Accession=PF00415.10; Description=Regulator of chromosome condensation (RCC1)
  Pfam module annotation: Pfam domain module=DZC::FYVE::RCC1::RCC1::RCC1 ::RCC1::RCC1; Domain location=697-732::314-382::158-207::210-259::264- 311::39-91::94-143
LGHGVDCDVSQPKLIDXLSHMNIELVACGEYHTCAVTLSGDLYTWGDGTFKFGLLGHGNDVSHWVPKRVNGPLEGIHVSSISCGPWHTALVTSAGQLFTFGDGSFGVLGHGDRESISVPREVESLKGLRTVRVACGVWHTAAVVEVMAGNSSSSNCSSGKIFTWGDGDKGRLGHGDKEPRYVPTCVAALVEPNFCQVACGHCLTVALTTSGHVYTMGSAVYGQLGNPQADGILPVRVEGKLHKNFVEEISCGAYHVAVLTSRTEVYTWGKGANGRLGHGDTDDRNTPTLVEALKDKQVRSVVCGINFTAAICIHKWVSGVDQSMCSGCRQPFNLRRKRHNCYNCALVFCHSCSSKKSLKASLAPNPNKPYRVCDSCYSKLTKGLETDMHSSAKRAASVPGLSDTIEEDLETRSNAQLSRLSSMESFKHVDSRYSKKNKKFEFNSTRVSPVPNGSSHWSGLNISRSFNPVFGSSKKFFSASVPGSRIVSRATSPISRRASPPRSTTPTPTLGGLASPRVVANDGKPTNDALSQEVLNLRSQVESLTRKSQLLEVELERTTKQLKEAISIAGEETAKCKAAKEVIKSLTAQLKGMAERLPGGAAKNTKLPPLPGISIPNDISSVGTESLGSPSSSGEQITNGHNGLLASNGPSSVRNKTSHAEVGKNGSRLPDAESCHEAEWVEQDEPGVYITLTALPGGARDLKRVRFSRKRFSETQAEQWWQENRARVYQQYNVRVVDKSTASVDNDIPSN

SEQ ID NO: 80186 - protein, 203 aa, Setaria italica
  Transcript Sequence Number=SeqID_14212
  Gene Ontology: Mol. function=transcription regulator activity; Cellular component=nucleus; Biological process=regulation of transcription
  Homolog annotation: Hit_ID=A9YWR2; Match level="QueryCoverage=88%, HitCoverage=55%, E-value=7e-58, Identity=63%"; Hit description=BHLH transcription factor
  Pfam annotation: Domain name=HLH; Domain location=34-81; Score=37.0; E_value=7.8e-08; Accession=PF00010.18; Description=Helix-loop-helix DNA-binding domain
  Subcellular localization annotation: CTP_CleavageSite=38; ConfidenceScore=5.17e-01
VEPGLAEGGGAFGAGAAPPAPPASKKKRVEGMPSKNLMAERRRRKRLNDRLSMLRSVVPKISKMDRTSILGDTIDYMKELLERIKLLQEEIDEQQQETPGVLSVFRELNPNEMVARNTPKFDVERKEGGETRVEIYCAAKPGLLLSTVSTLENLGLDIQQCVVSCFNDFGMHASCSEMQRERISADAIKQELFKNAGYGGGCL

SEQ ID NO: 80187 - protein, 133 aa, Setaria italica
  misc_feature (23)..(23): Xaa can be any naturally occurring amino acid
  Transcript Sequence Number=SeqID_14213
  Gene Ontology: Mol. function=peptidase activity; Biological process =lipid transport
  Homolog annotation: Hit_ID=B6U491; Match level="QueryCoverage=57%, HitCoverage=33%, E-value=3e-13, Identity=56%"; Hit description =Protease inhibitor/seed storage/LTP family protein
  Pfam annotation: Domain name=Tryp_alpha_amyl; Domain location=35-109; Score=33.9; E_value=6.6e-07; Accession=PF00234.14; Description =Protease inhibitorseed storageLTP f
  Subcellular localization annotation: CTP_CleavageSite=76; ConfidenceScore=5.70e-01
MCAVTAQPQPLPVPQPTTTTPMXGAPAVPSLPAACPPAQATLAPCLGFFTSNSSSPPAECCAQIRAMFQSQAPCLCAAMASGPAAQLGGLGSALGQLLPSSCDLPANACSGTTTGGAPAGPTTTPAPGSGATA

SEQ ID NO: 80188 - protein, 123 aa, Setaria italica
  Transcript Sequence Number=SeqID_14214
  Gene Ontology: Mol. function=transporter activity; Cellular component= membrane; Biological process=transport
  Homolog annotation: Hit_ID=Q10BC0; Match level="QueryCoverage=100%, HitCoverage=32%, E-value=1e-63, Identity=96%"; Hit description =Permease I, putative, expressed
MAAPAPKQEELQPHAVRDQLPAVSYCLTSPPPWPEAILLGFQHYLVMLGTTVIIPTALVPQMGGGNEEKARVIQTLLFVAGINTLIQSFLGTRLPAVIGGSYTFVAPTISIILAGRYSGITDP

SEQ ID NO: 80189 - protein, 459 aa, Setaria italica
  Transcript Sequence Number=SeqID_14215
  Gene Ontology: Mol. function=ATPase activity, coupled to transmembrane movement of substances; Cellular component=integral to membrane; Biological process=transport
  Homolog annotation: Hit_ID=Q5JJV5; Match level="QueryCoverage=100%, HitCoverage=84%, E-value=0.0, Identity=59%"; Hit description =Putative ABC transporter
  Pfam annotation: Domain name=ABC_membrane_2; Domain location=45-326; Score=336.1; E_value=7e-98; Accession=PF06472.7; Description=ABC transporter transmembrane region
GTLAYTQSGRWNKQQKENACSDGNAHTGTKDRNGQNGIDGKLVKPRKKKSGLKSLHFLAAILLKKIGPNGSNYLLGLIITAVLRTAVGHRLAKVQGYLFRAAFLRRVPTFTHLIIENLLLCFLQSTIYQTSKYLTGSLGLRFKKILTDLVHADYFENMVYYKISHVDHRISNPEQRIASDIPKFCSELSDLVQDDLAAIAEALIYIWRLCSYASPKYVLWILAYVIGAGGTIRKFSPAFGKLKSMEQQLEGEYRQVHSRLRTHAESVAFYGGENREASHIMQRFGALVKHLNVVLHENWWFGMIQDFLLKYLGATVGVILIIEPFFAGNLRPESSTLGRAEMLSNLRYHTSVIISLFQSLGTLSISSRRLNILSGYANRIHELLEVSRELSGVRDRLMTQNSSAANYISEANYIEFSGVKVVTPSGNVLVDDLTLRLESGSNLLITGPNGSGKSSLFRV

SEQ ID NO: 80190 - protein, 229 aa, Setaria italica
  Transcript Sequence Number=SeqID_14216
QLGCGYGLPGIFACLKGVTTVHFQDPSAEVVRCKTIPNVLANLEQAQDKQNHHQGSPLTPSRQQLPQDIHFYAGEWEELHTVLSIIQEDDVDASSGIGLGFCEDDLLDGYNSQDGNNICHETSSRRSRKLSSSRAWERGNETSTGDGGYDIVLVNEIPYSASSLQNLYLLIKKCLRPPYGVLYLAARKNYIGSSSAVRQLRALVDEEGIFGVHLVSEPPEREIWKFFFK

SEQ ID NO: 80191 - protein, 58 aa, Setaria italica
  misc_feature (39)..(39): Xaa can be any naturally occurring amino acid
  misc_feature (45)..(45): Xaa can be any naturally occurring amino acid
  Transcript Sequence Number=SeqID_14217
  Gene Ontology: Mol. function=protein dimerization activity
  Homolog annotation: Hit_ID=B6SSW7; Match level="QueryCoverage=100%, HitCoverage=8%, E-value=2e-19, Identity=84%"; Hit description =Transposon protein
MGNSTLTDMTLLPGVEPIVAGLAAGSSSPGQEAKAREPXKSLYLXRFFDTAPDGKSRI

SEQ ID NO: 80192 - protein, 41 aa, Setaria italica
  Transcript Sequence Number=SeqID_14218
  Homolog annotation: Hit_ID=B6SSW7; Match level="QueryCoverage=100%, HitCoverage=5%, E-value=4e-16, Identity=97%"; Hit description =Transposon protein
MGNSTLTDMTLLPGVEPIVAGLAAGSSSPGQEGKAKKKPMK

SEQ ID NO: 80193 - protein, 315 aa, Setaria italica
  misc_feature (223)..(223): Xaa can be any naturally occurring amino acid
  Transcript Sequence Number=SeqID_14219
  Gene Ontology: Mol. function=protein dimerization activity
  Homolog annotation: Hit_ID=B6SSW7; Match level="QueryCoverage=99%, HitCoverage=44%, E-value=1e-145, Identity=78%"; Hit description =Transposon protein
  Pfam annotation: Domain name=zf-BED; Domain location=42-84; Score =28.8; E_value=2.2e-05; Accession=PF02892.7; Description=BED zinc finger
MGNSTLTDMTLLPGVEPIVAGLAAGSSSPGQEGKAKKKPMKSLYLKFFDTAPDGKSRICRLCRKSYCMTTATGNLGKHLNNRHPGYHQLPEGPSFPAQNTIQTTMVTRSRKPHVPVRARAQAQPQVQTQSQIQDQAQAQAKVHSQPKAKPTVDIDHVNWLLLRWLIGSSLPPSTLEDNMLIDSCKYLSSSVRLWPKEKVQEITLEVFRSMKEDVKASLQCISXRRTDTLDFWTSYEKILYMSIRCHWIDENWVSQKVLLDVCRIPYPCTGSKILQVLTDVLVTYNIDSRVLACTHNNSQHSIDACHELEQELKYP

SEQ ID NO: 80194 - protein, 83 aa, Setaria italica
  Transcript Sequence Number=SeqID_14220
  Gene Ontology: Mol. function=nucleic acid binding; Cellular component= spliceosome; Biological process=mRNA processing
  Homolog annotation: Hit_ID=B9RH99; Match level="QueryCoverage=63%, HitCoverage=5%, E-value=3e-15, Identity=67%"; Hit description=RNA -binding protein, putative
  Pfam annotation: Domain name=RRM_1; Domain location=34-83; Score =13.3; E_value=0.012; Accession=PF00076.14; Description=RNA recognition motif. (a.k.a. RRM, RBD, o
MGKRKQRGGGGGEPAGEGEAATGGTGGGHSPSTVFVSNLPYTFKSSDLEAVFSEVGPVRRCFMVAEKGSETSRGFGFVQFATV

SEQ ID NO: 80195 - protein, 245 aa, Setaria italica
  misc_feature (18)..(18): Xaa can be any naturally occurring amino acid
  misc_feature (189)..(189): Xaa can be any naturally occurring amino acid
  misc_feature (222)..(222): Xaa can be any naturally occurring amino acid
  Transcript Sequence Number=SeqID_14221
  Homolog annotation: Hit_ID=B9RZY0; Match level="QueryCoverage=67%, HitCoverage=7%, E-value=6e-12, Identity=29%"; Hit description=ATP binding protein, putative
MQRVSTVELFALCSEIIXFGQDLKRCIRESRSYIVNMASLIEEKGRSTKQFQHLNANTSGSACQQVESHTCQCGSSKPDFSQSDYITDYASLRREFDRKINIAEGLSFDLKLLQESTSNAKDMKDKADEISTALSNVQRELDIKTDAMENMLRKQKALEEELVENGAVLTVLRSELERSQSLSSALLKXNKDLRVMLEEETVKNSEIKVLLEDKVNVIEGLXSQILLLNRSEVGQLMSDIEELKN

SEQ ID NO: 80196 - protein, 61 aa, Setaria italica
  misc_feature (58)..(58): Xaa can be any naturally occurring amino acid
  Transcript Sequence Number=SeqID_14222
CCYYGENASCETSEITFSKIVGGKVPVCLSYYSFLDRVTSIYFYVFAFISFTKKKKKXKKK

SEQ ID NO: 80197 - protein, 418 aa, Setaria italica
  Transcript Sequence Number=SeqID_14223
  Homolog annotation: Hit_ID=A8QNS5; Match level="QueryCoverage=48%, HitCoverage=97%, E-value=2e-31, Identity=43%"; Hit description=91A protein (Fragment)
  Subcellular localization annotation: CTP_CleavageSite=43; ConfidenceScore=5.14e-01
PLPSPRRTRPSVLTSCCLRFRSRSGCARFEACLVVRVPCSISRASRFVGIWCLGPICRFERKAIWGVGRGDRRSYKERETSLCNLGLSLWMGEPLADFSAECVSSSSCLCCNTSEKPGCEHSYACWKDGQDDLVVEEIGMALTEVMQAYGNEDNDEGSDLDEDSSDADNDDPVLSMESDSTDDLVDIDSELVISPASPSGDASESSISKSVDDKSSIHGIPRLVSAMKGTRAKQGIMTKLSVSWAPDVYDPPVTSASHTVRGHQRSSRKGHYKYKPSKSSSSSSRSSSGSKKDKKHSRHSSSISSSSKKDRTHSHRSASSSGSNRTDTSSSHYRKAHSGGGINSRTVTCVPESAKVSPLVLAESAALPEIVPVLKTMEPIKYATSCGKEKPFALLSRQFSPARYKGMFSFWSQNQLAS

SEQ ID NO: 80198 - protein, 154 aa, Setaria italica
  Transcript Sequence Number=SeqID_14224
  Gene Ontology: Mol. function=protein binding; Cellular component =cytoplasm; Biological process=vesicle docking during exocytosis
  Homolog annotation: Hit_ID=B6SHD7; Match level="QueryCoverage=85%, HitCoverage=19%, E-value=3e-71, Identity=99%"; Hit description=SNARE- interacting protein KEULE
RFTCALIKAGLLFEMLRSTRKNSKSTWKVLIMDKFTVKIMSYACKMADITEEGVSLVEDLYKRRQPLPSLDAIYFIQPTKENIVMFLSDMSGRSPLYKKAYVFFSSPVHKELVAQIKKDSSVLPRIGALSEMNLEYFAIDSQVTIFLQMDHLGC

SEQ ID NO: 80199 - protein, 305 aa, Setaria italica
  misc_feature (248)..(248): Xaa can be any naturally occurring amino acid
  misc_feature (289)..(289): Xaa can be any naturally occurring amino acid
  misc_feature (300)..(300): Xaa can be any naturally occurring amino acid
  Transcript Sequence Number=SeqID_14225
  Gene Ontology: Mol. function=protein binding; Cellular component =cytoplasm; Biological process=vesicle docking during exocytosis
  Homolog annotation: Hit_ID=B6SHD7; Match level="QueryCoverage=95%, HitCoverage=44%, E-value=1e-157, Identity=90%"; Hit description =SNARE-interacting protein KEULE
MLDLLASWFQPTFCLHCMKMHCSIYTLQEFPRVHYRVAKTIDASTMTTLRDLVPTKLAAGVWNCLAKYKTTIPEFPQTETCELLIVDRSIDQIAPIIHEWTYDAMCHDLLCMDGNKYVHEVPSKNGSATEKKEVLLEDHDPIWLELRHAHIADASERLHDKMTNFVSKNKAAQLHQARNGGEVSTRDLQKMVQALPQYSDQIDKLSLHVEIAGKLNNIIREQCLRDVGQLEQDLVFGDAGTKELINFXRTQLGVSRENKLRLLMIIAALNPEKFESDKGAKLMQLAGLXSVDDMIAVNNXRCLCG

SEQ ID NO: 80200 - protein, 639 aa, Setaria italica
  Transcript Sequence Number=SeqID_14226
  Gene Ontology: Mol. function=protein binding; Cellular component =cytoplasm; Biological process=vesicle docking during exocytosis
  Homolog annotation: Hit_ID=B6SHD7; Match level="QueryCoverage=100%, HitCoverage=100%, E-value=0.0, Identity=90%"; Hit description=SNARE -interacting protein KEULE
  Pfam annotation: Domain name=Sec1; Domain location=41-625; Score =211.5; E_value=2.2e-60; Accession=PF00995.15; Description=Sec1 family
MSLDSDTSSQGGDHRSFRHITRDRLLFEMLRSTRKNSKSTWKVLIMDKFTVKIMSYACKMADITEEGVSLVEDLYKRRQPLPSLDAIYFIQPTKENIVMFLSDMSGRSPLYKKAYVFFSSPVHKELVAQIKKDSSVLPRIGALSEMNLEYFAIDSQGFTTDHERALEELFSENAEGSHKYNACLNTMATRISTVFASMREFPRVHYRVAKTIDASTMTTLRDLVPTKLAAGVWNCLAKYKTTIPEFPQTETCELLIVDRSIDQIAPIIHEWTYDAMCHDLLCMDGNKYVHEVPSKNGSATEKKEVLLEDHDPIWLELRHAHIADASERLHDKMTNFVSKNKAAQLHQFMLGAVVETLHVEIAGKLNNIIREQCLRDVGQLEQDLVFGDAGTKELINFLRTQLGVSRENKLRLLMIYAALNPEKFESDKGAKLMQLAGLSVDDMIAVNNMRCLCGPDTKKSSGGGFTLKFDVHKKKHAHRKERTWEESAWALSRFYPVLEELIEKLSKGELPKDEYNCMNDPSPSAHGVPTSSSVRTSPAHSMRSRRTGGTWARPRGSDDGYSSDSVLKHASSDFKKLGQRIFVFVIGGATRSELRAAHKLSSKLKREVILGSSSLDDPPQFITKLKLMSAELSLDDLQI

SEQ ID NO: 80201 - protein, 271 aa, Setaria italica
  Transcript Sequence Number=SeqID_14227
  Homolog annotation: Hit_ID=B6SZ63; Match level="QueryCoverage=98%, HitCoverage=40%, E-value=1e-123, Identity=77%"; Hit description =Methyltransferase small domain
  Pfam annotation: Domain name=PPR; Domain location=130-164; Score =27.4; E_value=5.8e-05; Accession=PF01535.12; Description=PPR repeat
  Pfam annotation: Domain name=PPR; Domain location=165-199; Score =10.6; E_value=0.49; Accession=PF01535.12; Description=PPR repeat
  Pfam annotation: Domain name=PPR; Domain location=95-129; Score=23.7; E_value=0.00073; Accession=PF01535.12; Description=PPR repeat
  Pfam module annotation: Pfam domain module=PPR::PPR::PPR; Domain location=130-164::165-199::95-129
NRNSYKNNRTVQLNFSMLNAGFEPNEITLVSAVSAVAGSGTLDQGRWIHDYIINRSIRVTDNLSAGLIDMYAKCGSITDALQLFNHASDKFSSISPWNAMICSLAVHGYAHMSLDLFSHLQRTDIKPNSITFIGVLNACCHTGMVTEGKQHFESMREFGIQPTIKHYGCMVDLLGRAGYLEEAEQLVAKMPMKADNVIWGSILSAAMAHGNVGLGEKAAEELAKLDQAHGASKVALSNIYAYAGRWANVSVVRKELKDENLERQSGSSGIV

SEQ ID NO: 80202 - protein, 77 aa, Setaria italica
  Transcript Sequence Number=SeqID_14228
APATLSFDTAESVIRDGDCRWKQHGQWQLPFTGRAYYEHRLEAWVGLSRDPRTIGHLCSCDAVPTNASQQQCPAMKR

SEQ ID NO: 80203 - protein, 54 aa, Setaria italica
  Transcript Sequence Number=SeqID_14229
AKMEGAKFLVPPTNPLAPQEVLKWTKGAKSGPLIQNSFPCPSLSPPSHSSNMGK

SEQ ID NO: 80204 - protein, 52 aa, Setaria italica
  Transcript Sequence Number=SeqID_14230
GNRGRARRRERSAGEERGEGYRWKNGGGGPLLALLVNFSTSWRANGLWGAKI

SEQ ID NO: 80205 - protein, 164 aa, Setaria italica
  Transcript Sequence Number=SeqID_14231
  Gene Ontology: Mol. function=oligopeptide transporter activity; Cellular component=integral to membrane; Biological process =oligopeptide transport
  Homolog annotation: Hit_ID=B9SWQ1; Match level="QueryCoverage=100%, HitCoverage=24%, E-value=7e-61, Identity=69%"; Hit description =Oligopeptide transporter, putative
MEPQQVELSHLDGRDARPGTNGGRTDSAEEVDDCPIEEVRLTVPITDNPALPALTFRTWFLGLISCALLAFSNQFFGYRQNPLYISSLSVQIVVLPLGKLMAACLPKKAVRIRGTKWSFSLNPGPFNLKEHVLITIFANTGSNSVYAVGIITIVKAFYHREIHP

SEQ ID NO: 80206 - protein, 135 aa, Setaria italica
  misc_feature (129)..(129): Xaa can be any naturally occurring amino acid
  Transcript Sequence Number=SeqID_14232
  Gene Ontology: Mol. function=protein serine/threonine kinase activity; Cellular component=integral to membrane; Biological process=protein amino acid phosphorylation
  Homolog annotation: Hit_ID=Q25AB6; Match level="QueryCoverage=98%, HitCoverage=80%, E-value=6e-43, Identity=56%"; Hit description =B0808H03.2 protein
YTEITLPVVSSLLILICMWLVWIYNCQAKQRNKKIWKKMISEALSTSDELVDGKFPFISFREIVLATNNFSSSNMLGHGGFGNVYKGTLECGKPIAVKRLSKGSGQGILEFRNEAILIAKLQHRNLVKXLGFCIH

SEQ ID NO: 80207 - protein, 188 aa, Setaria italica
  misc_feature (11)..(11): Xaa can be any naturally occurring amino acid
  Transcript Sequence Number=SeqID_14233
  Gene Ontology: Cellular component=mitochondrion
  Homolog annotation: Hit_ID=A2Q4J6; Match level="QueryCoverage=98%, HitCoverage=36%, E-value=3e-43, Identity=30%"; Hit description =Tetratricopeptide-like helical
  Pfam annotation: Domain name=PPR; Domain location=105-139; Score=8.3; E_value=0.94; Accession=PF01535.12; Description=PPR repeat
  Pfam annotation: Domain name=PPR; Domain location=4-38; Score=17.0; E_ value=0.077; Accession=PF01535.12; Description=PPR repeat
  Pfam annotation: Domain name=PPR; Domain location=70-104; Score=44.8; E_value=3.5e-10; Accession=PF01535.12; Description=PPR repeat
  Pfam module annotation: Pfam domain module=PPR::PPR::PPR; Domain location=105-139::4-38::70-104
TDQFTFSTMAXVFSRLGLLEHAKQAHAGLIQKGLPLDIVGNTALVDLYCKWGRMEDARNVFERMPKRNLISWNALIAGYGYHGMGDKAIEMFERLVAEGVVPNHVTFLAVLNACRFSGLVDKGKRIFQLMTRNPKTKPRAMHYACVIELFGREGLLDEAYSMIRRAPFTPTANMWGALLTASRVHKNM

SEQ ID NO: 80208 - protein, 56 aa, Setaria italica
  misc_feature (49)..(49): Xaa can be any naturally occurring amino acid
  Transcript Sequence Number=SeqID_14234
MDSAKAWVAANYAEPMASMQHSLRVAYVVFSFCAAFFLGGIKAMVVGPXAAALMIL

SEQ ID NO: 80209 - protein, 105 aa, Setaria italica
  Transcript Sequence Number=SeqID_14235
  Gene Ontology: Mol. function=transcription factor activity; Cellular component=nucleus
  Homolog annotation: Hit_ID=Q7XAD6; Match level="QueryCoverage=83%, HitCoverage=28%, E-value=3e-16, Identity=55%"; Hit description=Ap25
  Pfam annotation: Domain name=AP2; Domain location=2-37; Score=22.1; E_ value=0.0023; Accession=PF00847.12; Description=AP2 domain
EIRDPKKRGSRVWLGTYDTAIEAARAYDRAAFRMRGAKAILNFPNEVGSRGADFLAPPPPQASQNKRKLQHDAAGAEPAAKSVKAEAFGSPASSSLTSSLSPATT

SEQ ID NO: 80210 - protein, 573 aa, Setaria italica
  Transcript Sequence Number=SeqID_14236
  Gene Ontology: Mol. function=protein serine/threonine kinase activity; Biological process=protein amino acid phosphorylation
  Homolog annotation: Hit_ID=B6SKG1; Match level="QueryCoverage=100%, HitCoverage=100%, E-value=0.0, Identity=82%"; Hit description =Protein kinase G11A
  Pfam annotation: Domain name=Pkinase; Domain location=184-524; Score =232.6; E_value=1e-66; Accession=PF00069.17; Description=Protein kinase domain
  Pfam annotation: Domain name=Pkinase_Tyr; Domain location=184-518; Score=-67.9; E_value=3.3e-09; Accession=PF07714.9; Description =Protein tyrosine kinase
  Pfam module annotation: Pfam domain module=Pkinase::Pkinase_Tyr; Domain location=184-524::184-518
MASAAAPEVIAEKKCGKTVAGNAAPLTSQGHSKESAENASKLGPASLSEITDGDAPTSIGVRESSKDISDSADGSVKLDDSEDAEKSSLRGSVKDSSVSAKCSDRGSSLSKASGSAKVSDQAADMIESGKSSLYRASGGSDVSDESTCSSICSSVSKPHKSNDSKWEAIQAVRTKEGSVGLGHFRLLKRLGCGDIGSVYLSELSGTKCYFAMKIMDKASLASRKKLLRAQTEREILQCLDHPFLPTLYTHFETDKFSCLVMEFCPGGDLHTLRQKQPGKYFPEQAAKFYVAEVLLALEYLHMLGIIYRDLKPENVLVREDGHIMLSDFDLSLRCAVSPALLRYSNPSADNQKGNPAYCVQPVCIEPACIQPSCVTTTTCFSPRFFSSKSKKEKKEKKAKADLANQVRPLPELVAEPTDARSMSFVGTHEYLAPEIIKGEGHGSAVDWWTFGIFLYELLFGKTPFKGSGNRATLFNVVGQPLRFPESPVVSFAARDLIRGLLIKEPQHRLAYKRGATEIKQHPFFEGVNWALIRCATPPDIPKPVEIPRSVASSSQKATSAAEKGSDYLELEFF

SEQ ID NO: 80211 - protein, 111 aa, Setaria italica
  Transcript Sequence Number=SeqID_14237
RSRRAVAKPRKQRRDDDSADEEEQTTRAWRRRRSGGVLSRAGGGDGAALAAVGTVVTVKVVMRRKDAEKLAARLNARERKARMAELKGELRAGGDGGGACWSPQLAPIKEN

SEQ ID NO: 80212 - protein, 56 aa, Setaria italica
  Transcript Sequence Number=SeqID_14238
LCCLKFRNKITFQMNDEQHKNDHHLSLMNSKLFKPYMCTQSPSNKSHIFIPTKLVV

SEQ ID NO: 80213 - protein, 160 aa, Setaria italica
  misc_feature (56)..(56): Xaa can be any naturally occurring amino acid
  Transcript Sequence Number=SeqID_14239
  Gene Ontology: Mol. function=heat shock protein binding; Biological process=protein folding
  Homolog annotation: Hit_ID=Q108V8; Match level="QueryCoverage=100%, HitCoverage=5%, E-value=1e-73, Identity=85%"; Hit description=DNAJ heat shock N-terminal domain-containing protein, putative, expressed
DLIWNERTRQELKEALQAEVHNLDVEKERTDDIVPGGSVTEDAGGSDNLPPETRRXISWNYAEFSVRYPSLFKEVCVGQYYLRLLLESGSNYRAQDFPLRDPVAFFRALYHRFLCDADIGLTVDGAVPDELGSSDDWCDMGRLDGFGGGGGSSVRELCSR

SEQ ID NO: 80214 - protein, 77 aa, Setaria italica
  Transcript Sequence Number=SeqID_14240
  Subcellular localization annotation: CTP_CleavageSite=48; ConfidenceScore=5.32e-01
VSDAHACSQTLGKDSSDDVNFSQGKSPTSTIRRKTGLKPKQVPRKPVRQKEALSSLDADSKPAETTESIEPNAAVRP

SEQ ID NO: 80215 - protein, 386 aa, Setaria italica
  Transcript Sequence Number=SeqID_14241
  Gene Ontology: Mol. function=proline dehydrogenase activity; Cellular component=mitochondrial matrix; Biological process=glutamate biosynthetic process
  Homolog annotation: Hit_ID=B6SSZ0; Match level="QueryCoverage=97%, HitCoverage=76%, E-value=1e-174, Identity=81%"; Hit description =Proline oxidase
  Pfam annotation: Domain name=Pro_dh; Domain location=16-370; Score =260.9; E_value=3e-75; Accession=PF01619.10; Description=Proline dehydrogenase
AAARATAYKHFCAGETADEAAAVVRRLWRGGMGGILDYGIEDAEDGDACDRNAAGFIAAVDVAASLPPGSASVCIKITALCPIALLEKTSDLLRWQKKHPSFSLPWKAHSFPILSDSSPLYLTASEPPALTAEEERELELAHERLLAVCARCVEHGIPLLVDAEYATVQPAIDYFTLVGALAVNGEARSADGERPIVHGTIQAYLRDARDRLEAMVRAAERERVRLGLKVVRGAYLTRETRLAASLGVPSPIHGSIQDTHDCYNGCAAFLLDRVRRGSASVMLATHNVESGQLAAAHAQELGIPKGDRNLQFAQLMGMADGLSLSLRNAGFQVSKYLPYGPVEQIIPYLIRRAEENRGLLSASSFDRQLLRKELGRRVKAAVVGRE

SEQ ID NO: 80216 - protein, 134 aa, Setaria italica
  Transcript Sequence Number=SeqID_14242
  Gene Ontology: Mol. function=microtubule motor activity; Cellular component=microtubule associated complex; Biological process =microtubule-based process
  Homolog annotation: Hit_ID=B6UAF6; Match level="QueryCoverage=67%, HitCoverage=50%, E-value=2e-36, Identity=79%"; Hit description =Microtubule motor
  Pfam annotation: Domain name=Dynein_light; Domain location=36-126; Score=84.7; E_value=3.4e-22; Accession=PF01221.10; Description =Dynein light chain type 1
VEPVLLKAAPRVLEEGKGGKEDTKAKERAAAEAKGEGKVAVCVRAADMPLPLQRRAVRIAVEAVAAMPRLQSKRLALALKKDFDTTYGPAWHCIVGTSFGSYVTHSLGGFLYFSVDKVYILLFRTAVEPLAHPE

SEQ ID NO: 80217 - protein, 89 aa, Setaria italica
  Transcript Sequence Number=SeqID_14243
DQPEAEIVEVGAAEPAEGSGAADQGKLRKTLMLLFQLDDSGSGAANPSQGKDPQPAEFQFGSGGGDRGGKRKGPGSWLRSILPTRGMRW

SEQ ID NO: 80218 - protein, 86 aa, Setaria italica
  Transcript Sequence Number=SeqID_14244
  Homolog annotation: Hit_ID=B6TSR3; Match level="QueryCoverage=79%, HitCoverage=23%, E-value=1e-25, Identity=82%"; Hit description =Phloem-specific lectin
PYLVRRGEGGVAVDGDAGCRLWLDRASGAKCYALSARRLSLPWEDGEFSWRWAAHPLSRFGEVAKLMDCTFLDIYGRLPAAALTPA

SEQ ID NO: 80219 - protein, 116 aa, Setaria italica
  Transcript Sequence Number=SeqID_14245
  Subcellular localization annotation: CTP_CleavageSite=74; ConfidenceScore=5.13e-01
SYERKGERNSMVLLQPVGIHPSHTKSHHFPPLSKSPTRVNGRPPPRLPTRVQSCRVPPGHALHASDERTRHACSCSYCDGYEDATPLLLLSKKPPESYQKGRADGKKKKMKNRGGA

SEQ ID NO: 80220 - protein, 415 aa, Setaria italica
  Transcript Sequence Number=SeqID_14246
  Gene Ontology: Mol. function=protein binding; Cellular component =membrane; Biological process=induction of apoptosis
  Homolog annotation: Hit_ID=Q10IH0; Match level="QueryCoverage=92%, HitCoverage=91%, E-value=1e-137, Identity=67%"; Hit description=TMS membrane family protein, putative, expressed
  Pfam annotation: Domain name=Serinc; Domain location=8-414; Score =524.5; E_value=1.4e-154; Accession=PF03348.7; Description=Serine incorporator (Serinc)
  Subcellular localization annotation: CTP_CleavageSite=21; ConfidenceScore=5.33e-01
MWCASCLASACAGCACNLCTSAASAVSRRSARLAYCGLFAASLILSFLLRQFATPLLKHIPWINAFEHTPPDEWFQMNAVLRVSLGNFLFFAIFAIMMIGIKDQNDRRDAWHHGGWVAKIAVWAVLIVLMFCVPNIVTTIYEVLSKFGSGLFLLVQVVMLLDFTNNWNDSWVEKDEQKWEIALLVVTVVCYLSTFAFSGVLFMWFNPSGHDCGLNVFFIVMTLILAFAFAIVALHPQVNGSIMPASVISVYCAYLCYSSLSSEPDGYECNGLHMHSKQVSMSALILGMLTTVLSVVYSAVRAGSSTTFLSPPSSPRSGAKNPLLGDEETGKGVDKDTEPRPVSYSYTFFHLIFALASMYSAMLLTGWTSAASEKSELMDVGWTTVWVRICTEWVTAALYIWTLIAPLLFPDRDFS

SEQ ID NO: 80221 - protein, 396 aa, Setaria italica
  misc_feature (385)..(385): Xaa can be any naturally occurring amino acid
  Transcript Sequence Number=SeqID_14247
  Gene Ontology: Mol. function=transferase activity, transferring glycosyl groups; Cellular component=plastid outer membrane; Biological process=biosynthetic process
  Homolog annotation: Hit_ID=B9RDM5; Match level="QueryCoverage=93%, HitCoverage=77%, E-value=1e-148, Identity=65%"; Hit description=UDP -galactose:MGDG galactosyltransferase, putative
  Pfam annotation: Domain name=Glycos_transf_1; Domain location=138 -305; Score=-3.7; E_value=0.0011; Accession=PF00534.12; Description =Glycosyl transferases group 1
MGIKDNLTYLFMMQFSTEMRSILPVGDITECIPDEVADIAVLEEPEHLNWYHHGRRWKNKFRRVIGIVHTNYLAYVRREKNGQVIACFLKYANTWVTRIYCHKIIRLSGATQDLPRSVICNVHGVSPKFLEVGKLKLRQLQSGEKAFTKGAYYIGKMVWSKGYRELLDLLSKYQTKLAGLEVDLYGSGEDSDEVRESANRLSLTVNVHPGRDHADPLFHEYKVFINPSTTDVVCTTTAEALAMGKIVICANHPSNEFFKQFPNCRIYNNEEEFVQLTLNALSEQPAQLTDTQRYELSWEAATERFIEAADINPRAPESRTHPTSRASLPAFLRTRRLKQNLEDASVYLHQALSGLEVTRCAFGAVPKTLQPDEQLCKDLGLAPPXKRKRLKFRLTT

SEQ ID NO: 80222 - protein, 101 aa, Setaria italica
  Transcript Sequence Number=SeqID_14248
  Gene Ontology: Mol. function=sequence-specific DNA binding; Cellular component=nucleus; Biological process=regulation of transcription, DNA-dependent
  Homolog annotation: Hit_ID=B6U513; Match level="QueryCoverage=100%, HitCoverage=74%, E-value=9e-20, Identity=54%"; Hit description=GATA transcription factor 22
  Pfam annotation: Domain name=GATA; Domain location=1-25; Score=30.2; E_value=8.2e-06; Accession=PF00320.19; Description=GATA zinc finger
WRSGPTGPRSLCNACGIRYRKKRRQELGLDHKQQQQQNQQQRQQHNGEAKTEVKDSSSNSSSSGSSNLQAVQKRRLLMGVEEAALLLMTLSSSPTSTLLHG

SEQ ID NO: 80223 - protein, 132 aa, Setaria italica
  Transcript Sequence Number=SeqID_14249
DVGKDTFKETKVAESTPSSAKPTYTQQPAITPSRQIHVGEARDKSMQSRETIPEQQKMVDRKTGISGEQSSDRQKAIRPPRQVAAAEDAPTGDTIQSPYIPDSSNESRGTFEEAIGPGSTLPKAQALDAQDS

SEQ ID NO: 80224 - protein, 210 aa, Setaria italica
  Transcript Sequence Number=SeqID_14250
  Gene Ontology: Mol. function=riboflavin synthase activity; Cellular component=chloroplast; Biological process=riboflavin biosynthetic process
  Homolog annotation: Hit_ID=B6TDF2; Match level="QueryCoverage=100%, HitCoverage=70%, E-value=1e-98, Identity=88%"; Hit description =Riboflavin synthase alpha chain
  Pfam annotation: Domain name=Lum_binding; Domain location=1-89; Score= 37.4; E_value=5.5e-08; Accession=PF00677.9; Description=Lumazine binding domain
  Pfam annotation: Domain name=Lum_binding; Domain location=102-188; Score=89.9; E_value=9.2e-24; Accession=PF00677.9; Description =Lumazine binding domain
  Pfam module annotation: Pfam domain module=Lum_binding::Lum_binding; Domain location=1-89::102-188
GRVRRLGPPLAPSGGGGGEAPGLDLEVETKDLLAGTHLGDSVAVDGTCLTVAAIDPAASTLTFGVAPETLRRTSLGERAPGDGVNLERALTPSSRMGGHFVQGHVDGTGEIAAFRPDGDSLWVTVRAPPEILRLLVPKGFVAVDGTSLTVVSVDDEGGWFDFMLVRYTQDNIVLPTKKVGDKVNLEADILGKYVEKLLAGRVEAMAKADS

SEQ ID NO: 80225 - protein, 98 aa, Setaria italica
  Transcript Sequence Number=SeqID_14251
  Homolog annotation: Hit_ID=Q2R047; Match level="QueryCoverage=100%, HitCoverage=10%, E-value=8e-35, Identity=69%"; Hit description=Salt -inducible protein, putative
  Pfam annotation: Domain name=PPR; Domain location=59-93; Score=39.9; E_value=1e-08; Accession=PF01535.12; Description=PPR repeat
LGIKPDVVAYTVLLDVHLRKTLYRQWQGIAKDTRSLILRSKHKTWLSNMKNNEIEPDVAYYTVLIDGQCKAAYLDEARELFDEMLAKGLTPDVYTYTS

SEQ ID NO: 80226 - protein, 100 aa, Setaria italica
  misc_feature (38)..(38): Xaa can be any naturally occurring amino acid
  Transcript Sequence Number=SeqID_14252
  Gene Ontology: Mol. function=pyridoxal phosphate binding; Cellular component=chloroplast; Biological process=cysteine biosynthetic process from serine
  Homolog annotation: Hit_ID=Q5N761; Match level="QueryCoverage=100%, HitCoverage=25%, E-value=9e-36, Identity=74%"; Hit description =Cysteine synthase
VISGDNPGYIPSILDIQLIDEVVKVSTAQAVDSARELXTKKGLLVGISSGAAAVAAINVAKRPENAGKLIAAIFPSFGERYLSSILFRPIYDSVRRMRKK

SEQ ID NO: 80227 - protein, 62 aa, Setaria italica
  Transcript Sequence Number=SeqID_14253
RTIQRRERRPAGMSYSLRRSGSAFCIFPETTFFTQISRYDKISPQGLGCMSDFALNICANGT

SEQ ID NO: 80228 - protein, 170 aa, Setaria italica
  Transcript Sequence Number=SeqID_14254
  Homolog annotation: Hit_ID=Q70VA9; Match level="QueryCoverage=100%, HitCoverage=100%, E-value=2e-61, Identity=63%"; Hit description=Cp protein
  Pfam annotation: Domain name=DUF538; Domain location=53-161; Score =174.7; E_value=2.6e-49; Accession=PF04398.4; Description=Protein of unknown function, DUF538
MDQVLNKVGSYWFSKRASKEIDSIGSDISSISSSIGGSAKWMVNKIKGKMQKALPDLLKEYDMPAGLFPRDATNYEFNEETKKLTVYIPSACDVGYKDSSVLRFFTCVTGYLEKGKFSDIEGLKTKVLVWTKVTAIKTEGPKVHFTAGVKKTRSRDAYEVVRDGITIDKF

SEQ ID NO: 80229 - protein, 152 aa, Setaria italica
  Transcript Sequence Number=SeqID_14255
  Gene Ontology: Mol. function=metalloendopeptidase activity; Cellular component=mitochondrial matrix; Biological process=proteolysis
  Homolog annotation: Hit_ID=Q9LJL3; Match level="QueryCoverage=88%, HitCoverage=12%, E-value=8e-46, Identity=61%"; Hit description =Presequence protease 1, chloroplastic/mitochondrial
TKKNKNKGKVVKLILRSNLRDLETKIDQDWDSISSSLEEMRKSIFSKNGCLINLTSDGKNLEKSSQHIAKFLDSLPSSPSLGSDPWLSRLPYVNEAIVVPTQVNYVGKAGNLYQSGYQLNGSAYVISKHISNTWLWDRVRVSGGAYGGFCEF

SEQ ID NO: 80230 - protein, 61 aa, Setaria italica
  misc_feature (32)..(32): Xaa can be any naturally occurring amino acid
  Transcript Sequence Number=SeqID_14256
  Gene Ontology: Mol. function=metalloendopeptidase activity; Cellular component=mitochondrial matrix; Biological process=proteolysis
  Homolog annotation: Hit_ID=B9RY20; Match level="QueryCoverage=93%, HitCoverage=7%, E-value=1e-24, Identity=91%"; Hit description=Zinc metalloprotease, putative
MYTILQDVQFTEQQRFKQFVSQSKARMENRLXGSGHGIAAARMDAKLNAAGWISEQMGGVR

SEQ ID NO: 80231 - protein, 1024 aa, Setaria italica
  Transcript Sequence Number=SeqID_14257
  Gene Ontology: Mol. function=metalloendopeptidase activity; Cellular component=mitochondrial matrix; Biological process=proteolysis
  Homolog annotation: Hit_ID=Q9LJL3; Match level="QueryCoverage=96%, HitCoverage=91%, E-value=0.0, Identity=74%"; Hit description =Presequence protease 1, chloroplastic/mitochondrial
  Pfam annotation: Domain name=M16C_assoc; Domain location=510-759; Score=276.3; E_value=6.9e-80; Accession=PF08367.3; Description =Peptidase M16C associated
  Pfam annotation: Domain name=Peptidase_M16; Domain location=78-229; Score=-19.9; E_value=0.011; Accession=PF00675.12; Description =Insulinase (Peptidase family M16)
  Pfam annotation: Domain name=Peptidase_M16_C; Domain location=245 -433; Score=103.8; E_value=5.9e-28; Accession=PF05193.13; Description= Peptidase M16 inactive domain
  Pfam annotation: Domain name=Peptidase_M16_C; Domain location=769 -937; Score=21.2; E_value=0.0013; Accession=PF05193.13; Description =Peptidase M16 inactive domain
  Pfam module annotation: Pfam domain module=M16C_assoc::Peptidase _M16::Peptidase_M16_C::Peptidase_M16_C; Domain location=510-759::78 -229::245-433::769-937
RGRAAALLRAVLAGRHATAGAEAVRARRLYIALPVPYDTDDVHEYAAKLGFEKVSEQIIDECKSTAVLYKHKKTGAEVMSVANDDENKVFGIVFRTPPKNSTGIPHILEHSVLCGSKKYPLKEPFVELLKGSLHTFLNAFTYPDRTCYPVASTNTKDFYNLVDVYLDAVFFPKCVEDFQTFQQEGWHYELDNPEEEITYKGVVFNEMKGVYSQPDNIMGRVSQQALSPENTYGVDSGGDPNEIPKLTFEEFKEFHSKYYHPSNARIWFYGDDDPKERLRVLSEYLDQFEASPAPNESKVWPQRLFKEPVRVIEKYPAGQEGDLTKKYMVCTNWLLSEEPLDVETELALGFLDHLLLGTPASPLRRILLESGLGDAIVGGGVEDELLQPQFSIGLKGVSEDNIQKVEELVMQTLKNLAEEGFASEAVEASMNTIEFALRENNTGSFPRGLSLMLRSIAKWIYDMDPFEPLKYEQPLQQLKARIAEEGSKAVFSPLIEKFILNNTHRVTVEMQPDPEKASRDEAAEKEILKQVKASMTQEDLAELARATKELKEKQETPDPPEALKAVPCLSLQDIPKKPIHVPIEVGEINGVKVLQHDLFTNDVIYSEVVFDMGSMKKEHLQLLPLFCQSLLEMGTKDMDFVQLNQLIGRKTGGISVYPFTSPVRGKEDPLTRIIVRGKAMATRVEDLFNLMYTILQDVQFTEQQRFKQFVSQSKARMENRLRGSGHGIAAARMDAKLNAAGWISEQMGGVSYLEYLRDLETKIDQDWDSISSSLEEMRKSIFSKNGCLINLTSDGKNLEKSSQHIAKFLDSLPSSPSLGSDPWLSRLPYVNEAIVVPTQVNYVGKAGNLYQSGYQLNGSAYVISKHISNTWLWDRVRVSGGAYGGFCDFDTHSGVFSYLSYRDPNLLKTLEVYDETAKFLRELEMDDDALAKAIIGTIGDVDAYQLPDAKGYSSLVRYLLGITDEERQQRREEILSTNLKDFREFADAVESIKDNGVVVAVASPNDVEAANKEKQVFPEVKKCL

SEQ ID NO: 80232 - protein, 693 aa, Setaria italica
  misc_feature (398)..(398): Xaa can be any naturally occurring amino acid
  Transcript Sequence Number=SeqID_14258
  Gene Ontology: Cellular component=membrane; Biological process =intracellular protein transport
  Homolog annotation: Hit_ID=Q70KU0; Match level="QueryCoverage=33%, HitCoverage=99%, E-value=3e-76, Identity=64%"; Hit description=VHS1 protein (Fragment)
MDQSRRAVESYWRSRMVDGVTADDDKVAPVYKLEEICELLRASDASIVKEVADFVLKRLDNKSPLVKQKALRLIKYSVGKSGTDFKREMQRHSAAMRQLVHYRGHPDPLRGDALNKAVRETANEAIAAIFSTEDPKPAVATESLGKRIQGFGNTNYEPSRMDDKKSFLSELSEVVGIGSASIKQGLSNFAAAHAMMTNDNGGTYKSPNLRRSLTTESERYGRYDPSEIQSESRASSGASKNVASGSWGPTPSSSAPTDDTSSSQPGIKTREERLLETIVTASGVRLQPTRDALQIFLTEASKLDAVALSRALENKLNSPLWQVRMKAICVLEAIVRKQDTDPYSIIASYFIENTASVVKCSELPQVSLREKASKVLNMLIGEQPTGTTNLSATKAAMXPPVQMPDLIDTGNQDDLGTSSGQESNGQNTGNSAYVSSVDDLLGGEPIADTSVPADSNGSDPFADVSFHEAETKENNDLFSGLTVEEKSSAAMPDSSSSNKNELPDIFGSNPDPFIQGSVTDQGTVNDLMAGLNLNKTDQVQHAVKAEPNSNLNGSQFFDTNNQTSNMAGAAALNGILGQNSFYQQQQVPLQYSLPQHMMLNQSFPGQQLNYGAMGILLAQQQQLLQNFGNFNAGVGNSPFDSMNSGNASVLPDIFNSSSQPQNHVAVTSNSKKDDTRAFDFVSDHLAAARGSRK

SEQ ID NO: 80233 - protein, 76 aa, Setaria italica
  Transcript Sequence Number=SeqID_14259
  Subcellular localization annotation: CTP_CleavageSite=53; ConfidenceScore=5.10e-01
NAYQSWLLHVAGGPWGEEISSYYLLRHRTSSAPPRYQSTTKPITTPASRAAVVAAASVAFARRSSSAAPAAAGFAR

SEQ ID NO: 80234 - protein, 115 aa, Setaria italica
  Transcript Sequence Number=SeqID_14260
MAFLTTNASFIPIMVAAVPRRNLIVVRAAAKPAEHHEPAAKPDGAYAGGRRQALMLLAAGAASTAVVSRSARADEPTEVPGGWVEIKDVTNPSVQDMGRWAVAEHNAKTGEKLQF

SEQ ID NO: 80235 - protein, 101 aa, Setaria italica
  Transcript Sequence Number=SeqID_14261
  Gene Ontology: Mol. function=metal ion binding
  Homolog annotation: Hit_ID=B4FKR4; Match level="QueryCoverage=49%, HitCoverage=17%, E-value=9e-22, Identity=88%"; Hit description=FYVE zinc finger family protein
  Pfam annotation: Domain name=FYVE; Domain location=55-101; Score =27.5; E_value=4.7e-07; Accession=PF01363.13; Description=FYVE zinc finger
  Subcellular localization annotation: CTP_CleavageSite=29; ConfidenceScore=5.38e-01
MPFLTAVTLSLPVSQVPQSIGSPRHLRVRSAKRGEQEQLGTRSAAASGAEPMETPPPFQESANCDVCRCTFSTFRRRHHCRSCGKTLCHEHSSYHMALPQY

SEQ ID NO: 80236 - protein, 173 aa, Setaria italica
  Transcript Sequence Number=SeqID_14262
  Gene Ontology: Mol. function=transferase activity, transferring glycosyl groups; Cellular component=1,3-beta-glucan synthase complex; Biological process=cell wall organization and biogenesis
  Homolog annotation: Hit_ID=Q9LYS6; Match level="QueryCoverage=99%, HitCoverage=8%, E-value=7e-44, Identity=54%"; Hit description =Putative callose synthase 6
TFMKMPRAPPVRSMMSFSVLTPYFKEEVLFSPKDLGRKNEDGISILFYLRKIFPDEFRNFLQRINCKPKDEEELKERMEEICHWASYRGQTLSRTVRGMMYYRKALEIQCLQDTKDPAKFGRDTSIESYQELQSDSEMAQAIADIKFTYVVSCQIYGMQKTSKKKEDKNRYLN

SEQ ID NO: 80237 - protein, 38 aa, Setaria italica
  Transcript Sequence Number=SeqID_14263
RPHLDGKLNCLLQPHCVLQFGSEIQYYEDHHIVFRIIL

SEQ ID NO: 80238 - protein, 385 aa, Setaria italica
  misc_feature (10)..(10): Xaa can be any naturally occurring amino acid
  Transcript Sequence Number=SeqID_14264
  Gene Ontology: Mol. function=amino acid binding; Biological process =metabolic process
  Homolog annotation: Hit_ID=B6SL14; Match level="QueryCoverage=100%, HitCoverage=85%, E-value=0.0, Identity=82%"; Hit description=ACR4
  Pfam annotation: Domain name=ACT; Domain location=206-277; Score =18.7; E_value=0.025; Accession=PF01842.17; Description=ACT domain
  Pfam annotation: Domain name=ACT; Domain location=284-350; Score =38.1; E_value=3.4e-08; Accession=PF01842.17; Description=ACT domain
  Pfam annotation: Domain name=ACT; Domain location=76-148; Score=35.8; E_value=1.8e-07; Accession=PF01842.17; Description=ACT domain
  Pfam module annotation: Pfam domain module=ACT::ACT::ACT; Domain location=206-277::284-350::76-148
VLTDLKLIVXKKAYISSDGGWFMDVFNVTNQSGQKIMDESVLQGIKDYIYKSIAPGSCFLPSRRRAIGVEPSSDYTLIELTGTDRPGLLSEVSAVLTNLDCNVVNAEVWTHNERAAAVIQVTDRKSGLAISDADRLGRIKEWLRNVFKGRSRDAKTTVAMGITHTERRLHQMMLEDRDYERYDKDRANANPMPMVSVVNWLQKDYSVVTMRCKDRPKLLFDTVCTLTDMQYVVYHGSVDTEGPEAYQEYYIRHIDGSPVNSEAERKRIIQCLEAAIERRVSEGLKLELSTGDRVGLLSDVTRIFRENGLTVTRAEVATRGNKAINTFYVRDTAGSSVELKTLEAIRQEIGQTVLQVKGHPEHPKSPAQESPTRFLFSSLFRPRSL

SEQ ID NO: 80239 - protein, 70 aa, Setaria italica
  Transcript Sequence Number=SeqID_14265
CFENYRVNFTTSIRTPGLRDEQDNTGTQTKTVLFCTITSLQLTQAHTDNEITSKQDEVFCSSTEGSTQMM

SEQ ID NO: 80240 - protein, 87 aa, Setaria italica
  Transcript Sequence Number=SeqID_14266
  Subcellular localization annotation: CTP_CleavageSite=41; ConfidenceScore=5.55e-01
VVRARAVLLSLLVVGSSTALSPASVFYYNCAARLRRRLCSSAAPFKSGTTTLETGSRGGSRTNWDRICSSINPSIRAAPPFGNPLIW

SEQ ID NO: 80241 - protein, 408 aa, Setaria italica
  Transcript Sequence Number=SeqID_14267
  Gene Ontology: Mol. function=protein serine/threonine kinase activity; Biological process=protein amino acid phosphorylation
  Homolog annotation: Hit_ID=Q1AMT7; Match level="QueryCoverage=99%, HitCoverage=99%, E-value=0.0, Identity=80%"; Hit description =Glycogen synthase kinase
  Pfam annotation: Domain name=Pkinase; Domain location=72-356; Score =324.7; E_value=1.8e-94; Accession=PF00069.17; Description=Protein kinase domain
  Pfam annotation: Domain name=Pkinase_Tyr; Domain location=72-356; Score=-17.1; E_value=1.4e-12; Accession=PF07714.9; Description =Protein tyrosine kinase
  Pfam module annotation: Pfam domain module=Pkinase::Pkinase_Tyr; Domain location=72-356::72-356
MTSVGLLNPSSGYEASTSGATDRLPDEMNGMSIRDEKEVEAVVVNGNGMEVGHTIVTSVGGRNSQPRQTISYMAERIVGQGSFGVVFQARCLETSERVAIKKVLQDVRYKNRELQTMQVLDHPNVVCLKHYFCSTTDKEELYLNLVLEYVPETVHRVIKHYNKMNQRMPLIYVKLYMYQICRALAYMHNCVGVCHRDIKPQNILVNPHTHQLKLCDFGSAKVLVRGEPNISYICSRYYRAPELIFGATEYTTAIDVWSAGCVLAELLLGQPVFPGDSGVDQLVEIIKVLGTPTRDEIKRMNPNYTEFKFPQIKAHPWHKIFHKRMPSEAVDLVSRLLQYSPNLRCTALEALIHPFFDELRDPNARLPNGRSLPHLFNFKPNELRGVPMEFLMKLIPQHAKKQCAFLGI

SEQ ID NO: 80242 - protein, 132 aa, Setaria italica
  Transcript Sequence Number=SeqID_14268
  Gene Ontology: Mol. function=nucleotide binding; Biological process =defense response
  Homolog annotation: Hit_ID=Q2R2R8; Match level="QueryCoverage=99%, HitCoverage=22%, E-value=2e-19, Identity=42%"; Hit description=NB -ARC domain containing protein, expressed
LRQLEYMCIDNRTRLPERFGNLMSLQMLLAQLTIRSPIMLHDLGKLTEMRTLMIRFDKWDESFEEPFVQCLSNLVNLDSLKIFACHNGLGSRIGMLILGPQQLRSINIGPGTICRVPRWMSSLSSLTDLDIT

SEQ ID NO: 80243 - protein, 212 aa, Setaria italica
  Transcript Sequence Number=SeqID_14269
  Gene Ontology: Mol. function=protein binding
  Homolog annotation: Hit_ID=A5HEH5; Match level="QueryCoverage=90%, HitCoverage=90%, E-value=1e-66, Identity=68%"; Hit description=GIF2
  Pfam annotation: Domain name=SSXT; Domain location=19-82; Score=49.5; E_value=1.3e-11; Accession=PF05030.4; Description=SSXT protein (N -terminal region)
MQQQMPMQAPAAAAAAPPSAGITTEQIQKYLDENKQLILAILENQNLGKLAECAQYQAQLQKNLLYLAAIADAQPQPPQNPASRPQMMQPGMVPGAGHYMSQVPMFPPRTPLTPQQMQEQQQQQLQQQQAQALAFPGQMVMRPATVNGMQPMQTDPAATAASLQQSAPVPADGRGGKQDTTAGVSTEPSGTESHKSTTGADHEAGGDVAEKS

SEQ ID NO: 80244 - protein, 79 aa, Setaria italica
  Transcript Sequence Number=SeqID_14270
MELVSFRRREAKISHYFWLLARGGTHSAHFAGLPPGFCLLAVLTVPVWHGFIKNHSKSQWMSRAKGALMGPEGRREGWC

SEQ ID NO: 80245 - protein, 97 aa, Setaria italica
  Transcript Sequence Number=SeqID_14271
YECSGTLRKYHAHGSLLYCSILFRRFVLLDYYPSVPAPVRDLAFISSLSSRPLLHFIFFNATTEFHLSKWHMQATDFMLLPCCRASTVCIPLELPWA

SEQ ID NO: 80246 - protein, 83 aa, Setaria italica
  Transcript Sequence Number=SeqID_14272
  Homolog annotation: Hit_ID=B6TJ88; Match level="QueryCoverage=61%, HitCoverage=14%, E-value=7e-17, Identity=80%"; Hit description=Seed specific protein Bn15D14A
HGGRGRGNGGGDPGAAARRRWDLPGKAAENIAMGKEVVDMSTDEESDCVVICPPNGNVDHGEVVSGSHDEDSPERQETPYAID

SEQ ID NO: 80247 - protein, 143 aa, Setaria italica
  misc_feature (79)..(79): Xaa can be any naturally occurring amino acid
  misc_feature (131)..(131): Xaa can be any naturally occurring amino acid
  Transcript Sequence Number=SeqID_14273
  Homolog annotation: Hit_ID=B6TVC9; Match level="QueryCoverage=97%, HitCoverage=38%, E-value=3e-39, Identity=62%"; Hit description=Seed specific protein Bn15D14A
  Pfam annotation: Domain name=TPX2; Domain location=25-82; Score=76.9; E_value=7.2e-20; Accession=PF06886.3; Description=Targeting protein for Xklp2 (TPX2)
AAYRTVTSARAGKTKKTTVAVAPTFVCDNRAEKRGEFYTKLEEKRKALEEEKLQAEARKKEEEEEALRQLRKNLVVRAXKPMPSFYQEGPPPKVELKKVPQLVLGHQKLTRRKSCSDTPHTPEGGNGSAVXCRLHRHSIGNSK

SEQ ID NO: 80248 - protein, 380 aa, Setaria italica
  Transcript Sequence Number=SeqID_14274
  Homolog annotation: Hit_ID=B6TVC9; Match level="QueryCoverage=94%, HitCoverage=100%, E-value=1e-107, Identity=57%"; Hit description =Seed specific protein Bn15D14A
  Pfam annotation: Domain name=TPX2; Domain location=213-269; Score =85.3; E_value=2.1e-22; Accession=PF06886.3; Description=Targeting protein for Xklp2 (TPX2)
MIWNVRRFQIVIGKAEENIAMGKEVVDMSTDEESDCVVICPPNGNVDHGEVVSGSHDEDSPERQETPYAIDSHMDSNGQEDVPVNQDSPKLIHEQESSLTNSPAKPAIAGQQGSSRTVAEPCTVAAERRSSRAGNCAPVSHPTSSGEKLSDKSSSSPRSMAKKSPSVTPRKPLQSDNTSHSQEEDSYSVTSSTVTSARAGKTKKTTVAVAPTFVCDNRAEKRGEFYTKLEEKRKALEEEKLQAEARKKEEEEEALRQLRKNLVVRAKPMPSFYQEGPPPKVELKKVPPTRARSPKLTRRKSCSDTPHTPEGGNGSAVCCRLHRHSIGNSKDVGSKAQCSPKGSSKTGSATKSRATKSREDLKATMKKVGQQSATNVAVKT

SEQ ID NO: 80249 - protein, 58 aa, Setaria italica
  Transcript Sequence Number=SeqID_14275
  Gene Ontology: Mol. function=prenyltransferase activity; Cellular component=integral to membrane
  Homolog annotation: Hit_ID=B6T6U8; Match level="QueryCoverage=100%, HitCoverage=15%, E-value=1e-22, Identity=87%"; Hit description =Prenyltransferase/ zinc ion binding protein
PQAFRRAVMVPVHVALAAGLIFQTWVLEQAKYTKDAISQYYRFIWNLFYAEYILFPLI

SEQ ID NO: 80250 - protein, 288 aa, Setaria italica
  misc_feature (6)..(6): Xaa can be any naturally occurring amino acid
  Transcript Sequence Number=SeqID_14276
  Gene Ontology: Mol. function=prenyltransferase activity; Cellular component=integral to membrane
  Homolog annotation: Hit_ID=B6T6U8; Match level="QueryCoverage=99%, HitCoverage=75%, E-value=1e-151, Identity=93%"; Hit description =Prenyltransferase/ zinc ion binding protein
  Pfam annotation: Domain name=UbiA; Domain location=2-288; Score=72.2; E_value=1.9e-18; Accession=PF01040.10; Description=UbiA prenyltransferase family
GPHTIXGTALGSIALVARALIENSHLINWWLLFKAFYGLVALICGNGYIVGINQIYDVAIDKVNKPYLPIAAGDLSVESAWLLVILFAAAGFSIVLSNFGPFITSLYCLGLFLGTIYSVPPFRLKRYPVAAFLIIATVRGFLLNFGVYYATRAALGLTFQWSSPVAFITCFVTLFALVIAITKDLPDVEGDRKYQISTLATKLGVRNIAFLGSGLLVANYIAAIVVAFLMPQAFRRAVMVPVHVALAAGLIFQTWVLEQAKYTKDAISQYYRFIWNLFYAEYILFPLI

SEQ ID NO: 80251 - protein, 60 aa, Setaria italica
  Transcript Sequence Number=SeqID_14277
  Gene Ontology: Mol. function=cyclin-dependent protein kinase inhibitor activity; Cellular component=nucleus
  Homolog annotation: Hit_ID=B6TSE9; Match level="QueryCoverage=98%, HitCoverage=27%, E-value=9e-24, Identity=91%"; Hit description =Cyclin dependent kinase inhibitor
MGKYMRKGKLSGEVAVMEVPGGALLGVRTRSRTLALQRAQRPLDKGEVDQAAGEYLELRR

SEQ ID NO: 80252 - protein, 173 aa, Setaria italica
  Transcript Sequence Number=SeqID_14278
  Gene Ontology: Mol. function=protein serine/threonine kinase activity; Cellular component=extracellular region; Biological process=xenobiotic metabolic process
  Homolog annotation: Hit_ID=Q41584; Match level="QueryCoverage=85%, HitCoverage=83%, E-value=3e-62, Identity=76%"; Hit description =Thaumatin-like protein
  Pfam annotation: Domain name=Thaumatin; Domain location=28-173; Score= 271.7; E_value=1.7e-78; Accession=PF00314.9; Description=Thaumatin family
  Subcellular localization annotation: CTP_CleavageSite=16; ConfidenceScore=5.30e-01
MAASSVVVFLLLAAFVAGASAATFTIKNNCPYTVWPAATPVGGGRQLNSGQTWTLDVPAGTSSGRIWGRTGCSFTNGRGRCASGDCGGALSCTLSGQPPLTLAEFTIGSGDKQDFYDISVIDGYNLPMDFSCSNGRNLQCRAPRCPDAYLFPSDNSKNHPCRGNSNYRVTFCP

SEQ ID NO: 80253 - protein, 66 aa, Setaria italica
  Transcript Sequence Number=SeqID_14279
MATAAAQANPASMDARGWDEVSYRRGILRARDLSSRTLFRAVFFDHSDDPEPDVLLAAASSDGSLA

SEQ ID NO: 80254 - protein, 318 aa, Setaria italica
  Transcript Sequence Number=SeqID_14280
  Gene Ontology: Biological process=response to stress
  Homolog annotation: Hit_ID=B4G1G1; Match level="QueryCoverage=92%, HitCoverage=91%, E-value=1e-154, Identity=91%"; Hit description =Desiccation-related protein PCC13-62
MGAPAFVVAAAAAVLLCGALARAQDMDKEWARPPYRGFFGAPGSMLPQSDVDLLEFPLNLEYLETEFFCWSALGYGLDAIDANLTGGGPPSIGGQSASLTPFIRDIATQFCYQEVGHLRAIKQTVRGFPRPLLDISAANFGKVIEQALNATLDPPFNPYENSVNFLIASYIIPYVGLTGYVGANPKLFTPQARKLLAGLLGVESAQDAVIRTLLYERGMTQVSSYGVGVAEVTAHISDLRNDLGRRGVKDEGLVVAPGQGPEGLTVGNVIAGDHLSLAYDRTPEEILGIVYGTGNPAQHGGFFPQGADGRIARGLLGV

SEQ ID NO: 80255 - protein, 150 aa, Setaria italica
  misc_feature (16)..(16): Xaa can be any naturally occurring amino acid
  Transcript Sequence Number=SeqID_14281
  Gene Ontology: Mol. function=transferase activity, transferring glycosyl groups
  Homolog annotation: Hit_ID=B9IA47; Match level="QueryCoverage=60%, HitCoverage=17%, E-value=6e-18, Identity=45%"; Hit description =Glycosyltransferase
AVMTLEGVHKCSSLDXLGRRLGPRLLGRGNDGSMRLVRDLYSMLDEINSEEGPVDLKVPESFDEFIWDMKNNDYDLRSFAFKLKATMESMDKELRSSRLSEQLNKHYAAIAIPKGLYCLSLRLTDEYSSNALARKQLPPPELVPRLSDNS

SEQ ID NO: 80256 - protein, 94 aa, Setaria italica
  Transcript Sequence Number=SeqID_14282
  Gene Ontology: Mol. function=sequence-specific DNA binding; Cellular component=nucleus; Biological process=regulation of transcription, DNA-dependent
  Homolog annotation: Hit_ID=A3BYC1; Match level="QueryCoverage=100%, HitCoverage=29%, E-value=1e-25, Identity=68%"; Hit description =Homeobox-leucine zipper protein HOX25
  Pfam annotation: Domain name=HALZ; Domain location=64-94; Score=5.9; E_value=0.078; Accession=PF02183.10; Description=Homeobox associated leucine zipper
  Pfam annotation: Domain name=Homeobox; Domain location=7-63; Score =67.5; E_value=5e-17; Accession=PF00046.21; Description=Homeobox domain
  Pfam module annotation: Pfam domain module=HALZ::Homeobox; Domain location=64-94::7-63
GGGAQERTKRRLTAEQVRELELSFEEEKRKLEPERKSELARRLGIAPRQVAVWFQNRRARWKAKQLEQDFDRLRAAHDELLAGRDALLADNDRL

SEQ ID NO: 80257 - protein, 50 aa, Setaria italica
  Transcript Sequence Number=SeqID_14283
MTRVIHDSGDGVQKEALDLVSSDVNFPKGHFPDYRIGPNNQIIDPEETHE

SEQ ID NO: 80258 - protein, 241 aa, Setaria italica
  misc_feature (220)..(220): Xaa can be any naturally occurring amino acid
  Transcript Sequence Number=SeqID_14284
  Homolog annotation: Hit_ID=Q2RA11; Match level="QueryCoverage=78%, HitCoverage=56%, E-value=4e-91, Identity=64%"; Hit description=CBS domain-containing protein, putative, expressed
  Pfam annotation: Domain name=CBS; Domain location=59-177; Score=93.7; E_value=6.6e-25; Accession=PF00571.20; Description=CBS domain
  Subcellular localization annotation: CTP_CleavageSite=30; ConfidenceScore=5.51e-01
MSSAAAVGLNRRTRSRPPSVASSRRSDDPTAAAAANGNGNVSAKSASPDHASGERTVKKLRLSKALTIPEGTTVSEACRRMAARRVDAVLLTDANGLLSGIVTDKDIATRVIAEGLRVEQTIISKIMTRDPLYVMSDTLAIEALQKMVQGKFRHLPVVENGEVIAMLDIAKCLYDAISRLEKAAEQGSALAAAVEGVERQLGGNISASQNLIETLRERMXKPSLSTIITENTKYMITFSDL

SEQ ID NO: 80259 - protein, 161 aa, Setaria italica
  Transcript Sequence Number=SeqID_14285
  Homolog annotation: Hit_ID=Q0ZFU7; Match level="QueryCoverage=59%, HitCoverage=20%, E-value=3e-11, Identity=42%"; Hit description=SNI1
VSSEIGGNSRSSDHLFDPLRFSLLIETIVEPTNATDDNNGIKAIENMMLFQYLVNTLEADFVPRRIAYKESLDWVIFRESLLNMLLGSRKLVFKSFVQNCIHLLLSQYHPEAKDAVEDSIPFEGEARSASDLDSSLNYSSLESGRTLVSLRKLFVMVMELD

SEQ ID NO: 80260 - protein, 472 aa, Setaria italica
  misc_feature (18)..(18): Xaa can be any naturally occurring amino acid
  Transcript Sequence Number=SeqID_14286
  Gene Ontology: Mol. function=ATP-dependent helicase activity; Cellular component=intracellular; Biological process=regulation of transcription, DNA-dependent
  Homolog annotation: Hit_ID=Q9FNQ1; Match level="QueryCoverage=98%, HitCoverage=60%, E-value=1e-180, Identity=47%"; Hit description=RNA helicase
  Pfam annotation: Domain name=Sec63; Domain location=156-468; Score =220.9; E_value=3.2e-63; Accession=PF02889.8; Description=Sec63 domain
TKIKVRIKRPTEYYYGRXKRYIDYDITDILQMMGRAGRPQYDQHGKAVILVHEPKKSFYKKFLYEPFPVESNLREHLHDHINAEIVSGTISNKEEAIIYLTWTYLYRRLVVNPAYYGLEDTETNTLNSYLSRLVETTFEDLEDSGCIRIDDHSVKYLILGKIASQYYLSYLTASMFGSNIGPNTSLEAFVHILSAAAEFDELPVRHNEDNLNRTLSGNVPYPVDQHHLDDPHVKANLLFQAHFSRVELPISDYATDLKSVLDQSIRIIQAMIDVCANSGWLSSALSCMHLLQMIIQGLWFERDSSLWMLPSMNDDILGHLRSRGVLTVPALLDLSREELHRLLQPFSASDLYQDLQHFPHVDVKLQLQNEQERSKSRTLNIRVQLKNSRRSASRAFAPRFPKAKQAAWWLVLGNSTSSELYGLKRISFADWVVNTRMELPQMFNIQETKLILVSDSYLGFDQEYSLEHLTKC

SEQ ID NO: 80261 - protein, 90 aa, Setaria italica
  Transcript Sequence Number=SeqID_14287
  Subcellular localization annotation: CTP_CleavageSite=75; ConfidenceScore=5.17e-01
LVVRAPVLHWAGVRVHSVLPFPLCFTSDKRFANKFQALLLFGLLGASPCLRQLRDHRPSTSRGGGTDASPSQAVPCSSVKASRAAVLPMS

SEQ ID NO: 80262 - protein, 110 aa, Setaria italica
  Transcript Sequence Number=SeqID_14288
  Gene Ontology: Mol. function=metal ion binding
  Homolog annotation: Hit_ID=Q10RU0; Match level="QueryCoverage=100%, HitCoverage=35%, E-value=3e-48, Identity=85%"; Hit description=CHY zinc finger family protein, expressed
  Pfam annotation: Domain name=zf-CHY; Domain location=1-65; Score =74.5; E_value=4e-19; Accession=PF05495.4; Description=CHY zinc finger
DCRHCHNEAKDSLEVNNHERHVVPRHEIKLVICSLCNKEQDVHQDCSNCGACFGKYFCAKCNFFDDDVSKNQFHCDGCGICRQVVTGGAENFYHCGKCGCCYTYQLKDSH

SEQ ID NO: 80263 - protein, 105 aa, Setaria italica
  Transcript Sequence Number=SeqID_14289
  Gene Ontology: Mol. function=metal ion binding
  Homolog annotation: Hit_ID=Q10RU0; Match level="QueryCoverage=99%, HitCoverage=34%, E-value=5e-48, Identity=87%"; Hit description=CHY zinc finger family protein, expressed
  Pfam annotation: Domain name=zf-CHY; Domain location=1-36; Score= -5.6; E_value=0.0035; Accession=PF05495.4; Description=CHY zinc finger
QVICSLCNKEQDVHQDCSNCGACFGKYFCAKCNFFDDDVSKNQFHCDGCGICRTGGAENFYHCGKCGCCYTYQLKDSHRCVDGAMHHNCPVCFEYLFDSTKAVSV

SEQ ID NO: 80264 - protein, 144 aa, Setaria italica
  misc_feature (5)..(5): Xaa can be any naturally occurring amino acid
  misc_feature (13)..(13): Xaa can be any naturally occurring amino acid
  misc_feature (61)..(61): Xaa can be any naturally occurring amino acid
  misc_feature (81)..(81): Xaa can be any naturally occurring amino acid
  Transcript Sequence Number=SeqID_14290
  Gene Ontology: Mol. function=metal ion binding
  Homolog annotation: Hit_ID=Q10RU0; Match level="QueryCoverage=100%, HitCoverage=37%, E-value=4e-47, Identity=67%"; Hit description=CHY zinc finger family protein, expressed
  Pfam annotation: Domain name=zf-CHY; Domain location=1-40; Score=7.2; E_value=0.00019; Accession=PF05495.4; Description=CHY zinc finger
HEIKXVICSLCNXEQDVHQDCSNCGACFGKYFCAKCNFFDDDVSKNQFHCDGCGICRQVVXNICIDATSFLKYSPFVFSYXLKLSLFYRTGGAENFYHCGKCGCCYTYQLKDSHRCVDGAMHHNCPVCFEYLFDSTKAVSVLHC

SEQ ID NO: 80265 - protein, 275 aa, Setaria italica
  Transcript Sequence Number=SeqID_14291
  Gene Ontology: Mol. function=metal ion binding
  Homolog annotation: Hit_ID=Q10RT9; Match level="QueryCoverage=96%, HitCoverage=100%, E-value=1e-132, Identity=85%"; Hit description=CHY zinc finger family protein, expressed
  Pfam annotation: Domain name=zf-C3HC4; Domain location=158-200; Score= 25.1; E_value=0.00014; Accession=PF00097.17; Description=Zinc finger, C3HC4 type (RING finger)
  Pfam annotation: Domain name=zf-CHY; Domain location=22-105; Score =147.7; E_value=3.5e-41; Accession=PF05495.4; Description=CHY zinc finger
  Pfam module annotation: Pfam domain module=zf-C3HC4::zf-CHY; Domain location=158-200::22-105
GKTERKRQHGMDADTGPVQYGCVHYKRKCKIRAPCCGEIFDCRHCHNEAKDSLEVNNHERHVVPRHEIKLVICSLCNKEQDVHQDCSNCGACFGKYFCAKCNFFDDDVSKNQFHCDGCGICRTGGAENFYHCGKCGCCYTYQLKDSHRCVDGAMHHNCPVCFEYLFDSTKAVSVLHCGHTIHLQCLYEMRAHQQFSCPVCLRSACDMSDIWRKLDQEVAASPMPAICQKKMIWILCNDCGMTSNVQFHILAHKCPGCSSYNTRQTRGGPAACSRV

SEQ ID NO: 80266 - protein, 346 aa, Setaria italica
  Transcript Sequence Number=SeqID_14292
  Gene Ontology: Mol. function=catalytic activity
  Homolog annotation: Hit_ID=Q7XTS7; Match level="QueryCoverage=100%, HitCoverage=59%, E-value=1e-152, Identity=78%"; Hit description =OSJNBa0008M17.6 protein
GAIVKRRTGNKQIGFLTNRHVAVDLDYPNQKMYHPLPPNLGPGVYLGAVERATSFITDDVWYGIYAGTNPETFVRADGAFIPFAHDFDIKTVTTTVRGVGDIGDVKVIDLQCPLNSLIGRQVCKIGRSSGHTTGTVMAYALEYNDEKGISFFTDLLVVGENRQTFDLEGDSGSLIILTGQDGEKPRPIGIIWGGTANRGRLKLTCDHGPENWTSGVDLGRLLDRLELDLIITNESLQDAVQQQRLALVAAANSAVGESSTVVPPVPEEKVEEMFEPLGIKIEQLPRNDVPASGTEGEDAGVTNVEVEERQFISNFVGMSPVRQDQDAPRQIANLNNPSEEELAMSL

SEQ ID NO: 80267 - protein, 550 aa, Setaria italica
  Transcript Sequence Number=SeqID_14293
  Gene Ontology: Mol. function=catalytic activity
  Homolog annotation: Hit_ID=Q7XTS7; Match level="QueryCoverage=95%, HitCoverage=90%, E-value=0.0, Identity=79%"; Hit description =OSJNBa0008M17.6 protein
MLQGGPQDMQGGLGLGPGPQMGAQSNLQHCAAEGRANYFGNLSKGLLPKSGKLPKGQQANSLLDLMTIRAFHSKILRCFSLGTAVGFRIRKGVLTDIPAILVFVARKVHKKWLNPTQCLPAIVEGPGGVWCDVDVVEFSYYGAPAQTPKEQMFTELVDRLCGSDECIGSGSQVASQDTFGTLGAIVKRRTGNKQIGFLTNRHVAVDLDYPNQKMYHPLPPNLGPGVYLGAVERATSFITDDVWYGIYAGTNPETFVRADGAFIPFAHDFDIKTVTTTVRGVGDIGDVKVIDLQCPLNSLIGRQVCKIGRSSGHTTGTVMAYALEYNDEKGISFFTDLLVVGENRQTFDLEGDSGSLIILTGQDGEKPRPIGIIWGGTANRGRLKLTCDHGPENWTSGVDLGRLLDRLELDLIITNESLQDAVQQQRLALVAAANSAVGESSTVVPPVPEEKVEEMFEPLGIKIEQLPRNDVPASGTEGEDAGVTNVEVEERQFISNFVGMSPVRQDQDAPRQIANLNNPSEEELAMSLHLGEREPKRLRTDTEADLDLEK

SEQ ID NO: 80268 - protein, 62 aa, Setaria italica
  Transcript Sequence Number=SeqID_14294
SKTVNSYDFFTVARFVPPPSCRWPESHGTVLFASTSILGRIVDDLGEVVEEDDTVQQDSSPS

SEQ ID NO: 80269 - protein, 143 aa, Setaria italica
  Transcript Sequence Number=SeqID_14295
  Gene Ontology: Mol. function=unfolded protein binding; Cellular component=mitochondrion; Biological process=response to stress
  Homolog annotation: Hit_ID=B6UGG5; Match level="QueryCoverage=98%, HitCoverage=20%, E-value=2e-74, Identity=96%"; Hit description=Heat shock 70 kDa protein
  Pfam annotation: Domain name=HSP70; Domain location=1-143; Score= -335.9; E_value=0.0077; Accession=PF00012.12; Description=Hsp70 protein
QPNGDTFLGGEDFDSALLEYLVAEFKKSDGIDLSMDKLALQRLREAAEKAKVELSSTMQTEINLPFITADTSGAKHFNITLTRSKFESLVSNLIERTRIPCVNCLKDAGISAKEIDEVLLVGGMTRVPKVQEVVSQIFNKPPS

SEQ ID NO: 80270 - protein, 379 aa, Setaria italica
  misc_feature (356)..(356): Xaa can be any naturally occurring amino acid
  Transcript Sequence Number=SeqID_14296
  Gene Ontology: Cellular component=intracellular; Biological process =RNA processing
KALENLDSHEETSRASQECTHSLDKYGMQNQMNSFAKEETDQDLSLHEQNAEKTSHEAQSHEAPVAESGDCNSPSKAIASSESINSQDKVAVVSARIHREMVCSKSDLPSGSSMPKEGGSSSDPARISPELEERHHVEVQVKLDTEDGLSVSNANLERSNDSPNTTDCDKVNSALVHESQNHVQSSPAEQLAVCAKPSSSELVNTKADTLGFQAQLQNQVANSQTHQSNNLSLPVQNIQQQGPSYTMAQNVQTSAQTQDQLFAQSNQGNQQYLQMTQGYASQMWQYYQQQLYYLQAQHNQQMQSLQQQHLPTEHLQQNFMQQVQQLQQQMVLWQQQVQQQQQVVLQQTIPAQQPPXDRKQGQHPSSSGDTKHDQNKQQQ

SEQ ID NO: 80271 - protein, 118 aa, Setaria italica
  misc_feature (48)..(48): Xaa can be any naturally occurring amino acid
  Transcript Sequence Number=SeqID_14297
  Gene Ontology: Mol. function=catalytic activity; Biological process =cellular metabolic process
  Homolog annotation: Hit_ID=B4F8E5; Match level="QueryCoverage=98%, HitCoverage=34%, E-value=8e-39, Identity=70%"; Hit description =Nucleoside-diphosphate-sugar epimerase
GRLEMLGMNASVFDAIESNFSLENVHSLQQATHLLISIPPIPGIGDPXVLLNLNEDLRRILSHGNLEWLCYLSTTSVYGDCGGALVDEDHMVNPKSESAKLRYKAEKGWLNLVDDLNL

SEQ ID NO: 80272 - protein, 261 aa, Setaria italica
  misc_feature (249)..(249): Xaa can be any naturally occurring amino acid
  Transcript Sequence Number=SeqID_14298
  Homolog annotation: Hit_ID=UPI0001A7B203; Match level="QueryCoverage =99%, HitCoverage=33%, E-value=3e-39, Identity=38%"; Hit description =pentatricopeptide (PPR) repeat-containing protein
  Pfam annotation: Domain name=PPR; Domain location=170-204; Score =20.3; E_value=0.008; Accession=PF01535.12; Description=PPR repeat
  Pfam annotation: Domain name=PPR; Domain location=205-239; Score=3.9; E_value=3.1; Accession=PF01535.12; Description=PPR repeat
  Pfam module annotation: Pfam domain module=PPR::PPR; Domain location =170-204::205-239
MENYLLGKSEITYCELLKIAVLQQNLPAVYDIWKDCTRYYSPSIITQRRILRALTAFGDLQSAYHILQHMVTSAAQRSEHLRLSSKRRYQSSRLDIPVLALSESEDLKLLPDFSLQPSQGKLATGKNSADVQPELLFAGNNLADKVELDNGTVRKTLRLAQSAVRRILIWSFNDLMHACVQFNNCQLAEQLFLEMQILGLRWSKFTYDGFVKTLIAGKGIAYAMKVIETMERRGIKPYNDTLSALSEGXDKNLQLDLAEVF

SEQ ID NO: 80273 - protein, 47 aa, Setaria italica
  Transcript Sequence Number=SeqID_14299
DSRVNQCTSCFCTRSILAQSNLTSLPLFAFTCIATMVGISSCITLYY

SEQ ID NO: 80274 - protein, 251 aa, Setaria italica
  misc_feature (26)..(26): Xaa can be any naturally occurring amino acid
  Transcript Sequence Number=SeqID_14300
  Gene Ontology: Mol. function=transcription regulator activity; Cellular component=nucleus; Biological process=regulation of transcription
  Homolog annotation: Hit_ID=Q69WS3; Match level="QueryCoverage=73%, HitCoverage=72%, E-value=7e-73, Identity=72%"; Hit description =Putative bHLH protein
  Pfam annotation: Domain name=HLH; Domain location=128-178; Score =41.2; E_value=4.2e-09; Accession=PF00010.18; Description=Helix-loop -helix DNA-binding domain
  Subcellular localization annotation: CTP_CleavageSite=61; ConfidenceScore=5.61e-01
TTTTSPPPASGPHHEASSVVTTADRXNGGRSGGGSSRRRPRRDAPAAEEEPSKLASTSGTAAASGGARDSADPEMAKRLKKMTSSDDKIRTEVETNSGNASKSVDKKPAPPEPPKQDYIHVRARRGQATDSHSLAERARREKISERMKVLQDLVPGCNKVIGKASVLDEIINYIQSLQRQVEFLSMKLEAVNAHVNSATGSFPSKDFDAPAPPYSTAPGLTFDPHTPREYPQALTSDWLHMQIGNTYERVT

SEQ ID NO: 80275 - protein, 109 aa, Setaria italica
  misc_feature (87)..(87): Xaa can be any naturally occurring amino acid
  Transcript Sequence Number=SeqID_14301
  Gene Ontology: Mol. function=electron carrier activity; Biological process=oxidation reduction
  Homolog annotation: Hit_ID=B6SXJ1; Match level="QueryCoverage=89%, HitCoverage=18%, E-value=1e-40, Identity=79%"; Hit description =Flavonoid 3-monooxygenase
AAAGGQHAAVALREHLYMVNLNVISRMVLGRKYVVDGAGSPVTPEEFRRMIDEHFSLNGALNVGDMIPWLSWLDPQGYVRRMKRSAXMFDRFLEYVLDEHNERRRREGK

SEQ ID NO: 80276 - protein, 474 aa, Setaria italica
  Transcript Sequence Number=SeqID_14302
  Gene Ontology: Cellular component=cytoplasm; Biological process =transcription
  Homolog annotation: Hit_ID=B6UFL7; Match level="QueryCoverage=99%, HitCoverage=95%, E-value=0.0, Identity=71%"; Hit description =Periodic tryptophan protein 1
  Pfam annotation: Domain name=WD40; Domain location=169-213; Score =1.9; E_value=23; Accession=PF00400.24; Description=WD domain, G-beta repeat
  Pfam annotation: Domain name=WD40; Domain location=240-279; Score =34.8; E_value=3.5e-07; Accession=PF00400.24; Description=WD domain, G-beta repeat
  Pfam annotation: Domain name=WD40; Domain location=283-322; Score =33.9; E_value=6.4e-07; Accession=PF00400.24; Description=WD domain, G-beta repeat
  Pfam annotation: Domain name=WD40; Domain location=327-365; Score =4.7; E_value=11; Accession=PF00400.24; Description=WD domain, G-beta repeat
  Pfam annotation: Domain name=WD40; Domain location=375-414; Score =49.3; E_value=1.5e-11; Accession=PF00400.24; Description=WD domain, G-beta repeat
  Pfam annotation: Domain name=WD40; Domain location=420-459; Score =23.0; E_value=0.0012; Accession=PF00400.24; Description=WD domain, G- beta repeat
  Pfam module annotation: Pfam domain module=WD40::WD40::WD40::WD40::WD4 0::WD40; Domain location=169-213::240-279::283-322::327-365::375 -414::420-459
AKNVPVVAEPPTQEEIDEAIKTLALGGDGGSDVDEDDDAGTMELDGAEAEEELDEVARAKAVAKALAKGSSQVDDVADELRELNMDAYDDEEEGIEIFSSGMGDLYYPSNDMDPYLNNNNDEDDDDDDEIEDKMIKPTDYLLVCAHSDEDVFSLQVNILEETEDGEQNMFVHHDVPLPAFPLCTAWMDFNLKGGDKGNFIAVGTMDPAIEIWDLDMVDEVQPHMVLGGLSKKKKKAKGKKGKKYKKGSHRNSVLGLAWNKEVRNVLASASADTTVKIWDLAVGKCAVTLEHHDDKVQSVAWCPQSPEVLLSGSFDKTVAMNDMKDGGQSCHKWSVEADVESLAWDPHNEHSFVVSLENGMVQAFDKRTASSSSSGRSTYTLHAHEKAVSSISFNPSAPNFLATGSTDKMVKLWDLSNNKPSCIASLNPKLGAIFSVSYSHDNPFWLACGGSKGKLKVWDTLSEPAVANKFGRQK

SEQ ID NO: 80277 - protein, 109 aa, Setaria italica
  Transcript Sequence Number=SeqID_14303
  Gene Ontology: Mol. function=microtubule motor activity; Cellular component=microtubule associated complex
  Homolog annotation: Hit_ID=Q2QM62; Match level="QueryCoverage=88%, HitCoverage=9%, E-value=3e-28, Identity=71%"; Hit description =Kinesin motor protein, putative, expressed
MKEESPYLRSPMAERNLNSTAEKPSAGRKDFGIAKQMFSDSNTDTYSFKQLLSLGEEKENNPEAGQLPPMAKARRVSLCNGGAYQQPMNQASRRQSLIPLPRRNSLMPP

SEQ ID NO: 80278 - protein, 117 aa, Setaria italica
  Transcript Sequence Number=SeqID_14304
  Gene Ontology: Mol. function=electron carrier activity; Cellular component=integral to membrane; Biological process=oxidation reduction
  Homolog annotation: Hit_ID=Q2QP56; Match level="QueryCoverage=100%, HitCoverage=13%, E-value=1e-45, Identity=72%"; Hit description =Respiratory burst oxidase, putative, expressed
  Pfam annotation: Domain name=NAD_binding_6; Domain location=1-117; Score=42.5; E_value=1.6e-09; Accession=PF08030.4; Description=Ferric reductase NAD binding domain
TPLISIVKDVLNNVIPISGAGGEQQPSPEFMTRRVYFYWCTREEGSFEWFRGVMNEVAERDAAGEVVELHNHCTSVYGEGDARSALLVMLQALHHAKSGVDVVSGTRVRTHFARPKW

SEQ ID NO: 80279 - protein, 111 aa, Setaria italica
  Transcript Sequence Number=SeqID_14305
  Gene Ontology: Mol. function=oxidoreductase activity, acting on the aldehyde or oxo group of donors, NAD or NADP as acceptor; Cellular component=cytoplasm; Biological process=methionine biosynthetic process
  Homolog annotation: Hit_ID=B6TWW1; Match level="QueryCoverage=100%, HitCoverage=29%, E-value=2e-47, Identity=85%"; Hit description =Aspartate-semialdehyde dehydrogenase
  Pfam annotation: Domain name=Semialdhyde_dh; Domain location=9-111; Score=122.4; E_value=1.5e-33; Accession=PF01118.16; Description =Semialdehyde dehydrogenase, NAD binding domain
WSLREDGPSVAIVGATGAVGQEFLRVITDRDFPYRSLRLLASERSAGKRLAFEDREYTVQDLAAPGAFDGVDIALFSAGGGVSRKFGPAAVARGAVVVDNSSAFRMDPEVP

SEQ ID NO: 80280 - protein, 124 aa, Setaria italica
  Transcript Sequence Number=SeqID_14306
  Gene Ontology: Mol. function=oxidoreductase activity, acting on the aldehyde or oxo group of donors, NAD or NADP as acceptor; Cellular component=cytoplasm; Biological process=methionine biosynthetic process
  Homolog annotation: Hit_ID=B6TWW1; Match level="QueryCoverage=91%, HitCoverage=30%, E-value=5e-53, Identity=88%"; Hit description =Aspartate-semialdehyde dehydrogenase
  Pfam annotation: Domain name=Semialdhyde_dh; Domain location=1-79; Score=49.5; E_value=1.3e-11; Accession=PF01118.16; Description =Semialdehyde dehydrogenase, NAD binding domain
VVLRPFEDREYTVQDLAAPGAFDGVDIALFSAGGGVSRKFGPAAVARGAVVVDNSSAFRMDPEVPLVIPEVNPEAMANVRLGQGAIVANPNCSTIICLMAATPLHRHAKVLRMVVSTYQAASGA

SEQ ID NO: 80281 - protein, 54 aa, Setaria italica
  Transcript Sequence Number=SeqID_14307
MPKVFGTGVFEFRHPRAAEYPLPADAAPATTAAPDKVPASTGGASITLLDIQRD

SEQ ID NO: 80282 - protein, 47 aa, Setaria italica
  Transcript Sequence Number=SeqID_14308
EGLEADKMGLLAALEDAEARQAEQEAALRARDEEVARLRGLLSEPHS

SEQ ID NO: 80283 - protein, 527 aa, Setaria italica
  Transcript Sequence Number=SeqID_14309
  Gene Ontology: Mol. function=catalytic activity; Cellular component =endoplasmic reticulum membrane; Biological process=metabolic process
  Homolog annotation: Hit_ID=Q7F0T4; Match level="QueryCoverage=99%, HitCoverage=46%, E-value=0.0, Identity=73%"; Hit description =Putative phospholipase D-like protein
  Pfam annotation: Domain name=PLDc; Domain location=323-350; Score =41.1; E_value=4.3e-09; Accession=PF00614.14; Description =Phospholipase D. Active site motif
LNEQAIPLLMPHHHMVIPHYKGRSKETNDEADGKQYHDRDVDKNPVLTSRTSCQDVPLLLPQELEPQELSSADLRLTDLDINNSDRINKKSFSQPLLNRKAKLDFSHQDLPMRSFVDNHSSLEASSIRRFDSLKDDRNHKDKKWWEKQERGDQVASVLDIGQVGPRATCRCQVVRSVGQWSAGTTQIEGSIHNAYFSLIEKAEHFVYIENQFFISGLSGDDTIKNRVLEALYRRILRAEREKKRFKAIIIIPLLPGFQGGIDDGGAASVRAIMHWQYRTICRGPNSILQNLFDVIGPKAHDYISFYGLRAHGKLNDGGPLVTSQIYVHSKLMIIDDRITLIGSANINDRSLLGSRDSEIAVVIEDKEVVNSKMDGRPWEAGKFSLSLRLSLWAEHLGLHPGEVSHIMDPIDDSTFKNIWMATAKTNTMIYQDVFSCVPNDLIDSRAQFRQSFAHLRDKIGHTTIDLGVAQEKLEAYQDGDLKGTDPMDRLQLVRGHLVSFPLDFMCQEDLRPYFSESEYYTSPQVFH

SEQ ID NO: 80284 - protein, 84 aa, Setaria italica
  Transcript Sequence Number=SeqID_14310
MDQFVGRITMEVAPSKLPSIIRRARLPKILDTIMEDEREALESPRAPSHNAIRTKEVIDTPMYCADKLAFLTPMVKTECLKIKA

SEQ ID NO: 80285 - protein, 73 aa, Setaria italica
  Transcript Sequence Number=SeqID_14311
MLSYQKGIKSSKMGYRSGDEFINRCFDCIQLGNASDRHKSTCFTTHLQCQHPSFQFQGAPYFIFLSSSSCCMI

SEQ ID NO: 80286 - protein, 97 aa, Setaria italica
  Transcript Sequence Number=SeqID_14312
  Gene Ontology: Mol. function=molecular_function; Cellular component =nucleus; Biological process=biological_process
  Homolog annotation: Hit_ID=B4FK57; Match level="QueryCoverage=100%, HitCoverage=100%, E-value=2e-47, Identity=95%"; Hit description=C -Myc-binding protein
MDREAKKEAFRKYLESSGVLDTLTKVLVALYEENDKPSSAVEFVQQKLGGPSISDYEKLKAEKLDLQLKYNELLDTHKETCRQLEELKNMKYGAPWN

SEQ ID NO: 80287 - protein, 309 aa, Setaria italica
  Transcript Sequence Number=SeqID_14313
  Gene Ontology: Mol. function=nucleic acid binding; Cellular component= mitochondrion
  Homolog annotation: Hit_ID=Q8S652; Match level="QueryCoverage=31%, HitCoverage=81%, E-value=3e-38, Identity=80%"; Hit description =Putative RNA-binding protein
  Pfam annotation: Domain name=GRP; Domain location=71-174; Score= -18.0; E_value=0.0058; Accession=PF07172.3; Description=Glycine rich protein family
  Pfam annotation: Domain name=RRM_1; Domain location=33-103; Score =108.1; E_value=3e-29; Accession=PF00076.14; Description=RNA recognition motif. (a.k.a. RRM, RBD, o
  Pfam module annotation: Pfam domain module=GRP::RRM_1; Domain location=71-174::33-103
MAFLQKVGNLVKRSTGASSSLNQAVRCMSSSKLFIGGISYGTDEHSLRDAFADYGEVIEARIIMDRETGRSRGFGFVTYTSTEEAAAAITGMDGKDLQGRIVRVSYAHDRGSRAGGGGYGGGGFGGGGYGDGGYGGGYGRGGGGGYSGGGGYGGGSYGGSGGYASGGGGYNDGGNMGPRYNTGGSYGVSQGGRGGFGVDAGYTGGYNATPGSYSGDSFNQGGGTPAYGGGNYGAGNNSYADNAPNNASVGKLDDLLSDLKVDGAGEAEGEGEPEDLGLADEDMKGKGQDEFAQDDFKDQDEPNEANKSS

SEQ ID NO: 80288 - protein, 78 aa, Setaria italica
  Transcript Sequence Number=SeqID_14314
AKVAGPAEAQPDDSALAASTLYGYQGQSHQAGLRQGQLPSQFGTALGQSQPGLGPEHRNPSDGNLSAAAQANPMWPSY

SEQ ID NO: 80289 - protein, 793 aa, Setaria italica
  Transcript Sequence Number=SeqID_14315
  Homolog annotation: Hit_ID=Q5SN37; Match level="QueryCoverage=45%, HitCoverage=98%, E-value=2e-48, Identity=40%"; Hit description=TA9 protein-like
  Pfam annotation: Domain name=DUF1296; Domain location=25-84; Score =108.6; E_value=2e-29; Accession=PF06972.3; Description=Protein of unknown function (DUF1296)
MRGGGRGGGGRQPFAAPDGADAAAIPTASRKMVQSLKGILADRSEGEIYATLCDCGMDPDIAVERLISQDTFHEVRRKRDKKKETKASQESRPRSFQKPMNRGYKAGSDRSGRDSMGVSKGPIKKEPELHAPLNSSALDVRTSNPTETISATGNVAQADAKNTTQPPSQVQHGWGGIPGRPSLAEIVKMGRPQAKSGSRSAASSTAMPAVGDSVISNTPSHTPKEYNRSAFASEPNGAVEVHSVPKDASSIDMLPPAEGADVPAPSIEDSSTPDVNEDGIEKSTNLEGNTDKSDYTEVATHQGDDLIEKTDDFQSNGLSFEPNQNLNGDMSTTTKQFDQLTLHEEPKSSDDNPAVIIPDHLQVSNADCAHLTFGSFVSGTLDASLTTKPLECHGDVVAAPDDHSIDQTVVRIHEDESKAAGTPAANECVASATNSNMENLDVTSVQQSEVTIANFLDVTNNTEYNLSATSDYATSSAALQDSASHNYLQENRQFQNLSPLSSFMQIQNGLLPPAIPPLREFDPAFSLLLTNPPMMHGTSSSSMNNATVSTQPQESANSVGLPNPQLTQSQPSTSIASGPPLPQHLLHPYAQATLPLGYAGMIGYPSLPPSYAYIQPAAFQQPYMSNMFHQAAAAVPNSSVKYPLPQYKALASLPQPASLLSSYVGGFGTANNMPGNFPVNQSTASATTTLGFDGSVPPHYKEGNQFISLQQQNENPAMWMHGAGSRGMPPLAASTLYGYQGQSHQAGLRQGQLPSQFGTALGQSQPGLGPEHRNPSDGNLSAAAQANPMWPSY

SEQ ID NO: 80290 - protein, 125 aa, Setaria italica
  Transcript Sequence Number=SeqID_14316
GGAGGLAWCRAGEAVQTAAEPVHCRALRELWPVHCWAAPAPEPDGRTECGGSRSPEGGGLFPLIPHFPLFSNRAPLYSEELDCGLIPRNSEGFFAKQARRTKIVGRDVTRFNNRYRYRYRYRFKI

SEQ ID NO: 80291 - protein, 64 aa, Setaria italica
  Transcript Sequence Number=SeqID_14317
LGYTSDKITRPRTHGQLNPDRSMDHRIMSSWGRGEAALGRQRHGADLGCLCGYKNSPWMGVYNI

SEQ ID NO: 80292 - protein, 104 aa, Setaria italica
  Transcript Sequence Number=SeqID_14318
  Homolog annotation: Hit_ID=B6SHR9; Match level="QueryCoverage=71%, HitCoverage=64%, E-value=2e-11, Identity=50%"; Hit description=PVR3 -like protein
  Pfam annotation: Domain name=Tryp_alpha_amyl; Domain location=26-98; Score=34.4; E_value=4.5e-07; Accession=PF00234.14; Description =Protease inhibitorseed storageLTP f
MTTSRALLVAAALLLVAAAPAAEAVCGMSNEQFMSCQPAAAKTTDPPAPPTQACCDALGGADLGCLCGYKNSPWMGVYNIDPSRAMALPAKCGLATAPQLLMIR

SEQ ID NO: 80293 - protein, 354 aa, Setaria italica
  Transcript Sequence Number=SeqID_14319
  Gene Ontology: Mol. function=transferase activity, transferring glycosyl groups; Cellular component=integral to membrane
  Homolog annotation: Hit_ID=Q9LSG3; Match level="QueryCoverage=99%, HitCoverage=63%, E-value=1e-178, Identity=83%"; Hit description =Glycosyltransferase QUASIMODO1
  Pfam annotation: Domain name=Glyco_transf_8; Domain location=11-327; Score=371.3; E_value=1.8e-108; Accession=PF01501.12; Description =Glycosyl transferase family 8
AAKSIPKPLHCLAVRLTAERIARPEQYAEPVPPPRALEDPALFHYAIFSDNVLAASCVVRSAVANSIDPSKHVFHVVTDRMNLGAMQVIIRRMDLKGAHYEVKAFEDYKFLNSSYVPVLRQLESANLQKFYFENKLENATKDASNMKFRNPKYLSMLNHLRFYLPEMYPKLHRILFLDDDVVVQRDLTGLWKIDMDGKVNGAVETCFGSFHRYWQYMNFSHPLIKAKFSPNACGWAYGMNFFDLDSWRREKCTEQYHYWQNQNENRTLWKLGTLPPGLITFYSTTKPLDKSWHVLGLGYNPSISMEEIRNAAVVHFNGNMKPWLDIGMNQFRHLWTKYVDYDDEYIRQCNFAPP

SEQ ID NO: 80294 - protein, 110 aa, Setaria italica
  misc_feature (24)..(24): Xaa can be any naturally occurring amino acid
  Transcript Sequence Number=SeqID_14320
  Gene Ontology: Mol. function=protein serine/threonine kinase activity; Biological process=protein amino acid phosphorylation
  Homolog annotation: Hit_ID=Q9LGV5; Match level="QueryCoverage=83%, HitCoverage=19%, E-value=1e-32, Identity=72%"; Hit description=CBL -interacting protein kinase 1
NNASPEDLFDKIERSASEMGFQVXRGHGKLKVTRNCTGTKNPKNPASFLVCTEVFELGPSLYVVELKKSHGEPALYRQLCERIGSDLGVFKMEQIFGTRPEKLKTVKPVK

SEQ ID NO: 80295 - protein, 161 aa, Setaria italica
  Transcript Sequence Number=SeqID_14321
  Gene Ontology: Mol. function=protein serine/threonine kinase activity; Cellular component=plasma membrane; Biological process =protein amino acid phosphorylation
  Homolog annotation: Hit_ID=A6N0G2; Match level="QueryCoverage=97%, HitCoverage=53%, E-value=6e-58, Identity=69%"; Hit description =Putative cbl-interacting protein kinase 1 (Fragment)
  Pfam annotation: Domain name=NAF; Domain location=7-67; Score=87.4; E_ value=4.9e-23; Accession=PF03822.6; Description=NAF domain
PTLSDKTTHQINAFQLIGMASSLDLSGFFEEEDVSQRKIRFTTTHPPEDLFDKIERSASEMGFQVQRGHGKLKVTRNCTGTKNPKNPASFLVCTEVFELGPSLYVVELKKSHGEPALYRQLCERIGSDLGVFKMEQIFGTRPVADDLASLDNRSATPLVAL

SEQ ID NO: 80296 - protein, 374 aa, Setaria italica
  Transcript Sequence Number=SeqID_14322
  Gene Ontology: Mol. function=protein serine/threonine kinase activity; Cellular component=plasma membrane; Biological process =protein amino acid phosphorylation
  Homolog annotation: Hit_ID=Q75L42; Match level="QueryCoverage=95%, HitCoverage=78%, E-value=1e-178, Identity=82%"; Hit description=CBL -interacting protein kinase 17
  Pfam annotation: Domain name=NAF; Domain location=234-294; Score =87.4; E_value=4.9e-23; Accession=PF03822.6; Description=NAF domain
  Pfam annotation: Domain name=Pkinase; Domain location=1-197; Score =176.9; E_value=5.9e-50; Accession=PF00069.17; Description=Protein kinase domain
  Pfam annotation: Domain name=Pkinase_Tyr; Domain location=1-197; Score=-93.7; E_value=1.7e-07; Accession=PF07714.9; Description =Protein tyrosine kinase
  Pfam module annotation: Pfam domain module=NAF::Pkinase::Pkinase_Tyr; Domain location=234-294::1-197::1-197
NVVRLHEVAASKTKIYMVLEFVNGGELFNRIAIKGKLSEQEGRRLFQQLIDGVSYCHEKGVYHRDLKPENVLLDTKGNIKISDFGLSALPQHLGNDGLLHTTCGSPNYIAPEVLQNRGYDGSLSDIWSCGVILYMMLVGYLPFDDRNIVVLYQKIFKGDTQIPKCLSPGAQNLLQRILEPNPMKRITMAEIKTHEWFQKDYVPSVPFDSDDEDSQLDVVLPAKEEINQPPADKTTHQINAFQLIGMASSLDLSGFFEEEDVSQRKIRFTTTHPPEDLFDKIERSASEMGFQVQRGHGKLKVTRNCTGTKNPKNPASFLVCTEVFELGPSLYVVELKKSHGEPALYRQLCERIGSDLGVFKRIGRQEYFREQRTG

SEQ ID NO: 80297 - protein, 142 aa, Setaria italica
  Transcript Sequence Number=SeqID_14323
  Pfam annotation: Domain name=DUF1218; Domain location=1-67; Score =50.3; E_value=7.5e-12; Accession=PF06749.4; Description=Protein of unknown function (DUF1218)
IPSETKRIVGIVCAVFSWIAAVIAWALLIEGASWNANVVRETAPFCPYLKDGIFAGAGVLALAATALGVTSSIMLQRQPVAAAAAVGTPNSKRTGEQSPPPAGVALGQPMFPQPSKPEPELPSVADRPTAAHPQGYREAPQN

SEQ ID NO: 80298 - protein, 94 aa, Setaria italica
  Transcript Sequence Number=SeqID_14324
  Subcellular localization annotation: CTP_CleavageSite=81; ConfidenceScore=5.78e-01
SPPPHPTPPPPRSDLLLRRAAAAATPPSRRAPSPRQLIRRRPSGSFPSFPPSWPRRSPNPTQGAPPWPKKGRSMDRSINFRGIAGSAGNIMQGM

SEQ ID NO: 80299 - protein, 205 aa, Setaria italica
  misc_feature (73)..(73): Xaa can be any naturally occurring amino acid
  misc_feature (78)..(78): Xaa can be any naturally occurring amino acid
  Transcript Sequence Number=SeqID_14325
  Homolog annotation: Hit_ID=A3QME3; Match level="QueryCoverage=100%, HitCoverage=41%, E-value=1e-47, Identity=42%"; Hit description=Wax synthase
  Pfam annotation: Domain name=DUF1298; Domain location=63-205; Score =265.7; E_value=1.1e-76; Accession=PF06974.5; Description=Protein of unknown function (DUF1298)
  Subcellular localization annotation: CTP_CleavageSite=56; ConfidenceScore=5.19e-01
KNAMSCTVNDVLLGITSAALSRYYFRKTGESDSNSITVRSAVLVNLRPTPGIQTLASMMESGKDNGARWGTRXGYMLXPFSHLATHDDPIEYVRRATKVARRKKSSMESVFTFWSGDMVLKLFGIKAAAALCYGMFTHTTLSFSNMVGPTEQVLFCGNPIVYIAPGTYGHPHALTVHYQSYMNTVKLVLSVDESQFPDCHQLLDD

SEQ ID NO: 80300 - protein, 108 aa, Setaria italica
  Transcript Sequence Number=SeqID_14326
SSSYSLAPWGTWGAPEQKAGRCRCLHGTRREATISCCSEPKGRPQPSPSPVCGVAGACRRFFPKAPPAGSKGCRDSPLTSSLLDRMTVCLIISYLWMVYLVFIVAAAL

SEQ ID NO: 80301 - protein, 627 aa, Setaria italica
  misc_feature (56)..(56): Xaa can be any naturally occurring amino acid
  Transcript Sequence Number=SeqID_14327
  Homolog annotation: Hit_ID=Q259C8; Match level="QueryCoverage=100%, HitCoverage=75%, E-value=0.0, Identity=78%"; Hit description =H0402C08.15 protein
  Pfam annotation: Domain name=WD40; Domain location=131-169; Score =40.5; E_value=6.6e-09; Accession=PF00400.24; Description=WD domain, G-beta repeat
  Pfam annotation: Domain name=WD40; Domain location=251-288; Score =43.5; E_value=8.4e-10; Accession=PF00400.24; Description=WD domain, G-beta repeat
  Pfam annotation: Domain name=WD40; Domain location=292-330; Score =37.6; E_value=5.1e-08; Accession=PF00400.24; Description=WD domain, G-beta repeat
  Pfam annotation: Domain name=WD40; Domain location=334-371; Score =12.5; E_value=1.3; Accession=PF00400.24; Description=WD domain, G -beta repeat
  Pfam annotation: Domain name=WD40; Domain location=384-423; Score =2.2; E_value=21; Accession=PF00400.24; Description=WD domain, G-beta repeat
  Pfam annotation: Domain name=WD40; Domain location=425-465; Score =17.4; E_value=0.059; Accession=PF00400.24; Description=WD domain, G -beta repeat
  Pfam annotation: Domain name=WD40; Domain location=482-619; Score =0.6; E_value=33; Accession=PF00400.24; Description=WD domain, G-beta repeat
  Pfam module annotation: Pfam domain module=WD40::WD40::WD40::WD40::WD4 0::WD40::WD40; Domain location=131-169::251-288::292-330::334 -371::384-423::425-465::482-619
EVRREVTTGRQLTFEEFELCVGRSPIVHELMKRTTTAASSSASDHAAPASKPRRKXPGEGWLRGIRQLAGSVAYGRRSTDEGEKEKDKKEREARRLSSATDDSLDGTGSRNAAGRVRVRQYGKACKELTGMFMTQELAAHSGSVWCINFSLDGRYLATAGEDRVIHVWEVSEGERKGELLGEASVTKENGGSCSPFLAVVGNDSPEIAALSLTCADGGYVDKKRRPRKQSNRKSVGSDHLVVPECVFGFRDKPVCSLLGHAADVLDLSWSKSQYLISSSMDKTVKLWDITTSTCLKTFSHTDYVTCIQFNPVDDNFFISGSLDEKVRIWNVRDRKIEDWNDLHEMVTAACYSPDGQVALVGSHKGSCHIFDTSEKKLQYKSQIDLRIRKKKSGQKKITGFQFAPGSSSEVLITSADSRIRVVNGDELVHKFKGFRNTSSQISASVAPNGKYVVCASEDSHVYVWRHDNSSHPSRSRSTVDVTNSYEHFHCHGVTVAITWPGSEVRGSFGSRSSRHSDSDGAVNSGRDVPAENTEHNSDAADNRYNESPVCEGVASRSTSKPPGDGASTSWPDEKLPSAKSSPGHCSSDLCIGAMDVQRRSAWGLVIVTAGRGGEIRVFQNFGFPVQV

SEQ ID NO: 80302 - protein, 49 aa, Setaria italica
  Transcript Sequence Number=SeqID_14328
ACKIAVDISNRLINYYILLMSLTYQIPNTVNIKLHISNRHISTASNPKC

SEQ ID NO: 80303 - protein, 311 aa, Setaria italica
  misc_feature (17)..(17): Xaa can be any naturally occurring amino acid
  misc_feature (26)..(26): Xaa can be any naturally occurring amino acid
  Transcript Sequence Number=SeqID_14329
  Gene Ontology: Mol. function=transferase activity
  Homolog annotation: Hit_ID=Q69SJ5; Match level="QueryCoverage=100%, HitCoverage=42%, E-value=1e-128, Identity=73%"; Hit description=NatC N(Alpha)-terminal acetyltransferase, Mak10 subunit-like
GDKEFQMNEFVVQLGQXLTLKYYFSXPNTAWQRRKLGKSLQDWSTISIQLELALKREFGETRNVLHHENMCMRVSKQLLIWTQEHAYWVASRFLTLGFELDLYSPGEYCMVYWYMYVVFTKLIEKMQLRVLASSETSRRKGKKKKDHSKDSARDTTFSSSCLLLQCYVLLSEGLSMMLAVLRNESRSFQLPSIFNTEQERFMQHFDLLQKARVPEHISYYSFKESSSQAGIMDLVKYNFFKETRKIIPSLRGSFASEPEKLAELRRIEQVAEHNRIALNIISQVGPGDPSLRVSFEFTHHPHFAVAVVKRS

SEQ ID NO: 80304 - protein, 45 aa, Setaria italica
  Transcript Sequence Number=SeqID_14330
TLTVGLDGCYTLSFDVSCSCSLIFSHFRQCYILCQLGDGGQIKAA

SEQ ID NO: 80305 - protein, 164 aa, Setaria italica
  Transcript Sequence Number=SeqID_14331
  Gene Ontology: Mol. function=metal ion binding
  Homolog annotation: Hit_ID=B9SSQ5; Match level="QueryCoverage=56%, HitCoverage=6%, E-value=7e-20, Identity=56%"; Hit description =Protein binding protein, putative
CKGVENKNHRNMQFAVCRRCPTTYHRKCLPSNIPFETKKGPNGYMQRAWDEWEGPDGHVIPRDRILIYCTKHEIIKKLGTPKRNHIIFPDVKKLRVPKRLVDPPNEKGIPEEEVLKNASPEPSQSPPAVASDQNQCSCSGPFDSFAPESLFRHPYPGTCGWLGD

SEQ ID NO: 80306 - protein, 73 aa, Setaria italica
  Transcript Sequence Number=SeqID_14332
  Gene Ontology: Mol. function=heat shock protein binding
MADLGLWKQAWRWVLSQKHILAWAHTAACGSRERLAFLVDRHWPAVSRACATSSRLALAALLQWRGCMARGVD

SEQ ID NO: 80307 - protein, 543 aa, Setaria italica
  misc_feature (238)..(238): Xaa can be any naturally occurring amino acid
  Transcript Sequence Number=SeqID_14333
  Gene Ontology: Mol. function=calcium:sodium antiporter activity; Cellular component=integral to membrane; Biological process=calcium ion transport
  Homolog annotation: Hit_ID=Q2R041; Match level="QueryCoverage=96%, HitCoverage=98%, E-value=0.0, Identity=78%"; Hit description =Magnesium/proton exchanger, putative, expressed
  Pfam annotation: Domain name=Na_Ca_ex; Domain location=380-534; Score= 94.1; E_value=4.9e-25; Accession=PF01699.16; Description =Sodiumcalcium exchanger protein
  Pfam annotation: Domain name=Na_Ca_ex; Domain location=55-217; Score =73.3; E_value=9.2e-19; Accession=PF01699.16; Description =Sodiumcalcium exchanger protein
  Pfam module annotation: Pfam domain module=Na_Ca_ex::Na_Ca_ex; Domain location=380-534::55-217
ENIFSSSGLGAASVFPMSGPSSACEGTYLLFHVETLLSGGVRASLYTVALAYCFIGLSAITARFFKSMEQIMKHSREVVSVDPHTNAPVVKQEKVWNYTIADIALLAFGTSFPQISLATIDAIRNLGQLTAGGLGPGTLVGSAAFDMFPIHAVCVIMPKAGSKKKITDLGVWLVELFWSFWAYIWLYVILEVWTPKVITVWEALLTVLQYGLLLLHAYAQDKRWPYVSIPLYGVDPFXRGDRPEDWVPEEGASVDYDNCNETSEILPGSSDKDIADIFSGHSYHNAEYHKVPENDMECSSTMNNFVKNTREDTSWRSLWRQQFVDAFMLESPESRKMASVCLRLIRIFWNLLIAPWKLFFAFVPPYHIAHGWVAFICSLIFISGIAYGVTKLTDQISCVTGVSPYVIAFTALAAGTSWPDLVASKIAAERQVTADSAIANITCSNSVNIYVGIGVPWLIDTVYNFFVYREPLYIDNAAGLSFSLLVFFATSFGCITVLVLRRIIIGAELGGPRLWAWITSVYFMILWIVFVVFSSLSLWNYTA

SEQ ID NO: 80308 - protein, 88 aa, Setaria italica
  misc_feature (45)..(45): Xaa can be any naturally occurring amino acid
  Transcript Sequence Number=SeqID_14334
  Subcellular localization annotation: CTP_CleavageSite=50; ConfidenceScore=5.94e-01
MAATSRRRSLSPPANCRPRGSPPANHRRSRSPRPPHPRRPSRRIXSPRSRGASLASRTSSPSAPPAAPTVLPADPIQPRLPSAAPPRP

SEQ ID NO: 80309 - protein, 29 aa, Setaria italica
  Transcript Sequence Number=SeqID_14335
HFFGSGAFLLGGGVYTLLDRVFPATSMVM

SEQ ID NO: 80310 - protein, 63 aa, Setaria italica
  Transcript Sequence Number=SeqID_14336
CISKTVDNYILPPETHCLSFFFQDPIVGGSLLLTYTTGYVAPLLIAASFAGVLQVRISSCYLS

SEQ ID NO: 80311 - protein, 82 aa, Setaria italica
  Transcript Sequence Number=SeqID_14337
  Gene Ontology: Cellular component=integral to membrane; Biological process=cytochrome complex assembly
  Homolog annotation: Hit_ID=Q2RAR6; Match level="QueryCoverage=87%, HitCoverage=19%, E-value=5e-31, Identity=93%"; Hit description =Cytochrome C biogenesis protein transmembrane region containing protein, expressed
AFFFQDPIVGGSLLLTYTTGYVAPLLIAASFAGVLQSLLSFRRYSAWINPISGAFLLGGGVYTLLDRVFPATSMWLGTTKTS

SEQ ID NO: 80312 - protein, 327 aa, Setaria italica
  Transcript Sequence Number=SeqID_14338
  Gene Ontology: Cellular component=integral to membrane; Biological process=cytochrome complex assembly
  Homolog annotation: Hit_ID=Q2RAR6; Match level="QueryCoverage=85%, HitCoverage=74%, E-value=1e-117, Identity=81%"; Hit description =Cytochrome C biogenesis protein transmembrane region containing protein, expressed
  Pfam annotation: Domain name=DsbD; Domain location=129-322; Score =116.4; E_value=9.4e-32; Accession=PF02683.7; Description=Cytochrome C biogenesis protein transmembrane region
  Subcellular localization annotation: CTP_CleavageSite=68; ConfidenceScore=5.81e-01
MLSAMAARPVTVASSSPLLRLPAQAASAASGTSSSPVVRGLKSEAAEKRSLLRRCPMLLTSVAVGSLVAAGAANATEILDPMHGSSGLLLADLGIGDWFGGLLFSAGQQANEAVQDQLSALSFTSLAVIFGAGLVTSLSPCTLSVLPLTLGYIGAFGSGKGQAEVVGNSIAFSLGLATTLAILGVAASFAGKAYGQVGQGLPVAASGLAIVMGLNLLEVVELQLPSFFSDFDPRTAAANLPSSVQAYLAGLTFALAASPCSTPVLATLLGYVATSRDPIVGGSLLLTYTTGYVAPLLIAASFAGVLQGENIVLLSFLEDFVVGVNCR

SEQ ID NO: 80313 - protein, 136 aa, Setaria italica
  Transcript Sequence Number=SeqID_14339
  Gene Ontology: Mol. function=selenium binding; Cellular component =integral to membrane; Biological process=cytochrome complex assembly
  Homolog annotation: Hit_ID=Q2RAR6; Match level="QueryCoverage=93%, HitCoverage=34%, E-value=3e-57, Identity=91%"; Hit description =Cytochrome C biogenesis protein transmembrane region containing protein, expressed
  Pfam annotation: Domain name=DsbD; Domain location=3-125; Score= -16.6; E_value=5e-05; Accession=PF02683.7; Description=Cytochrome C biogenesis protein transmembrane region
  Subcellular localization annotation: CTP_CleavageSite=54; ConfidenceScore=5.28e-01
TNIFLDRKGKLQLPSSIVILTQRTAAANLPSSVQAYLAGLTFALAASPCSTPVLATLLGYVATSRDPIVGGSLLLTYTTGYVAPLLIAASFAGVLQSLLSFRRYSAWINPISGAFLLGGGVYTLLDRVFPATSMVM

SEQ ID NO: 80314 - protein, 114 aa, Setaria italica
  Transcript Sequence Number=SeqID_14340
GTSLLKVEIDVDRFALDKPSAKLHGVDHNVGQFFRGDKDDLSSHTVKIIPGKLVVKLDNIGAEVIPDKAVVKCEPVGDNGVEADEEGSYDYCLEMTPKIRIFDEEDDEDVVIVR

SEQ ID NO: 80315 - protein, 74 aa, Setaria italica
  Transcript Sequence Number=SeqID_14341
MHAVLVDELAVRDLEEERTRLERAVTASLAHRGKLLAWLHKTSPAPDPGVAASTARCRTSRAGACRAPASPASC

SEQ ID NO: 80316 - protein, 133 aa, Setaria italica
  Transcript Sequence Number=SeqID_14342
  Gene Ontology: Cellular component=nucleus; Biological process =regulation of transcription, DNA-dependent
  Homolog annotation: Hit_ID=B6TD18; Match level="QueryCoverage=84%, HitCoverage=51%, E-value=1e-30, Identity=63%"; Hit description=PnFL-2
  Pfam annotation: Domain name=CCT_2; Domain location=75-101; Score =60.9; E_value=4.8e-15; Accession=PF09425.2; Description=Divergent CCT motif
  Pfam annotation: Domain name=tify; Domain location=10-45; Score=58.2; E_value=3.2e-14; Accession=PF06200.6; Description=tify domain
  Pfam module annotation: Pfam domain module=CCT_2::tify; Domain location=75-101::10-45
LWYQPFDPCREEEAQQLTIFYGGKVVVFDKFPSTKVKDLLQIVNAGGDRAGDTAAPQPSQNSLSGNSTSPSCNMPIARRNSLHRFLEKRKGRITAKAPYQVNSPVGVDASKQATGEKKSWLGLGQEVAVKQEI

SEQ ID NO: 80317 - protein, 223 aa, Setaria italica
  Transcript Sequence Number=SeqID_14343
  Gene Ontology: Cellular component=nucleus
  Homolog annotation: Hit_ID=B6TD18; Match level="QueryCoverage=90%, HitCoverage=96%, E-value=7e-43, Identity=52%"; Hit description=PnFL-2
  Pfam annotation: Domain name=CCT_2; Domain location=165-191; Score =60.9; E_value=4.8e-15; Accession=PF09425.2; Description=Divergent CCT motif
  Pfam annotation: Domain name=tify; Domain location=108-143; Score =58.2; E_value=3.2e-14; Accession=PF06200.6; Description=tify domain
  Pfam module annotation: Pfam domain module=CCT_2::tify; Domain location=165-191::108-143
MGAEKQEEQGADTGMAGRATPAREKSSFAVTCSLLSQYLKDKKGGLQGLGGLGMAPPPPDAAGAFRPPTTMNLLSALDAPAAEEPNDAAKATTEEAKEHDQQTGENPREEEAQQLTIFYGGKVVVFDKFPSTKVKDLLQIVNAGGDRAGDTAAPQPSQNSLSDMPIARRNSLHRFLEKRKGRITAKAPYQVNSPVGVDASKQATGEKKSWLGLGQEVAVKQEI

SEQ ID NO: 80318 - protein, 117 aa, Setaria italica
  misc_feature (50)..(50): Xaa can be any naturally occurring amino acid
  Transcript Sequence Number=SeqID_14344
SNIVKIWISFLEDSWKLQSSYNEQKEKKTCDELEKCVSDFLKLTKHHLSXSREEAKEHEDDETSEKTNPRKSLEEEYLETEKKVLLSHLALTWFQSSSATFLYQLILCACFLTALHI

SEQ ID NO: 80319 - protein, 610 aa, Setaria italica
  misc_feature (352)..(352): Xaa can be any naturally occurring amino acid
  Transcript Sequence Number=SeqID_14345
KSFKKTVARLEEAAVSCRGGERVELLKRWLGALLDVDAELGGSDLKASEDHDPSGETDTSKAPMVLFYDADIDGAPMNFRDVFLYSQALEGITLSMILEAPSEEEVSLLLEIFGICLTGGKEVNKEIMSNVQDLAKAFSEYKDEVLVKREELLEYAQSIISGLKRNADIVRIDAETLELQRKLDEKQKSRAQSPEDQVKTSEKIAVANLEAFKEALSEVRLCSRVEELLLKKKSITPGDSLEIHSQKVDKLKVLADSLASSSSKAEQRILEHRRQKEDALNFRVKKENEVSAAEKELLDEITELEKQRDELEAQLKKVNISLNAATGRLKQTREERDQFDEANNQIIFSLKXKEDDLSKSIALCNVESNIVKIWISFLEDSWKLQSSYNEQKEKKTCDELEKCVSDFLKLTKHHLSAFKEVLNPLIESIKTYVDNLAVLNSREEAKEHEDDETSEKTNPRKSLEEEYLETEKKIIIAFSIVDHIKRLFYSEQGANSRRDDPEVKNLVDEIEKLRESFESIERPTLSIESEKAKPLPVEGSKLSPSPLQAPATPKAAHVDSPKSPMKPEQHFDSDAELATLGSELGKEDKEYSGEEISGWEFDELEEDLKS

SEQ ID NO: 80320 - protein, 234 aa, Setaria italica
  Transcript Sequence Number=SeqID_14346
  Gene Ontology: Mol. function=nucleotide binding; Biological process =defense response
  Homolog annotation: Hit_ID=Q8LJZ9; Match level="QueryCoverage=99%, HitCoverage=26%, E-value=2e-62, Identity=57%"; Hit description =Putative stripe rust resistance protein Yr10
KIEEMGQLLELRVLRIVFNNWNNNLVEYLRKLQKISNLYIEVIDGRCSIGGLDAWVAPQHLCRLNTVRSCWFSALPAWMNRSVLPNLSFLWIAVRELQLKDLEILGRLPALRSLELEVDHANLGIHGRFDVGAGLFPCLVHCKFWGFVEPVVFRQGAMPRIRELYLELFFMWEAKETTTSDGGLDMGIRNLPLLQDVFIELRSEVASTEEVEHVKATLRRAAEFHPNHPRLTIL

SEQ ID NO: 80321 - protein, 530 aa, Setaria italica
  misc_feature (27)..(27): Xaa can be any naturally occurring amino acid
  misc_feature (37)..(37): Xaa can be any naturally occurring amino acid
  Transcript Sequence Number=SeqID_14347
  Gene Ontology: Mol. function=metal ion binding; Cellular component =ribonucleoprotein complex; Biological process=ubiquitin-dependent protein catabolic process
  Homolog annotation: Hit_ID=Q10GJ1; Match level="QueryCoverage=89%, HitCoverage=80%, E-value=1e-144, Identity=53%"; Hit description=IBR domain containing protein, expressed
  Pfam annotation: Domain name=IBR; Domain location=193-256; Score =71.2; E_value=3.9e-18; Accession=PF01485.13; Description=IBR domain
  Pfam annotation: Domain name=zf-C3HC4; Domain location=123-175; Score= 11.6; E_value=0.0048; Accession=PF00097.17; Description=Zinc finger, C3HC4 type (RING finger)
  Pfam module annotation: Pfam domain module=IBR::zf-C3HC4; Domain location=193-256::123-175
MASDEEDECGYFYDEDDAEEDAAAGLXEEGAAPPPEXRADYWAITQESLPTAQKQDLCTVMNLLNVKQHQARALLIHHRWKMDGIYDCLDKGRERMLRDAGIVLQENTIMAAAGSTPWRIVHCNVCFEDIAVGVVLTMDCGHCFCNDCWTQHFYAAVESGKKQIRCMEVKCPAFCDEDHVRRLLGQKYPEMAKRFNRFLLESYLEDNDSVKWCPSAPNCGRAIRVGAGERYCEVECPCGLSFCFNCMALAHSPCPCTIWEKWNAKRSEGESIKWILANTKSCPKCFKAIEKNGGCNLVRCNCGQCMCWLCGGGTGVEHTWTSIAGHSCNRYKEDSRGKTADTSREQMQRYKHYYDRFKIHGDSCNTEKQKLGPTLKERVRLLEADLQRPLTIRDGDWLIRAHRRLLVSRQVLSRSYVFAYCMFGGDLRMQPHGRAGLGVARNLFEDQQEQLEQHVERLSALLAGADVAAMPEAEIVQAKQKAVTLVKTVERLCGEMYKCIQDELLTLLVEPMTIAAYRPDGPDKAEELAA

SEQ ID NO: 80322 - protein, 93 aa, Setaria italica
  Transcript Sequence Number=SeqID_14348
  Gene Ontology: Mol. function=structural molecule activity
  Subcellular localization annotation: CTP_CleavageSite=40; ConfidenceScore=5.56e-01
MALAAPSSLRRLPARSPSAASLLRSRPLREPRLRLRQPLVAAAAAATAPLAASSSPADTERRKHELLRLVQETRRGFAAGPDQRAAIEEAIVG

SEQ ID NO: 80323 - protein, 67 aa, Setaria italica
  Transcript Sequence Number=SeqID_14349
QFLFSIHNKVLLSLSVLLALRSLSIKCLVLFEVLPGARLAVTASYSYIVLVHHQILAISSAAFGTVK

SEQ ID NO: 80324 - protein, 80 aa, Setaria italica
  Transcript Sequence Number=SeqID_14350
  Homolog annotation: Hit_ID=B6U6D3; Match level="QueryCoverage=77%, HitCoverage=11%, E-value=4e-23, Identity=79%"; Hit description =Heparanase-like protein 2
KTLKVTITLCNTTGYNVTLQNDINIGKRPDLEKRSSFSHRLRKAVSWLGSKASSDTKKREEYHLTPKDLRHATVGKAHRG

SEQ ID NO: 80325 - protein, 96 aa, Setaria italica
  Transcript Sequence Number=SeqID_14351
  Gene Ontology: Mol. function=hydrolase activity; Cellular component =extracellular region
  Homolog annotation: Hit_ID=B6U6D3; Match level="QueryCoverage=90%, HitCoverage=16%, E-value=3e-42, Identity=91%"; Hit description =Heparanase-like protein 2
ESAGRTLLYYSQLLQTSGHGVVNALTHHVYNLGGGDDVHLIRKILDPKYLDRAEDTYRDMQLTIQRHGTWTSAWVSESGGVFNNGGELVSNTFIDR

SEQ ID NO: 80326 - protein, 68 aa, Setaria italica
  Transcript Sequence Number=SeqID_14352
  Homolog annotation: Hit_ID=B6U6D3; Match level="QueryCoverage=79%, HitCoverage=9%, E-value=4e-18, Identity=81%"; Hit description =Heparanase-like protein 2
QCSSYESSSNWTPLSKTMLLNGVQLELGDDGSVPAMNPVLAAVDSPVYLAPTSIAFIVLPEFEAKACS

SEQ ID NO: 80327 - protein, 540 aa, Setaria italica
  Transcript Sequence Number=SeqID_14353
  Gene Ontology: Mol. function=hydrolase activity; Cellular component =extracellular region
  Homolog annotation: Hit_ID=B6U6D3; Match level="QueryCoverage=96%, HitCoverage=97%, E-value=0.0, Identity=88%"; Hit description =Heparanase-like protein 2
  Pfam annotation: Domain name=Glyco_hydro_79n; Domain location=26-344; Score=534.2; E_value=1.6e-157; Accession=PF03662.6; Description =Glycosyl hydrolase family 79, N-terminal domain
MEVRLLLLLALICLHAAPRWASAQQPEEATVIVKGSTRIAETDESYVCATIDWWPPEKCNYNQCPWGQSSILNLDLDHPFLAQAIQAFDNLRIRLGGSLQDRVVYDVGAESPCTPFRNMSNGLFGFSVGCLSMDRWDKLNDLFQKTGAIVTFGVNALYGRYNVRRSIWAGKWNSTNAYDFVKYTISKGYPVGSWEFGNELSGHGIGAKVDAKLYGKDVIEFKSILQQLYKAPLSQPLLLAPGGFFDQQWYSQLLQTSGHGVVNALTHHVYNLGGGDDVHLIRKILDPKYLDRAEDTYRDMQLTIQRHGTWTSAWVSESGGVFNNGGPLVSNTFINSIWYLDQLGMASKYNTKVFCRQTLIGGNYGLLDTQTFLPNPDYYSALLWHRLMGNGVLSIDSIAPRRLRAYAHCRRQQQGITLLLINLSNTTGYNVTLQNDINIGKRPDLEKRSSFSHRLRKAVSWLGSKASSDTKKREEYHLTPKDGDVQSKTMLLNGVQLELGDDGSVPAMNPVLAAVDSPVYLAPTSIAFIVLPEFEAKACS

SEQ ID NO: 80328 - protein, 155 aa, Setaria italica
  Transcript Sequence Number=SeqID_14354
  Gene Ontology: Mol. function=peptidase activity; Cellular component =integral to membrane; Biological process=lipid transport
  Homolog annotation: Hit_ID=B6U3L7; Match level="QueryCoverage=54%, HitCoverage=64%, E-value=3e-28, Identity=75%"; Hit description =Cortical cell-delineating protein
  Pfam annotation: Domain name=Tryp_alpha_amyl; Domain location=73-154; Score=79.9; E_value=8.9e-21; Accession=PF00234.14; Description =Protease inhibitorseed storageLTP f
GGGYGPIGGGGNGGGVGPIGGGSGGIGPIGGGSGGGIVPIGGGSGGGYGPIGGGGSGGGGSGKDGTSGWYGHCPTNALKLGVCANVLDLIKAKAGVPVDEKCCPLLNGLVELDAAVCLCTAIKANVLGLNLNIPVNLSLVLNFCGKGVPTGFKCA

SEQ ID NO: 80329 - protein, 103 aa, Setaria italica
  Transcript Sequence Number=SeqID_14355
  Gene Ontology: Mol. function=cation transmembrane transporter activity; Cellular component=integral to membrane; Biological process=calcium ion transport
  Homolog annotation: Hit_ID=Q9LKW7; Match level="QueryCoverage=100%, HitCoverage=24%, E-value=1e-44, Identity=86%"; Hit description =Calcium/proton exchanger CAX1-like protein
TLGVSLGSATQISMFVVPLSVLVAWIMGVPMDLDFNLLETGCLFLAILVTTFTLQDGSSHYLKGLLLLFCYIVIGICFFVLRQRGSGGNDGVDLGIGSKTWRI

SEQ ID NO: 80330 - protein, 448 aa, Setaria italica
  Transcript Sequence Number=SeqID_14356
  Gene Ontology: Mol. function=cation transmembrane transporter activity; Cellular component=integral to membrane; Biological process=calcium ion transport
  Homolog annotation: Hit_ID=Q9LKW7; Match level="QueryCoverage=91%, HitCoverage=98%, E-value=0.0, Identity=83%"; Hit description =Calcium/proton exchanger CAX1-like protein
  Pfam annotation: Domain name=Na_Ca_ex; Domain location=290-423; Score= 113.8; E_value=5.6e-31; Accession=PF01699.16; Description =Sodiumcalcium exchanger protein
  Pfam annotation: Domain name=Na_Ca_ex; Domain location=97-248; Score =89.9; E_value=8.9e-24; Accession=PF01699.16; Description =Sodiumcalcium exchanger protein
  Pfam module annotation: Pfam domain module=Na_Ca_ex::Na_Ca_ex; Domain location=290-423::97-248
  Subcellular localization annotation: CTP_CleavageSite=48; ConfidenceScore=5.10e-01
MDSAAAAAGLLEPGAKELAARSLGRTAHNMSSSSLRKKSDLALLRKVPCASLRRLLDNLQQVLLATKLVLLFPAVILALAARFFHFGQEWIFVLSLIGLIPLAERLSFLTEQVAFYTGPTVGGLLNATFGNVTEVIIAIFALYEGKVLVVKCSLLGSILSNLLLVLGTSLFFGGLANLGKEQPYDRMQADVSTGLLILGALCHSLPLMLRYSVSSGEHMMVSWDAGLELSRACSVVMLLAYVAYLFFQLKTHRQLFEPQEVEDDGDDSVSQDEAVLGFSSAIIWLGVMTLMTAVLSEFVVSTIEAASKSWELSVSFISIILIPIVGNAAEHAGAVIFAFKNKLDITLGVSLGSATQISMFVVPLSVLVAWIMGVPMDLDFNLLETGCLFLAILVTTFTLQDGSSHYLKGLLLLFCYIVIGICFFVLRHRGSGGNDGVDLGIGSKTWRI

SEQ ID NO: 80331 - protein, 119 aa, Setaria italica
  Transcript Sequence Number=SeqID_14357
  Gene Ontology: Mol. function=zinc ion binding; Cellular component =intracellular
  Homolog annotation: Hit_ID=Q9ZS85; Match level="QueryCoverage=90%, HitCoverage=12%, E-value=3e-12, Identity=37%"; Hit description =T4B21.1 protein
SYAGIAPKKWYPSKNSYIDGSHEIEDSAEASDADLGSAEEVCEFMVPADESQIICALCGEPFDDIYSVEKGDWMYKDAVFLDYPKREGSCGSNVEGEEHVPIVHVRCMPRGSNNGMEVD

SEQ ID NO: 80332 - protein, 268 aa, Setaria italica
  Transcript Sequence Number=SeqID_14358
  Gene Ontology: Mol. function=sequence-specific DNA binding; Cellular component=nucleus; Biological process=regulation of transcription, DNA-dependent
  Homolog annotation: Hit_ID=B6TQB9; Match level="QueryCoverage=92%, HitCoverage=60%, E-value=4e-42, Identity=46%"; Hit description=GATA zinc finger family protein
  Pfam annotation: Domain name=GATA; Domain location=181-216; Score =74.1; E_value=5e-19; Accession=PF00320.19; Description=GATA zinc finger
LEWVSRIMDDSLAELPPPPKLPAAPLAAAARRPPLERAVPAPAAPAPMRSPTICALSTEALVPVKARRSKRSRASVWSLSGGAPPSDSTSSSSTTTTSSCSSSASFSSFLFLPAESPPPFWAAHLLGEAPPRGSKKSKHGKHGKNNGKPKKRGRKPKHHPAASHFAGGAAASPPVPGDRRCSHCGVQKTPQWRAGPEGAKTLCNACGVRYKSGRLLPEYRPACSPTFVSSIHSNSHRKVLEMRRKKEGVVLIPGPAPLPAAAPAVASF

SEQ ID NO: 80333 - protein, 80 aa, Setaria italica
  Transcript Sequence Number=SeqID_14359
  Subcellular localization annotation: CTP_CleavageSite=68; ConfidenceScore=5.75e-01
GPWPPPSSIAPSSSSCCGILPTAWRLGFPSVEPFSSCCRSQGQAWRRRQRRASPGPGAVKKVTPRSSRAGRGKEGDVEDL

SEQ ID NO: 80334 - protein, 372 aa, Setaria italica
  misc_feature (56)..(56): Xaa can be any naturally occurring amino acid
  misc_feature (207)..(207): Xaa can be any naturally occurring amino acid
  misc_feature (367)..(367): Xaa can be any naturally occurring amino acid
  Transcript Sequence Number=SeqID_14360
  Gene Ontology: Cellular component=cytoskeleton
  Homolog annotation: Hit_ID=Q2QTH8; Match level="QueryCoverage=94%, HitCoverage=98%, E-value=1e-162, Identity=81%"; Hit description =Transducin family protein, putative, expressed
  Pfam annotation: Domain name=WD40; Domain location=140-180; Score =22.8; E_value=0.0015; Accession=PF00400.24; Description=WD domain, G- beta repeat
  Pfam annotation: Domain name=WD40; Domain location=293-341; Score =7.1; E_value=5.8; Accession=PF00400.24; Description=WD domain, G -beta repeat
  Pfam annotation: Domain name=WD40; Domain location=53-93; Score=33.7; E_value=7.2e-07; Accession=PF00400.24; Description=WD domain, G-beta repeat
  Pfam annotation: Domain name=WD40; Domain location=97-136; Score=0.9; E_value=31; Accession=PF00400.24; Description=WD domain, G-beta repeat
  Pfam module annotation: Pfam domain module=WD40::WD40::WD40::WD40; Domain location=140-180::293-341::53-93::97-136
WKRDLERLGLKNSIQTNFGDDYVFQIASCQEISTLAVSLSTNALKFYSPATGQYLXGECIGHEGTIHEISFSVPSSPQVICSCSSDGTVRAWDTRNFKQISLLRGSASQEMFTFSFGGSSGNLLVAGSNAQVLLWDWRTSKQVACLEESHMDDVTQVKFAPNQQSKLISAAVDGLVCVFDTDGDIDEDNHLLSVMNAETSVAKVGFXGNMYQKLWCLTHIETLSVWDWNDGSRELNMEDARSLATDKWNLDHVDYFVDCHYSLPDDQLWLIGGTSAGTLGYFPLRNDPAGAIGSVEAILEGGHTGVVRTVYPAAGTHESLGQNRGIFGWTGGEDGRLCCWRSDEIAETNKSWISTSLGLKLQKKPKXRHQPY

SEQ ID NO: 80335 - protein, 170 aa, Setaria italica
  Transcript Sequence Number=SeqID_14361
  Gene Ontology: Mol. function=hydrolase activity, acting on acid anhydrides, in phosphorus-containing anhydrides
  Homolog annotation: Hit_ID=B9S2H8; Match level="QueryCoverage=100%, HitCoverage=14%, E-value=3e-70, Identity=78%"; Hit description =Helicase, putative
  Pfam annotation: Domain name=Helicase_C; Domain location=1-69; Score =6.2; E_value=0.014; Accession=PF00271.23; Description=Helicase conserved C-terminal domain
FPLWKSFIEELFQRGLVKVVFATETLAAGINMPARTAVISSLSKRIDAGRQLLTPNELFQMAGRAGRRGIDTVGHAVLVQTPYEGPEECCDIIFAGLEPLVSQFTASYGMVLNLLAGSKVTHNQKESDDLKVKRSGRTLEEARKLVEQSFGNYVGSNVMVAAKEEIERIQ

SEQ ID NO: 80336 - protein, 105 aa, Setaria italica
  misc_feature (65)..(65): Xaa can be any naturally occurring amino acid
  Transcript Sequence Number=SeqID_14362
  Gene Ontology: Mol. function=metalloendopeptidase activity; Cellular component=chloroplast; Biological process=proteolysis
  Homolog annotation: Hit_ID=B9R9Q2; Match level="QueryCoverage=99%, HitCoverage=14%, E-value=2e-26, Identity=55%"; Hit description =Mitochondrial intermediate peptidase, putative
LNTNTTLYNAILKAEGESVLLTEEARRAATTLRIDFEKGGIHLPEDKLERVNQLNLEIAQLGRKXRFSENVMNKPGFVDVYPASRVPRNMQPHFKSVYRSNSGSF

SEQ ID NO: 80337 - protein, 63 aa, Setaria italica
  Transcript Sequence Number=SeqID_14363
FSHPLFEQTWNEIQCEYAWIGRSFYPEHPDESCHAQATSDSDLKTLCAMHEKTRPNYQTIYAC

SEQ ID NO: 80338 - protein, 159 aa, Setaria italica
  Transcript Sequence Number=SeqID_14364
  Gene Ontology: Cellular component=extracellular region; Biological process=sexual reproduction
  Homolog annotation: Hit_ID=B6TT10; Match level="QueryCoverage=92%, HitCoverage=54%, E-value=4e-63, Identity=80%"; Hit description=Beta -expansin 3
  Pfam annotation: Domain name=DPBB_1; Domain location=53-135; Score =109.8; E_value=9e-30; Accession=PF03330.10; Description=Rare lipoprotein A (RlpA)-like double
GKSSAAAGKAADLDMEWRPATATWYGDAEGDGSDGGACGYGTLVDVVPMKARVGSVSPVLFKDGEGCGACYKVKCLDHNICSRRAVTVIVTDECPGGVCGGGRTHFDLSGAAFGRLAVAGAGGQLRNRGEINVVFRRTVCRYGGKNIAFHVNEGSTSFW

SEQ ID NO: 80339 - protein, 122 aa, Setaria italica
  misc_feature (7)..(7): Xaa can be any naturally occurring amino acid
  Transcript Sequence Number=SeqID_14365
NAEHMKXLMEAAKSNEDMLRKTSNELELKLKSSDYEKQQMLEEISGLNLQVQKIMNLQVMEKGFEKMSHIKEENLGMQEIGGDDQADIQSKIQLLETKIAPQASDSFVELCTTYFPPTPLQA

SEQ ID NO: 80340 - protein, 122 aa, Setaria italica
  Transcript Sequence Number=SeqID_14366
  Homolog annotation: Hit_ID=B9S0A4; Match level="QueryCoverage=97%, HitCoverage=8%, E-value=3e-12, Identity=40%"; Hit description=ATSMC2, putative
SLKESSITSKCLDEVRQDILVLSSSIDSHVSANKVLQRNVIELESCNSSSALQLSSSALQLEQENIELSERISGLEAQLTYLTNEKESSELQIHDSKALIVNLKDKVECQQSEMESQRLEFK

SEQ ID NO: 80341 - protein, 130 aa, Setaria italica
  Transcript Sequence Number=SeqID_14367
CRGRILKGWAVTGSVHPITETFTVLVRILQHQLPSPVYMAFGSALTRPFSHDNPTRMSHCYRTDITGLDGVHLCCQSQGYGRPWVKRGASERCNLFKRCHSKLCAVSVVIKRSTCVVSLKVTAGHSSPSR

SEQ ID NO: 80342 - protein, 364 aa, Setaria italica
  Transcript Sequence Number=SeqID_14368
  Homolog annotation: Hit_ID=B6TE57; Match level="QueryCoverage=84%, HitCoverage=76%, E-value=1e-130, Identity=77%"; Hit description=IQ calmodulin-binding motif family protein
  Subcellular localization annotation: CTP_CleavageSite=36; ConfidenceScore=5.11e-01
PSPFSTSPFPELDLFLPPAPPLNPFPAPSPYPFLLRDLTDRVAALELAVAARRPEPTTRKCTYVTEAGGRKVKWTSIEKPRAGDRTLKWEAEIKSPNDDGFDRKWKWEAKGGSSRKIKWGAAVKGKGSLQPWSQAYTWEEDFAATDTSDEEDEKKADRNKTKIADKHKKNKEGKVVNKAKKCPVATVKIEEIPDDNDAGCVAIRKAFAKGNGKGKKKELSPEDAALLIQMNYRAHLAHRSQVLRCLRDLAVAKAKLKEIRSLFYNISYRRRIAHDHEERQRFSEKIIVLLITVDALEGPDYMVRTAKKSMLEELEAMLEVVDPQSPGKRRSLSRRKFDLPEGGAVSGEKADGVNKAVRIINEGK

SEQ ID NO: 80343 - protein, 45 aa, Setaria italica
  Transcript Sequence Number=SeqID_14369
TGADARIYRFSLPGDREQTVMDFVGQTSPTRWFVLGLLCYLLSTQ

SEQ ID NO: 80344 - protein, 383 aa, Setaria italica
  Transcript Sequence Number=SeqID_14370
  Gene Ontology: Mol. function=hydrolase activity; Cellular component =cytoplasm; Biological process=nuclear-transcribed mRNA catabolic process, nonsense-mediated decay
  Homolog annotation: Hit_ID=B6T785; Match level="QueryCoverage=100%, HitCoverage=100%, E-value=1e-149, Identity=70%"; Hit description =Dcp1-like decapping family protein
  Pfam annotation: Domain name=DCP1; Domain location=17-139; Score =219.8; E_value=6.9e-63; Accession=PF06058.5; Description=Dcp1-like decapping family
MAHGGGRAKVTPNLQVDGEGTRTLNLTVLQRLDPSVEDILITAAHVTLYDFDTDVNQWSRKDVEGSLFVVKRNAQPRFQFIVMNRRNTDNLVEDLLGDFEYQLQVPYIMYRNAAQEVIGIWFYNSQECHEVANLFSRILNAFSKVPPKPKIPSAQSEFEELEAAPALVEGPLEPQTSNIISSTNQVQEDPLSAFFSAAANAGSTSSVGVAGQPNQSFGAIPLSTHAPTSTITSQSPGLHHLLPSQASSISGIPADVHGGTGPIVRSASLVNPSHFSPLTSLQTTMVHSNSAVPTAPPQHPRTSQQPQSAPLLQPFPLPTASPSPPYGTPLLQPFPPPNPSPSLASAPVYSPALSRDKVRDALLRLVESEEFIDLVYREIVNRQ

SEQ ID NO: 80345 - protein, 259 aa, Setaria italica
  Transcript Sequence Number=SeqID_14371
  Gene Ontology: Mol. function=DNA binding; Cellular component=nucleus; Biological process=regulation of transcription, DNA-dependent
  Homolog annotation: Hit_ID=B6SXX7; Match level="QueryCoverage=100%, HitCoverage=38%, E-value=5e-97, Identity=70%"; Hit description=Auxin response factor 4
THGVAWSHSSDTPKWQYLGERRFSADVWNCKMNDAMSGFRHRNANGFAYQPLGFSESVRFSEVLQGQEMSQAVPSFLGAALDARVQNGRIGSFDYVHRSTVSQGYPLQQFNLPATEVHSPSSVLMVNQTTALQPELEGMTNREEANGSRYAPIAVRREAERWPSTQQPRASGNGSEVFNTTEASAPATAAKPVDRGVGRSSCRLFGFSLTDKILGAEEDGVKEGNYEADHQTPRALDLFGHSQSAPSALHALCAAPLGI

SEQ ID NO: 80346 - protein, 206 aa, Setaria italica
  Transcript Sequence Number=SeqID_14372
  Gene Ontology: Mol. function=Rho GDP-dissociation inhibitor activity; Cellular component=cytoplasm; Biological process=negative regulation of cell adhesion
  Homolog annotation: Hit_ID=B6TI53; Match level="QueryCoverage=88%, HitCoverage=86%, E-value=1e-67, Identity=69%"; Hit description=Rho GDP-dissociation inhibitor 1
  Pfam annotation: Domain name=Rho_GDI; Domain location=3-204; Score =32.8; E_value=4.4e-11; Accession=PF02115.9; Description=RHO protein GDP dissociation inhibitor
VSISNNDTDTNDFEDDDYDDDDGKHTVALGPQVPLKDHLELDKDDDSLRRWKEQLLGDVDTTKLGETAEPEVTILNLTILSPERPDLVLPIPLVLDDKGYAFALKDGSTYSFRFSFTVSNNIVSGLRYTHNVWKTGVRVENQKVMLGTYSPQQEPYTYEAEEDTTPSGIFARGSYSAKLKFVDDDGKVYLDMSYCFEIRKDWPASA

SEQ ID NO: 80347 - protein, 308 aa, Setaria italica
  misc_feature (27)..(27): Xaa can be any naturally occurring amino acid
  Transcript Sequence Number=SeqID_14373
  Gene Ontology: Mol. function=zinc ion binding
  Homolog annotation: Hit_ID=Q53M07; Match level="QueryCoverage=84%, HitCoverage=41%, E-value=5e-46, Identity=37%"; Hit description =Transposon protein, putative, unclassified
  Pfam annotation: Domain name=SWIM; Domain location=142-178; Score =26.0; E_value=0.00015; Accession=PF04434.9; Description=SWIM zinc finger
LSNNELLQSLYDIRQQWAPSYTKKVFXSRNQMPTTCENIEKVIEKYFSSKTELRVAVWQLGEAISSSFEAEVQADYFTIFQMPPLSTASPLEKQGSSIFTSTIFGIFQGQFAESFGYHAERLEDETVHKYRVTRYEGDEEIHTVSFSPDQSTVNCSCCLFESCGMLCRHALRIFIIQGVRALPKAYILKRWTKHAKNIITSDNYVDLRGDREDPSTARFNDLCCDAVKCAKEGSKSAEIYAVAKDALHKAFDEVVRSSKNFRGQQNLQSCTTSIKRPIKKFGKAKDSSGKSLKRSASKSPLMESDDIR

SEQ ID NO: 80348 - protein, 114 aa, Setaria italica
  misc_feature (103)..(114): Xaa can be any naturally occurring amino acid
  Transcript Sequence Number=SeqID_14374
  Subcellular localization annotation: CTP_CleavageSite=50; ConfidenceScore=5.77e-01
SCSLLPTVATNPRPAIVSSPLFSLSFMSVSLAGGSRRPVGRQPRRILLIRQAATGEGSMCPSSFCTSSCSGGRGGGRRRYFSRKWMVLVHVKSWNGECFLLSXXXXXXXXXXXX

SEQ ID NO: 80349 - protein, 46 aa, Setaria italica
  Transcript Sequence Number=SeqID_14375
NRYLLYTNLSSKEGIRESHTIPFLSNLFNPTINQTYQEVLRKIKIK

SEQ ID NO: 80350 - protein, 113 aa, Setaria italica
  Transcript Sequence Number=SeqID_14376
  Gene Ontology: Mol. function=ubiquitin-protein ligase activity; Cellular component=nucleus; Biological process=ubiquitin-dependent protein catabolic process
  Homolog annotation: Hit_ID=Q5Z7Y0; Match level="QueryCoverage=98%, HitCoverage=18%, E-value=4e-24, Identity=53%"; Hit description=SIAH1 protein-like
DPPAAASGGEKRKREDGPAEAAGGWEPPKPRILVARGGKPEGSAVVGAGTAEGSGRNAVETVVGGEADGISVRIDPDVLDCSICFEPLQPPLYQCQNGHVACFSCWSRLTNKC

SEQ ID NO: 80351 - protein, 137 aa, Setaria italica
  Transcript Sequence Number=SeqID_14377
  Gene Ontology: Mol. function=protein phosphatase type 2A regulator activity; Cellular component=protein phosphatase type 2A complex; Biological process=signal transduction
  Homolog annotation: Hit_ID=B9T7W7; Match level="QueryCoverage=98%, HitCoverage=18%, E-value=8e-40, Identity=55%"; Hit description=WD -repeat protein, putative
  Pfam annotation: Domain name=WD40; Domain location=55-92; Score=45.0; E_value=2.9e-10; Accession=PF00400.24; Description=WD domain, G-beta repeat
  Pfam annotation: Domain name=WD40; Domain location=96-134; Score =42.4; E_value=1.8e-09; Accession=PF00400.24; Description=WD domain, G-beta repeat
  Pfam module annotation: Pfam domain module=WD40::WD40; Domain location=55-92::96-134
IPMDDPRCTILKAHRKSGLAPADAENGKKCKVKGVKQSADSACVVIPAMVFQISEEPLHEFRGHSGDVLDLSWSNNKHLLSASTDKTVRLWELGSANCVTVFHHSNFVTCVQFNPANESRFISGSIDGKIRVWDILK

SEQ ID NO: 80352 - protein, 111 aa, Setaria italica
  Transcript Sequence Number=SeqID_14378
TVQDPCTRKLKSDSETEQSLAKASGENIRQNQENLILTCCSVLTSLFLLQTSSSSVLPADRNVNLTNNLMIRGNRLPFPFVILLSLKCSMDMLLLLDLQIFTCLPSFPIVL

SEQ ID NO: 80353 - protein, 78 aa, Setaria italica
  Transcript Sequence Number=SeqID_14379
FKLSSARIVFIAFTSCVTVCLSLPLPVKSIDGTTEAHVYLNGSRSLQPFARPSRLALLWAFSPCNYYYVYHKCCRREV

SEQ ID NO: 80354 - protein, 142 aa, Setaria italica
  Transcript Sequence Number=SeqID_14380
PKQEAAGRSGGGAGDGDGDDEAKRKEEALASSRLLNPGFKPSKLSQDRLDKFKELHKKRLQITEKPKYKRKPKGTTGRSTKVTNDYKFIDKDESAVSSPRDVYHTSSVTVIQEDPAQPLSRDKRKLHWGLDIKERWERKANM

SEQ ID NO: 80355 - protein, 140 aa, Setaria italica
  Transcript Sequence Number=SeqID_14381
RLPASAQSGRAPTAGRAPPDLIRPRPGRAPPDLLPSLPGCHQTSPAPPSAPYLYPPQIHLVCHGLQRGAPGLLEEGGRPASAACHEEQSSRHGDAPHPVQQRCAAALAYRPPVRRPRPAGRISATTMGRISPPPHIEAKV

SEQ ID NO: 80356 - protein, 58 aa, Setaria italica
  Transcript Sequence Number=SeqID_14382
LFLPYMLACNSTPRSCSVMKTYMLHLCLTGGSCACLHFAHFCFWCGQCLILSSTHFAW

SEQ ID NO: 80357 - protein, 693 aa, Setaria italica
  misc_feature (223)..(223): Xaa can be any naturally occurring amino acid
  Transcript Sequence Number=SeqID_14383
  Gene Ontology: Mol. function=ubiquitin protein ligase binding; Cellular component=plasma membrane; Biological process=ubiquitin -dependent protein catabolic process
  Homolog annotation: Hit_ID=Q9SGJ0; Match level="QueryCoverage=76%, HitCoverage=55%, E-value=1e-129, Identity=46%"; Hit description =F28J7.14 protein
GNRGKVIEDRPTDDKAVDGSAKDDKAVEGRATDEVVEGRNKDDKAIDGTEDNKAIEDRTKDDKAIEDGTQDDKAVEDGTKNDMDIEDGKDAKVIEDKVTDDNAIEGRETDGKAVGEAKEIDILDEAPKCDQSTSTDDEIAETEENIVHNGHSVSYERNEELDSKIEKLEQELREVAALEVSLYSVVPEHGCSSHLLHTPARRLSRLYIHASKFWSSDKKASVXENSVSGLVLVAKSCGNDVSRLTFWLSNIVVLREIIAQTFGTSRQSGPVMKSFSTNGNAKKLDGNFAPMRWKSSSNAKHARPNIMQMPDDWRESGTLLSALEKIESWIFSRIVESVWWQAMTPHMQTPVEDLSTPKISRLLGPSLGDQQHGNFSIDLWKTAFRDAFSRICPLRASGHECGCLPVLAKLVMEHCVARLDVAMFNAILRESANEIPSDPISDPIVDSRVLPIPAGDLSFGSGAQLKNSVGNWSRWLTDTFGMDGAESEKDGQDAEHNGDERRDAAESNCFKLLNELSDLLMLPKDMLLEKSIRKEVCPSIGLPLVTRILCNFTPDEFCPDPVPGMVLEELSSEGMMERFMEKEVISTFPVTAAPVVYCPPSLEDVAEKVADTGCGNPELDRRSSMAQRRGYTSDDDLDDLDSPLASLYDRSAPPSPCSNGAAHFSARQGAGAGAASMANARYELLREVWSERR

SEQ ID NO: 80358 - protein, 263 aa, Setaria italica
  misc_feature (213)..(213): Xaa can be any naturally occurring amino acid
  misc_feature (254)..(254): Xaa can be any naturally occurring amino acid
  Transcript Sequence Number=SeqID_14384
  Gene Ontology: Mol. function=transferase activity, transferring phosphorus-containing groups; Cellular component=TORC2 complex; Biological process=negative regulation of cell cycle arrest in response to nitrogen starvation
  Homolog annotation: Hit_ID=Q5EFI5; Match level="QueryCoverage=100%, HitCoverage=10%, E-value=1e-135, Identity=89%"; Hit description =Target of rapamycin
EFTIFIPSIRKILVKHHLRYRKWDEIENRLLRRELLITENLSVQKYTQCPPDVISDPLDDFDGSPSEIADETQRQSRNHQVNDVRLRSAGEASQRSTREDWAEWMRHFSIALLKESPSPALRTCARLAQLQPSVGRELFAAGFASCWAQMSESSQEQLVRSLKTAFSSQNIPPEILATLLNLAEFMEHDEKPLPIDTRLLGALAEKCRAFAKXLHYKEMEFEAVCNKKMGANPVTVVESLIHINNQLHQHEAAXVGILTYSQQ

SEQ ID NO: 80359 - protein, 81 aa, Setaria italica
  Transcript Sequence Number=SeqID_14385
NPCVHVSKKKKMSMLWLQDIEQRTILGEMVRWQTPNSNASYDIPMRSFCTMVCRVFLTNEMAVHREITFSVAGMQLQWLVV

SEQ ID NO: 80360 - protein, 162 aa, Setaria italica
  Transcript Sequence Number=SeqID_14386
  Gene Ontology: Mol. function=hydrolase activity, acting on ester bonds; Biological process=lipid metabolic process
  Homolog annotation: Hit_ID=Q9AYM5; Match level="QueryCoverage=100%, HitCoverage=61%, E-value=6e-28, Identity=40%"; Hit description =CPRD49 protein
  Pfam annotation: Domain name=Lipase_GDSL; Domain location=5-162; Score=94.0; E_value=5.1e-25; Accession=PF00657.14; Description=GDSL -like LipaseAcylhydrolase
MRPRLVLFGDSITEQSFQSGGWGAALTDRFARQADVVLRGLSGYNTRWALKVLPRAMEGAADADPAAVTVFFGANDASLPDQVQAHQNVPLEEYQTNLRAICAYFKERWTSAAIILITPPPIYETARIRDIYGVDDSARQAERTNEAAGSYAQACIAVAKEL

SEQ ID NO: 80361 - protein, 175 aa, Setaria italica
  misc_feature (135)..(135): Xaa can be any naturally occurring amino acid
  Transcript Sequence Number=SeqID_14387
  Gene Ontology: Mol. function=zinc ion binding; Cellular component =intracellular
  Homolog annotation: Hit_ID=Q6Z2L0; Match level="QueryCoverage=92%, HitCoverage=39%, E-value=1e-30, Identity=48%"; Hit description=Zinc finger protein-like
LLGQGLDDGNQLDESFYMESLGLMTTPTEDGGRVLKMEPDSIVVSHGDMGALGRSPAEVKPEESAEKASAASNGVAADAQFLKRSLDLRLNYEAVIESWGSSPWTDGQRPDVQLDDFWPHHAHHSGVWMAGGGRXGGEALTPRTGMGGGGREARVSRYREKRRTRLFAEIRYEVR

SEQ ID NO: 80362 - protein, 385 aa, Setaria italica
  misc_feature (26)..(26): Xaa can be any naturally occurring amino acid
  Transcript Sequence Number=SeqID_14388
  Gene Ontology: Mol. function=zinc ion binding; Cellular component =intracellular
  Homolog annotation: Hit_ID=Q6Z2L0; Match level="QueryCoverage=100%, HitCoverage=84%, E-value=9e-84, Identity=51%"; Hit description=Zinc finger protein-like
  Subcellular localization annotation: CTP_CleavageSite=92; ConfidenceScore=5.13e-01
FLCQGCDASVHSANPLARRHERLRLXPTSPMHPLSAFEGGAPSTSTLMSKKRQQVAPAAWSRRKARTRRPQVKSVGQLLSRKLIVVPEVTVESSEERKAEDEESEEAAEEQLLYCVPTFDRALAELCSPPPIDDDSPAAAPCCREDADDSNVEHAKAAPVAAESPVQQLPDSFAGFGPTDAELREFAADMEALLGQGLDDGNQLDESFYMESLGLMTTPTEDGGRVLKMEPDSIVVSHGDMGALGRSPAEVKPEESAEVLDIDFNCSSPTVIDNDEDYCFEQKASAASNGVAADAQFLKRSLDLRLNYEAVIESWGSSPWTDGQRPDVQLDDFWPHHAHHSGVWMAGGGRLGGEALTPRLGMGGGGREARVSRYREKRRTRLFAK

SEQ ID NO: 80363 - protein, 387 aa, Setaria italica
  Transcript Sequence Number=SeqID_14389
  Gene Ontology: Mol. function=phosphoprotein binding
  Homolog annotation: Hit_ID=Q84VF1; Match level="QueryCoverage=97%, HitCoverage=74%, E-value=1e-102, Identity=58%"; Hit description =Myosin heavy chain-like protein (Fragment)
  Pfam annotation: Domain name=Strep_SA_rep; Domain location=232-256; Score=6.2; E_value=12; Accession=PF06696.3; Description =Streptococcal surface antigen repeat
  Pfam annotation: Domain name=Strep_SA_rep; Domain location=67-91; Score=12.3; E_value=1.2; Accession=PF06696.3; Description =Streptococcal surface antigen repeat
  Pfam module annotation: Pfam domain module=Strep_SA_rep::Strep_SA _rep; Domain location=232-256::67-91
  Subcellular localization annotation: CTP_CleavageSite=12; ConfidenceScore=5.11e-01
MPRSRGSEPPQRASPRAPLHLKTTACSRRNGAHHRPVVDRTSPKVGDRHSPRSPLPEKKRAAGTRVAELEAKLGKVQDELKKLREQLVSAEAAKKDAQVALEEAKKRVGTKGSPASAATSPLSAPSAGVESAKKTEELKVPPPAAEEEEESSINSPATDVFEVVRAESGDKENKAAAAAADDCEAVSCGEKAALAEKEEVVEEEETKKMIEEESKNAAVEIDGAEKESPEVTELKAKLAEKDTEIAALSAENAELKKQALDAAEAAKKAEEDAAAKASQAEHDLKEGAAREARMGEQLKASEAAREALDGEMRRLRVQTEQWRKAAEAAAAVLGGDNHLTGLAGNGNGWGSPATMPDGDDDEGFGGKRKGAGIRMLGDLWKKKGNNK

SEQ ID NO: 80364 - protein, 116 aa, Setaria italica
  misc_feature (23)..(23): Xaa can be any naturally occurring amino acid
  Transcript Sequence Number=SeqID_14390
  Homolog annotation: Hit_ID=Q0DA50; Match level="QueryCoverage=69%, HitCoverage=12%, E-value=2e-12, Identity=54%"; Hit description=Zinc finger CCCH domain-containing protein 45
DGGFWFPNWPLRCRYKHAKLPGXPPPPVEEVLQKILQMRSFNRYGQNRNNNYNQQGERPQHPQGSGLPNQNSAENATATAPPTCGQQAQITNQQPPQQQQKPNTNDQVQGASNGHQ

SEQ ID NO: 80365 - protein, 82 aa, Setaria italica
  misc_feature (67)..(67): Xaa can be any naturally occurring amino acid
  Transcript Sequence Number=SeqID_14391
  Gene Ontology: Mol. function=DNA binding
  Homolog annotation: Hit_ID=Q6EPN5; Match level="QueryCoverage=100%, HitCoverage=32%, E-value=4e-20, Identity=62%"; Hit description=Myb family transcription factor-like
  Subcellular localization annotation: CTP_CleavageSite=53; ConfidenceScore=5.42e-01
RPKRKAAHPYPQKASKNEPNYGLKTDSSSIHRNSGMNATVSSWAVSSIPPAVASSMVKDLGPGTLGXTNFCSSSTEGPPRTW

SEQ ID NO: 80366 - protein, 172 aa, Setaria italica
  Transcript Sequence Number=SeqID_14392
  Gene Ontology: Mol. function=transferase activity, transferring groups other than amino-acyl groups
  Homolog annotation: Hit_ID=Q5I2Q5; Match level="QueryCoverage=93%, HitCoverage=34%, E-value=1e-51, Identity=61%"; Hit description =Putative alcohol acyl-transferases
ARRRSGYAPGDEVRLSFIVNARGRPEIPLPEGFYGNAFAYSVAATTAGELCGKDLGYALELVKKAKSAVTYDYLLSVADLMVLEGRPLFALSRTYIVSDVSHAGFKSVDFGWGEAVYGGPAKGGEGPLPGVTNYFSRAKNGKGEEGTVVPICLPKDAMEKFQLEVEGLTAEL

SEQ ID NO: 80367 - protein, 451 aa, Setaria italica
  Transcript Sequence Number=SeqID_14393
  Homolog annotation: Hit_ID=B6U1Y2; Match level="QueryCoverage=100%, HitCoverage=67%, E-value=0.0, Identity=88%"; Hit description=Ankyrin- like protein
  Pfam annotation: Domain name=DUF248; Domain location=1-439; Score =910.2; E_value=1e-270; Accession=PF03141.8; Description=Putative methyltransferase
  Pfam annotation: Domain name=Methyltransf_11; Domain location=53-148; Score=32.7; E_value=1.4e-06; Accession=PF08241.4; Description =Methyltransferase domain
  Pfam module annotation: Pfam domain module=DUF248::Methyltransf_11; Domain location=1-439::53-148
EYKGHQNWVKVSGEHLIFPGGGTQFKHGALHYIDFIQEAKKDIAWGKRTRVVLDVGCGVASFGGYLFDRDVITMSFAPKDEHEAQVQFALERGIPAISAVMGTKRLPFPSRVFDVVHCARCRVPWHIEGGKLLLELDRLLRPGGYFVWSATPVYQKLPEDVEIWEAMSALTRSMCWKMVNKVKDRVNRVGIAIFRKPTDNSCYEERSEANSPICGEYDDPDAAWNVSLRTCMHKLPVDLTIRGSKWPELWPLRLEKPPYWLKSSEAGVYGKPAPEDFQVDYEHWKRVVSNSYMNGLGVDWSAVRNVMDMKAVYGGFAAALHDLKVWVMNVIPIDSPDTLPIIYERGLFGLYHDWCESFSTYPRTYDLLHANHLFSKVKKRCELLPVVVEVDRVLRPEGRLIVRDNIETISEVENIVKSLHWEVRMSYSQDKEGLLFVQKTSWRPNEVEAKL

SEQ ID NO: 80368 - protein, 226 aa, Setaria italica
  Transcript Sequence Number=SeqID_14394
  Gene Ontology: Mol. function=catalytic activity
  Homolog annotation: Hit_ID=Q9HCG7; Match level="QueryCoverage=86%, HitCoverage=20%, E-value=3e-19, Identity=32%"; Hit description=Non -lysosomal glucosylceramidase
MGSAELEQAKVLSGMDCSKPPSRTWQRRFDDEGKKVAMFSMTMRDMISIVPLIVKALQLQVEDSAKGRATVYDPLRKWMDNCYRGVPLGGIGAGSIGRSYRGYFQQFQIFPVTNEEKPILANQFSAFISRPNGKKYSTVLSAPTADLLKGVDKAGIGSWDWKLKEDKCTYHALFPRSWTVYDGVPDPEIKIACRQISPFIPHNYKESSFPAAVFTFTVHNSGSTPA

SEQ ID NO: 80369 - protein, 100 aa, Setaria italica
  Transcript Sequence Number=SeqID_14395
  Gene Ontology: Mol. function=lipid transporter activity; Cellular component=integral to membrane; Biological process=lipid transport
  Homolog annotation: Hit_ID=Q6V5H8; Match level="QueryCoverage=100%, HitCoverage=21%, E-value=1e-32, Identity=63%"; Hit description =Nuclear division RFT1-like protein
LAMSGTSEAFLHAVANENQLKQSNDMLLLFSVIYIILNVVLIKSAGALGLIAANSINMLLRITYSAMFIKNYFKGSFSFRRCVPAGWGILLISAVTTVFS

SEQ ID NO: 80370 - protein, 133 aa, Setaria italica
  misc_feature (97)..(97): Xaa can be any naturally occurring amino acid
  Transcript Sequence Number=SeqID_14396
  Gene Ontology: Mol. function=lipid transporter activity; Cellular component=integral to membrane; Biological process=lipid transport
  Homolog annotation: Hit_ID=Q6V5B3; Match level="QueryCoverage=95%, HitCoverage=30%, E-value=5e-31, Identity=49%"; Hit description =Nuclear division RFT1-like protein
MHEAQKGFACILELLAEPLYIISQKKKYYNIRVYAEPAATLFRCLTTFILVKGHIKVHKLVLVSLSQVVYGAFIFFGYCSYFLIFTDMKISDLLPLXGQTFRKLILQEGEKFVLVSFDTPYNQAAYGLVDKLG

SEQ ID NO: 80371 - protein, 213 aa, Setaria italica
  misc_feature (135)..(135): Xaa can be any naturally occurring amino acid
  Transcript Sequence Number=SeqID_14397
  Gene Ontology: Mol. function=lipid transporter activity; Cellular component=integral to membrane; Biological process=lipid transport
  Homolog annotation: Hit_ID=B9R9V1; Match level="QueryCoverage=99%, HitCoverage=52%, E-value=1e-54, Identity=53%"; Hit description =Oligosaccharide translocation protein rft1, putative
EAILKVAWMVVPFAIVITSIGSIFVLSVKKLKLSDPYAKAVLIIGFACILELLAEPLYIISQKKKYYNIRVYAEPAATLFRCLTTFILVKGHIKVHKLVLISLSQVVYGAFIFFGYCSYFLIFTDMKIYDLLPLXGQTFRKLILQEGEKFVLVSFDTPYNQAAYGLVDKLGSLVVRIVFLPFEESSYTTFARLAGETPLNISNLEGSLLGALK

SEQ ID NO: 80372 - protein, 161 aa, Setaria italica
  misc_feature (104)..(104): Xaa can be any naturally occurring amino acid
  misc_feature (110)..(110): Xaa can be any naturally occurring amino acid
  Transcript Sequence Number=SeqID_14398
  Gene Ontology: Mol. function=lipid transporter activity; Cellular component=integral to membrane; Biological process=lipid transport
  Homolog annotation: Hit_ID=Q6V5B3; Match level="QueryCoverage=93%, HitCoverage=32%, E-value=2e-41, Identity=53%"; Hit description =Nuclear division RFT1-like protein
TRINSSSVLSGTSEAFLHAVANENQLKQSNDMLLLFSVIYIILNVVLIKSAGALGLIAANCINMLLRITYSAMFIKNYFKGSFSFRRCVPAGWGILLISALTTXVFSGSXFLNRTRFKQTVPIHIAIGIMCLSISSFEIYRGEKQFLRQIFGTLNHHDKSQ

SEQ ID NO: 80373 - protein, 175 aa, Setaria italica
  Transcript Sequence Number=SeqID_14399
  Gene Ontology: Mol. function=lipid transporter activity; Cellular component=integral to membrane; Biological process=lipid transport
  Homolog annotation: Hit_ID=Q6V5B3; Match level="QueryCoverage=98%, HitCoverage=36%, E-value=3e-51, Identity=55%"; Hit description =Nuclear division RFT1-like protein
DRHSDREAPVILRYYCFYIISLAMNGTSEAFLHAVANENQLKQSNDMLLLFSVIYIILNVVLIKSAGALGLIAANCINMLLRITYSAMFIKNYFKGSFSFRRCVPAGWGILLISALTTVFSERVFLNRTRFKQTVPIHIAIGIMCLSISSFEIYRGEKQFLRQIFGTLKHHDKSQ

SEQ ID NO: 80374 - protein, 138 aa, Setaria italica
  misc_feature (25)..(25): Xaa can be any naturally occurring amino acid
  Transcript Sequence Number=SeqID_14400
  Gene Ontology: Mol. function=lipid transporter activity; Cellular component=integral to membrane; Biological process=lipid transport
  Homolog annotation: Hit_ID=B9R9V1; Match level="QueryCoverage=84%, HitCoverage=26%, E-value=4e-22, Identity=49%"; Hit description =Oligosaccharide translocation protein rft1, putative
  Subcellular localization annotation: CTP_CleavageSite=8; ConfidenceScore=5.32e-01
GPAAAAPPAAAAGAAVMGVFKYNFXAAQFLSRVIPFVFNIWFVRQLGADDGAVSAFALQLPLFMNCILFLSREGFRRACLRNDSQSDVLTDEAVLKVAWMVVPFAIVITSIGSLFVLSVKKLKLSDPYAKAILIIDRN

SEQ ID NO: 80375 - protein, 332 aa, Setaria italica
  Transcript Sequence Number=SeqID_14401
  Gene Ontology: Mol. function=lipid transporter activity; Cellular component=integral to membrane; Biological process=lipid transport
  Homolog annotation: Hit_ID=Q6V5B3; Match level="QueryCoverage=96%, HitCoverage=67%, E-value=1e-105, Identity=59%"; Hit description =Nuclear division RFT1-like protein
  Pfam annotation: Domain name=Rft-1; Domain location=3-332; Score= -106.3; E_value=6.9e-07; Accession=PF04506.5; Description=Rft protein
MAGFACILELLAEPLYIISQKKKYYNIRVYAEPAATLFRCLTTFILVKGHIKVHKLVLISLSQVVYGAFIFFGYCSYFLIFTDMKIYDLLPLRLSNLMDYDKQLLHMCMLFTGQTFRKLILQEGEKFVLVSFDTPYNQAAYGLVDKLGSLVVRIVFLPFEESSYTTLARLAGETPLNISNLEGSLLGALKLIMLIGLVIISFGPSYSYTLLKLLYGDRHSDREAPVILRYYCFYIISLAMNGTSEAFLHAVANENQLKQSNDMLLLFSVIYIILNVVLIKSAGALGLIAANCINMLLRITYSAMFIKNYFKGSFSFRRCVPATSTGRIQFTI

SEQ ID NO: 80376 - protein, 111 aa, Setaria italica
  Transcript Sequence Number=SeqID_14402
  Gene Ontology: Mol. function=protein serine/threonine kinase activity; Biological process=protein amino acid phosphorylation
  Homolog annotation: Hit_ID=Q94FU1; Match level="QueryCoverage=71%, HitCoverage=17%, E-value=1e-14, Identity=46%"; Hit description=Auxin- regulated dual specificity cytosolic kinase
LVEWARPYLTDARRLDRVMDPNLAGQYSARAAQKAAAVAHQCVSLNPKSRPHMSAVVDALEPLLALDDCPVGPFVYVAPPEDNSNNDKGSSGRRGRRKSSDGAAAAVVRPE

SEQ ID NO: 80377 - protein, 93 aa, Setaria italica
  Transcript Sequence Number=SeqID_14403
  Gene Ontology: Mol. function=voltage-gated potassium channel activity; Cellular component=integral to membrane; Biological process=potassium ion transport
  Homolog annotation: Hit_ID=Q8VX27; Match level="QueryCoverage=90%, HitCoverage=11%, E-value=1e-37, Identity=89%"; Hit description =Inwardly rectifying potassium channel
RETKEPKPGNFRDSIQAASEFAVRNQLPEKIKQQMLSHFCLQFKTEGLNQQAMLNGLPKGIRSSIAYNLFFPIIRQAYLFHGVSNNFIAELVI

SEQ ID NO: 80378 - protein, 194 aa, Setaria italica
  misc_feature (161)..(161): Xaa can be any naturally occurring amino acid
  misc_feature (170)..(170): Xaa can be any naturally occurring amino acid
  Transcript Sequence Number=SeqID_14404
  Gene Ontology: Mol. function=protein binding
  Homolog annotation: Hit_ID=Q10PT8; Match level="QueryCoverage=100%, HitCoverage=20%, E-value=4e-32, Identity=46%"; Hit description =Leucine Rich Repeat family protein, expressed
LESDSSFTDNAHSGSNGIVKESSNEVNANQVHLTMHLNYFQRPPPLELVGTSHTDPFSELEDGSRNMLANGTPSNTMSKLIESSPYNAYPSPQSPPQYKEDILHRRLFLEEEFLQISGHLHSVGSLGSDSSCSDDSSDDFCSCNSEDDCAAMQTKMELASXNGQVALFPXVDSDHEGNKYFSAEKSLSDHSAED

SEQ ID NO: 80379 - protein, 337 aa, Setaria italica
  misc_feature (9)..(9): Xaa can be any naturally occurring amino acid
  Transcript Sequence Number=SeqID_14405
  Gene Ontology: Mol. function=hydrolase activity; Cellular component =vacuole; Biological process=embryonic development ending in birth or egg hatching
  Homolog annotation: Hit_ID=Q7XTH3; Match level="QueryCoverage=91%, HitCoverage=89%, E-value=1e-140, Identity=74%"; Hit description =P0041A24.6 protein
  Pfam annotation: Domain name=Abhydrolase_1; Domain location=95-314; Score=56.3; E_value=1.1e-13; Accession=PF00561.12; Description =alphabeta hydrolase fold
  Pfam annotation: Domain name=Abhydrolase_3; Domain location=71-302; Score=-81.8; E_value=0.026; Accession=PF07859.5; Description =alphabeta hydrolase fold
  Pfam annotation: Domain name=PGAP1; Domain location=65-261; Score= -69.5; E_value=0.0024; Accession=PF07819.5; Description=PGAP1-like protein
  Pfam annotation: Domain name=Thioesterase; Domain location=69-316; Score=-36.7; E_value=0.017; Accession=PF00975.12; Description =Thioesterase domain
  Pfam module annotation: Pfam domain module=Abhydrolase_1::Abhydrolase_ 3::PGAP1::Thioesterase; Domain location=95-314::71-302::65-261::69-316
QEEGEGEPXGEESSAFSPAAVPPRPATHSHSLHKYAPLDWSAYFDEERSVAIPGTDDVFNVYTAGSDGPVVFCLHGGGYSGLSFALAARQMKDKARVVAMDLRGHGKSTTSNDLDLSIETLTNDVIAVIRTMYGDSSPAIILVGHSMGGSVAVHVAARKEIRNLHGLVVVDVVEGTAMASLVHMQKILSNRAQHFPSIEKAIEWSVKGGSLRNVESARVSIPSTLKYDESRECYTYRTPLEQTEMYWKGWYEGLSDKFLSCPVQKILLLAGTDRLDRALTIGQMQGKFQMVVVRHTGHAIQEDVPEEFASHILNFISRNKIGPNGVEIPGLIKKWGR

SEQ ID NO: 80380 - protein, 154 aa, Setaria italica
  misc_feature (109)..(109): Xaa can be any naturally occurring amino acid
  misc_feature (118)..(118): Xaa can be any naturally occurring amino acid
  Transcript Sequence Number=SeqID_14406
  Gene Ontology: Mol. function=structural constituent of ribosome; Cellular component=ribonucleoprotein complex; Biological process =translation
  Homolog annotation: Hit_ID=P49216; Match level="QueryCoverage=42%, HitCoverage=49%, E-value=3e-31, Identity=100%"; Hit description=40S ribosomal protein S26
  Pfam annotation: Domain name=Ribosomal_S26e; Domain location=18-135; Score=231.7; E_value=1.8e-66; Accession=PF01283.11; Description =Ribosomal protein S26e
VLRTFFVVRPSGSVRPIVPFKRRNGGRNKHGRGHVKYIRCSNCAKCCPKDKAIKRFQVRNIVEQAAIRDVQEACVHDGYVLPKLYAKVHHCVSCAIHAHIVRVRSREKXRRDRKPPEXFRRREDRPAGGQGGPRPGGPGPAGAATAPAPNAPRP

SEQ ID NO: 80381 - protein, 106 aa, Setaria italica
  Transcript Sequence Number=SeqID_14407
VVRCTASPRNASGAGRIGLLVGKEAPPWWSWPCWCCHGSSTKCSSPIGLDYRLHEVRPVGSHECLNSVSVSRQSGGCGVAILVELLSEVRMLAKRISSRLNNCAQL

SEQ ID NO: 80382 - protein, 136 aa, Setaria italica
  Transcript Sequence Number=SeqID_14408
  Gene Ontology: Mol. function=structural constituent of ribosome; Cellular component=ribonucleoprotein complex; Biological process =translation
  Homolog annotation: Hit_ID=B6TXN6; Match level="QueryCoverage=61%, HitCoverage=45%, E-value=1e-31, Identity=81%"; Hit description=40S ribosomal protein S26
  Pfam annotation: Domain name=Ribosomal_S26e; Domain location=1-117; Score=248.1; E_value=2.2e-71; Accession=PF01283.11; Description =Ribosomal protein S26e
MTFKRRNGGRNKHGRGHVKYIRCSNCAKCCPKDKAIKRFQVRNIVEQAAIRDVQEACVHDGYVLPKLYAKVHHCVSCAIHAHIVRVRSREKRRDRKPPERFRRREDRPAGGQGGPRPGGPGPAGAATAPAPNAPRP

SEQ ID NO: 80383 - protein, 79 aa, Setaria italica
  Transcript Sequence Number=SeqID_14409
TVNGFGSHVQLTVDYSMIRRYLTTFHMANTKYPNFIDGRAPCMPLTGDGRRLRRVLGFRSGFGYLFLFPVLTFLPFLVF

SEQ ID NO: 80384 - protein, 119 aa, Setaria italica
  Transcript Sequence Number=SeqID_14410
  Gene Ontology: Mol. function=serine-type endopeptidase activity; Biological process=negative regulation of catalytic activity
  Homolog annotation: Hit_ID=B9RYG6; Match level="QueryCoverage=98%, HitCoverage=15%, E-value=4e-26, Identity=54%"; Hit description=Xylem serine proteinase 1, putative
  Subcellular localization annotation: CTP_CleavageSite=78; ConfidenceScore=5.84e-01
PSCAGASLDLNYPSFMVILNRTNSATRTFKRVLTNVAASPAKYSVSMTAPAGMKVTVSPTALSFGGKGSKQTFTVTVQVSQVKRSSDEYNYIGNYGFLSWNEVGGKHVVRSPIVSAFAQ

SEQ ID NO: 80385 - protein, 444 aa, Setaria italica
  misc_feature (8)..(8): Xaa can be any naturally occurring amino acid
  Transcript Sequence Number=SeqID_14411
  Gene Ontology: Mol. function=binding; Cellular component=nucleus; Biological process=multicellular organismal development
  Homolog annotation: Hit_ID=B6SU26; Match level="QueryCoverage=100%, HitCoverage=100%, E-value=0.0, Identity=83%"; Hit description =Interferon-related developmental regulator 2
  Pfam annotation: Domain name=IFRD; Domain location=26-340; Score =164.9; E_value=2.4e-46; Accession=PF05004.5; Description=Interferon -related developmental regulator (IFRD)
MGKSKRNXGGRGGGGGGGDDQLEGGSDADSVASMSTALSDLQVAQATEHVSSQEFVLDKYIDDLYEKRGSTREKALGALVDAFESFMLLGLVENKYVTLLSQFTNSIKKGSAKEVCLACRAIGLLAITLGAGSSSHEIMDESHPQLLRILQTWPDAPKMISALDCLAVVTFVSANDLAETQLSLKAIWDVIHPKSGSKVGIVRKPNPPLLAAAVSAWAFLLTTVGSSRRNSDSWKEPITFLSSLLEAEDRAVRIAAGEALALCFELKLLDVSSSEEADVDSDTRETSGSKNQLFLNMQALKAKISGLVCNLSMEAGGRGADKKNLNDQRDLFQRISDFIKSGECPEESLRISGKNGILRVTSWRESIQLNYLRRFLGRGFLKHAQDNDLLHDIFDIKIDQVKNMSTTKKKIFRSEEEKGRALKLNKERRLAQERKQNILNEQYG

SEQ ID NO: 80386 - protein, 80 aa, Setaria italica
  Transcript Sequence Number=SeqID_14412
HFGPAPLLGRLSWLLLHRRPFLAYCSTAGDAALLLQLAPADLSRCCCSPNPRGATGRCGRGRDPGAEAGGAGANGRDQYG

SEQ ID NO: 80387 - protein, 83 aa, Setaria italica
  Transcript Sequence Number=SeqID_14413
  Gene Ontology: Mol. function=transcription factor activity; Cellular component=nucleus; Biological process=regulation of transcription, DNA-dependent
  Homolog annotation: Hit_ID=Q9AUU0; Match level="QueryCoverage=57%, HitCoverage=18%, E-value=6e-13, Identity=77%"; Hit description =Putative transcriptional factor
ATKNAAAPGEAAADEAAVPPPASQSQPATPSSGVEEERQLFDLPDLLLDIRDGFGCFPPMWAPLPDVEEVNAELRLEEPLLWE

SEQ ID NO: 80388 - protein, 67 aa, Setaria italica
  Transcript Sequence Number=SeqID_14414
LSSRQHGWHVCYSYSTVKHIRDTWLIVSTIQLPNPWRQPEGLAAGQAVSTSEVLDGCSCCSRSSDSS

SEQ ID NO: 80389 - protein, 118 aa, Setaria italica
  Transcript Sequence Number=SeqID_14415
  Gene Ontology: Mol. function=diphosphate-fructose-6-phosphate 1 -phosphotransferase activity; Cellular component=6-phosphofructokinase complex; Biological process=glycolysis
  Homolog annotation: Hit_ID=A9YVC8; Match level="QueryCoverage=89%, HitCoverage=17%, E-value=1e-34, Identity=64%"; Hit description =Pyrophosphate-dependent phosphofructokinase alpha subunit
WADGFLACLYSAPDGIQGTTVRVEYGDAAIAADVAGAHVISQAFPHTYGQPLAHFLGKTANVQDATIMTEHPVVRVGIVFSGRQSPGGHNVIWGLYDAIKAHNPNSKLIGFLGGTDGL

SEQ ID NO: 80390 - protein, 539 aa, Setaria italica
  Transcript Sequence Number=SeqID_14416
  Gene Ontology: Mol. function=diphosphate-fructose-6-phosphate 1 -phosphotransferase activity; Cellular component=6-phosphofructokinase complex; Biological process=glycolysis
  Homolog annotation: Hit_ID=Q41140; Match level="QueryCoverage=97%, HitCoverage=85%, E-value=0.0, Identity=81%"; Hit description =Pyrophosphate--fructose 6-phosphate 1-phosphotransferase subunit alpha
  Pfam annotation: Domain name=PFK; Domain location=10-290; Score= -121.7; E_value=3.4e-05; Accession=PF00365.12; Description =Phosphofructokinase
MDWNVCVGCRVGIVFSGRQSPGGHNVIWGLYDAIKAHNPNSKLIGFLGGTDGLFAQKTMDISDEALASYKNQGGYDMLGRTRDQIRTTEQVEATLAICQALKLDSLVIIGGVTSNTDAAQLAETFAELKCPTKVVGVPVTLNGDLKNQFVETTVGFDTICKVNSQLISNVCTDALSAEKYYYFIRFMGQKASHVALECALQSHPNMVILGEEVSLSKLTIFDITKQICDAVQARAEKDKYHGVVLIPEGLVETIPELYALLQEIHGLHNKGVSVENISSHLSPWASALFEFLPPFIRKQLLLHPESDESAQLSQIETEKLLAQLVENEMNKRLKEGTYKGKKFNAICHFFGYQARGALPSKFDCDYAYVLGHVCYHILAAGLNGYMATVTNLKSPVNKWKCGAAPITSMMTVKRWSRGPTASQIGKPAVHMASVDLKGKAYELLRQNSSSFLMEDIYRNPGPLQFEGPGAETKPISLCVEDRDYMGRIKQLQEYLEKVKSIVKPGCSQDVLKAAVSAMASVTEMLTIMSTPPFSSQATI

SEQ ID NO: 80391 - protein, 74 aa, Setaria italica
  Transcript Sequence Number=SeqID_14417
KQKSEQQGGWIDKQQKNEVSIACSFRNYSTATSMSCITSSIYNRAVEQLVIFTDRVGYRASSARLGSAQLELVH

SEQ ID NO: 80392 - protein, 96 aa, Setaria italica
  Transcript Sequence Number=SeqID_14418
  Gene Ontology: Mol. function=transferase activity, transferring glycosyl groups; Cellular component=integral to membrane; Biological process=cell wall organization and biogenesis
  Homolog annotation: Hit_ID=Q7XIF5; Match level="QueryCoverage=98%, HitCoverage=16%, E-value=7e-40, Identity=78%"; Hit description =Probable mannan synthase 7
VKSELPSTYKAYCRQQFRWSSGGANLFRKMAKDVLVAKDVSLLKKTYMLYSFFLVRRVIAPTAACILYNIILPISVTIPELYLPVWGIAYIPTVLT

SEQ ID NO: 80393 - protein, 463 aa, Setaria italica
  misc_feature (159)..(159): Xaa can be any naturally occurring amino acid
  Transcript Sequence Number=SeqID_14419
  Gene Ontology: Mol. function=transferase activity, transferring glycosyl groups; Cellular component=integral to membrane; Biological process=cell wall organization and biogenesis
  Homolog annotation: Hit_ID=Q7XIF5; Match level="QueryCoverage=100%, HitCoverage=78%, E-value=0.0, Identity=78%"; Hit description =Probable mannan synthase 7
  Pfam annotation: Domain name=Glycos_transf_2; Domain location=29-210; Score=30.9; E_value=5.2e-06; Accession=PF00535.18; Description =Glycosyl transferase
IGWRPEWRFKWEPLDGDDEKGSAHYPLVLVQIPMYNELEVYRLSIAAACELQWPKDRIIVQVLDDSTDPFIKNLVELECENWANKGVNINYTTRTSRKGFKAGALKKGMECDYARQSEYIAIFDADFQPEPDFLLRTVPFLVNNPEVALVQARWSFEFXVNDTTSLLTRVQKMFFDYHFKVEQEAGSATFAFFSFNGTAGVWRTVAIKEAGGWKDRTTVEDMDLAVRATLKGWKFVYVGEVRVKSELPSTYKAYCRQQFRWSSGGANLFRKMAKDVLVAKDVSLLKKTYMLYSFFLVRRVIAPTAACILYNIILPISVTIPELYLPVWGIAYIPTVLTIVTAIRHPKNLHIMPFWILFESVMTVRRMRAALTGLLELEGFNQWVVTKKVGNDLADSEVPLLQKTRKRLRDRVNFQEIGFSVFVFLCASYNLAFHGTTSYYIYLYLQGLAFLLLGFNFTGTCSC

SEQ ID NO: 80394 - protein, 241 aa, Setaria italica
  Transcript Sequence Number=SeqID_14420
  Gene Ontology: Mol. function=protein serine/threonine kinase activity; Cellular component=myosin complex; Biological process =protein amino acid phosphorylation
  Homolog annotation: Hit_ID=Q5XPL8; Match level="QueryCoverage=96%, HitCoverage=24%, E-value=6e-97, Identity=77%"; Hit description=EDR1
VRNDRGGPGNPDGEQIRKAKLMSLGRGNPGAAGDQGGGGTAESLSRQYQEYNFLDYNEKVIDGFYDICGLSAESSKQKKIPSLSELQMSIGDLGFEVIVIDHKFDNALREMKDVAQCCMDRDDIPVSVRRIAEVVAEHMGGPVIDANEMFTRWLGKSIEQRTSHQTSLLPIGRIEIGLSRHRALLFKILADSVGIPCKLVKGSHYTGVEDDAFSIIKMDNDREYLVDVMAAPGTLIPVRCL

SEQ ID NO: 80395 - protein, 68 aa, Setaria italica
  Transcript Sequence Number=SeqID_14421
QSSDDNNTPPATCPPSNTSYDLAFSDCGARTTRPCDAKEDGATRDWCVWKPSIRSRRKKKTRRNPAIA

SEQ ID NO: 80396 - protein, 128 aa, Setaria italica
  Transcript Sequence Number=SeqID_14422
MENISFVTPVSEGSHKSYKNLLPPLYEGTVECQAQGSDVVGLDARVEGSVCEPSGLENDTQLYEVELTVRGNYEGHGLPLAFLASKSTGKHVKGYPITVEVMEDGSSAACIAAQQLAALSAYSRVETN

SEQ ID NO: 80397 - protein, 126 aa, Setaria italica
  Transcript Sequence Number=SeqID_14423
  Gene Ontology: Mol. function=kinase activity; Cellular component =nucleus; Biological process=cell division
  Homolog annotation: Hit_ID=B6TXG2; Match level="QueryCoverage=100%, HitCoverage=35%, E-value=1e-53, Identity=80%"; Hit description =Cyclin-A2
  Pfam annotation: Domain name=Cyclin_C; Domain location=9-125; Score =118.4; E_value=2.4e-32; Accession=PF02984.11; Description=Cyclin, C -terminal domain
VLKFEMGTPTTKTFLRMFIRSAQEDSKNNPSLSLEFLGSYLAELSLLDYGLLRFLPSLVAASVVFVARLTLDPHTHPWSKKMQALTGYNPSELKDCVTAIHELQLNRKCSSMMAIRDKYKQHRFKG

SEQ ID NO: 80398 - protein, 88 aa, Setaria italica
  Transcript Sequence Number=SeqID_14424
  Gene Ontology: Mol. function=ubiquitin thiolesterase activity; Cellular component=integral to membrane; Biological process =ubiquitin-dependent protein catabolic process
GLRALVKTGYGARVTPYVDESVIIDINPDNKDMSPEFLRWLRERNLSSDDRIMRLKEGYYLFPCLFALGIDLKETSLSLTIRPNDIHK

SEQ ID NO: 80399 - protein, 97 aa, Setaria italica
  Transcript Sequence Number=SeqID_14425
  Subcellular localization annotation: CTP_CleavageSite=91; ConfidenceScore=5.13e-01
CMQVHATRRNSPFIHSARPQSISFYCHFSESTKRYCDCTESFSMGSRHACGSPSLSLPLSPSQNLAPLTCLTAPTPDFAREREARREKGTAGMSGSH

SEQ ID NO: 80400 - protein, 83 aa, Setaria italica
  Transcript Sequence Number=SeqID_14426
LHQPWSLVVVGKKNWSMCAPPMGMAARTCSSTDDDDASPPAMELSGGWQEELAARTCPHDLIYLPGCNKNTDLLTQQQLIEPM

SEQ ID NO: 80401 - protein, 197 aa, Setaria italica
  misc_feature (176)..(176): Xaa can be any naturally occurring amino acid
  Transcript Sequence Number=SeqID_14427
  Gene Ontology: Cellular component=nucleus
  Subcellular localization annotation: CTP_CleavageSite=39; ConfidenceScore=5.82e-01
APPSSATGCAPSTRCSASSRSSAASPWTSRRRCRPDDPACSGRGSCPTPPPPCPSAARTCSSTSEILETAFKKETVGLVTREQYVEKRVNIRTKIEEEEKEKLQKLQQEEEELQMQKRKKRRVKGDPRLSFYDDIENGSDEDDFENQETQKKNGPIKLGKDPTVETSFLPDRMILXEREAEEQAERERLKKQWLCEQ

SEQ ID NO: 80402 - protein, 224 aa, Setaria italica
  misc_feature (92)..(92): Xaa can be any naturally occurring amino acid
  Transcript Sequence Number=SeqID_14428
  Gene Ontology: Mol. function=protein disulfide isomerase activity; Cellular component=endoplasmic reticulum lumen; Biological process =cell redox homeostasis
  Homolog annotation: Hit_ID=P52588; Match level="QueryCoverage=65%, HitCoverage=86%, E-value=9e-74, Identity=71%"; Hit description =Protein disulfide-isomerase
  Pfam annotation: Domain name=ERp29_N; Domain location=50-169; Score= -41.2; E_value=0.035; Accession=PF07912.5; Description=ERp29, N -terminal domain
  Pfam annotation: Domain name=Thioredoxin; Domain location=56-165; Score=168.5; E_value=1.9e-47; Accession=PF00085.12; Description =Thioredoxin
  Pfam module annotation: Pfam domain module=ERp29_N::Thioredoxin; Domain location=50-169::56-165
SLPTPCPVSGENLPHHTPPAQAMATRAWISLLLALAVALSAPAAARAEEAAAEGEAVLTLDVDSFDEAVAKHPFMVIEFYAPWCGHCKALAXPEYERAAQALSKHDPPIVLAKVDANEDKNRPLATKYEIQGFPTLKIFRNQGKNIQEYKGPREAEGIVEYLKKQVGPASKEIKSPEDAASLIDDKKIYIVGVFTEFSGTEFTNFMEVWVVVGVLVKVTTRGCC

SEQ ID NO: 80403 - protein, 55 aa, Setaria italica
  Transcript Sequence Number=SeqID_14429
EGNFRDLDIEKLQKTHISQLLGFWLSESSAQKLTICLSFRLLRVESYLKVQTNSA

SEQ ID NO: 80404 - protein, 333 aa, Setaria italica
  Transcript Sequence Number=SeqID_14430
  Gene Ontology: Mol. function=molecular_function; Cellular component =nucleus; Biological process=spermatogenesis
  Homolog annotation: Hit_ID=A9LLF2; Match level="QueryCoverage=100%, HitCoverage=100%, E-value=1e-129, Identity=72%"; Hit description =XAP5 family protein
  Pfam annotation: Domain name=XAP5; Domain location=108-331; Score =488.3; E_value=1e-143; Accession=PF04921.6; Description=XAP5 protein
MSGFGDGYVGTAQDAVKIRRLEKQREAERRKIEELKNKSADGQPGLLQFGSSTSEILETAFKKETVGLVTREQYVEKRVNIRTKIEEEEKEKLQKLQQEEEELQMQKRKKRRVKGDPRLSFYDDIENGSDEDDFENQETQKKNGPIKLGKDPTVETSFLPDREREAEEQAERERLKKQWLCEQELIKNEPLSITYSYWDGTGHRRVIQVRKGDTIGEFLRAVQQQLAPEFREVRTTSVENLLYVKEDLIIPHQHSFYELIINKARGKSGPLFHFDVHEDVRTIADATKEKDESHAGKVVERHWYEKNKHIFPASRWEIYDPTKKWERYTIHGD

SEQ ID NO: 80405 - protein, 298 aa, Setaria italica
  Transcript Sequence Number=SeqID_14431
  Gene Ontology: Mol. function=ubiquitin thiolesterase activity; Cellular component=integral to membrane; Biological process =ubiquitin-dependent protein catabolic process
  Homolog annotation: Hit_ID=Q01IJ9; Match level="QueryCoverage=47%, HitCoverage=41%, E-value=1e-12, Identity=35%"; Hit description =H0501D11.5 protein
NPSRRAESQPKVLAVTNLNTEDGYTIQGSFPKPILWAVILLFVMGFIAGGFILGAVHNAILLIVVVVIFGFVAALLIWNACWGRRGAIGFVNRYPDADLRTAKDGQYVKVTGVVTCGNFPLESSFQRVPRCVYTSTSLYEYRGWDSKAANTEHRRFTWGLRSMERHAVDFYISDFQSGLRALVKTGYGARVTPYVDESVIIDINPDNKDMSPEFLRWLRERNLSSDDRIMRLKEGYIKEGSTVSVMGVVQRNDNVLMIVAPSEPISTGCQWAKCVLPTNIDGLVLRCEDTSNIDVIPV

SEQ ID NO: 80406 - protein, 426 aa, Setaria italica
  misc_feature (160)..(160): Xaa can be any naturally occurring amino acid
  misc_feature (246)..(246): Xaa can be any naturally occurring amino acid
  misc_feature (311)..(311): Xaa can be any naturally occurring amino acid
  Transcript Sequence Number=SeqID_14432
  Gene Ontology: Mol. function=isomerase activity; Cellular component =endoplasmic reticulum; Biological process=cell redox homeostasis
  Homolog annotation: Hit_ID=Q5EUE0; Match level="QueryCoverage=100%, HitCoverage=90%, E-value=0.0, Identity=76%"; Hit description=Protein disulfide isomerase
  Pfam annotation: Domain name=Thioredoxin; Domain location=293-397; Score=169.8; E_value=7.8e-48; Accession=PF00085.12; Description =Thioredoxin
LLAKVDANEDKNRPLATKYEIQGFPTLKIFRNQGKNIQEYKGPREAEGIVEYLKKQVGPASKEIKSPEDAASLIDDKKIYIVGVFTEFSGTEFTNFMEVAEKLRADYDFGHTLHANHLPRGDAAVERPLVRLLKPFDELVVDSKDFDVAALEKFIDASSXTPRVVTFDKNPDNHPYLLKFFQSSATKAMLFLNFSTGPFDSFKNVYSAAAEEFKDKEIKFLIGDIDASQGAFQYFGLKAEQAPLIXIQDSESKKFLKDNIEADQIVSWLKEYFDGKLSPFKKSEPIPEVNNEPVKVVVADSIHDVVFKSGXNVLIEFYAPWCGHCKKLAPILEEAATTLQSDEEVVIAKMDATENDVPSEFEVQGYPTMYFVTPSGKVTSYDAGRTADEIVDFIKKNKETSGTGQATTTEKAADPATTAESVKDEL

SEQ ID NO: 80407 - protein, 69 aa, Setaria italica
  Transcript Sequence Number=SeqID_14433
  Homolog annotation: Hit_ID=Q2L3A1; Match level="QueryCoverage=88%, HitCoverage=72%, E-value=6e-20, Identity=70%"; Hit description =RAFTIN1a-like protein (Fragment)
  Pfam annotation: Domain name=BURP; Domain location=1-62; Score= -113.1; E_value=0.069; Accession=PF03181.7; Description=BURP domain
ARTYKVEMEGAGGDKVTLFSVCHTDTSEWDKDHVAFRFLGTKPGGPPVCHVLPYGHILWAKKYAGLSSA

SEQ ID NO: 80408 - protein, 96 aa, Setaria italica
  Transcript Sequence Number=SeqID_14434
  Homolog annotation: Hit_ID=B6TEW7; Match level="QueryCoverage=89%, HitCoverage=17%, E-value=2e-32, Identity=68%"; Hit description =RAFTIN1a protein
  Pfam annotation: Domain name=BURP; Domain location=1-89; Score=-18.0; E_value=9.8e-09; Accession=PF03181.7; Description=BURP domain
PVRGSSFVGCHQKEYPYTVYMCHSTGPARAYMVEMEGAGGDKVTLFSVCHTDTSEWDKDHVAFRFLGTKPGGPPVCHVLPYGHILWAKKYAGLSSA

SEQ ID NO: 80409 - protein, 529 aa, Setaria italica
  misc_feature (330)..(330): Xaa can be any naturally occurring amino acid
  Transcript Sequence Number=SeqID_14435
  Gene Ontology: Mol. function=isomerase activity; Cellular component =endoplasmic reticulum; Biological process=cell redox homeostasis
  Homolog annotation: Hit_ID=Q5EUE0; Match level="QueryCoverage=89%, HitCoverage=92%, E-value=0.0, Identity=84%"; Hit description=Protein disulfide isomerase
  Pfam annotation: Domain name=ERp29_N; Domain location=45-163; Score= -35.8; E_value=0.011; Accession=PF07912.5; Description=ERp29, N -terminal domain
  Pfam annotation: Domain name=Thioredoxin; Domain location=396-500; Score=173.2; E_value=7.6e-49; Accession=PF00085.12; Description =Thioredoxin
  Pfam annotation: Domain name=Thioredoxin; Domain location=51-159; Score=180.0; E_value=6.9e-51; Accession=PF00085.12; Description =Thioredoxin
  Pfam module annotation: Pfam domain module=ERp29_N::Thioredoxin::Thior edoxin; Domain location=45-163::396-500::51-159
FPFSGENLPHHTPPAQAMATRAWISLLLALAVALSAPAAARAEEAAAEGEAVLTLDVDSFDEAVAKHPFMVIEFYAPWCGHCKALAPEYERAAQALSKHDPPIVLAKVDANEDKNRPLATKYEIQGFPTLKIFRNQGKNIQEYKGPREAEGIVEYLKKQVGPASKEIKSPEDAASLIDDKKIYIVGVFTEFSGTEFTNFMEVAEKLRADYDFGHTLHANHLPRGDAAVERPLVRLLKPFDELVVDSKDFDVAALEKFIDASSTPRVVTFDKNPDNHPYLLKFFQSSATKAMLFLNFSTGPFDSFKNVYSAAAEEFKDKEIKFLIGDIDAXSQGAFQYFGLKAEQAPLILIQDSESKKFLKDNIEADQIVSWLKEYFDGKLSPFKKSEPIPEVNNEPVKVVVADSIHDVVFKSGKNVLIEFYAPWCGHCKKLAPILEEAATTLQSDEEVVIAKMDATENDVPSEFEVQGYPTMYFVTPSGKVTSYDAGRTADEIVDFIKKNKETSGTGQATTTEKAADPATTAESVKDEL

SEQ ID NO: 80410 - protein, 281 aa, Setaria italica
  misc_feature (12)..(12): Xaa can be any naturally occurring amino acid
  misc_feature (113)..(113): Xaa can be any naturally occurring amino acid
  misc_feature (230)..(230): Xaa can be any naturally occurring amino acid
  Transcript Sequence Number=SeqID_14436
  Gene Ontology: Mol. function=isomerase activity; Cellular component =endoplasmic reticulum; Biological process=cell redox homeostasis
  Homolog annotation: Hit_ID=Q5EUE0; Match level="QueryCoverage=99%, HitCoverage=90%, E-value=1e-122, Identity=71%"; Hit description =Protein disulfide isomerase
  Pfam annotation: Domain name=Thioredoxin; Domain location=148-252; Score=168.5; E_value=2e-47; Accession=PF00085.12; Description =Thioredoxin
IFDVAALEKFYXMLAAPPVVTFDKNPDNHPYLLKFFQSSATKAMLFLNFSTGPFDSFKNVYSAAAEEFKDKEIKFLIGDIDASQGAFQYFGLKAEQAPLILIQDSESKKFLEXNIEADQIVSWLKEYFDGKLSPFKKSEPIPEVNNEPVKVVVADSIHDVVFKSGKNVLIEFYAPWCGHCKKLAPILEEAATTLQSDEEVVIAKMDATENDVPSEFEVQGYPTMYFVTPXGKVTSYDAGRTADEIVDFIKKNKETSGTGQATTTEKAADPATTAESVKDEL

SEQ ID NO: 80411 - protein, 28 aa, Setaria italica
  Transcript Sequence Number=SeqID_14437
KTKKAPKVELGTGTTDANMDEWLEVCSC

SEQ ID NO: 80412 - protein, 257 aa, Setaria italica
  Transcript Sequence Number=SeqID_14438
  Gene Ontology: Mol. function=calcium ion binding; Cellular component =endoplasmic reticulum membrane; Biological process=cotranslational protein targeting to membrane
  Homolog annotation: Hit_ID=B6SRQ1; Match level="QueryCoverage=100%, HitCoverage=100%, E-value=1e-118, Identity=88%"; Hit description =Translocon-associated protein alpha subunit
  Pfam annotation: Domain name=TRAP_alpha; Domain location=6-256; Score= -30.6; E_value=3.6e-09; Accession=PF03896.8; Description=Translocon -associated protein (TRAP), alpha subunit
MAIRVWLPALLLAFLLAASPFTQVARAQSEEDAATAEVVEGADLGIVGDDTQVSSDEPLSPAPGVETVCVFPKNAGKIVPAGEETELLVGLQNEGESALNVVAVHSTLHLPYDHKMYGQNLTVQNFFNASVPVSVQATFPYTFVVSKFLQPGAYDLVGYIVYEIDQHPYQNVFYNGTIEVVEAGGLLSVESVFLITLGIALLGLFGLWAYGQVQQLSKKTKKAPKVELGTGTTDANMDEWLEGTSFAQRSKSKKKQT

SEQ ID NO: 80413 - protein, 96 aa, Setaria italica
  Transcript Sequence Number=SeqID_14439
RDGAISVANLGDRTQTWGDGHPENRTAGSISGAGDCLTNDRNAPQKRRNPGSGTAALDGAAVGSRNGGDGASGAASEERRSVRPRLILSIDSESDD

SEQ ID NO: 80414 - protein, 197 aa, Setaria italica
  Transcript Sequence Number=SeqID_14440
  Gene Ontology: Mol. function=protein binding; Cellular component =extracellular region
  Homolog annotation: Hit_ID=B6SN21; Match level="QueryCoverage=84%, HitCoverage=48%, E-value=7e-61, Identity=69%"; Hit description =Polygalacturonase inhibitor
  Pfam annotation: Domain name=LRRNT_2; Domain location=30-68; Score =39.7; E_value=1.1e-08; Accession=PF08263.4; Description=Leucine rich repeat N-terminal domain
  Pfam annotation: Domain name=LRR_1; Domain location=123-145; Score =6.8; E_value=15; Accession=PF00560.25; Description=Leucine Rich Repeat
  Pfam annotation: Domain name=LRR_1; Domain location=147-169; Score =15.7; E_value=0.19; Accession=PF00560.25; Description=Leucine Rich Repeat
  Pfam annotation: Domain name=LRR_1; Domain location=171-194; Score =12.2; E_value=1.4; Accession=PF00560.25; Description=Leucine Rich Repeat
  Pfam module annotation: Pfam domain module=LRRNT_2::LRR_1::LRR_1::LRR_ 1; Domain location=30-68::123-145::147-169::171-194
MRTTTATRMGAFLVLLVAASPAAAASSRCHSGDKAALLAIKAALGNPYHFASWTPGTPCCDWYDVDCDDSTGRVVGLSVFQDANLTGTIPDAVAGLVHLQSLTWHHLPGISGPIPPAIAKLSNLSFLTISWTAVSGPVPSFLGALTKLTFLDLSFNSLTGTIPTSLAAIPNLSGINLSRNRLTGAIPPLLLSKSPDR

SEQ ID NO: 80415 - protein, 58 aa, Setaria italica
  Transcript Sequence Number=SeqID_14441
NHSLIFSPLQPLGFNVDDTKLKRAGLDYWPYPFIVCKLSTVYMIIYELQSAKLGSAEY

SEQ ID NO: 80416 - protein, 148 aa, Setaria italica
  Transcript Sequence Number=SeqID_14442
  Gene Ontology: Mol. function=RNA methyltransferase activity; Biological process=RNA processing
  Homolog annotation: Hit_ID=B9RHG3; Match level="QueryCoverage=97%, HitCoverage=61%, E-value=7e-52, Identity=66%"; Hit description=23S rRNA methyltransferase, putative
  Pfam annotation: Domain name=SpoU_methylase; Domain location=1-116; Score=47.4; E_value=5.5e-11; Accession=PF00588.11; Description=SpoU rRNA Methylase family
VLTLDDTKLKRAGLDYWPYVVVKIHDSWDDFCDYFVKQEGEKRLLAFTKRGTSIHSDFSYKPGDWLVFGSETKGLPQQALEDCSREGLGGGTIRIPMVETYVRCLNLSVSVGIALYEAARQLNYEQLQYQPELPEEAQGLFPAEDIYA

SEQ ID NO: 80417 - protein, 83 aa, Setaria italica
  Transcript Sequence Number=SeqID_14443
WTLGKIYPFLPRHFQESLFPSIPTGYNLHFPLFLANFTPHHDWTRTTLVVAPTMITTTSAVGITQSGKNIYAMYRKNRHRLIA

SEQ ID NO: 80418 - protein, 71 aa, Setaria italica
  Transcript Sequence Number=SeqID_14444
  Gene Ontology: Cellular component=endoplasmic reticulum
  Homolog annotation: Hit_ID=Q5N7S1; Match level="QueryCoverage=85%, HitCoverage=30%, E-value=7e-21, Identity=75%"; Hit description=24 kDa seed maturation protein-like
PIAIIHLTSLNNLLPQDFCCAHTLPALYQRYETEVDHLAARGSEDIKRFYKRIDSNLLNKIPRGPVKSKPI

SEQ ID NO: 80419 - protein, 73 aa, Setaria italica
  misc_feature (21)..(21): Xaa can be any naturally occurring amino acid
  Transcript Sequence Number=SeqID_14445
  Gene Ontology: Mol. function=nucleotidyltransferase activity; Biological process=biosynthetic process
  Homolog annotation: Hit_ID=B4FI85; Match level="QueryCoverage=100%, HitCoverage=18%, E-value=3e-18, Identity=66%"; Hit description =Cytidyltransferase-related
GGDYNRMLEILLKCKSTGSGXRSSETPYTTGWVLKALEDLVIPEELSDMFISIPEEKFRMDISSTELRKSQGL

SEQ ID NO: 80420 - protein, 47 aa, Setaria italica
  Transcript Sequence Number=SeqID_14446
  Gene Ontology: Mol. function=nucleotidyltransferase activity; Biological process=biosynthetic process
  Homolog annotation: Hit_ID=B4FI85; Match level="QueryCoverage=68%, HitCoverage=8%, E-value=3e-11, Identity=96%"; Hit description =Cytidyltransferase-related
ALKLSGPGLQVMGVGFTGSLASSRPKHGDHRYALQLAHFTKLEQWSC

SEQ ID NO: 80421 - protein, 147 aa, Setaria italica
  misc_feature (92)..(92): Xaa can be any naturally occurring amino acid
  Transcript Sequence Number=SeqID_14447
  Gene Ontology: Mol. function=nucleotidyltransferase activity; Biological process=biosynthetic process
  Homolog annotation: Hit_ID=B4FI85; Match level="QueryCoverage=100%, HitCoverage=38%, E-value=1e-72, Identity=90%"; Hit description =Cytidyltransferase-related
MYDDGLPFFEISAINADKPPLSIPEIKRRVEQFRKAGKNVIISNQPYFYKKAELFPGSAFIIGADTAARLVNPKYYGGDYNRMLEILLKCKXTGTTFLVGGRMIEGVFKALEDLVIPEELSDMFISIPEEKFRMDISSTELRKSQGL

SEQ ID NO: 80422 - protein, 251 aa, Setaria italica
  misc_feature (95)..(95): Xaa can be any naturally occurring amino acid
  misc_feature (214)..(214): Xaa can be any naturally occurring amino acid
  Transcript Sequence Number=SeqID_14448
  Gene Ontology: Mol. function=aspartic-type endopeptidase activity; Cellular component=chromatin; Biological process=RNA-dependent DNA replication
  Homolog annotation: Hit_ID=Q8SA93; Match level="QueryCoverage=93%, HitCoverage=8%, E-value=4e-59, Identity=47%"; Hit description =Putative polyprotein
LHAGAQAIQNRRWVGDIKGALTVDVLFEYLHIWDMVDSLVLQQEVPDQYKWKLTHTCSYSSKLAYAAFFVGTIKFGPWRRIWKSWAPPRCKFFIXLVFLNRVWTADRLAKRGLPHPESCPFCDQAEETIHHLLVGCVFTHQVWALIFQQLGLLNLTPDPDPSVSHFPSWWRRAISSVPKEVRKGFNSLIILIAWEVWKHRNDCVFDNSRPNIRXAKVVSSVSTEGGLWCMAGASKLQELMSRLSRSLPLGA

SEQ ID NO: 80423 - protein, 218 aa, Setaria italica
  Transcript Sequence Number=SeqID_14449
  Gene Ontology: Cellular component=endoplasmic reticulum
  Homolog annotation: Hit_ID=B6TUJ8; Match level="QueryCoverage=99%, HitCoverage=97%, E-value=8e-68, Identity=55%"; Hit description=Seed maturation protein
  Pfam annotation: Domain name=Reticulon; Domain location=33-199; Score= 184.9; E_value=2.3e-52; Accession=PF02453.9; Description=Reticulon
MHPHFPNDHDNERVGGPFHRHKSIHRLLGGGKVADILLWKDRNLSAGVLLGATLIWYLLEVVEYNVIPLLSQIAILAMLVVFIWSNAAPLLNIPPPRIPEVIVSEHAFRHIAQTIHYKLAYTAAALYDIACGKDLKKFLLVIFSLLILSEIGSSYSFTSLLYLGFLCAHTLPALYQRYETEVDHLAARGSEDIKRFYKRIDSNLLNKIPRGPVKSKPI

SEQ ID NO: 80424 - protein, 383 aa, Setaria italica
  Transcript Sequence Number=SeqID_14450
  Gene Ontology: Mol. function=nucleotidyltransferase activity; Biological process=biosynthetic process
  Homolog annotation: Hit_ID=B4FI85; Match level="QueryCoverage=100%, HitCoverage=100%, E-value=0.0, Identity=91%"; Hit description =Cytidyltransferase-related
  Pfam annotation: Domain name=CTP_transf_2; Domain location=215-380; Score=7.3; E_value=0.00027; Accession=PF01467.18; Description =Cytidylyltransferase
MESWVRAVVEAIYSSRSQAVIYLAGGASQALGWLLSVPGASGTVLEVVVPYSRASMAQLLGKMPLQFTSKQAAEDMALAAYNRALKLSGPGLQVMGVGFTGSLASSRPKHGDHRFYVSTWTHNCLRTSHVTLSKGLRSREEEDEVSSCFLLKAIADTCRVSATIQSGIQEPELPEESTEQFDEDQELQQVIDGQVCMKVYHFAAPVETNFNRKVILPGSFNPLHDGHLKLLEVASSMYDDGLPFFEISAINADKPPLSIPEIKRRVEQFRKAGKNVIISNQPYFYKKAELFPGSAFIIGADTAARLVNPKYYGGDYNRMLEILLKCKSTGTTFLVGGRMIEGVFKALEDLVIPEELSDMFISIPEEKFRMDISSTELRKSQGL

SEQ ID NO: 80425 - protein, 139 aa, Setaria italica
  misc_feature (111)..(111): Xaa can be any naturally occurring amino acid
  Transcript Sequence Number=SeqID_14451
ERRLFRARYWISRFDCLFDNSHWARDQQVLRKRKTELGGTCSVASLILFTGLLTVLLYQAIKRRSIEMHRVKPANAPDLLSFVNDLEFHITTISGMSCAQAVAPSTFAMGXPGYMDFRLVSLPTMFTYSCANTSQGHPL

SEQ ID NO: 80426 - protein, 76 aa, Setaria italica
  Transcript Sequence Number=SeqID_14452
  Gene Ontology: Mol. function=acireductone synthase activity; Biological process=methionine salvage
  Homolog annotation: Hit_ID=Q8H3J6; Match level="QueryCoverage=77%, HitCoverage=8%, E-value=5e-25, Identity=91%"; Hit description =Selenium-binding protein-like protein
KVHAIKVHSERLAIAYGFIVVEAGSPIRIVKNLSVCGDCHEFSKMVTKVFSREIIVRDGSRFHHMKDGKCSCHDYW

SEQ ID NO: 80427 - protein, 121 aa, Setaria italica
  Transcript Sequence Number=SeqID_14453
MASAPASGSYRCAACGADLNLSAAHLYPAGVFFEAGNKGTLSFSWVDESRLRFAPEDRIRPFFETRNYWGIQRKRTRISCDACGRLLGHVYDDGPPLMQGPGQFGMGPSQVIPRRPRYRFK

SEQ ID NO: 80428 - protein, 90 aa, Setaria italica
  Transcript Sequence Number=SeqID_14454
NEPLNLNEKKTRNKTKLREQYQDGRRQPAISCDACGRLLGHVYDDGPPLMQGPGQFGMGPSQVIPRRPRYRFKIKAVAAPSPPPAAAYGK

SEQ ID NO: 80429 - protein, 61 aa, Setaria italica
  misc_feature (59)..(59): Xaa can be any naturally occurring amino acid
  Transcript Sequence Number=SeqID_14455
  Subcellular localization annotation: CTP_CleavageSite=8; ConfidenceScore=5.11e-01
TGRRRGAAAATRASRRSLQVVPLTPNPISQLLLGFAQINPGQSELNRLRSRFLLNVPKXEL

SEQ ID NO: 80430 - protein, 97 aa, Setaria italica
  Transcript Sequence Number=SeqID_14456
  Gene Ontology: Mol. function=hydrolase activity, acting on carbon -nitrogen (but not peptide) bonds; Cellular component=plasma membrane; Biological process=nitrogen compound metabolic process
  Homolog annotation: Hit_ID=A4ULE0; Match level="QueryCoverage=95%, HitCoverage=26%, E-value=2e-33, Identity=78%"; Hit description =Nitrilase 1
VWSRSSVTHIALEGGCFVLSAVPFTRRKDYPPPPEYTFGSLEEEPSPESVVCCGGSVIISPSGTVLAGPNYEGEALLTADLDLGEIVRAKFDFDVVG

SEQ ID NO: 80431 - protein, 38 aa, Setaria italica
  Transcript Sequence Number=SeqID_14457
GILERASNVDNRPGRSFRNFRFDTAGILQSMEASFLRT

SEQ ID NO: 80432 - protein, 70 aa, Setaria italica
  Transcript Sequence Number=SeqID_14458
  Gene Ontology: Mol. function=hydrolase activity, acting on carbon -nitrogen (but not peptide) bonds; Cellular component=plasma membrane; Biological process=nitrogen compound metabolic process
  Homolog annotation: Hit_ID=A4ULE0; Match level="QueryCoverage=70%, HitCoverage=13%, E-value=2e-13, Identity=69%"; Hit description =Nitrilase 1
MFTGVQIYCAPTVDCVTSWQASVTHIALEGGCFVLSAVPFTRRKDYPLPLGYQMYTREGRIVLSAGERHC

SEQ ID NO: 80433 - protein, 357 aa, Setaria italica
  Transcript Sequence Number=SeqID_14459
  Gene Ontology: Mol. function=hydrolase activity, acting on carbon -nitrogen (but not peptide) bonds; Cellular component=plasma membrane; Biological process=nitrogen compound metabolic process
  Homolog annotation: Hit_ID=A4ULE0; Match level="QueryCoverage=99%, HitCoverage=99%, E-value=1e-167, Identity=81%"; Hit description =Nitrilase 1
  Pfam annotation: Domain name=CN_hydrolase; Domain location=32-217; Score=261.0; E_value=2.8e-75; Accession=PF00795.14; Description =Carbon-nitrogen hydrolase
MAALAPASSGGESVIAEVEMNAGTDQDAGTVRVTVVQAASVFYDTPATLDKAEKLMAEAAGYGSQLVLFPEVFIGGYPHGATFGLVVGNRTAKGKEDFRKYHASAIDVPGPEVSRLAALAGKYKVFLVIGVVERSGYTLYNTVLTFDPLGKYLGKHRKLMPTALERVFWGFGDGSTIPVYDTPLGKIGALICWENRMPLLRTAMYAKGVQIYCAPTVDCVTSWQASVTHIALEGGCFVLSAVPFTRRKDYPPPPEYTFGSLEEEPSPESVVCCGGSVIISPSGTVLAGPNYEGEALLTADLDLGEIVRAKFDFDVVGHYSRPEVLSLVVNTDPKSAVSFASDAEKTFAGKRDDVSKT

SEQ ID NO: 80434 - protein, 56 aa, Setaria italica
  Transcript Sequence Number=SeqID_14460
SLGAKVSITTVDVKITSYHSYRRKYRSSHSHYSSNSSKHEQNQTFMKHAMHKIHNK

SEQ ID NO: 80435 - protein, 123 aa, Setaria italica
  misc_feature (34)..(34): Xaa can be any naturally occurring amino acid
  Transcript Sequence Number=SeqID_14461
  Gene Ontology: Mol. function=nucleoside-triphosphatase activity
  Homolog annotation: Hit_ID=Q2R029; Match level="QueryCoverage=100%, HitCoverage=17%, E-value=2e-33, Identity=55%"; Hit description=AAA -type ATPase family protein, putative, expressed
KFILSKETWAPDVDLRSVANMTEGYSGSDLKNLXITAAHGPIREIFEKEKKEKSLAIAEGKPEPPLYGGEDVPPLGMVHLKFALDQVGASLSPDSVTMNQIVQWNNEFGDGGSRKKETLTYII

SEQ ID NO: 80436 - protein, 395 aa, Setaria italica
  misc_feature (362)..(362): Xaa can be any naturally occurring amino acid
  Transcript Sequence Number=SeqID_14462
  Gene Ontology: Mol. function=nucleoside-triphosphatase activity
  Homolog annotation: Hit_ID=Q2R029; Match level="QueryCoverage=100%, HitCoverage=57%, E-value=1e-157, Identity=70%"; Hit description=AAA -type ATPase family protein, putative, expressed
  Pfam annotation: Domain name=AAA; Domain location=157-342; Score =245.5; E_value=1.3e-70; Accession=PF00004.21; Description=ATPase family associated with various cellular activities (AAA)
  Pfam annotation: Domain name=AAA_3; Domain location=157-283; Score= -1.8; E_value=0.00059; Accession=PF07726.3; Description=ATPase family associated with various
  Pfam annotation: Domain name=AAA_5; Domain location=157-289; Score =21.8; E_value=1.5e-05; Accession=PF07728.6; Description=ATPase family associated with various
  Pfam module annotation: Pfam domain module=AAA::AAA_3::AAA_5; Domain location=157-342::157-283::157-289
ETLKAQANTSNIRKFLISREIECNDLEELCINDQLLTTENVDKIVGYAISHHLQQIKPQKGGKMVLPIESLKHGFSVVQSTHRGNKSSKHTLKDVDTENVFEEIVLSDVISSNGTGVSFEDIGALDSVKETLKELVMLPLQRPELFTEGQLRKPVKGILLFGPPGTGKTMLAKAVATEAGANFINVSVSSIMSKWLGEAEKYVKAIFSLASKISPAVIFVDEVDSLLAKRESAVEHEAMRKMKNEFMVNWDGLRTKEQERVIALGATNRPYDLDDAVIRRFPCRLMVSLPEASNREKILRVILSKEILAPDVDLKLVANMADGYSGSDLKNLCITAAFCPVREIMEKEKKEKSLAIAEGRPXLYGSKDIRPIKMDDFKFALGQVCVSFSTASRTM

SEQ ID NO: 80437 - protein, 78 aa, Setaria italica
  Transcript Sequence Number=SeqID_14463
  Gene Ontology: Mol. function=hydrolase activity; Cellular component =extracellular region
  Homolog annotation: Hit_ID=B6TMW5; Match level="QueryCoverage=69%, HitCoverage=20%, E-value=4e-14, Identity=68%"; Hit description =Retrotransposon protein Ty1-copia subclass
MSSAALLFLCLAVVLVAAATVHDEHSQCLDNPPDLSLRGVEAGKVVDDLPGGFRAYVTGPSMSIRAIVLASDVYGFEA

SEQ ID NO: 80438 - protein, 60 aa, Setaria italica
  Transcript Sequence Number=SeqID_14464
  Gene Ontology: Mol. function=actin binding; Cellular component=actin cytoskeleton; Biological process=cytoskeleton organization and biogenesis
HDNWYCARCVNSTKSGGEGVIVMQIGAYLLVCMYDGSLASASQAMVAADQFAMQFNRRTH

SEQ ID NO: 80439 - protein, 216 aa, Setaria italica
  misc_feature (160)..(160): Xaa can be any naturally occurring amino acid
  Transcript Sequence Number=SeqID_14465
  Gene Ontology: Cellular component=integral to membrane
  Homolog annotation: Hit_ID=Q2QY93; Match level="QueryCoverage=62%, HitCoverage=45%, E-value=3e-56, Identity=86%"; Hit description =Mpv17/PMP22 family protein, expressed
  Subcellular localization annotation: CTP_CleavageSite=69; ConfidenceScore=5.73e-01
MAVASALALLLAPRPVPARPTSPHLQSRRLALPPPRPATLSAPAATYPRKAGRLQQLNAASCCSNSAPAAGTAGGSATGVKDWRFFLAWYLMSLDKNPIATKAVTSAVLTLAGDLICQLVIDRVPALDLRRTFVFTFLGLALVGPTLHVWYLYLSKLVTXISGASGAIARLLLDQFIFSPIFIGIFMSLLVTLEGKPSLVVPQLKQEWLSSVLANW

SEQ ID NO: 80440 - protein, 107 aa, Setaria italica
  Transcript Sequence Number=SeqID_14466
  Homolog annotation: Hit_ID=Q67UH6; Match level="QueryCoverage=100%, HitCoverage=23%, E-value=5e-31, Identity=63%"; Hit description =Mitochondrial transcription termination factor-like
APNPFAIEDYLVSTCGLTREQALKSSKWISHLKHPSNPDAVLAFLSDLGLSRAEVATVVAKDPRVLCADVGRTLAPRVAELADLGLSRPDIARLFILGQNHFRHSSL

SEQ ID NO: 80441 - protein, 638 aa, Setaria italica
  Transcript Sequence Number=SeqID_14467
  Gene Ontology: Mol. function=ATP-dependent helicase activity; Cellular component=nucleus
  Homolog annotation: Hit_ID=Q650T9; Match level="QueryCoverage=86%, HitCoverage=78%, E-value=0.0, Identity=81%"; Hit description=DEAD -box ATP-dependent RNA helicase 7
  Pfam annotation: Domain name=DEAD; Domain location=74-252; Score =224.7; E_value=2.4e-64; Accession=PF00270.21; Description=DEADDEAH box helicase
  Pfam annotation: Domain name=GRP; Domain location=543-631; Score= -21.9; E_value=0.015; Accession=PF07172.3; Description=Glycine rich protein family
  Pfam annotation: Domain name=GUCT; Domain location=485-581; Score =183.0; E_value=8.3e-52; Accession=PF08152.4; Description=GUCT (NUC152) domain
  Pfam annotation: Domain name=Helicase_C; Domain location=319-395; Score=102.5; E_value=1.4e-27; Accession=PF00271.23; Description =Helicase conserved C-terminal domain
  Pfam module annotation: Pfam domain module=DEAD::GRP::GUCT::Helicase _C; Domain location=74-252::543-631::485-581::319-395
KSSTSSEETAPAAKKAKKEKTKKNVEASPSASEDDGEITASSDEDPADPNALTNFRISEPLRQRLKSKGIKALFPIQATTFDLVLDGSDLVGRARTGQGKTLAFVLPILESLVNGTHKASRKTDYGRLPTVLVLLPTRELANQVHADFEFYGSTYGLSACCVYGGSPYRPQEMALRKGVDIVVGTPGRVKDFVVKGTLNLKSLKFRVLDEADEMLNMGFVDDVELILGKVEDVTRVQTLLFSATLPDWVNKLSMRFLKGDRKTVDLVGNEKLKASASVKHLALPCNKAARAQVIPDIIRCYSHGGRTIIFTETKDSASELSGLIPGSRALHGDVVQAQREVILAGFRGGKFQVLVATNVAARGLDINDVQLIIQCEPPRDVEAYIHRSGRTGRAGNTGVAVMLYEPRYKHSVSRLERESGVKFEHISAPQPTDVAQSAGTEAADAISSVSDSVIPVFRQQAEQLLSSSSLSAADLLAKALAKAVGYTDIKKRSLLSSMEDYTTLHLQTGRPMWSPGFAFTILKRFMPEEKLADVKGATLTVDGTGVVFDVPAADVEDYIQAAESAAQVTIDEVKQLPPLQEREQSRGNSGGGRFGRGGGGSRFGGGGGSRFGGGGGRGGGGSRFGGRGGGGNRFNRRN

SEQ ID NO: 80442 - protein, 173 aa, Setaria italica
  Transcript Sequence Number=SeqID_14468
  Gene Ontology: Mol. function=ATP-dependent helicase activity; Cellular component=nucleus
  Homolog annotation: Hit_ID=Q650T9; Match level="QueryCoverage=36%, HitCoverage=9%, E-value=2e-25, Identity=88%"; Hit description=DEAD -box ATP-dependent RNA helicase 7
MSPALAAAAEPMAVDDSASKKAKRKQLKAAAAAAEAEAAEAASAKKKEKKEKKRKAKEPSPPAPSSDEEEKSSTSSEETAPAAKKAKKEKTKKNVEASPSASEDDGEITASSDEDPADPNALTNFRISEPLRQRLKSKGIKALFPIQATTFDLVLDGSDLVGRARTGQHLLNC

SEQ ID NO: 80443 - protein, 243 aa, Setaria italica
  Transcript Sequence Number=SeqID_14469
  Gene Ontology: Mol. function=calcium ion binding
  Homolog annotation: Hit_ID=Q10BR5; Match level="QueryCoverage=67%, HitCoverage=14%, E-value=5e-58, Identity=66%"; Hit description =Calreticulin family protein, expressed
IYNMTHDYNITPDLDHYVAMVDLLGRLGRLEEAYELIDEMPLIPNLAIWEALLTAATVHGNVRLANLAARELLSIESSDPRIQRLVYNLQDLAGKFVDLPQTMLSNKGRELEEVDSCSVEIKNKVYLFSTGDNFVLERTVAELKLIMIQIGISKLNISNGIPDVEEEEEELSAIHCEKLAIAFAISNSPPFRTIRIIKNVRMCRHCHTFAKLVSEKYKRQILIKDSNCLHKFKGGKCSCEDYW

SEQ ID NO: 80444 - protein, 118 aa, Setaria italica
  Transcript Sequence Number=SeqID_14470
MAGCCVFLRWPSASPPRIGYRPLDDEAAAGPSPAAVTVVVGKERRAFSVDQLVLDSYPFRVLLETVARKEERRGGAIFVDVDAILFEHILWLACDGRSVSQILQLDLKEIIDFYAQDA

SEQ ID NO: 80445 - protein, 71 aa, Setaria italica
  Transcript Sequence Number=SeqID_14471
  Gene Ontology: Cellular component=plasma membrane
  Homolog annotation: Hit_ID=B6U5U8; Match level="QueryCoverage=95%, HitCoverage=17%, E-value=4e-30, Identity=91%"; Hit description =Membrane protein
NVLQIHGILNAVAWGILIPTGAIIARYLRVFESADPAWFYLHIACQCSGYILGVAGWGLGLKLGSESVGVT

SEQ ID NO: 80446 - protein, 90 aa, Setaria italica
  Transcript Sequence Number=SeqID_14472
  Homolog annotation: Hit_ID=B6U5U8; Match level="QueryCoverage=80%, HitCoverage=18%, E-value=2e-24, Identity=76%"; Hit description =Membrane protein
  Pfam annotation: Domain name=DUF568; Domain location=2-74; Score =31.9; E_value=1.1e-08; Accession=PF04526.5; Description=Protein of unknown function (DUF568)
  Subcellular localization annotation: CTP_CleavageSite=69; ConfidenceScore=5.19e-01
VEYSGGAYTIFATIALPGNATQQNTVWQAGSLSGGQIAPHPTAPANLASATRLDFLSGSSTGASNSRLRRKNVSSSSISLLRFFPSGYLD

SEQ ID NO: 80447 - protein, 386 aa, Setaria italica
  Transcript Sequence Number=SeqID_14473
  Gene Ontology: Cellular component=plasma membrane
  Homolog annotation: Hit_ID=B6U5U8; Match level="QueryCoverage=93%, HitCoverage=94%, E-value=1e-170, Identity=81%"; Hit description =Membrane protein
  Pfam annotation: Domain name=Cytochrom_B561; Domain location=205-370; Score=-69.4; E_value=0.058; Accession=PF03188.8; Description =Eukaryotic cytochrome b561
  Pfam annotation: Domain name=DUF568; Domain location=88-212; Score =188.0; E_value=2.7e-53; Accession=PF04526.5; Description=Protein of unknown function (DUF568)
  Pfam module annotation: Pfam domain module=Cytochrom_B561::DUF568; Domain location=205-370::88-212
  Subcellular localization annotation: CTP_CleavageSite=29; ConfidenceScore=5.04e-01
MARPGHTAWLLVGAAMLLLASAATAQDCLSARFSNGRTFGRCNSMPTLGASLHWTYHPENGTADIAFRAQSGADGWVGWGINPNSRGMVGSSVFVATQSSGSPSVLMTNLDSTSPSLQPATLKFNVPVAPTVEYSGGAYTIFATIALPGNATQQNTVWQAGSLSGGQIAPHPTAPANLASATRLDFLSGSSTGASNSRLRRKNIHGILNAVAWGILIPTGAIIARYLRVFESADPAWFYLHIACQCSGYILGVAGWGLGLKLGSESVGVTYHPHRNIGIAIFSLATLQVFALLLRPDKKNKYRLYWNIYHHSVGYSVIILGAINIFKGLDILKPASGYKTAYIAVLATLGGIALCLEAITWPIAIRKRKRDANKATNGNAGWQQGA

SEQ ID NO: 80448 - protein, 72 aa, Setaria italica
  misc_feature (72)..(72): Xaa can be any naturally occurring amino acid
  Transcript Sequence Number=SeqID_14474
GGGQVRSPRAAAIHHGLRGDHSTARPHRSKTAKDRGAFRLPGWRAAESDKACRVPAVSRARARMHDHAMTRX

SEQ ID NO: 80449 - protein, 170 aa, Setaria italica
  misc_feature (151)..(151): Xaa can be any naturally occurring amino acid
  Transcript Sequence Number=SeqID_14475
  Gene Ontology: Mol. function=transferase activity; Cellular component= membrane
  Homolog annotation: Hit_ID=B6U626; Match level="QueryCoverage=94%, HitCoverage=32%, E-value=3e-80, Identity=90%"; Hit description =Secondary cell wall-related glycosyltransferase family 47
  Pfam annotation: Domain name=Exostosin; Domain location=1-170; Score=- 2.5; E_value=1.6e-06; Accession=PF03016.7; Description=Exostosin family
DSRDADLVFVPFFASLSYNRHSRPVPPEKVARDKALQEKLVRYLSARPEWKRYGGADHVIVAHHPNSLLHARGPLSPAVFVLSDFGRYHPRVASLEKDVIAPYKHMAKTFVNDSAGFDNRPTLLYFRGAIYRKEGGSIRQELYYMLKDEKXVYFSFGSVQLGTYWVTLSL

SEQ ID NO: 80450 - protein, 109 aa, Setaria italica
  Transcript Sequence Number=SeqID_14476
KNVRVGDGKREEQCRRTDQVDAVARGEGEDVGAGDGGRARGLDLRLDVVDEVEAEGGAAGVGAGALLAGCRGGVIQQQRGVAAVDEAVVEEEAEDGGAAARVVHDGLRH

SEQ ID NO: 80451 - protein, 188 aa, Setaria italica
  Transcript Sequence Number=SeqID_14477
LYLPYKRYVLKRDIMSRQLYVTENNIVYKATRPSYLPFMGIVKKEIKVPLHLIVDIVVEQGCLQSAYSLYTFRIESIAHGKPAPVDELQFHGVHDPDLLRKVIIREASRRTQEVQSWRTRLYSGEGPSYVPPTSGLHSPSAKVKASSIRAFLDPKGKIPDSILLHKLEEVSRSVKNLESLLIGSHTRE

SEQ ID NO: 80452 - protein, 79 aa, Setaria italica
  Transcript Sequence Number=SeqID_14478
  Gene Ontology: Mol. function=nucleoside-triphosphatase activity; Cellular component=membrane
  Homolog annotation: Hit_ID=Q8GU83; Match level="QueryCoverage=58%, HitCoverage=3%, E-value=2e-13, Identity=80%"; Hit description=PDR -like ABC transporter
  Pfam annotation: Domain name=PDR_assoc; Domain location=1-60; Score =38.8; E_value=2.1e-08; Accession=PF08370.3; Description=Plant PDR ABC transporter associated
MVSGVTLGRSILMDRGLDFSSIFYWISIGALIVFILLLNIGFAIGLTTVRRKNSEYPSTVRYLIEEKAVLVFLELFQLC

SEQ ID NO: 80453 - protein, 612 aa, Setaria italica
  misc_feature (16)..(16): Xaa can be any naturally occurring amino acid
  misc_feature (610)..(610): Xaa can be any naturally occurring amino acid
  Transcript Sequence Number=SeqID_14479
  Gene Ontology: Mol. function=nucleoside-triphosphatase activity; Cellular component=membrane; Biological process=transport
  Homolog annotation: Hit_ID=Q8GU83; Match level="QueryCoverage=100%, HitCoverage=80%, E-value=0.0, Identity=51%"; Hit description=PDR -like ABC transporter
  Pfam annotation: Domain name=ABC2_membrane; Domain location=446-612; Score=67.8; E_value=4.1e-17; Accession=PF01061.16; Description=ABC-2 type transporter
  Pfam annotation: Domain name=ABC_tran; Domain location=159-349; Score= 85.3; E_value=2.2e-22; Accession=PF00005.19; Description=ABC transporter
  Pfam annotation: Domain name=PDR_assoc; Domain location=14-74; Score =58.3; E_value=3e-14; Accession=PF08370.3; Description=Plant PDR ABC transporter associated
  Pfam module annotation: Pfam domain module=ABC2_membrane::ABC _tran::PDR_assoc; Domain location=446-612::159-349::14-74
EISLTGNEFLTPRWKXMVSGVTLGRSILMDRGLDFSSIFYWISIGALIVFILLLNIGFAIGLTTVRRTSQALVSRDKLTILQGKERANFEDIVNKSPKLPKAALDTPNFIGKVIPFKPLGITFQDVNYYVDTPMAMREKGFSDSKLQLLHNITGAFQPGVLSVLMGVTGAGKTTLLDVLAGRKTGGVIEGDIRIGGYPKVQETFARISGYCEQTDVHSPQITVWESVVYSAWLRLPTEIDPEIRYDFVKEVLETIELDEVRDSLVGLPGANGLSTEQRKRLTIAVELVSNPSIIFLDEPTSGLDARAAAIVMRAVKNVADTGRTVACTVHQPSIEIFEAFDQLMLMKRGGKLIYAGPLGHNSCKVIQYFQAIPGVPMIKDDYNPSTWMLEVTSQSMETYLGVNFAQIYRESSLYKDNDAIVKQLSIPSPKTSDLHFLMRFPQKFWEQFKACLWKQCLSHWRSPSYNLVRIVTVALCSLLFGALYWQQGNIAHINDRKGLFTILGSMYCTTLYTGVKNCQSVMPFVSVERSVMYRERFAGMYSPWAYSFAQLAMEIPYVAIQVVLFLFIAYPMIGYAWTATKLLWFFYTMFCTLLYFVYLGMMIVSLTSQXQV

SEQ ID NO: 80454 - protein, 228 aa, Setaria italica
  Transcript Sequence Number=SeqID_14480
  Gene Ontology: Mol. function=protein disulfide oxidoreductase activity; Cellular component=extracellular region; Biological process=electron transport chain
  Homolog annotation: Hit_ID=B6TEC7; Match level="QueryCoverage=84%, HitCoverage=99%, E-value=2e-83, Identity=79%"; Hit description=Grx _S15.2-glutaredoxin subgroup II
  Pfam annotation: Domain name=Glutaredoxin; Domain location=129-193; Score=81.3; E_value=3.5e-21; Accession=PF00462.16; Description =Glutaredoxin
  Subcellular localization annotation: CTP_CleavageSite=57; ConfidenceScore=5.24e-01
ILLSLVAILHRPPLPRRPVGAERRSIRTLSWLPLLLGTMKRLVSTALVARGLVRSCRAPTTAAVSRPAFQQFMNYSSGHGGDDPNATGDSTATQIAADRDTHQDFKPMSKSSDTSLHDIVAQDIRENPVLIYMKGFPESPMCGFSALAVKVFQQYDVPICGRDILGDLRLKEAVKAHTNWPTFPQIFIKGEFVGGSDIILSMHQKGELKDLLGDITQRYGQKPDANEP

SEQ ID NO: 80455 - protein, 85 aa, Setaria italica
  Transcript Sequence Number=SeqID_14481
LTHGLHSAAARKNLRSRVARLREDLSRSRWVACETARFRARLEDAIQRHKRYNLDKHQSRVVRIDSDEPPIPPLCGMEATRLVGI

SEQ ID NO: 80456 - protein, 529 aa, Setaria italica
  misc_feature (426)..(426): Xaa can be any naturally occurring amino acid
  Transcript Sequence Number=SeqID_14482
  Gene Ontology: Mol. function=ATP-dependent helicase activity; Cellular component=nucleolus
  Homolog annotation: Hit_ID=Q0ILZ4; Match level="QueryCoverage=70%, HitCoverage=59%, E-value=0.0, Identity=83%"; Hit description=DEAD -box ATP-dependent RNA helicase 9
  Pfam annotation: Domain name=DEAD; Domain location=47-216; Score =231.2; E_value=2.6e-66; Accession=PF00270.21; Description=DEADDEAH box helicase
  Pfam annotation: Domain name=Helicase_C; Domain location=285-361; Score=122.9; E_value=1e-33; Accession=PF00271.23; Description =Helicase conserved C-terminal domain
  Pfam annotation: Domain name=ResIII; Domain location=43-211; Score= -30.5; E_value=0.019; Accession=PF04851.7; Description=Type III restriction enzyme, res subunit
  Pfam module annotation: Pfam domain module=DEAD::Helicase_C::ResIII; Domain location=47-216::285-361::43-211
RRKGSFYEEEKRAGGGAAAEEGLEIAKLGISSKIVDRLASKGITKLFPIQRAVLEPAMQGKDMVGRAKTGTGKTLAFGIPIMDAIIRHNDKYKPGKFPLAIVLAPTRELAKQVEREFIESSPLETLCVYGGTPISQQIRKLGYGVDVVIGTPGRVIDLLKRGSLSLAEIRFVVLDEADQMLSVGFDQDVETILQQVPQQRQTLMFSATMPTWIRKLTQKYLNNPVTVDLVGEDDQKLAEGISLFSIATENREKPAVLGELIKEHAKGGKCIVFTQTKRDADRLSCSMSRSFQCEALHGDISQAQRERTLAGFRDGRFNILIATDVAARGLDIPNVDLVIHFELPNSSEIFVHRSGRTGRAGKKGTAIAMYNYRQNRDVQSIERDIGSKFKELPKVNVEGSVLLGGDFDSFGGGGGGGYGGSNFGRXGGSGGRGGGFGNSSGRGGGFGRSGGGGGGFGDSGFGRSDGGFGGSGFGRSGGGGGFGDSGFGRSSGGYGDSGFGRSSGGGSGFGRSGGFGDSGSGRFGGGFGS

SEQ ID NO: 80457 - protein, 120 aa, Setaria italica
  Transcript Sequence Number=SeqID_14483
KKNEKKTKKNKKSKKVKGKGNNSGSGGGGGGFGDSGFGRSDGGFGGSGFGRSGGGGGFGDSGFGRSSGGYGDSGFGRSSGGGSGFGRSGGFGDSGSGRFGGGFGSSSGGFGGGFGDRKSG

SEQ ID NO: 80458 - protein, 72 aa, Setaria italica
  Transcript Sequence Number=SeqID_14484
YKKFQVYGHLFEQDKNSALQSIPDLPEFALSLRPEGYELPSTDSIWENVNGQPQIQSLKEHLNDDEDEVDTK

SEQ ID NO: 80459 - protein, 88 aa, Setaria italica
  Transcript Sequence Number=SeqID_14485
  Subcellular localization annotation: CTP_CleavageSite=36; ConfidenceScore=5.73e-01
MSAAACLFAAAVSLTLPSTSAPAFAGASGRRSRWIPAALRSSPTRRRGPVRALDERLLEAAAAPAAKDTEGEEAGVDVGDGFGDAEGD

SEQ ID NO: 80460 - protein, 381 aa, Setaria italica
  Transcript Sequence Number=SeqID_14486
  Gene Ontology: Cellular component=nucleus; Biological process =regulation of transcription, DNA-dependent
  Homolog annotation: Hit_ID=Q7X9T5; Match level="QueryCoverage=98%, HitCoverage=50%, E-value=1e-151, Identity=64%"; Hit description =SCARECROW-like protein
  Pfam annotation: Domain name=GRAS; Domain location=9-380; Score =507.1; E_value=2.3e-149; Accession=PF03514.6; Description=GRAS family transcription factor
SPEEVGVDLTTLLIHCAQAAAIDDHRNANELLKQIRKHSSATGDAGQRLAHYFANGLEARLAGTGSSIYRSLTSKRTSTGEMLRAFGLYVKACSFRLISHYVANTTILNASKSEARLHIIDYGVQYGFQWPVLMQRLSKRCGGPPSLRITGIDFPLPGFRPAERIEATGRRLHEYARMFNIPFEYQAIASKWDTIQVEDLKIKSDEYLVVNCLYRMRNMMDETVTDDSPRTRVLNTIRKLNPHLFVHGIVNGTYNAPFFVTRFKEAMFFSLSIFDMLEANASRMDEHRLLIESEFFGREALNVIACEGTERIERPETYKQWQMRNLRAGFRQLRLNEEIMKRARYKVSKSYHRDFLVDEDNKWMLQGWKGRIIFALSAWTS

SEQ ID NO: 80461 - protein, 38 aa, Setaria italica
  Transcript Sequence Number=SeqID_14487
  Homolog annotation: Hit_ID=B6U4K1; Match level="QueryCoverage=100%, HitCoverage=8%, E-value=3e-11, Identity=89%"; Hit description =CRAL/TRIO domain containing protein
MANVSKHLQPSSAAGNDRKYQGTLVASPAKAISPKRVN

SEQ ID NO: 80462 - protein, 305 aa, Setaria italica
  Transcript Sequence Number=SeqID_14488
  Homolog annotation: Hit_ID=B6U4K1; Match level="QueryCoverage=89%, HitCoverage=57%, E-value=1e-134, Identity=84%"; Hit description =CRAL/TRIO domain containing protein
  Subcellular localization annotation: CTP_CleavageSite=36; ConfidenceScore=5.23e-01
MANVRAPCFGNSSYCLKHLQPSSAAGNDRKYQGTLVASPAKAISPKRVNRIVPSRQLILGADSLGHAASFLLKVVVLEAVRRVSKARCPFIWNSVQALQILVYPPFSWIQRWAPLRFIVQGIQKLSTPLLFLSVTTTLSERSSKRDDEPDSNTEHSETPSEANESASTSSTRDVADGTKEIVQENWLVLLFRELEKQGITLPERFTEDELRRFYVAANGDFSSLLSSVKKTIRWRETFHILTLQELDRWSHLVFWHGFDTMLRPCLVIRLGLACASIPPRDRPRFGQAVGNSSTCFICTFISVYS

SEQ ID NO: 80463 - protein, 95 aa, Setaria italica
  Transcript Sequence Number=SeqID_14489
  Gene Ontology: Mol. function=methyltransferase activity
  Homolog annotation: Hit_ID=Q5VNJ0; Match level="QueryCoverage=90%, HitCoverage=14%, E-value=1e-31, Identity=73%"; Hit description =Putative tRNA-(N1G37) methyltransferase
RYLRIFFSPDVFRGILRSGQSELHCVMPMIHVYGFSKAEDPEHDFHGRINVALGENVDIVEMHRVRLVAPGKWMICASFTLPFSIAIAEPNYISC

SEQ ID NO: 80464 - protein, 181 aa, Setaria italica
  Transcript Sequence Number=SeqID_14490
  Gene Ontology: Mol. function=methyltransferase activity; Cellular component=cytoplasm; Biological process=tRNA processing
  Homolog annotation: Hit_ID=Q5VNJ0; Match level="QueryCoverage=93%, HitCoverage=29%, E-value=1e-77, Identity=81%"; Hit description =Putative tRNA-(N1G37) methyltransferase
  Pfam annotation: Domain name=MTS; Domain location=5-120; Score=-83.6; E_value=0.018; Accession=PF05175.6; Description=Methyltransferase small domain
  Pfam annotation: Domain name=Met_10; Domain location=7-121; Score= -39.2; E_value=9e-08; Accession=PF02475.8; Description=Met-10+ like -protein
  Pfam module annotation: Pfam domain module=MTS::Met_10; Domain location=5-120::7-121
TNCWLSQPAAGDMFSGVGPLAISAAKKVKYVYANDINPTAVEYFKRNMVLNKLERKIEVFNMDARRFISAIYSSQHVHPVTQIVMNLPNDAAEFLDVFRGILRSGQSELHCVMPMIHVYGFSKAEDPEHDFHGRINVALGENVDIVEMHRVRLVAPGKWMICASFTLPFSIAIAEPNYISC

SEQ ID NO: 80465 - protein, 211 aa, Setaria italica
  misc_feature (57)..(57): Xaa can be any naturally occurring amino acid
  Transcript Sequence Number=SeqID_14491
  Gene Ontology: Mol. function=methyltransferase activity; Cellular component=cytoplasm; Biological process=proteolysis
  Homolog annotation: Hit_ID=Q5VNJ0; Match level="QueryCoverage=100%, HitCoverage=36%, E-value=1e-109, Identity=88%"; Hit description =Putative tRNA-(N1G37) methyltransferase
  Pfam annotation: Domain name=Met_10; Domain location=21-211; Score =203.6; E_value=5.3e-58; Accession=PF02475.8; Description=Met-10+ like-protein
NYWPMNEVLEELLPEGVIIPTGFETVGHIAHLNLRDEHLPYKKLIAQVVLDKNKPKXQTVVNKIDAIQNDYRTMQLEVLAGNDSLRTMVIESGLRFQVDLGTVYWNSRLATERQRLVNDIFRNSDIVCDMFSGVGPLAISAAKKVKYVYANDINPTAVEYFKRNMVLNKLERKIEVFNMDARRFISAIYSSQHVHPVTQIVMNLPNDAAEF

SEQ ID NO: 80466 - protein, 170 aa, Setaria italica
  Transcript Sequence Number=SeqID_14492
  Gene Ontology: Mol. function=protein serine/threonine kinase activity; Cellular component=integral to membrane; Biological process=protein amino acid phosphorylation
  Homolog annotation: Hit_ID=Q9FN92; Match level="QueryCoverage=91%, HitCoverage=18%, E-value=2e-23, Identity=40%"; Hit description =Receptor-like protein kinase
MDSRTVNLKLVLAFTAAIWVLGTCSADFTPADNYLINCGSTIDANVDQRVFQADNSGPAILTSSQSTAATTSPNLVSGFDSAMLYQSARIFNEPSSYAFKLKSRGRHFVRLHLFPFKYQKYDLTTANFKVSTQDIVLLDNFTAPSSSAPVFKEYSLNITRDMLILTFVPL

SEQ ID NO: 80467 - protein, 103 aa, Setaria italica
  misc_feature (18)..(18): Xaa can be any naturally occurring amino acid
  Transcript Sequence Number=SeqID_14493
  Gene Ontology: Mol. function=acid phosphatase activity
  Homolog annotation: Hit_ID=C4PKL7; Match level="QueryCoverage=100%, HitCoverage=18%, E-value=3e-53, Identity=96%"; Hit description =Chloroplast purple acid phosphatase isoform c
VGDMTYANQYLSTGGKGXPCFSCSFPNAPIRESYQPRWDGWGRFMEPITSKIPLMVIEGNHEIEPQGHGGEVTFASYLARFAVPSKESGSNTKFYYSFNAGGI

SEQ ID NO: 80468 - protein, 95 aa, Setaria italica
  Transcript Sequence Number=SeqID_14494
IVFFYYTVHGHQLEERTLATDCKLNCIIAHATVSVFCIATMIMPFSCTMTSYCHLSRSTTLLYILHLYCWGTARKGLKVSMSPMTSVKFSSRNII

SEQ ID NO: 80469 - protein, 101 aa, Setaria italica
  Transcript Sequence Number=SeqID_14495
MSAMAAAAAPPPRLDSVLSFGNALPGDGADADAHRPGTDERAFSDAGSEYDDDDDAGFEFAFAPPLVARGTGGGAEDLAPADYIFAHGRILPAYPVFDRHH

SEQ ID NO: 80470 - protein, 88 aa, Setaria italica
  Transcript Sequence Number=SeqID_14496
FCIQVVWLRVFRARLIIIVVYFIFLKENPGLSYVLTMSLASFVDYKIFLDYLITALLKTFSFCLFWKIRKSNLFPVFLPQIIVIHLNV

SEQ ID NO: 80471 - protein, 972 aa, Setaria italica
  Transcript Sequence Number=SeqID_14497
  Homolog annotation: Hit_ID=Q53JH6; Match level="QueryCoverage=90%, HitCoverage=96%, E-value=0.0, Identity=70%"; Hit description=Coiled -coil protein, putative, expressed
  Pfam annotation: Domain name=DUF869; Domain location=173-897; Score =326.5; E_value=5.2e-95; Accession=PF05911.3; Description=Plant protein of unknown function (DUF869)
  Pfam annotation: Domain name=Filament; Domain location=487-747; Score= -179.3; E_value=0.017; Accession=PF00038.13; Description=Intermediate filament protein
  Pfam annotation: Domain name=M; Domain location=189-209; Score=0.7; E_ value=1.2e+02; Accession=PF02370.8; Description=M protein repeat
  Pfam annotation: Domain name=M; Domain location=250-270; Score=4.1; E_ value=41; Accession=PF02370.8; Description=M protein repeat
  Pfam annotation: Domain name=M; Domain location=291-311; Score=5.3; E_ value=29; Accession=PF02370.8; Description=M protein repeat
  Pfam annotation: Domain name=M; Domain location=628-648; Score=2.8; E_ value=63; Accession=PF02370.8; Description=M protein repeat
  Pfam annotation: Domain name=M; Domain location=687-707; Score=5.0; E_ value=31; Accession=PF02370.8; Description=M protein repeat
  Pfam annotation: Domain name=Myosin_tail_1; Domain location=107-854; Score=-504.1; E_value=0.048; Accession=PF01576.11; Description =Myosin tail
  Pfam module annotation: Pfam domain module=DUF869::Filament::M::M::M:: M::M::Myosin_tail_1; Domain location=173-897::487-747::189-209::250 -270::291-311::628-648::687-707::107-854
MDRRSWLWKRKSSDKSPGESDSSGSVSSHSEPYFDDQEVKPVSSISSPNHSHSPEVSSRMMTDDETQEAGTTKSLNEKLLLATILNDSSPQHGQSPQPEVCQSPQPEVSPVVQDSVKSLNEKLSPKVRDDDVQDSVKSLNEKVSAKVRDDDIPDSVKSLNEKLSAALLTINAKEDLVKQHTRVAEEAVAGWEQAEAEVASLKQLLETASQKNTSLEDQVSHLDDALKECVRQLRQAREEQDKKIRDSVAKKSKELESEKSELQNHIAELSKQLEATKVEATAMQVQRDLQEKLQIVEKENKDLKVELLTLSKDLKILARERDLSNQAAETASKLHLESVKKITRVEAECLKLRHLTRRTSLANDSRPIANSACMESQTDSQSDSGERMLVVDDEMKNSDSWASALIAELDQFKNGNSGARNLVNNPAEIDLMDDFLEMEKLAALPESDRVSSSFGAETDSDQGVTTDKSSKVETESLMRQVADLHGKVDKIEVEKRDLEMALADAKDQLGTSCEALMVANNKLVELQMQLDLANESKHAALGQAERLNGERKDLALQLESKSAQVEELQLMVASLEEKVDRKELELQLELISAEAADLRKTVTSLEEQIDAERILSMQHKANADMAEASKESLEAQLRSANTEIGKLNGIMQTLESEVQKEKASREELLEQIETMKIESNRSLASASTKESLEAQLQVVNSEVAKLHGTVNALECDAAKEKAYSSDLQMQLEAVEGIRKVLESELESSHQETMKLREKVSLLEVRLKDQTSLLVEFTAKSEDAVSRRKAMEGQLEAANLEVTKLRNRISLLQGKVEQEKLLSEEYEAKCRKLEAQLSRDSREVKLWRLSNSNGDLKVKQEKELSGAAGKLAECQKTIANLGRQLKSLTDIDGVVTDHEDLEPKDTHLDFRDGDDGLLSADMADGLHELGLPKRNGSCFSPIRPNPSSSPTFGIAGVSGNLTSLSSYLSKTKT

SEQ ID NO: 80472 - protein, 79 aa, Setaria italica
  Transcript Sequence Number=SeqID_14498
AGGGHGAGAGAVYGARGGAGVGGGMGGGTGGGHGASAGKGGGFGAGAGGGGGSRHKGGGNHHGGSSIGNDISTRAFHLN

SEQ ID NO: 80473 - protein, 144 aa, Setaria italica
  misc_feature (64)..(64): Xaa can be any naturally occurring amino acid
  Transcript Sequence Number=SeqID_14499
  Gene Ontology: Mol. function=nucleic acid binding; Cellular component= intracellular
  Homolog annotation: Hit_ID=B6TBI8; Match level="QueryCoverage=61%, HitCoverage=22%, E-value=3e-35, Identity=77%"; Hit description =Nucleic acid binding protein
MLLHTDDAHPNLQKLSTLTSLVRKNEDNCQVDQKVESTCLDEPDPIICPDAVSQAEDVNWWGHXKFGFVSGGFLGATSRKKRSSRKDPSNVRQTFVEEDQENLYNLVQVDWYDVLYTDYSDVKQRSCYFSFQIWRCDVNAECTQ

SEQ ID NO: 80474 - protein, 380 aa, Setaria italica
  Transcript Sequence Number=SeqID_14500
  Gene Ontology: Mol. function=nucleic acid binding; Cellular component= intracellular; Biological process=telomere maintenance via telomerase
  Homolog annotation: Hit_ID=B6TBI8; Match level="QueryCoverage=100%, HitCoverage=100%, E-value=1e-172, Identity=79%"; Hit description =Nucleic acid binding protein
  Pfam annotation: Domain name=G-patch; Domain location=15-59; Score =62.0; E_value=2.3e-15; Accession=PF01585.15; Description=G-patch domain
MAAPEASTCYVGIARQSAAFRLMKQMGWEEGEGLGKDKQGIKGHVRVKNKQDTLGVGVDNPRDKWVYDTTQFDNILKKLKVQSANPIQEETAAVSDSPDSTPKKDKPANDEVTKVTRPQGRYKKRERGKSVSSYSAIDLQGILVRKNEDNCQVDQKVESTCLDEPDPIICPDAVSQAEDVNWWGHKFGFVSGGFLGATSRKRKSSRKDPSNVRQTFAEEDQENLYNLVQDKATSGKQGLGIKGLPMKIAGHRWKGNKTSFGDSDEDSSAQSDEYSEIEEDDNEEQPATTVELIDTEKNTDKVLHADIKSKTKVKKLCKRILREAPSQSMKLKDLKVAVEERSNAVFSSFSCRREAMLFLKKKLQGSRKFNVDGKKVHLVS

SEQ ID NO: 80475 - protein, 410 aa, Setaria italica
  misc_feature (64)..(64): Xaa can be any naturally occurring amino acid
  Transcript Sequence Number=SeqID_14501
  Gene Ontology: Mol. function=zinc ion binding; Cellular component =intracellular; Biological process=intracellular protein transport
  Homolog annotation: Hit_ID=UPI0001A7B309; Match level="QueryCoverage =84%, HitCoverage=37%, E-value=2e-41, Identity=36%"; Hit description =zinc finger (C2H2-type) family protein
  Pfam annotation: Domain name=DUF618; Domain location=47-105; Score =56.1; E_value=1.3e-13; Accession=PF04818.5; Description=Protein of unknown function, DUF618
VALGELTFNSKPIITNLTIIAGENLQAAKPIAALICANILEVPSEQKLPSLYLLDSIVKNIGKXDMLKHFSSRLPEVFCKAYKQVDPSIHHSMRHLFGTWKGVFPPHPLQMIEKDLGFQSSANGSSSATPSRPESQSPRPSNSIHVNPKYLEARQQLNQPTKGILGSGAKTAVIADAGNDIERANRLGTDRSAGRRLDAPNARPNIQRTQRDPFSNPVNEKQAGRDVRGLGFSNISQQAVVGTGQVRSKSKGQDGIGGPYYATGVGSSEEQFDRRSNFYASKDVRPSGPVRLDSALLPTPSIDPDRIGRPSSNKSWKHSEEEEYVWDDVHSQAADYGSNSTVRKGEWMVDDGNAKFASLQRAKWAEGGAVEHLDPRFGLATGQDRRLAAYMDHEEYIHGKHEVGPRIDRE

SEQ ID NO: 80476 - protein, 510 aa, Setaria italica
  Transcript Sequence Number=SeqID_14502
  Gene Ontology: Mol. function=zinc ion binding; Cellular component =intracellular
NRLDAKFASLQRAKWAEGGAVEHLDPRFGLATGQDRRLAAYMDHEEYIHGKHEVGPRIDREIRPDGQQLPAPRSSSLWASQENTHPDIGLDPRISRFSNQPGERSTIYTGTMSASITSSVPVGLSGPYAGRSSLDSANSVPIRSTETFGQQKHRYWSSSPPPAHSPSSTAPFVRQSSPNPAEPDFYPSRSFSQLGQNPQEEYSLRAAALAKDSHFMSHNAGLPQGQPSLLATQQGQKYATLQPKSHIKPTDQVQASFSRENSPSLSRPSIQLGEVSLPSDPTPITSDLTSASNLLAGLIKSGFKPNNPSDLASLRAQPLVPSGPLPRTLPSPPVASSSLQNAAGENTTLQTQAPNTARPPLPPGLPPPPTQSAGIAAPLSSLLSSLVAKGLISSPATDSSAAGPSQPNKASSANATDVAASAMPMPAQKPSVGKETSNSDSSAPTNTLLPKVIKIKTGDLIGLEFKQEILRECHEHVISSLFGDQNYQCKTCGERFSLEEELRSHAPCPV

SEQ ID NO: 80477 - protein, 85 aa, Setaria italica
  Transcript Sequence Number=SeqID_14503
LEMDACASNLGVSVGGDGGLLIWERRGVLRDDIDGGVVPSVVCTVEKPNVVYLVIHHMYLCCNNFIHSLKSLFFLGFYLKKKKKK

SEQ ID NO: 80478 - protein, 172 aa, Setaria italica
  Transcript Sequence Number=SeqID_14504
MATDREKEREAELESAMYTNCLLLGLDPAVLGSPSSPAARVGLFRHSNPRLGEQLLYFLLSSLRGPAQSAKDFDKVWPIFDSAQSREFRKIVQGIISELEQQGALPRSNSRVSSLATCCGPRFVELLWQLSVHALREVHRRTFAADVASNPLPAALTDVSYLHAAALLPVTK

SEQ ID NO: 80479 - protein, 621 aa, Setaria italica
  Transcript Sequence Number=SeqID_14505
  Subcellular localization annotation: CTP_CleavageSite=97; ConfidenceScore=5.15e-01
SSTPLSPGSSGRWSNSRVSSLATCCGPRFVELLWQLSVHALREVHRRTFAADVASNPLPAALTDVSYLHAAALLPVTKARIALERRKFLKNANIAVQRQTTWSNLAHEMTAEFRSLCAEEAYLQQELEKLQDMRNKAKLEGELWDERLSSSSGQNSHLVSKATRLWESILARKGQHEVLASGPIEDLIAHREHRYRISGSQLLAAMDMSSSVPHSELLSARAGETSPILDKQEKISPLFQGKEEALSRPDDRNGRAQQNVDVAEILRRWTHALQRIHKQSLHLAKANDGEGPELLRSASDGETSTHADSLTATLAEHRQHLVSIQGLINQLKEAIPAMQQSIEELSEEVNCVSNPIDQLNSRLPLSVQNAGLGRSEESSSEVSEMTSKLSSTYLDKPGGSPALKLPPLFSLTPSSSGKGTQTQKRNALTRQPSQEVISEEKTLTIPSTKDQMNGSVHENDGYFANDIRRSVREAALSKPSRNTERPQDKNSDDGSEHFFIPLSTGAAREMDAAINRRKQRLGLSSPQMKFPKSMGDLYYNADSPINTSPVLLSELNGHDPISAMNFLDPVSGLARQSFITDDALDQVFSPPLLMESSLFHDADEDLLAPLSETDAALMEQH

SEQ ID NO: 80480 - protein, 51 aa, Setaria italica
  Transcript Sequence Number=SeqID_14506
  Gene Ontology: Mol. function=oxidoreductase activity; Biological process=oxidation reduction
  Homolog annotation: Hit_ID=O04162; Match level="QueryCoverage=90%, HitCoverage=14%, E-value=1e-13, Identity=73%"; Hit description =Dioxygenase
MPVLTNGRFKSVKHRVVTNSLKSRVSFIYFGGPPLAQRIEPLPELLGEARE

SEQ ID NO: 80481 - protein, 154 aa, Setaria italica
  Transcript Sequence Number=SeqID_14507
  Gene Ontology: Mol. function=oxidoreductase activity; Biological process=oxidation reduction
  Homolog annotation: Hit_ID=Q2I374; Match level="QueryCoverage=99%, HitCoverage=44%, E-value=7e-58, Identity=73%"; Hit description =Gibberellin 2-oxidase (Fragment)
  Pfam annotation: Domain name=2OG-FeII_Oxy; Domain location=12-117; Score=124.6; E_value=3.2e-34; Accession=PF03171.12; Description=2OG -Fe(II) oxygenase superfamily
DALSAMVTEQGSDQVFRVNHYPPCPALQGLGCSATGFGEHTDPQLVSVLRSNGTSGLQIALRDGAQWVSVPSDRDAFFVNVGDSLQVLTNGRFKSVKHRVVTNSLKSRVSFIYFGGPPLAQRIEPLPELLGEGEESLYKEFTWGEYKKAAYKTR

SEQ ID NO: 80482 - protein, 262 aa, Setaria italica
  misc_feature (102)..(102): Xaa can be any naturally occurring amino acid
  misc_feature (164)..(164): Xaa can be any naturally occurring amino acid
  Transcript Sequence Number=SeqID_14508
  Gene Ontology: Mol. function=voltage-gated potassium channel activity; Cellular component=integral to membrane; Biological process=potassium ion transport
  Homolog annotation: Hit_ID=Q9SM12; Match level="QueryCoverage=92%, HitCoverage=28%, E-value=1e-107, Identity=79%"; Hit description =Potassium channel protein ZMK2
  Pfam annotation: Domain name=Ion_trans; Domain location=30-232; Score= 113.5; E_value=7.1e-31; Accession=PF00520.23; Description=Ion transport protein
  Pfam annotation: Domain name=Ion_trans_2; Domain location=141-238; Score=66.7; E_value=8.7e-17; Accession=PF07885.8; Description=Ion channel
  Pfam module annotation: Pfam domain module=Ion_trans::Ion_trans_2; Domain location=30-232::141-238
GRNYGRRVVTRYEGRTLQWNASPKGGLEVADIVVDLFFAVDIVLTFFVAYIDPRTQLLVRDRKKITFRYLSTFFIMDVASTIPFQGLAYLVTGEVREGAAYXLLGILRLWRLRKVKQFFTRLEKDIRFSYFWIRCARLVAVTLFLVHCAGCVYYLIADRYPHRXRTWIGAAIPNFRQASLRIRYISSIYWSITTMTTVGYGDLHAENTLEMVFNIFYMLFNLGLTAYLIGNMTNLVVEGTRRTMEFRNSVRAASSFVVRNRL

SEQ ID NO: 80483 - protein, 318 aa, Setaria italica
  Transcript Sequence Number=SeqID_14509
  Gene Ontology: Mol. function=transporter activity; Cellular component= intracellular; Biological process=transport
  Homolog annotation: Hit_ID=B9RJH0; Match level="QueryCoverage=83%, HitCoverage=76%, E-value=1e-86, Identity=57%"; Hit description =Transporter, putative
  Pfam annotation: Domain name=CRAL_TRIO; Domain location=98-267; Score= 52.9; E_value=1.2e-12; Accession=PF00650.12; Description=CRALTRIO domain
  Pfam annotation: Domain name=CRAL_TRIO_N; Domain location=13-83; Score=44.5; E_value=4.3e-10; Accession=PF03765.7; Description =CRALTRIO, N-terminus
  Pfam module annotation: Pfam domain module=CRAL_TRIO::CRAL_TRIO_N; Domain location=98-267::13-83
MSFLFKSSNGGTTEKGLSLEEQQEKVNELRKELGESSSAAIQDFLSDASLSRFLRARNWNVQKASKMMKAAVKWRLAFKPENIFWEDIAQEAETGKIYRADYKDKHGRTVLVLRPGLENTTSATGQIKYLVYSLEKAIMNLTEDQEKMVWLTDFQCWTLGSTPLKVTRETVNVLQECYPERLGLAILYNPPRIFESFWKIVKPFLDHETRKKVKFVYSNDTESQKIMAEVFDIEELDSAFGGKNPATFEYNSYAERMQEDDKKMGSLHSSTDSLLESAGKDTHGAASDASSEASFYSGTDSPKHEDGEHGAPTRHTII

SEQ ID NO: 80484 - protein, 100 aa, Setaria italica
  Transcript Sequence Number=SeqID_14510
  Gene Ontology: Mol. function=mannosyl-oligosaccharide 1,2-alpha -mannosidase activity; Cellular component=membrane
  Homolog annotation: Hit_ID=B6T729; Match level="QueryCoverage=100%, HitCoverage=15%, E-value=3e-26, Identity=60%"; Hit description=Alpha- mannosidase/ calcium ion binding protein
ATNSSKYRCGKFTVGKFLSLLMVSGLLYLFLHKSPEGFVSGDLHGKEMHNNNVKRAPNIRTLWRKPPRLPPRLPPNEIYKNNSLLQQSPSEWTSRQKKVK

SEQ ID NO: 80485 - protein, 28 aa, Setaria italica
  Transcript Sequence Number=SeqID_14511
SAVHLPSYLIKNADKFKFLLPGGCLRSK

SEQ ID NO: 80486 - protein, 365 aa, Setaria italica
  misc_feature (114)..(114): Xaa can be any naturally occurring amino acid
  misc_feature (360)..(360): Xaa can be any naturally occurring amino acid
  Transcript Sequence Number=SeqID_14512
  Gene Ontology: Mol. function=beta-1,4-mannosylglycoprotein 4-beta-N -acetylglucosaminyltransferase activity; Cellular component=membrane; Biological process=protein amino acid N-linked glycosylation
  Homolog annotation: Hit_ID=B9SMF8; Match level="QueryCoverage=91%, HitCoverage=92%, E-value=1e-129, Identity=64%"; Hit description =Acetylglucosaminyltransferase, putative
  Pfam annotation: Domain name=Glyco_transf_17; Domain location=7-365; Score=655.9; E_value=3.7e-194; Accession=PF04724.5; Description =Glycosyltransferase family 17
MARDLPHPSVTRRKVLPFKFLIPFVLVLSVSVIAVTQYFQSISYLLRPLWDTPPTPFTRIPHYYAPNISMPQLCQLHGWGILPSPRRVFDAVLFSNELDILEIRYRELLPYVDXRFVILESNATFTGIPKSLSFYENLNRFAFAGSKLVYDMLSVGELDTGHREQPFHVEAYHRRSLNNLIRRSGIAAGDVLIMADADEIPSPETVQLLKWCDGIPPVMHLEMKNYMYSFEFPVDDNSWRASAHVFTERTLYRHSRQSNLILADAGWHCSFCFRDIKEFVFKMKAYSHADRVKQKSFLNPDRIQKIICNGEDLFDMLPEEYTFRDLFKKMGPIPKSASAVHLPSYLIKNADKFKFLLPGXCLRSK

SEQ ID NO: 80487 - protein, 137 aa, Setaria italica
  misc_feature (78)..(78): Xaa can be any naturally occurring amino acid
  misc_feature (128)..(128): Xaa can be any naturally occurring amino acid
  Transcript Sequence Number=SeqID_14513
  Gene Ontology: Mol. function=nucleotide binding; Biological process =defense response
  Homolog annotation: Hit_ID=Q8LL84; Match level="QueryCoverage=82%, HitCoverage=15%, E-value=5e-40, Identity=63%"; Hit description=NBS -LRR-like protein
  Pfam annotation: Domain name=LRR_1; Domain location=38-59; Score =10.2; E_value=3.5; Accession=PF00560.25; Description=Leucine Rich Repeat
  Pfam annotation: Domain name=LRR_1; Domain location=61-83; Score=7.5; E_value=11; Accession=PF00560.25; Description=Leucine Rich Repeat
  Pfam module annotation: Pfam domain module=LRR_1::LRR_1; Domain location=38-59::61-83
ATRLLRRGNLTLSEVLTFHLHNDNRRTCGSTFIGNLFNLRYIGLRRTNVKSLPESIEKLFNLHTLDIKQTQIEKLPRXYFIGVESPKGLSNLEELQTLETVQVSKDLAEQLKKLMQLRSVWIDNVSAXNCANLFANP

SEQ ID NO: 80488 - protein, 113 aa, Setaria italica
  misc_feature (16)..(16): Xaa can be any naturally occurring amino acid
  Transcript Sequence Number=SeqID_14514
  Gene Ontology: Mol. function=nucleotide binding; Biological process =defense response
  Homolog annotation: Hit_ID=Q9ZQT3; Match level="QueryCoverage=100%, HitCoverage=12%, E-value=3e-32, Identity=61%"; Hit description=NB -ARC domain containing protein, expressed
LAPHVANLTYLSLGMXLSASTLVLSAGCFPHLKTLVLKRMPDVKQMEIGDGALPRIEGLYIVSLAQLDKVPQGIELLLSLKRLWLLYLHDEFKTLWQTSGMHQKMQHVPEIRI

SEQ ID NO: 80489 - protein, 211 aa, Setaria italica
  misc_feature (45)..(45): Xaa can be any naturally occurring amino acid
  misc_feature (104)..(104): Xaa can be any naturally occurring amino acid
  Transcript Sequence Number=SeqID_14515
  Gene Ontology: Mol. function=nucleotide binding; Biological process =defense response
  Homolog annotation: Hit_ID=Q2R8J6; Match level="QueryCoverage=90%, HitCoverage=21%, E-value=5e-69, Identity=67%"; Hit description=NBS -LRR type disease resistance protein, putative, expressed
  Pfam annotation: Domain name=LRR_1; Domain location=121-142; Score =13.0; E_value=1; Accession=PF00560.25; Description=Leucine Rich Repeat
  Pfam annotation: Domain name=LRR_1; Domain location=144-165; Score =9.3; E_value=5; Accession=PF00560.25; Description=Leucine Rich Repeat
  Pfam annotation: Domain name=LRR_1; Domain location=167-188; Score =7.0; E_value=14; Accession=PF00560.25; Description=Leucine Rich Repeat
  Pfam module annotation: Pfam domain module=LRR_1::LRR_1::LRR_1; Domain location=121-142::144-165::167-188
ASCGCGAEGFVLSREKNTPEEVAEVNLMELIHRNMLEVVDCDELXKMHNIMRDLALSIAKEEKFGSANDYEAIIQVDPHVRRLSLCRWKVNTSLKVKFPRLMEXISSTHDLLPSILSESKHLTVLELQDSNITEVPTSIGNLFNLRYIGLRRTDVKSLPESIENLLNLHTLDIKQTQIEKLPRGIVKVKKLRHLLADRLHQAPSPSCLIYA

SEQ ID NO: 80490 - protein, 237 aa, Setaria italica
  misc_feature (55)..(55): Xaa can be any naturally occurring amino acid
  misc_feature (111)..(111): Xaa can be any naturally occurring amino acid
  misc_feature (226)..(226): Xaa can be any naturally occurring amino acid
  Transcript Sequence Number=SeqID_14516
  Gene Ontology: Mol. function=nucleotide binding; Biological process =defense response
  Homolog annotation: Hit_ID=Q2R8J7; Match level="QueryCoverage=100%, HitCoverage=30%, E-value=4e-87, Identity=66%"; Hit description=NB -ARC domain containing protein, expressed
  Pfam annotation: Domain name=NB-ARC; Domain location=1-237; Score =95.0; E_value=2.5e-25; Accession=PF00931.14; Description=NB-ARC domain
MGGLGKSTLVTNLYEREKVNFPVHAWIVVSQICPADALLRKLLWKIGNKRAVHDXIDKMDVHDLKAEIKKKLQNRKCLIVLDDVWEQEVYFKIHDAFQNHQASRIILQNTXMLSKIHDASLDQHLELEPLDGPDAFDLFCRRAFHNNKDHKCPKEFEEIATSIVDRCHGLPLAIVTIGSLLSYLEYIIWNQTYNQLRSELSTNDHVRAILNLSYHDLSEDLRNCFXYCSLFPEDYPM

SEQ ID NO: 80491 - protein, 189 aa, Setaria italica
  Transcript Sequence Number=SeqID_14517
  Gene Ontology: Mol. function=nucleotide binding; Biological process =defense response
  Homolog annotation: Hit_ID=Q2R8J6; Match level="QueryCoverage=82%, HitCoverage=16%, E-value=1e-42, Identity=57%"; Hit description=NBS -LRR type disease resistance protein, putative, expressed
KFSTRSCQLKRVNFEESRFLSSGILGRPCQLQSAGAVLLAVTKIGSILGDETSKAVINKLSWKVHSLKELPWKVDQIRMNLTFMSQIIQQIGTVYLTDELANNWIGEVRKVAYRVEDVVDKYSYHVFQLTQEGFLKFFIKGTHNDIVFSAITDEIAHIEEEINQVIHMKDKWLHQTQLVSNNQQLAEIE

SEQ ID NO: 80492 - protein, 903 aa, Setaria italica
  misc_feature (272)..(272): Xaa can be any naturally occurring amino acid
  Transcript Sequence Number=SeqID_14518
  Gene Ontology: Mol. function=nucleotide binding; Biological process =defense response
  Homolog annotation: Hit_ID=Q2R8J6; Match level="QueryCoverage=98%, HitCoverage=94%, E-value=0.0, Identity=67%"; Hit description=NBS-LRR type disease resistance protein, putative, expressed
  Pfam annotation: Domain name=LRR_1; Domain location=569-590; Score =10.9; E_value=2.5; Accession=PF00560.25; Description=Leucine Rich Repeat
  Pfam annotation: Domain name=LRR_1; Domain location=592-613; Score =10.2; E_value=3.5; Accession=PF00560.25; Description=Leucine Rich Repeat
  Pfam annotation: Domain name=LRR_1; Domain location=615-636; Score =7.8; E_value=9.6; Accession=PF00560.25; Description=Leucine Rich Repeat
  Pfam annotation: Domain name=LRR_1; Domain location=772-798; Score =8.4; E_value=7.6; Accession=PF00560.25; Description=Leucine Rich Repeat
  Pfam annotation: Domain name=NACHT; Domain location=191-343; Score= -39.0; E_value=0.084; Accession=PF05729.4; Description=NACHT domain
  Pfam annotation: Domain name=NB-ARC; Domain location=172-454; Score =244.7; E_value=2.3e-70; Accession=PF00931.14; Description=NB-ARC domain
  Pfam module annotation: Pfam domain module=LRR_1::LRR_1::LRR_1::LRR _1::NACHT::NB-ARC; Domain location=569-590::592-613::615-636::772 -798::191-343::172-454
VLLAVTKIGSALANESATVIINKLSEKVQALKELPRKMDQIRMKLTLMSDTIQEIGTVYLIDKPVKSWIGEVRKVAYHVEDVVDKYSYHVLEIEEEGFLMKYFIKGTHYVKVFSDIADEVALVEQDIQQVILMKDQWLQHSQLVPDKLAMIERQRSQDGFPDFVKDEDLVGIEKNRKLLSGWLYSDELDSTVITVSGMGGLGKSTLVTNVYEREKVNFPVHAWIVVSQICPADALLRKLLWKIGNMVPPVPSEIDKMDVHDLKAEIKKNSKXKCLIVLDDVWEQEVYFKIHDAFQNHQASRIIITTRKDHVGAIASLDQHLELEPLDGPDAFDLFCRRAFHNKKDHRCPKEFEEIAKSIVDRCHGLPLAIVTIGSLLSSRPRINIWNQTYNQLRSELSANDHVRAILNLSYHDLSGGLRNCFLYCSLFPEDYPMSRESLVRLWVAEGFVLSKEKNTPEEVAEGNLMELIHRNMLEVVDYDELGRVSTCKMHGLMRDLALSVAKEEKFGSANDYEAIIQVDPHVRRLSLCRWKVNTSLKVKFPRLRSLVAHGMISSTPDLLSSILSESKHLTVLELQDSNITEVPTFIGNLFNLRYIGLRRTNVKSLPESIEKLFNLHTLDIKQTQIEKLPRGIVNVKKLRHLLADRLVDEKQSDFRYFIGVESPKGLSNLEELQTLETVQVSKDLAEQLKKLMQLRSIWIDNVSASDCANLFATLSTMPLLSSLLISARDLNETLCLQALDPISTKLHRLIVRGQWTSGTLRYPIFRNHGEHLKYLALSWCQLGEDPLGVLAPHVPNLTYLSLNRVNSASTLVLSAGCFPHLKTLVLKRMPDVKQMEIGDGALPRIEGLYIVSLAQLDKVPQGIELLLSLKRLWLLYLHDEFKTLWQTSGMHQKMQHVPEIRI

SEQ ID NO: 80493 - protein, 112 aa, Setaria italica
  Transcript Sequence Number=SeqID_14519
  Subcellular localization annotation: CTP_CleavageSite=68; ConfidenceScore=5.63e-01
MVETRRSSAAAAAGKRPSPSPSSSSLPPPKRPKAEAPASPTASAPGRAEEDSAAAAPARSAGSAEDAMAEAEQKDQGADKPAAAAAESSKRRKEPEQQQPALMYCVLVATWA

SEQ ID NO: 80494 - protein, 264 aa, Setaria italica
  Transcript Sequence Number=SeqID_14520
  Gene Ontology: Cellular component=plasma membrane
  Homolog annotation: Hit_ID=B6SWG6; Match level="QueryCoverage=99%, HitCoverage=56%, E-value=1e-109, Identity=75%"; Hit description=AAP6
  Pfam annotation: Domain name=Aa_trans; Domain location=1-264; Score= -13.7; E_value=7.9e-05; Accession=PF01490.10; Description =Transmembrane amino acid transporter protein
TYMVVFGLFQLLLSQLPSLHNIAWLSVVAVATSFGYSFISLGLCAAKWASHGDVRGTLAGAAVDAPREKAFNVLLALGNMAFSYTFADVLIEIQDTLRAPPAENKTMKRASFYGLGMTTVFYLLLGCTGYAAFGNDAPGNILTGYAFYEPFWLVDIANICVIVHLIGAYQVFAQPIFARLESCVACRWPDAKFINATYYVRVPCLRSSSSPPATVAVAPLKLVLRTILIMFTTLVAMLLPFFNAVLGLIGALGFWPLSVYLTVP

SEQ ID NO: 80495 - protein, 85 aa, Setaria italica
  Transcript Sequence Number=SeqID_14521
  Homolog annotation: Hit_ID=B6TBE6; Match level="QueryCoverage=72%, HitCoverage=18%, E-value=2e-24, Identity=84%"; Hit description =Cytosolic 5-nucleotidase III
LVKKRTNVLLLGDHIGDLGMSDGLNYENRIAVGFLNANIEKSLKDYSKAFDIVYLVRGTLQLRLFPQSYCGFAPYSMFVFHMVRF

SEQ ID NO: 80496 - protein, 353 aa, Setaria italica
  Transcript Sequence Number=SeqID_14522
  Gene Ontology: Mol. function=5'-nucleotidase activity; Cellular component=endoplasmic reticulum; Biological process=nucleotide metabolic process
  Homolog annotation: Hit_ID=B6TBE6; Match level="QueryCoverage=85%, HitCoverage=85%, E-value=1e-155, Identity=88%"; Hit description =Cytosolic 5-nucleotidase III
  Pfam annotation: Domain name=UMPH-1; Domain location=97-352; Score =210.3; E_value=5e-60; Accession=PF05822.4; Description=Pyrimidine 5'- nucleotidase (UMPH-1)
  Subcellular localization annotation: CTP_CleavageSite=81; ConfidenceScore=5.65e-01
MRPMMSPPLLSPSPCSLLRFLRLCHAPRRRNPTAAPPTPYTFRRRPLLLLPVAMSSSASITAPNSVVADPSALARKVAAIRAAGPSKLQVIADFDGTLTRYWYDGARGQSSHGLLRQGNEEYDAKREALYEHYHPIEICPDIPLPEKAKLMEEWWEKTHGLLIEGGLTYEAIKKSVSDAAIAFRDGVVELFEYLEERDIPVLVFSAGLADIIEEVFRQKLHRSFKNIKVVSNRMVFNEEGRLVAFKGKTIHVLNKNEHALDMAAPVHDSLGDPNGSIDDYSLVKKRTNVLLLGDHIGDLGMSDGLNYENRIAVGFLNANIEKSLKDYSKAFDIVYLNDAPMRGVVELVSELCP

SEQ ID NO: 80497 - protein, 70 aa, Setaria italica
  Transcript Sequence Number=SeqID_14523
LLPASPVVFVDLYVPAWLSLAKPFSCVYLIFSYALCSCLYLCSLFITLGYFHMYDGSFAYILKFLLNSSP

SEQ ID NO: 80498 - protein, 138 aa, Setaria italica
  Transcript Sequence Number=SeqID_14524
  Gene Ontology: Mol. function=catalytic activity; Cellular component =plasma membrane; Biological process=cellular metabolic process
  Homolog annotation: Hit_ID=B6T983; Match level="QueryCoverage=94%, HitCoverage=19%, E-value=1e-70, Identity=94%"; Hit description=RHM1
CEKQGIPYEYGKGRLQERSSLILDIQTIKPTHVFNAAGVTGRPNVDWCESHKPDTIRTNVVGTLTLADVCREHGLLMINYATGCIFEYDACHPEGSGIGFKEEDTPNFTGSFYSKTKAMVEELLKEYENVCNPNEVPE

SEQ ID NO: 80499 - protein, 184 aa, Setaria italica
  Transcript Sequence Number=SeqID_14525
  Gene Ontology: Mol. function=catalytic activity; Cellular component =plasma membrane; Biological process=cellular metabolic process
  Homolog annotation: Hit_ID=B6T983; Match level="QueryCoverage=100%, HitCoverage=27%, E-value=1e-101, Identity=92%"; Hit description=RHM1
MFVENRPFNDQRYFLDDEKLKSLGWAERTPWEEGLKKTMEWYVANSDYWGDVSGALLPHPRTLMMPGYEGSEEIKGILSQFNNIQTKVASTSDSAPETHAFKFLIYGRTGWIGGLLGKICEKQGIPYEYGKGRLQERSSLILDIQTIKPTHVFNAAGVTGRPNVDWCESHKPDSIRTNVVGRLD

SEQ ID NO: 80500 - protein, 175 aa, Setaria italica
  Transcript Sequence Number=SeqID_14526
  Homolog annotation: Hit_ID=B6TYL5; Match level="QueryCoverage=64%, HitCoverage=100%, E-value=8e-53, Identity=91%"; Hit description =Cytoplasmic membrane protein
MGSLLTRTGVLPWLQSKIVDPVLQVIRRGAEPKQLAFSAALGVTIGIFPICGTTVILGGVAVAMLGSRCNAVTLMVLNLAATPIELSLIIPFLRLGEAVTGSGHFPLTADALKNVLTGHASKDVLLSIVHAMLGWLIAAPFVLGVLYTVSVPCFKILADRFGGIPSSPRTPIKAV

SEQ ID NO: 80501 - protein, 89 aa, Setaria italica
  Transcript Sequence Number=SeqID_14527
WLTSCLRLTNKSSLCLLTARMAIVPHTATPLAALTGASWLAASQYIISHCRAAAMATICEAGEGSLDASMQPARRERDARSGSASGRHR

SEQ ID NO: 80502 - protein, 54 aa, Setaria italica
  Transcript Sequence Number=SeqID_14528
  Gene Ontology: Mol. function=transcription factor activity; Cellular component=nucleus; Biological process=regulation of transcription, DNA-dependent
  Homolog annotation: Hit_ID=Q3T5N0; Match level="QueryCoverage=100%, HitCoverage=21%, E-value=2e-10, Identity=64%"; Hit description=SbCBF6
MCPIKKEMSAESTSPCSWASASTSTSSEHHQTVWTSPPKRPAGRTKFRETRHPV

SEQ ID NO: 80503 - protein, 52 aa, Setaria italica
  Transcript Sequence Number=SeqID_14529
  Gene Ontology: Mol. function=transcription factor activity; Cellular component=nucleus; Biological process=regulation of transcription, DNA-dependent
  Homolog annotation: Hit_ID=Q3T5N0; Match level="QueryCoverage=100%, HitCoverage=21%, E-value=8e-10, Identity=65%"; Hit description=SbCBF6
MCQIKKEMIAESCSPCSSASASTSSEHHQTVWTSPPKRPAGRTKFRETRHPV

SEQ ID NO: 80504 - protein, 59 aa, Setaria italica
  Transcript Sequence Number=SeqID_14530
  Gene Ontology: Mol. function=transcription factor activity; Cellular component=nucleus; Biological process=regulation of transcription, DNA-dependent
  Homolog annotation: Hit_ID=B6UHM5; Match level="QueryCoverage=100%, HitCoverage=27%, E-value=2e-16, Identity=71%"; Hit description=SbCBF6
DAEEASSATEDSPFELDVFGDMSWDLYYASLAQAMLMEPPSTVTAFCDDAVAEVPLWSY

SEQ ID NO: 80505 - protein, 116 aa, Setaria italica
  Transcript Sequence Number=SeqID_14531
  Gene Ontology: Mol. function=transcription factor activity; Cellular component=nucleus; Biological process=regulation of transcription, DNA-dependent
  Homolog annotation: Hit_ID=C3UZ68; Match level="QueryCoverage=100%, HitCoverage=49%, E-value=3e-26, Identity=55%"; Hit description=DRE -binding protein 3
WLLAVPASYASLAEVRHAVAEAVEDFLRREALPEEEEDARSAASSAPSSPAASVKDEVSTDGEESSPFELDVFDDMSWDLYYASMAQAMLMEPPSAVPAFGDDGYANAGDVALWSY

SEQ ID NO: 80506 - protein, 231 aa, Setaria italica
  Transcript Sequence Number=SeqID_14532
  Gene Ontology: Mol. function=transcription factor activity; Cellular component=nucleus; Biological process=regulation of transcription, DNA-dependent
  Homolog annotation: Hit_ID=C3UZ68; Match level="QueryCoverage=88%, HitCoverage=86%, E-value=4e-74, Identity=69%"; Hit description=DRE -binding protein 3
  Pfam annotation: Domain name=AP2; Domain location=52-105; Score=70.3; E_value=7.2e-18; Accession=PF00847.12; Description=AP2 domain
  Subcellular localization annotation: CTP_CleavageSite=71; ConfidenceScore=5.18e-01
MCQIKKEMSAESSGSACSWASASTSSEHHQTVWTSPPKRPAGRTKFRETRHPVFRGVRRRGNAGRWVCEVRVPGRRGCRLWLGTFDTAEAAARAHDAAMLAIAGAGACLNFADSAWLLAVPASYASLAEIRHAVAEAVEDFQRRKVLPEEEDARSATSSTPSSVANDECSCTDSEETSPATDDSPFELDAFGDMSSDLYYASLAQAMLMEPPCTVAAFCDEAVADVPLWSY

SEQ ID NO: 80507 - protein, 57 aa, Setaria italica
  Transcript Sequence Number=SeqID_14533
GERLARISMLIESQTVFLGKKTKVEPETVCFWTRAPSQVTPLAGLVSSGDQGDEDCT

SEQ ID NO: 80508 - protein, 75 aa, Setaria italica
  Transcript Sequence Number=SeqID_14534
MDEPGESIVLMWIGNFLFVHFITQTLFISSGKSVTSACKCLIAYAAAILFVFLQFIFTTLATEKLQCPTKFWYCN

SEQ ID NO: 80509 - protein, 91 aa, Setaria italica
  Transcript Sequence Number=SeqID_14535
  Gene Ontology: Mol. function=microtubule motor activity; Cellular component=microtubule associated complex; Biological process =microtubule-based movement
  Homolog annotation: Hit_ID=Q5ZE99; Match level="QueryCoverage=85%, HitCoverage=40%, E-value=9e-24, Identity=67%"; Hit description=BY-2 kinesin-like protein 10-like
ILYTLFYSIQEEEDLVIAHRKQVQESITILREEMKLLEEADQPGNQLDEYITRMSFIISKKAAGLMNLQARLARFQQCLSEQNVLVNQSDL

SEQ ID NO: 80510 - protein, 547 aa, Setaria italica
  Transcript Sequence Number=SeqID_14536
  Gene Ontology: Mol. function=microtubule motor activity; Cellular component=microtubule associated complex; Biological process =microtubule-based movement
  Homolog annotation: Hit_ID=B9RKR8; Match level="QueryCoverage=98%, HitCoverage=75%, E-value=0.0, Identity=63%"; Hit description=Kif4, putative
  Pfam annotation: Domain name=Kinesin; Domain location=6-316; Score =415.6; E_value=8e-122; Accession=PF00225.15; Description=Kinesin motor domain
MKDNFPTTRKEEDIITVDAYANSLTVHETKLKVDLTEYMERHEFVFDAVLDDDVSNDKVYNETVEPIIPAIFQRTKATCFAYGQTGSGKTYTMQPLPLKASQDILRLIHYTYRSQGFQLFVSFFEIYGGKLFDLLNKKRKLCMREDGKQQVCIVGLQEYRVSDVEMIKELIERGNACRSTGTTGANEESSRSHAILQLAIKKVVEGKESSRVVGKLSFIDLAGSERGADTTDNDKQTRIEGAEINKSLLALKECIRALDNDQVHIPFRGSKLTEVLRDSFIGNSRTVMISCISPNSGSCEHTLNTLRYADRVKSLSKVGTKKDDPLPPASNMRESSPGPPLSNLDYCDASDELKRYGLKKTAQDDSLLSNISRVPSGRFVTQGPLPYLNHVNEPSRSSAKGNGYELSEEGSEPDIPLQKSSRAPTNSTSSIDGTRKTATQMQWKSTPEVHANGLDADDVLDALLKEEEDLVIAHRKQVQESITILREEMKLLEEADQPGNQLDEYITRMSFIISKKAAGLMNLQARLARFQQCLSEQNVLTKQSKNL

SEQ ID NO: 80511 - protein, 46 aa, Setaria italica
  Transcript Sequence Number=SeqID_14537
EEKKKMGGEPGDVAAAGRKERKKRDHQKAPPIVMHHFPFHSRPGLL

SEQ ID NO: 80512 - protein, 94 aa, Setaria italica
  Transcript Sequence Number=SeqID_14538
  Gene Ontology: Mol. function=protein binding
  Pfam annotation: Domain name=LRR_1; Domain location=10-34; Score=4.0; E_value=53; Accession=PF00560.25; Description=Leucine Rich Repeat
  Pfam annotation: Domain name=LRR_1; Domain location=36-57; Score =11.5; E_value=1.9; Accession=PF00560.25; Description=Leucine Rich Repeat
  Pfam annotation: Domain name=LRR_1; Domain location=59-80; Score =12.5; E_value=1.2; Accession=PF00560.25; Description=Leucine Rich Repeat
  Pfam module annotation: Pfam domain module=LRR_1::LRR_1::LRR_1; Domain location=10-34::36-57::59-80
FPHKISALKSLNKLLLTANDIDDENISWEGLSCLQKLLNLSLSQNRLVSLPSTLGSLTSLHELRIANNRLDNLPIEIGSLKHLQILIANNNRLS

SEQ ID NO: 80513 - protein, 74 aa, Setaria italica
  Transcript Sequence Number=SeqID_14539
  Gene Ontology: Mol. function=protein binding
  Homolog annotation: Hit_ID=UPI0000196D09; Match level="QueryCoverage =100%, HitCoverage=8%, E-value=4e-19, Identity=62%"; Hit description =ubiquitin family protein
  Pfam annotation: Domain name=LRR_1; Domain location=22-44; Score =18.4; E_value=0.03; Accession=PF00560.25; Description=Leucine Rich Repeat
  Pfam annotation: Domain name=LRR_1; Domain location=46-68; Score=2.0; E_value=1.3e+02; Accession=PF00560.25; Description=Leucine Rich Repeat
  Pfam module annotation: Pfam domain module=LRR_1::LRR_1; Domain location=22-44::46-68
IQVDLSSNLLTELPEAFGKLGNLKVLHLRNNGLTSLPSTLFKKCVQLITLDLHGTEITNDILRQVEGWEEFDER

SEQ ID NO: 80514 - protein, 257 aa, Setaria italica
  Transcript Sequence Number=SeqID_14540
  Gene Ontology: Mol. function=protein binding; Cellular component =intracellular; Biological process=small GTPase mediated signal transduction
  Homolog annotation: Hit_ID=B9SKU7; Match level="QueryCoverage=96%, HitCoverage=69%, E-value=4e-62, Identity=51%"; Hit description =Leucine-rich repeat containing protein, putative
  Pfam annotation: Domain name=LRR_1; Domain location=116-137; Score =11.5; E_value=1.9; Accession=PF00560.25; Description=Leucine Rich Repeat
  Pfam annotation: Domain name=LRR_1; Domain location=139-160; Score =12.5; E_value=1.2; Accession=PF00560.25; Description=Leucine Rich Repeat
  Pfam annotation: Domain name=LRR_1; Domain location=162-183; Score =13.3; E_value=0.86; Accession=PF00560.25; Description=Leucine Rich Repeat
  Pfam annotation: Domain name=LRR_1; Domain location=185-206; Score =15.9; E_value=0.17; Accession=PF00560.25; Description=Leucine Rich Repeat
  Pfam annotation: Domain name=LRR_1; Domain location=208-230; Score =18.4; E_value=0.03; Accession=PF00560.25; Description=Leucine Rich Repeat
  Pfam annotation: Domain name=LRR_1; Domain location=232-252; Score =4.2; E_value=49; Accession=PF00560.25; Description=Leucine Rich Repeat
  Pfam annotation: Domain name=LRR_1; Domain location=67-88; Score =11.4; E_value=2; Accession=PF00560.25; Description=Leucine Rich Repeat
  Pfam annotation: Domain name=LRR_1; Domain location=90-114; Score =4.0; E_value=53; Accession=PF00560.25; Description=Leucine Rich Repeat
  Pfam module annotation: Pfam domain module=LRR_1::LRR_1::LRR_1::LRR _1::LRR_1::LRR_1::LRR_1::LRR_1; Domain location=116-137::139-160::162- 183::185-206::208-230::232-252::67-88::90-114
DGPITKNSSSSATSVTRTLNVKEHQTQKPEAVVGKSRAERWKLTGVVALHDCDLKAVPEEVWGCGPSVRILDASNNCIKEIPHKISALKSLNKLLLTANDIDDENISWEGLSCLQKLLNLSLSQNRLVSLPSTLGSLTSLHELRIANNRLDNLPIEIGSLKHLQILIANNNRITSLPSSIGDCESLTEVDLSSNLLTELPEAFGKLGNLKVLHLRNNGLTSLPSTLFKKCVQLITLDLHGTEITNDIISFGLGWLFV

SEQ ID NO: 80515 - protein, 332 aa, Setaria italica
  misc_feature (90)..(90): Xaa can be any naturally occurring amino acid
  misc_feature (127)..(127): Xaa can be any naturally occurring amino acid
  misc_feature (155)..(155): Xaa can be any naturally occurring amino acid
  Transcript Sequence Number=SeqID_14541
  Gene Ontology: Mol. function=protein binding; Cellular component =intracellular; Biological process=small GTPase mediated signal transduction
  Homolog annotation: Hit_ID=UPI0000196D09; Match level="QueryCoverage =96%, HitCoverage=40%, E-value=2e-82, Identity=46%"; Hit description =ubiquitin family protein
  Pfam annotation: Domain name=LRR_1; Domain location=102-123; Score =11.4; E_value=2; Accession=PF00560.25; Description=Leucine Rich Repeat
  Pfam annotation: Domain name=LRR_1; Domain location=181-202; Score =12.5; E_value=1.2; Accession=PF00560.25; Description=Leucine Rich Repeat
  Pfam annotation: Domain name=LRR_1; Domain location=204-225; Score =13.3; E_value=0.86; Accession=PF00560.25; Description=Leucine Rich Repeat
  Pfam annotation: Domain name=LRR_1; Domain location=227-248; Score =15.9; E_value=0.17; Accession=PF00560.25; Description=Leucine Rich Repeat
  Pfam annotation: Domain name=LRR_1; Domain location=250-272; Score =18.4; E_value=0.03; Accession=PF00560.25; Description=Leucine Rich Repeat
  Pfam annotation: Domain name=LRR_1; Domain location=274-296; Score =2.0; E_value=1.3e+02; Accession=PF00560.25; Description=Leucine Rich Repeat
  Pfam annotation: Domain name=ubiquitin; Domain location=13-80; Score =38.3; E_value=3.1e-08; Accession=PF00240.15; Description=Ubiquitin family
  Pfam module annotation: Pfam domain module=LRR_1::LRR_1::LRR_1::LRR _1::LRR_1::LRR_1::ubiquitin; Domain location=102-123::181-202::204 -225::227-248::250-272::274-296::13-80
MESSPPTITIQVKFAGRTIPVEVPAAATTAELKRLLQPLTNVLPRGQRLVCKGKVLQDAASLSSMQVVGGSKVMLIASQGLHQGGSQRIXAVPEEVWGCGPSVRILDASNNCIKEIPHKISALKSLXYNYILLLTANDIDDENISWEGLSCLTKXLLKLDVCNIIPEVLVSLPSTLGSLTSLHELRIANNRLDNLPIEIGSLKHLQILIANNNRITSLPSSIGDCESLTEVDLSSNLLTELPEAFGKLGNLKVLHLRNNGLTSLPSTLFKKCVQLITLDLHGTEITNDILRQVEGWEEFDERRRQKHQKQLDFRVGSSGVFDEGADDDNMRR

SEQ ID NO: 80516 - protein, 126 aa, Setaria italica
  Transcript Sequence Number=SeqID_14542
  Subcellular localization annotation: CTP_CleavageSite=39; ConfidenceScore=5.26e-01
MSHFAAMKSPLPVAASAAAGDAKSPLFCPKPRRPVAPLRCHQSGGYSDAGVDLLDLLLSKGEESGLMAASPQPPLFCGSPPRRASNPVVHDSRFGMDYPPMPVPLPGLPAVVAAPVAVARPNPRPS

SEQ ID NO: 80517 - protein, 171 aa, Setaria italica
  misc_feature (95)..(95): Xaa can be any naturally occurring amino acid
  Transcript Sequence Number=SeqID_14543
  Homolog annotation: Hit_ID=UPI0001A7B120; Match level="QueryCoverage =46%, HitCoverage=4%, E-value=3e-15, Identity=53%"; Hit description =DCAF1 (DDB1-CUL4 ASSOCIATED FACTOR 1); nucleotide binding
KDISDIVLKAVRAAESEARSANAPDEAVKAAADAAAELVKSAALEVWKSEKNGDAVVLAAEKAASAIVEAAVSTSVSRSSNQVGVKHAVEEAVPXSKDQDLENFVISDQGQLLQLREKYSIQCLQILGEYVEALGPVLHEKGVDVCLALLQRSMKDQEGHDHFALLPDVLK

SEQ ID NO: 80518 - protein, 75 aa, Setaria italica
  Transcript Sequence Number=SeqID_14544
  Gene Ontology: Mol. function=calcium ion binding; Cellular component =flagellin-based flagellum
  Homolog annotation: Hit_ID=B6SNK9; Match level="QueryCoverage=100%, HitCoverage=44%, E-value=7e-35, Identity=97%"; Hit description =Calmodulin
  Pfam annotation: Domain name=efhand; Domain location=11-39; Score =40.7; E_value=5.9e-09; Accession=PF00036.24; Description=EF hand
  Pfam annotation: Domain name=efhand; Domain location=48-75; Score =29.4; E_value=1.5e-05; Accession=PF00036.24; Description=EF hand
  Pfam module annotation: Pfam domain module=efhand::efhand; Domain location=11-39::48-75
MDLLNPEQISEFREAFAFFDKDGDGCITVEELATVMGSLQGTRPSAEELREMIRDADADGNGTIDFAEFLGLMAR

SEQ ID NO: 80519 - protein, 365 aa, Setaria italica
  Transcript Sequence Number=SeqID_14545
  Gene Ontology: Mol. function=transporter activity; Cellular component= integral to membrane; Biological process=transport
  Homolog annotation: Hit_ID=B9RB11; Match level="QueryCoverage=83%, HitCoverage=72%, E-value=1e-107, Identity=63%"; Hit description =Triose phosphate/phosphate translocator, non-green plastid, chloroplast, putative
  Pfam annotation: Domain name=DUF6; Domain location=209-355; Score =7.4; E_value=0.029; Accession=PF00892.12; Description=Integral membrane protein DUF6
  Pfam annotation: Domain name=DUF6; Domain location=69-200; Score =31.5; E_value=3.5e-06; Accession=PF00892.12; Description=Integral membrane protein DUF6
  Pfam annotation: Domain name=TPT; Domain location=209-355; Score =180.8; E_value=3.9e-51; Accession=PF03151.8; Description=Triose -phosphate Transporter family
  Pfam annotation: Domain name=UAA; Domain location=64-361; Score= -149.9; E_value=0.0073; Accession=PF08449.3; Description=UAA transporter family
  Pfam module annotation: Pfam domain module=DUF6::DUF6::TPT::UAA; Domain location=209-355::69-200::209-355::64-361
APPLPLLRVRGGCRLRPLSLLPDSGRNGEVAKAAAAAAASVPEDDASAAARGEGAGGIAATAQLGAMIVAWYLLNIYFNIYNKQVLGALPLPLPYTITAFQLAFGSLLIFLMWATRLHPAPRLSAAQLGKIAPLALGHMLGTVFTNMSLGKVAVSFTHTIKASEPFFTVVLSALFLGEVPSLPVLGSLVPIVGGVALASFTEVSFNWTGFWSAMASNLTNQSRNVLSKKLLAGDKDAMDDINLFSVITVLSFLLSCPLMLFAEGVKFTPGYLQSSGLNLQELCIRAALAGFCFHGYQKLSYLILSRVSPVTHSVANCVKRVVVIVSSVIFFSTPISPVNALGTGAALGGVFLYSKLTRTKKPKNA

SEQ ID NO: 80520 - protein, 90 aa, Setaria italica
  Transcript Sequence Number=SeqID_14546
LLPFSCSHEASLQELGSATAWPAVFTPGHMIIFKPFSMCNQCKVMALKIQRHLAMGKPNDAQCTSVYLAIPLEQVWHNKSLGWSSLENSC

SEQ ID NO: 80521 - protein, 408 aa, Setaria italica
  Transcript Sequence Number=SeqID_14547
  Gene Ontology: Mol. function=amine oxidase activity; Biological process=cellular amine metabolic process
  Homolog annotation: Hit_ID=B9N3N0; Match level="QueryCoverage=98%, HitCoverage=67%, E-value=0.0, Identity=78%"; Hit description=Copper amine oxidase (Fragment)
  Pfam annotation: Domain name=Cu_amine_oxid; Domain location=1-397; Score=717.1; E_value=1.4e-212; Accession=PF01179.12; Description =Copper amine oxidase, enzyme domain
ADARAGMVVSRARVQDPGTGAHREVMYKGMASELFVPYMDPSEAWYFKTYMDAGEYGFGLQAMPLVPLNDCPRHAQYVDGVFVAADGRPYVRGNMICVFERYAGDVAWRHSESPITGMDIRESRPKVTLVARMVASVANYDYIMDWEFQMDGLVRIKVGLSGILMVKGTAYSHLSEASENEDMHGTLLSENVIGVIHDHYVTFRLDMDVDGTDNSFVRVEMARQETGPGESPRRSYLKATRHVAQTEKDAQVRLKLYQPEEFHVINPTKKTRVGNPVGYKVVPAGTAASLLDPEDPPQKRGAFTNNQIWVTPYNKSEEWAGGLFVYQSKGEDTLATWSERDRPIENRDLVLWYTLGFHHIPCQEDFPIMPTVSSSFDLKPVNFFESNPILKQRPTEDDDLPVCAAAAR

SEQ ID NO: 80522 - protein, 231 aa, Setaria italica
  Transcript Sequence Number=SeqID_14548
  Gene Ontology: Mol. function=two-component response regulator activity; Cellular component=nucleus; Biological process=two -component signal transduction system (phosphorelay)
  Homolog annotation: Hit_ID=Q9FRZ0; Match level="QueryCoverage=100%, HitCoverage=100%, E-value=5e-75, Identity=65%"; Hit description =Response regulator 5
  Pfam annotation: Domain name=Response_reg; Domain location=12-143; Score=75.1; E_value=2.6e-19; Accession=PF00072.16; Description =Response regulator receiver domain
MTVVDAESRFHVLAVDDSLIDRKLIEMLLRNSSYQVTTVDSGSKALELLGLRDEADDPSSPSSSSPDQQEIDVNLIITDYCMPGMTGYDLLKRVKGSSSLKDIPVVIMSSENVPARINRCLEDGAEEFFLKPVKLADMKKLKSHLLKRKEPKMCQPQIQPEPEQKLEPPPQPAHKPEEAVAEATADGTAAISDCNGSNKRKAAAMEQQQEGLTSPESTKPRLSNSSLAVET

SEQ ID NO: 80523 - protein, 175 aa, Setaria italica
  Transcript Sequence Number=SeqID_14549
  Gene Ontology: Mol. function=protein serine/threonine kinase activity; Biological process=protein amino acid phosphorylation
  Homolog annotation: Hit_ID=Q8H4I0; Match level="QueryCoverage=92%, HitCoverage=22%, E-value=1e-27, Identity=44%"; Hit description =Putative receptor-type protein kinase LRK1
  Pfam annotation: Domain name=Lectin_legB; Domain location=12-173; Score=56.5; E_value=3.5e-14; Accession=PF00139.11; Description =Legume lectin domain
AAVAVSGGSGGDDDEFVYSGFAAGGSNLTHLTLDGTAKVTPTGLLELTNGTAHSKGHAFHPTPLRLREPDDGGSDKKKKAAAAIRSFSATFVFGIVPPAAPGVGAGHGLALVVSPTKDLSSGMATSYLGFLNGTKFFAVELDTVMSTEFHDKDNNHVGVDVDTLVSAAAASAGYY

SEQ ID NO: 80524 - protein, 162 aa, Setaria italica
  Transcript Sequence Number=SeqID_14550
  Homolog annotation: Hit_ID=Q9XGZ7; Match level="QueryCoverage=94%, HitCoverage=34%, E-value=6e-53, Identity=58%"; Hit description =T1N24.19 protein
  Pfam annotation: Domain name=DUF266; Domain location=1-152; Score =122.8; E_value=1.1e-33; Accession=PF03267.6; Description=Arabidopsis protein of unknown function, DUF266
ASSAPSRPGPHGRGRYRAGLAPEVRREQWRKGAQWFELDRALAVDVVADERYYPKFRKHCRPPCYMDEHYLPTVLSVEAPGRIANRSVTWVDWSRGGAHPATFGEADVKEAFLKRLTTPGKDQGTCTYNGQPADVCFLFARKFAPSTLQPLLTLAPKMLGYG

SEQ ID NO: 80525 - protein, 68 aa, Setaria italica
  Transcript Sequence Number=SeqID_14551
  Subcellular localization annotation: CTP_CleavageSite=19; ConfidenceScore=5.09e-01
CCDDIFLGSQNMNSETSVMCSKQQQQKKYLRTLTSSPDYNSTNRVLSSILINSTQQSLQQHHDNPGQT

SEQ ID NO: 80526 - protein, 135 aa, Setaria italica
  misc_feature (60)..(60): Xaa can be any naturally occurring amino acid
  Transcript Sequence Number=SeqID_14552
  Homolog annotation: Hit_ID=B9SKG1; Match level="QueryCoverage=37%, HitCoverage=5%, E-value=3e-13, Identity=60%"; Hit description =Pentatricopeptide repeat-containing protein, putative
SDVLDRAMILTGRLIKMAFQPNTITLNVFLSHFCKQGFGKRALMWAEKLREDSFSFRIEXTNDATRNIIDWAQREMENDPQANNEDIDRCLFLEFLMFMTYETMHNSRFSKARHVPTDKGSDPAGTNMIKILDAG

SEQ ID NO: 80527 - protein, 325 aa, Setaria italica
  Transcript Sequence Number=SeqID_14553
  Gene Ontology: Mol. function=structural molecule activity; Cellular component=plasma membrane; Biological process=lipid transport
  Homolog annotation: Hit_ID=B6TRX1; Match level="QueryCoverage=100%, HitCoverage=91%, E-value=2e-70, Identity=47%"; Hit description=VAP27- 2
  Pfam annotation: Domain name=Motile_Sperm; Domain location=1-79; Score=41.1; E_value=4.4e-09; Accession=PF00635.18; Description=MSP (Major sperm protein) domain
QYVAFKVKTTSPKRYCVRPNVGVILPLESRDFTVTMQAPKNASPDPQIKDKFLVQTTVVPFGTADEDNVPAFFSKETDRYIEEKKLKVVLVSMTQDQVEQPINGVLHAKEPVGVTVAEEILNNVNEAPNVVNEVRHPLKPSFPPLRGTPATFSEISSSVKQGPTVLQDFLVPPNQTSLTLSESAPSLQETSSISVESQFSSTETSAYLKSPPLEYTPTPSEVPPLSDIESTNTDDLHISHVTEDVHTLQMKLNNLEVKLEEAETLIVKLREETKITLQERDKLRKEVVFLKKAGAAQVHSSTGFPLLFVVYMAVVGMSLGYLLHL

SEQ ID NO: 80528 - protein, 53 aa, Setaria italica
  Transcript Sequence Number=SeqID_14554
  Gene Ontology: Mol. function=rRNA binding; Cellular component =intracellular; Biological process=ribosome biogenesis
  Homolog annotation: Hit_ID=B4FE03; Match level="QueryCoverage=100%, HitCoverage=29%, E-value=3e-22, Identity=96%"; Hit description=40S ribosomal protein S4-like
MRKLKFHEQKLLKKTNFLEYKREGGHREALVTQRYRLVERDDYKKYNGICLMV

SEQ ID NO: 80529 - protein, 81 aa, Setaria italica
  Transcript Sequence Number=SeqID_14555
  Gene Ontology: Mol. function=rRNA binding; Cellular component =intracellular; Biological process=ribosome biogenesis
  Homolog annotation: Hit_ID=B4FE03; Match level="QueryCoverage=100%, HitCoverage=44%, E-value=2e-37, Identity=92%"; Hit description=40S ribosomal protein S4-like
MRKLKFHEQKLLKKTNFLEYKREGGHREALVTQHYRLVERDDYKKYNGICLMVQKLVNIIKQMDPRDPFRIEMTDMLLDKL

SEQ ID NO: 80530 - protein, 108 aa, Setaria italica
  Transcript Sequence Number=SeqID_14556
  Gene Ontology: Mol. function=rRNA binding; Cellular component =intracellular
  Homolog annotation: Hit_ID=B4FE03; Match level="QueryCoverage=93%, HitCoverage=55%, E-value=1e-50, Identity=94%"; Hit description=40S ribosomal protein S4-like
  Pfam annotation: Domain name=S4; Domain location=33-80; Score=42.4; E_ value=1.8e-09; Accession=PF01479.17; Description=S4 domain
WSFLNFRYNMGVIPTKKSLLKCENLSASAFCRRRLATVMVKLKFAEHLKEAVTYIEQGHVRVGPETVTDPAFLVTRNMEDFITWVDSSKIKRKVMEYNDALDDYDAMF

SEQ ID NO: 80531 - protein, 140 aa, Setaria italica
  Transcript Sequence Number=SeqID_14557
  Gene Ontology: Mol. function=rRNA binding; Cellular component =intracellular; Biological process=ribosome biogenesis
  Homolog annotation: Hit_ID=B4FE03; Match level="QueryCoverage=100%, HitCoverage=76%, E-value=6e-72, Identity=91%"; Hit description=40S ribosomal protein S4-like
  Pfam annotation: Domain name=S4; Domain location=65-112; Score=42.4; E_value=1.8e-09; Accession=PF01479.17; Description=S4 domain
WSFYNGICLMVQKLVNIIKQMDPRDPFRIEMTDMLLDKLYNMGVIPTKKSLLKCENLSASAFCRRRLATVMVKLKFAEHLKEAVTYIEQGHVRVGPETVTDPAFLVTRNMEDFITWVDSSKIKRKVMEYNDALDDYDAMF

SEQ ID NO: 80532 - protein, 142 aa, Setaria italica
  misc_feature (35)..(35): Xaa can be any naturally occurring amino acid
  misc_feature (52)..(52): Xaa can be any naturally occurring amino acid
  misc_feature (83)..(83): Xaa can be any naturally occurring amino acid
  Transcript Sequence Number=SeqID_14558
  Gene Ontology: Cellular component=membrane; Biological process=amino acid transport
  Homolog annotation: Hit_ID=B9SB46; Match level="QueryCoverage=92%, HitCoverage=31%, E-value=3e-36, Identity=60%"; Hit description =Tyrosine-specific transport protein, putative
VGAGILAIPAVTQEAGFLASAVTCIFCWLYMVIEXIDWVNYQTRLLKVTCSXEIHESLSYLFIHYALLVAYVARSSDIITNSXGWESATLFSLAFGGICYFGSQQLIGAVNGFLVIGILTSFTSLVVSANAIRHVCSKVLMV

SEQ ID NO: 80533 - protein, 132 aa, Setaria italica
  Transcript Sequence Number=SeqID_14559
  Gene Ontology: Cellular component=membrane; Biological process=amino acid transport
  Homolog annotation: Hit_ID=B9SB46; Match level="QueryCoverage=93%, HitCoverage=25%, E-value=4e-52, Identity=82%"; Hit description =Tyrosine-specific transport protein, putative
LCFPCACSLSYLFIHYALLVAYVARSSDIITNSLGIPLWESATLFSLAFGGICYFGSQQLIGAVNGFLVIGILTSFTSLVVVASGNLQWSSLLEANFAAAPQSIPIIALSFVYQNVVPVLCTNLEGNLSKVR

SEQ ID NO: 80534 - protein, 461 aa, Setaria italica
  Transcript Sequence Number=SeqID_14560
  Gene Ontology: Cellular component=membrane; Biological process=amino acid transport
  Homolog annotation: Hit_ID=B9SB46; Match level="QueryCoverage=85%, HitCoverage=84%, E-value=1e-154, Identity=70%"; Hit description =Tyrosine-specific transport protein, putative
  Pfam annotation: Domain name=Trp_Tyr_perm; Domain location=75-449; Score=166.6; E_value=7.5e-47; Accession=PF03222.5; Description =Tryptophantyrosine permease family
  Subcellular localization annotation: CTP_CleavageSite=46; ConfidenceScore=5.64e-01
MALISAHCYPLLKPSLLTTPSSVSARTPVLRRVVRRGTRRPLQRCLCSQYADERQPPESPQQLERLFSNLNQATMKHEPGSVTSAIFLVAGTTVGAGILAIPAVTQEAGFLASAVTCIFCWLYMVVTGLLVAEVNVNTMCEIGSGGVSLVSMAMRTLGTSGVITACLSYLFIHYALLVAYVARSSDIITNSLGIPLWESATLFSLAFGGICYFGSQQLIGAVNGFLVVASGNLQWSSLLEANFAAAPQSIPIIALSFVYQNVVPVLCTNLEGNLSKVRTAIVAGTAIPLALFLVWDGVILGTLPGIAGNSNVSDPLELLRSSNGTVGPIVEAFSFLAIGTSYIGFILGLSDFLADLLKLPSGQNKPLPFLLTLLPPLVLSLLDPEIFFKALDFAGTYGVLVLFGVFPAAMSWSERYSDELEAPVPPIVPGGKFTLGVVMGGALLVIVSEIVKDIMQLQGQH

SEQ ID NO: 80535 - protein, 125 aa, Setaria italica
  misc_feature (45)..(45): Xaa can be any naturally occurring amino acid
  Transcript Sequence Number=SeqID_14561
  Gene Ontology: Mol. function=transferase activity, transferring phosphorus-containing groups; Cellular component=chloroplast; Biological process=sulfate assimilation
  Homolog annotation: Hit_ID=Q9SE92; Match level="QueryCoverage=98%, HitCoverage=34%, E-value=3e-39, Identity=69%"; Hit description =Adenylyl-sulfate kinase (Fragment)
  Pfam annotation: Domain name=APS_kinase; Domain location=1-102; Score= -31.8; E_value=3.3e-08; Accession=PF01583.12; Description =Adenylylsulphate kinase
NKLTVIRKKNREACRALLSDGSFVEVFLNMSLELCEARDSKGLYXKLARAGKIKGVYMSICKFRRSSLVEKWKKRKMSFTGIDDPYEAPLNCEIEIKEVDGVCPPLCDMAGQVVTYLEEKGFLHE

SEQ ID NO: 80536 - protein, 53 aa, Setaria italica
  Transcript Sequence Number=SeqID_14562
  Gene Ontology: Mol. function=transferase activity, transferring phosphorus-containing groups; Biological process=sulfate assimilation
  Homolog annotation: Hit_ID=Q9SE92; Match level="QueryCoverage=90%, HitCoverage=16%, E-value=1e-20, Identity=93%"; Hit description =Adenylyl-sulfate kinase (Fragment)
SWFTAGFTGIDDPYEAPLNCEIEIKEVDGVCPPLCDMAGQVVTYLEEKGFLHE

SEQ ID NO: 80537 - protein, 101 aa, Setaria italica
  Transcript Sequence Number=SeqID_14563
  Gene Ontology: Mol. function=transferase activity, transferring phosphorus-containing groups; Cellular component=chloroplast; Biological process=sulfate assimilation
  Homolog annotation: Hit_ID=B6UD68; Match level="QueryCoverage=68%, HitCoverage=20%, E-value=1e-31, Identity=94%"; Hit description =Adenylyl-sulfate kinase
  Pfam annotation: Domain name=APS_kinase; Domain location=1-87; Score =34.0; E_value=5.8e-14; Accession=PF01583.12; Description =Adenylylsulphate kinase
QFQLFWTGEVAKLFADAGLVCIASLISPYRRDREACRALLSDGSFVEVFLNMSLELCEARDSKGLYKLARAGKIKGEVHIMLGVQNGNNLESLMLQFSMSC

SEQ ID NO: 80538 - protein, 313 aa, Setaria italica
  misc_feature (23)..(23): Xaa can be any naturally occurring amino acid
  Transcript Sequence Number=SeqID_14564
  Gene Ontology: Mol. function=transferase activity, transferring phosphorus-containing groups; Cellular component=chloroplast; Biological process=sulfate assimilation
  Homolog annotation: Hit_ID=B6UD68; Match level="QueryCoverage=99%, HitCoverage=92%, E-value=1e-144, Identity=83%"; Hit description =Adenylyl-sulfate kinase
  Pfam annotation: Domain name=APS_kinase; Domain location=135-290; Score=357.7; E_value=2.2e-104; Accession=PF01583.12; Description =Adenylylsulphate kinase
  Subcellular localization annotation: CTP_CleavageSite=63; ConfidenceScore=5.40e-01
LAAPRRAGWWWCPRDPRANSSGXWPGGCTFPSPGRCSRLAAAHRNQSPVANLGLPPPRPRLPRSQAAGTGTRVTGDGGFDRRPLVECTGDRSIQEHAGVEEKASKMSSTVPKSSNIFWHDCAVGKADRQKLLKQKGCVVWITGLSGSGKSTLACTLGRELHTRGKLAYVLDGDNLRHGLNKDLGFKAEDRAENIRRVGEVAKLFADAGLVCIASLISPYRRDREACRALLSDGSFVEVFLNMSLELCEARDSKGLYKLARAGKIKGFTGIDDPYEAPLNCEIEIKEVDGVCPPLCDMAGQVVTYLEEKGFLHE

SEQ ID NO: 80539 - protein, 149 aa, Setaria italica
  Transcript Sequence Number=SeqID_14565
KNFFHNKLLALGTNDGWRVVTWSRELHNSDHWIKDCDACADDIMIDNPGHLDLLPPELRTYNGGGSGSEAVTTLTKNHVAGAPALSIHDGDVVYLTGKLKQTNRAGWLPAINTRKKRLDEVAPASTGGAASPCSPRYIIHSSPARSPNT

SEQ ID NO: 80540 - protein, 110 aa, Setaria italica
  misc_feature (64)..(64): Xaa can be any naturally occurring amino acid
  Transcript Sequence Number=SeqID_14566
  Gene Ontology: Mol. function=protein methyltransferase activity; Biological process=protein amino acid methylation
  Homolog annotation: Hit_ID=B9SE56; Match level="QueryCoverage=98%, HitCoverage=30%, E-value=3e-21, Identity=50%"; Hit description=N6 -DNA-methyltransferase, putative
KRGKLQWVVISNPPYIPTDDLPRLQPEVGWHEPKLALDGGKDGLEHLLHLCEGLSSVLKPGGFXVFETNGNKQSEFLVDLISTKWSSSFHNVEAVLDFAEIKRFVTGYRR

SEQ ID NO: 80541 - protein, 90 aa, Setaria italica
  Transcript Sequence Number=SeqID_14567
  Gene Ontology: Mol. function=protein kinase activity; Cellular component=plasma membrane; Biological process=protein amino acid phosphorylation
  Homolog annotation: Hit_ID=Q10R62; Match level="QueryCoverage=87%, HitCoverage=18%, E-value=9e-28, Identity=72%"; Hit description =Serine/threonine-protein kinase NAK, putative, expressed
GGGGGSDVVDGLKSFSMSDLRAATKNFGSSSYLGEGGFGCVYKGWMDEATLAPTKPGVGRMVAIKKLKKESFQGHREWLAEVTYLGELHH

SEQ ID NO: 80542 - protein, 51 aa, Setaria italica
  Transcript Sequence Number=SeqID_14568
  Gene Ontology: Mol. function=lactoylglutathione lyase activity
  Homolog annotation: Hit_ID=B9RKL0; Match level="QueryCoverage=94%, HitCoverage=13%, E-value=2e-18, Identity=93%"; Hit description =Lactoylglutathione lyase, putative
YTIAMMGYGPEDKNAVLELTYNYGVKEYDKGNAYAQIAISTDDVYKTCLVS

SEQ ID NO: 80543 - protein, 148 aa, Setaria italica
  Transcript Sequence Number=SeqID_14569
  Gene Ontology: Mol. function=lactoylglutathione lyase activity
  Homolog annotation: Hit_ID=B9RKL0; Match level="QueryCoverage=99%, HitCoverage=68%, E-value=2e-71, Identity=69%"; Hit description =Lactoylglutathione lyase, putative
  Pfam annotation: Domain name=Glyoxalase; Domain location=1-80; Score =25.6; E_value=0.00021; Accession=PF00903.17; Description =GlyoxalaseBleomycin resistance proteinDioxygenase superfamily
LGYGPEDSHFVVELTYNYGVESYDIGTGFGHFGIAVEDVAKTVDLIKAKGGTVTREPGPVKGGKSVIAFIEDPDGYKFELIERGPTPEPLCQVMLRVGDLDRAINFYEKAFGMELLRKRDNPEYKYTIAMMGYGPEDKKCWIGVEHQI

SEQ ID NO: 80544 - protein, 249 aa, Setaria italica
  Transcript Sequence Number=SeqID_14570
  Gene Ontology: Cellular component=extracellular region
  Homolog annotation: Hit_ID=B6SKP5; Match level="QueryCoverage=100%, HitCoverage=100%, E-value=1e-116, Identity=82%"; Hit description =Osmotin-like protein
  Pfam annotation: Domain name=Thaumatin; Domain location=34-249; Score= 173.6; E_value=5.8e-49; Accession=PF00314.9; Description=Thaumatin family
MASPKLLLLLATSLLGCGLLAAADYAPMTLTVVNNCPFPVWPGIQANSGHDVLEGGGFFLPALSHKSFPAPSHPWSGRIWARTGCTGAGAQLHCATGDCGGRLQCAGLGGAAPTTLAQVNLHHGGDDQASYGVSVVDGFNVGLSVTPHEGRGNCPVLACRTDLTQTCPGELQLRSPAGAVLACKSGCEAFRTDELCCRNMYNSPRTCRASKYSEFFKRECPQAFTYAHDSPSLTHQCAAPRELKVIFCH
